United States Patent Application Publication US 2006/0134663 A1 - sequence listing, part 108

SEQ ID NO: 333571 - DNA, 426 bp, Homo Sapiens
gtacttgttaaggtatatttttggggtaaattactaaaattggggctgctgggacaaagagtaaatgaatatgtatatttattagatattggtaaatccccctccacaaggtggaaccactgtgctttcccatcagcaatgtaggagagtggctgtttctccacaaccttgctaataggatgtgttgttgatcttttgaatttttaccaatctgatacatgggaaatgtatctcagtgtaggttgatttatgcgatgcttatgaataaagttcggtatcgttttattttaaataccatttgcagtcggcaaggtggtggaatgaagagccccccgaaatcactccccccataaaaatacagctagaaagtattccggaataagaataccacactgaattcaatagaactcaagggagaagtagaga

SEQ ID NO: 333572 - DNA, 428 bp, Homo Sapiens
cttttccttctggcagcttcttggcatcaacatagacatgcctgaagagctgttttggagcctgaaggaaaaaacagaccctccacctttcccagaatcctctgtcttattatttcctttccaactccaggagcagacacggatgggggggacaggaagtggggccagctcaaggtggtgaaggacaactgactcaggtgaataattcccaagaagcccttctctcggtcagggcccactttgtacctcggtccacacaccagacaccactcggctgctgtcaccacgggtgcgtgtggaaggtgagctcaatcacacccccgggacgccttcgctcgggcttttcatatgaatcttaacaatctagatgtgagccttcttggctcagaaaagattcctgggaatactcgtttccggtttaaatcaat

SEQ ID NO: 333573 - DNA, 476 bp, Homo Sapiens
agagatatgtgtatttatttaaggtatgtaaattatgtcacatgactctgcaagtacatttctggggtccctcccagggccctgagaaagggcgtgaaggtcagggtccctgactctcaaacctcaccagcctcacggccctacatggctggcctccgggcacctcggcccctggtctactccctgacccctgcctgcacctctaaatgagttcgaaggagagagctccagtttctgcaggccccacccagggcgttctcgccgcaggcctgccaccctgcctgcctccttactagtttggtgcctgctgctctcatgggctcccacattcggaaatacccaaaggtggtgggcatcgtctccacgttcatctggacagcccaccttcggggacaataagcccagccccaaggatcgctctgctcccagggagacagcaggactgtctgcagggaatgtagcttggctggctccca

SEQ ID NO: 333574 - DNA, 807 bp, Homo Sapiens
ttttttatgtttttagaagcaattttattacaaactgtcccatcggatagcgcctggaaagttatggggagctgtgttcattctccagacgctgggacagcagcgggaggttgttacaggaggatttattccagcagagctggggaggggcccaggccaggtgtcgaggggacaggctccatctgggtctgtgtccttcccaaggggccaggtagagggtccctgccagcccctcccctactcagtgcctggcccctctgcctccctccttgctggtgccccagtagaggggccctgggagtgaggagctgccgtctggagggaatgcacagatcgcaaaaggccggagggaggcccaggctcagggacacggcacccacagtctggctgacggagagacgtgaacacagccacaactcacagaacacttcagagggactcaggccccagcaggaagaagcaaatcacaagaagcccctggtgtggcccaagaatttctcttttttctaagtcaggtgtgagacctggagtccacagggactgtgtggggtctctgacctcttcctcctggctggagggggctgaagccagaagacactctctgctccttctgcattctcctcatcacagtgtctgcctggcagctctgagatggccccagggatgcacacccctacggagtcccctcccctggagcggggctgcgcctagcaatgcttctgggtgatgtggcaggtggggaggcagctcctctgagaggaggctgtagaaaagagcatgcctctgtcttgggtgctggctggattt

SEQ ID NO: 333575 - DNA, 390 bp, Homo Sapiens
tgctggggaaagagggactccttcaccgtactgaccggagctgatggcgatctcaatgatggagtcgctaatgtgtgtggcaggctcgcctgtgacagcgcatcctcaggttggccgggcagggagatgtcgagcagagcagagacgtctggtggagacagcccgggtgctggagctctctgacgaggacagcggtatggagaggccattctggagaggggccttggcagtctcagataaggagagaacagatgagccctggaaactgtctgccactggctcctgctcaggcctcgaagggatgctgacaaatgggtcggagcccccacggtgggtagggtgtctcatcctggtgagttccagtagagtcctgccccgagatggcaccgt

SEQ ID NO: 333576 - DNA, 438 bp, Homo Sapiens
gggaaaatggatttacaatcaacaaataaacaaaaatgatggcatgtttccatgttttctttttaattggatccttatcagagtactcccaatcagattcttctccagtttagagttttcccccaagagattcagctcatccaagaaaaaggtgagaaggtcctaggcagtactagagtgaagcctgcctgattctcagctgattggcccaaactcagaactctctcggtgttctgggtgcttttgacagacagtgggacggacctccccaccccagtactgctgacacagtgtcttccctctctctctctggaccttactcccaagaattagtgagaagcccacagatgtgtggagaacactaagcataccctgggcaaacggccattcgcacatcagaaaatattagaaacttattgtgaggaacagagggggaac

SEQ ID NO: 333577 - DNA, 492 bp, Homo Sapiens
aacgttatagtccatgtccctcttttatatgggtgataatttcaaagtactatagccagagtcccaggaaggttctagtcacccttgtaccccaaaagccagtctttccttaggctctgagctcctcaggctagcgctggtcccagtctgcacatctcagaccataccctcttcctatacaggaggtggggcaggctttcagccctcaggtccagtgtggggagcggcaggagcaggagggctgggatcctccagctgcacatcatgcaggtgcactgtgggggtggtggggtctttgcccacaccctggtttgggtcggcttggtcagggtggtgcctgcgtacgtgcttgaccacctggaacttttgcttggccttgtagttgcagaggcggcaaaagaaggggtggcggtcggtgtgggtgagggcatgatggcgcaggccagcagcccagcggaaagcacggtggcacacatttgcacacataggttt

SEQ ID NO: 333578 - DNA, 667 bp, Homo Sapiens
  misc_feature (424)..(452): n is a, c, g, or t
ccaaaaaaataatcattcaaaataatcggttaacattttcaataagagcattacatacaaggagttagggaacaaagagttttaaaatctggctctttttatctctacttagggcgtgcatcttctcttcttaccccaacatatactgactttttaggacctcctttagggagatctcaatatcccgaatttttctgtgtggagaggggaaggaatatgtctttttttgctttggtcagagtggatacattttatagtttgttttttcaaagacgggtcttctgagtcacttctttcactgctgccgtaaagaaactgtataaaggtgattgagcagtgaaggcatggataaaaggggaaatattcagcagttctgaacgtgcatgtcatcaaatataaaggagtgagaacttgatgtataagnnnnnnnnnnnnnnnnnnnnnnnnnnnnnccaagaatgggctgcttgttgcagtagtgaactcctcgctggaggtactagagcggagtctgtctcaaggatgctattggaagcaccccagctgtgggtggaaaactgcactttctgagcctagtcttttatagcctggagtttttgatgctgatgcttttactacttgttcttagactattttgccatacgctgctctgttttctcacctccag

SEQ ID NO: 333579 - DNA, 743 bp, Homo Sapiens
gacatttcaaacactgacagtttattttcagccaaaggacatcttaaatgcaaaagtaaaatgaccaagtttcctcaaagtgggaatgtaccacctggaaaatgcctcagcctagtaattattcgtctgaagtctaacttgttgttagccaggcccaaatcacaggaggaagctgtttgttgactcacagaagatagtgttggaaggaatttattaagtggtaagctaatcccaaagaatactaaaagggctttgtttatattaaagagaagtgtcaaatttaaggatcagaacagactttgaaacatctaaatgtagaagctaagaggtagtctaagtagttgacctcacattgttggggtacataattgattggaaactctctatctacagaaattcttatctgaataatccactatcttatggattcagctctgtatcccctcaaaaatctacagctaagtaggtatctatgttctagggggtacatttgactgaggaagaaaggacttggcatttggaaatgtgaggtctctctcacagcacaaagaccatctctaatctctattgagacctcctcatggcggcagccccatttcccctaagaatgtactttggggagcacttccactgtccacaggagagtagctgtgggatcagcaccactggcttctaaagacatcctcagtggctctaggaatcccctctttgattcatgagatggtgcctactttatatattag

SEQ ID NO: 333580 - DNA, 620 bp, Homo Sapiens
  misc_feature (324)..(324): n is a, c, g, or t
  misc_feature (351)..(351): n is a, c, g, or t
  misc_feature (419)..(420): n is a, c, g, or t
  misc_feature (492)..(492): n is a, c, g, or t
  misc_feature (530)..(530): n is a, c, g, or t
  misc_feature (548)..(548): n is a, c, g, or t
  misc_feature (592)..(592): n is a, c, g, or t
ttccctggcgtgtagaggattttatttcatatgcagtgatgcagcactgaccgggccaggcgtggggttcagaatgggtcccttccaccccagctctgatctcagagtcctggccagttgggagagaggtaccgggctggtcttcaagagggtagcaggatcattattgggcctgagcgcgagcccagaggagctggaatgatcaaaacccttcttctggagagttctgcttcctgggaatccctggggttgaggtcctagcccagcacaagcacggcctcatcctcagttatagcagcagagtctccctcctcttcagggccncatgatgggaaaaggcccaggcgggtnggcgtgaaagagagccgcccggttctgctgttcacctttctttacccagtgcccgtagagccggaagnncagttgtcgatgaggtgccgcactgaccgcagcgcataagggtccctcaacagtgcattcttggtcagtggncgtacacgatgggtgcttaggggcactcgttcagcagnccagcactgtcacactgncacccggaacagctggcggggggtgaagtttcagggtttggctnctttcacaacgctcaaagaaggggtgct

SEQ ID NO: 333581 - DNA, 976 bp, Homo Sapiens
aattttcaaggaagacagcagctgtccatcttcagtcttgacttgccattcccttagggagttccttcctttcacccatctttttctccccatggcttggccatgccacagtggtccctcggcttcaacagtcttgcttgcttacatctactaactgggcaagagagaccattctcccattggccctggaccaccactctgatttggatttagatgggctcaggaattttgtttggaatccttttggccttaaacaaaataatgatgagagaaatctgcctcccataagtcataatctcagcaggctcctgtgtctgagctatttctgtatccaggtccccaagagggctacagggaaaacttcatcatgatgggagggaagaaagaaggtaagtcctaagatgtttgcttcctattccttgtaaggtttagccatgtatagtcatgtgccagtcacctagggctgagaaaggggagcaagcagagagggagaagaggaagaagccaaatgagatggttcgtaattgattagtggaagttaaataatgttaaggataggaggcttgtcccctacatcatgatttagtatatcatccttcccaagagaagttttgagaacttgtcctctggtatccaggaaatggcctccccagcagtgtgcatagtcccagggaagccgtctcatgagcccctccttctcttgactcctctcctaatggtcacatggtgccaccactctttcaagccaagtcaaattgcatgcagcagaaaacccaaataagtttatgcagtagaggtttattctcacaccgaagtaattcagcattggtatggtggctccatggacttcaaggatcaaggatcctttcctctttctgttccaccatcctcagaacatggcttccagtttcaaagttaccttatggcccaatgtggctgttggagctccagccatcacatccaaattccagatagg

SEQ ID NO: 333582 - DNA, 620 bp, Homo Sapiens
ttttgagactgcatagggctggcgtggggaggtggggaatataccatgggagatggccttgggagatggacacaaagattggacagaagagaagcaagagtacaaagaaagggagggattaagggttgaggggcatgagaagaagagtccagatgtgaaaatgggaagagatggtgagtattacaaccagtgtgggtgtgcccagcaaggcagaagcatgataatcagcatcttaaaaggagctattccttgtctcaggaacagggccagggtgagtgaggtgaggaacctgtcccaggtacaaaatctaagaggtaccaaaaactcagtaatcaaactgcaacctaacttaggagtatattcttgcaacaggtagctccatctcagccagccataccagctgatcttcaggcaaccacaggctgtcaagtgatcagaccatgcccattaaagacaattgctaagctgtaaccaatcaagctgtttctgggtgtcacttcctctttctgtaaatactgcctgcctgcattgttgggtggagctctctgaacctctactgcttcaggatgctgcccaattcataaatcagtctttgctcaaataaactcttttttaaaaaa

SEQ ID NO: 333583 - DNA, 815 bp, Homo Sapiens
gtagagacggggtcttgccatgttgcaagcaaccctcccaccttgaccacccaaagtgctaggattacagtcatgagtcactgcgcccagccagtcaaaggcatctctaaggggtgattggagaccctggtcacccgtggctgtctgggagccttgtgggaggagaactgacagtttctcagaggataaaatgactagagagaagctcctacttttgggaatgggtatcaggttggaaaattccaaattcactcttggccctgccctcaaggctctgtgtgcatgtgcatgtgcacgtccttgcagaatgaagcactctggctatggctcttaaaaaaatgagtaaagaagcacacctttccccaccacactggaaccacctctaggggtgggaggttccaaaagagtgggccctgcagccaaagatcagaagaaaggccagcccaggggctggaatgtcctcagccactgcagttcccaggggctgctccaacttttttgagctttgaccctggtgtgggggaggtgctgataaaacagaagctctctgaggaagaaaaataccctgtaacctctgagattttgaggactcttgggatgaacatttcactttgctggagggaggaaaacaaacaaattctggattcacagcaatttctctaacgtgtaaagctttggaaactcgacagatagagagtttgccaacgcttggcaggactcttctttctgaaccacagccaaaaataatactgaccctaatcaggcatggataaagaatagctactaagagctaatatttggctctttgtagataa

SEQ ID NO: 333584 - DNA, 552 bp, Homo Sapiens
gaaaggctgaggaatttctcagagggtgacggactgccagctgccctgaggttgctcttacttgttacagtggacaagctgctttgctagcgtgcagatggagaaggcgggcccgggagcttggagtttggcccaggagctggcaggtgccagcagcagtttcactgcccgcttcaggcgactctccactggcttcctgggagccttccgttaggagatgctctctcaagatccccgtcaccagggctttctggttggaatgaggcaaggacctgctttacacggtgcgccccattacccaacagcgtttcctgtccttgctgccacagccatcacagtggggctgtcatcagccactttaaacaggcaaaacgtatttacctgtcagggaaaataccaagatcacaaaggtggttttcccagggcaaggttcgtccattgcactccagatgtgctgacccctgcgatttcttcatatgtggggaactgcactcacactctccccagcaatacaaataaataagtaggctggcacagtggcccatgcctgta

SEQ ID NO: 333585 - DNA, 593 bp, Homo Sapiens
  misc_feature (330)..(330): n is a, c, g, or t
  misc_feature (376)..(376): n is a, c, g, or t
tgacaattttaactctttatttgaaacaaacaatttcagagacagaaggttagtcgtgacaacagcttctcactacaacacaagggtgggcatggctcactgaagggacaggccaggcgcctcagaacaatatatacaatttaaacagtggctaactggtgacagttataaaaacacaaaaaggagcctgggaaacagcaaagtcaacagggaaagaagtgggtaccccctttgccagaagctaattgttttctgggacctccaatgcaagatggggaagagagaagatgtagggcagtggcggcatgccctgcgcccacagctcctcgnctgtcctttgaccacagatcccatcctgcatgactcaaggtcccantaggcttggcctagctcttatgataggggaacaatagaggggaacccagcctcaacccaagtcagaaggtagtttttgccttgggaggtctgtccattgaactaaagggaggcagttacagagggggctaagcatgttgacaccatggctcatggcaacctaagatggcagagagacaaacacagaaaccaaggggacaggagtctgcacaacagga

SEQ ID NO: 333586 - DNA, 406 bp, Homo Sapiens
cacatttttttgttaacctttattaaggtataatttataaaccataaaatccacccattttacacacacacatcaacgatttttaataaactgatcacgtagtcaactattgccataatctagttttaggacatttccatcatctctgtaaggtaccctgtgcaatttatagttaactcccatttccacttctggcaaccactcacctcatgtctgtccctacagatttgctattctatacatttttattattattctgcacatttcacataaatgggaacatatactatgtggccttttgtgcctggcttcttgcatttagatcagtattttctaggttcacccatgttgtggcatgcatcgatactttattcctttttatagctgaatgtgactacagtatata

SEQ ID NO: 333587 - DNA, 450 bp, Homo Sapiens
ctcctattcaacctataacctaataggaaatctactgcgctgctttgcagaatgagtttttttaatggtcctgactcttaaggttttactgtagttactgagtaagacctaaaaacataaaacaattaaccaacactaatcaatgtactaaaagacgtctgtggcatggatggagaggtacagctcagacctgcttttaagagaagagtcactgcccatctgtcagggctgtggggaacagacaacctccagctgttagcctcttcagcttgcaagccaaggtcacactcttctcaaggtcacactcttgcccagacagtaactgagcaaggcagtagtacaggacctgggccatttacacccaatggagtgctcctctaacaggctctctgctacaggactcttcactgggactggcaggaactttatcagatctgcatgccatttgat

SEQ ID NO: 333588 - DNA, 501 bp, Homo Sapiens
tgtgtgcaagtgtttatttggaatcccttctattttattagaaacagaaacagtaatttcaccagtaggaattgcgtgtgctctcaatacaagtaagtttgccactccttcaattgttgtccattgcagacactttggattcaaggttaagaatccaaatgagaaataagaaatatccggtccctgatgattcgtttaagtcctgttcaactcgatgaaagcttccacccgaaagaagagttactgttcctcctggctggctttgtgtttcttccagtgctctaaagaactttgtatttgggcagctgtgctctgtcatgtcaggctgctggacaggagttgatgcttacggcgccgctgaccagggctgctttactgaagctcactgggtgtccatcaatcacaaagtggcgtatgcagcctgtgaagggtttgctgggggccaagcgtggtgtcagtagagattctggaacacctccaacaaacacaggctccctgtga

SEQ ID NO: 333589 - DNA, 751 bp, Homo Sapiens
gatttttttccctgggatttcgaaccaatatactcctagcctgaacaacatagaacatttcctttccattttggtagaaattattttttaatgtaaattatattgtgttctatttgtttccaatgtcttgaaaagttcaatcacttctccaaattctccgaataaacataagaaaatatctctccccagcactacccggtcccccagtatcaccatcctaaaggcacttccacttcctctatcatcagggaaggagtgtgcagttctgatttagctcctcagtggagtaaagggaatttagaggaagggggatttctgcagaaattgtcagttacacaagtaagttcctcttggttccccgtttcatcaaaagtgaaaaactgttcacaggagtgcccatgtcccctgtttccctatgcatcactagagccaagaggggactccgccagcaaggcaccctctgctctgtcccgcagatcacagtccccgactttcaccccattgtttgtgcaatgtgcaaaactggagcccaaagcagcgggctcaggatcactcatcacaggcccggcgggcccatagactccttccttggctgggaagaggggctttcgtgaaagcagagcttgacaagccccagtactgtcatggtcaagatcaccaacactactactgctgtgctcacaaatatgaagaccacggcagaggaggagtcgaaagcctgaggagtggcagaggaagtcgtagaattaaa

SEQ ID NO: 333590 - DNA, 476 bp, Homo Sapiens
aagcctcccaatgcagaaggaatggagatggaaaaaaccgctgcggtagacatcagattccattccttggttttaattgcgtggttgcagtggggaatgaggagagtaaacagcagtgcctcccacggagctccctgcaggttctccttgtaggagtgagattttgctggtgatttatattgtttgagagatacccaaagagtcttgtgtcactcaatccccagctccatccctggctcggaggagctgtcaccgcctcacgggagcctgtaactgtcaaatggcattccccgaatccatcaatactgtttgctgccaaataaataccctgctgctctacaggttgcaaatatttcaatcatttgtgcagatctgcacaaacttggaaagaaaactcatgcaatctcatggccttatttccccttcctacataagagaacatacatgctaaacttcactttcaaatgtttactaga

SEQ ID NO: 333591 - DNA, 467 bp, Homo Sapiens
ctcagggttaaatctgcatttaatttcagatactatatttttcatatgtggaggttccatttgattcttcttgatactgtccatttatctcattatatgttatttttaaaatatttgagcacatttataacatttataagaagtgttttaaaattcctagtctgcttatactactgatacttcagcttctctgtttctactggttatggtctcattttcctgcttcttctcatgtccactcattttaattggatgctgaatatgtgatactatattgttaagtgacagattttgttgtaatcctttaaagagttctggaatcagtaagaatggcagactatatattgattcccacttttttgtgtgtgcagctgtctggaaattgccaggtagaaagctgcggtgattttagcgttcaatttgttttggtttatctgagatcacagttctatattgcctgttgccca

SEQ ID NO: 333592 - DNA, 589 bp, Homo Sapiens
tccaaactttctgtaatgttttaatattgtcctgttcatgaagacaaggaagaatatctcaaagggctttagttatggttgatttttttcctattcttggtagcttagaaaatttcccaaccaggagtgaggtctagctatcaatgtcaaggtggaaaaaatatgccaagagtggtgagcttgctctttttggcttcctcctacatttctgatcccatcttggagtggagaaagattcctccacccctccatcacacaccactgctcctgccccagtgctcaccccatcctagtcccatgcggttagggtgatatgttccagtcttcatttgaggtctgaggcaatgtgttgaccttgctcctcagcttatcttgagtaagggatgaatgtcatggccatatgcttcccatgaccacaattctcattctcatcagagatccaggaaagcttcctctgaattcagccaaactgcaatgtgtaaacatttctgctgtgagatttgaaacttgcgatagaaattccaagccagaagcttctgcaaaatatgtgaatcacagggaaagaatctgctcttttctgattgaccct

SEQ ID NO: 333593 - DNA, 527 bp, Homo Sapiens
  misc_feature (83)..(110): n is a, c, g, or t
catcaataatagatcttgctggtgtgttggagaggagacctgtgccccagggttgtgcatgttcttgttctctctgtctctgnnnnnnnnnnnnnnnnnnnnnnnnnnnnatcatttgcttaggctctcagtgtccctgtcacaggagccggacttgccaggagtgggatgggaaggatcagggacagtttgaaaaggatatggcagaattgaaagtttgggatgagctcatggaaatgaaatcactgtaacaggctggcattcccactgcccaagggcatgggatggctggtagcctctgcatacggcaggtgctcaataaaggccaaccaatgtacacagtcaacagaagagattgcaggtcatgtgccatctgtgtaggctgtaagaattggcggtttcaagggaggagccctggggagggggcagttacctcattctgagatgacttttagggttttctccgtttttttccattcaggcagcttcaaaattgtccctgaggggcctggattagggggaagagg

SEQ ID NO: 333594 - DNA, 535 bp, Homo Sapiens
tttttgaagccacaatagtcctagttttaatttttttgcagcttacaatttcatgtgattattattattattttttggaacatgattctgctgctaaaaatgcgttggaaaacactgggcttgattccccctctaaggttacattagaagaggacatgtttcctgttactacagtaatttgtttttcccacctccaagacaagggacagtggtctacattcaggctgggaaaagggtgtcggagagaagagggctagaaggataggtgtggtgggaggaaaggcgctctgggaagcccccgtgttcccaatgtgctgccaactccccaaggctaccactgggacgcaccgcttgcccctgcccccgctgaggtgagcctctctctgcctcctgctgcttcgtgctccatcctttgagtacaatgatggtcgttgcccgcacaccctgtcccagcaaggtgggcttataggcccaacctgccactacattgtcgcagctcttcttgaagcccttgtgttcccagctcttcaggaag

SEQ ID NO: 333595 - DNA, 764 bp, Homo Sapiens
catttttgcttaacatttattggaaataaattgtatggtttttttaaacacgtaagtgcccagaaaccttgtttacgtgagtaagtagatgggaatgatagttttgttacagtgtcactcagttatttgaattctttccataataatgccaaaagtataatttgtcgtcagatatgactttccgcaatctatcagatgacacttccactaggacctccttgtgttttgttgaaagcagagaatcagaaaatgtctgacttgtggagtctttctcatcctgacctcagagctaggcactgtgtcagcaccagtgtcaatgttttaaattgtccccttgttcagtgcccctggggcagtgctgcctggtagccttccagatgggagcgggggagaggaggctgcctttgtgaagtgagaggggggcagtggtggggatagaagaagagaggctgcatcccctcacaggagcgtgtgccttctcaggctgatggattgttggaaagagaacataggaaaaaaatgtcttttgtgtccatacatcccattttgcggactatggtcttacacatcttatatgccaggcccacttctgggcactgggagagtcaaggaaacccacgcccccataggagctgggctagtggtgtgacgagggctagcttaggagcttggggcaggaaaccgggctgcatattgcactggaaattgaatgatgaaaaacttgctgtccttgccctccaagggtttatcatctgaggtcacat

SEQ ID NO: 333596 - DNA, 394 bp, Homo Sapiens
tttatgcacttctgacaactatctgctaagaaaactttgtgcatgtttttttgactggaaagtggaaaatattgaaatgtgtgtggtgttctcatgacttttatatgctgtggtctcttcaacttttggtctcatttgttgtaatctgaaatgatgttgccgccttgtcataacaatggttatgtgactacagttatacattttacagaagaatgtaccataagtatataattagaagaacagtggcttaatatatgtatgggaagtttatggaaaatgaagttggcacttttctaccctctgagcttggttcttaataagcataatgtgagggtgaatatgtagtatctcctaattatgagcactgcatgagaattaaaaaacacatgtaagt

SEQ ID NO: 333597 - DNA, 500 bp, Homo Sapiens
  misc_feature (331)..(331): n is a, c, g, or t
  misc_feature (374)..(374): n is a, c, g, or t
  misc_feature (380)..(380): n is a, c, g, or t
  misc_feature (390)..(390): n is a, c, g, or t
  misc_feature (404)..(404): n is a, c, g, or t
  misc_feature (419)..(419): n is a, c, g, or t
  misc_feature (469)..(469): n is a, c, g, or t
cctcatgtagaatagattgtgtttgtgacatgaagaactattgtcttaaaatatggattttatgaattgtgatcatgagttgttctcaattaaaaataattaaatgtaggagaagtggaatcataactgcctcttctgggcaaatatggagagaaacgccattcattttatggctgctggagaaaatggagttaatgcaacaccctctgatgctgcaagtgacaggtgggaaactggtgcagggaaatatcctgtgccatgtaggctgcaccagcctgtgccctactgctctctaagtggccctaccaccattgtccttcatcgcccaganaggctggtctcagttccgcctgcagcaactattgttgattttncttggnaacatggttntgtccttgtggatncattgtagattgggncccaaaccagacactggtgattgagtcaccaaaaaagtcctttctccttngattcctgggtgtccagagtctgatgggggg

SEQ ID NO: 333598 - DNA, 464 bp, Homo Sapiens
  misc_feature (180)..(316): n is a, c, g, or t
aatatgattttctatgtgtgccatgcagatcaggagcactgtagcaggcccctctctctatcaccagtgcatcactttcatcatggagcaggttgggaaacatagcaaaggctggccccacagacacaaagaataagtcacaactcacccacgtggtgtgtttcctcctaactctttagnnnnnnnnnnnnnnnnnnnnnnnnnnnnnnnnnnnnnnnnnnnnnnnnnnnnnnnnnnnnnnnnnnnnnnnnnnnnnnnnnnnnnnnnnnnnnnnnnnnnnnnnnnnnnnnnnnnnnnnnnnnnnnnnnnnnnnnnngcccaccgttaagtacgtcagcaggtatctttcaggagtgtggacttccccatttgcaaccacggtgccatcatcacacctaagaaattaccactgtccaataatatccaatctacaacccattcatatttccccagttgaactccaa

SEQ ID NO: 333599 - DNA, 376 bp, Homo Sapiens
aagagtcctcagtatatattttgttcatcatgcattcattccacaaacatttactgagcacttactaagtacaagcactgtgcaggctaatggctaagtgagggattctaagaaaatgtacggaccctgtcccagaggaactcacaatctagtgaggtgacaatgccaggcattgcagtgtttgttggttccccacagctttgttcttgtcaactatagtcaccaaataaaaatgttagtgaataaaacctcaggatctttgagtgaagcaacaatccttatagttagcttaaaatgttgagtgcgttatggttacagatgatagtgtagcgggagtaaccttaggcctgcaaactcaaatgtgtaacaaagataa

SEQ ID NO: 333600 - DNA, 466 bp, Homo Sapiens
tgctaggaaaagaactactcaacatgtattgaacatatgcaataaccaaggcacatttttttctcacataaaccaatttagagctagctctcacagcttgcagaaaaacatagaaattaattgatttcaaactttacccatctgtcccgtgatgatgaccttgtttgaataagttcaaggttcttgcaagcaagtaaacgacttcgaactttgtatacacaacggtacacttctgataagtgtttaccaggttgatatctaaatgaagaaccaaaatagaaaagttacctaatttctgacatcatgagagcaaatatttgtctgaggatagttttaagttacttgccggctttctccacatgcttgactaagtaaatttgtgtgtttcagaagagctgcaagaacaaatctagacacagtgtccaagagtgactcattacttaaagttgcactgtcccaatctgaa

SEQ ID NO: 333601 - DNA, 502 bp, Homo Sapiens
tttctagagagaaaaagcactgggtggtttctccaaagagccacacttgttttctttttctgggtaaagggatccaagaccacttttcaaccctgggctatgacttatgggctggaaaataatgaagcagagagagagtaacagatttgaattcagagaaaatgtcaaagccactcacgagtcaagtactggatttttttcctctctgcaatggaatgaacagggaagagtcatcaaggtgctcaaagcgaggataggaagacatgtctggatctctgggggaatggtaacttactgagttcctcctggaggctctctcttaggcttatttcccgctctgttgcagcatatcccatttctttcatctcttgctcactttctatctcactggacagagcagttatttccttctgttgtctccacaagaagtaactggctccggcgagaagcagcagcaagataggcagggtcctgcatggctgcgatcagggctggcgctctg

SEQ ID NO: 333602 - DNA, 536 bp, Homo Sapiens
gctattcggtgcatcctatttttaggttgctttcattattttattttttatacagatacatacacattgctagaatcaaagcaaaaatattaatgggcaggtactacagaactaaagtgaaacaaaacaaaacaacgaacaactgaaaaacaatagctataaactttcaaggccaaaagataagatttaagggcaatacctgttgaagaaggaaaaggagtataaagttcctagagaggtatttataatgcaaatctaatgccagctttttagtaataaaaaagagaagtgctttactatacactgactagcacataatacttaatttggaaagaaaaattaatgacgttccttgggccagcagcagatatggtgtgtccattgccggcaacagacacaacaccggaacagaaaaacccaaatcccagggctaaagtattcacaggagtaatggttcgaggtatcaggatttacaggctaggttttatcacacgtgctacactctgtacaatgttatggctctgcttgacatttta

SEQ ID NO: 333603 - DNA, 881 bp, Homo Sapiens
  misc_feature (500)..(509): n is a, c, g, or t
aagaagattttaaaaatctggcagtagtgtttagggtagagaatagtgaaaatactcttatcacactgccaatgacatgtctacactttgagttttgcttttgtaaaatgctctttaaaattctaaaagtagaagaaaaatatctgttttgctatgagtcatcctgggggtttctaaagtctccttgcttaaagtttccctaagcaaacttccaactgtccacaggagccagcataccctgggtcttgggacaagaagggccttcttacattgcatcacatgcaaaattagttcctccacacacataacttctcctgtagcaggcagagttacagtatctgccccaggggctgggacaaggctctgacaatcctaggcacatgttggctgaaaggatttcttgattaaaagcttcatttgggatacagggaaagaaggaccaagtgatggtcagtgcatttcttacatatttcctttcagtatctccccagtggggcttnnnnnnnnnncctaagatgatgcaaacctttgccaaaacgtctggtcatctcagcatgctttctggtgactgtgatgccctaggggctgggcacagacaggatttctgctgggttctaaagcaataattttatacatatttggcagagaaaatgaataaagagaactagactgggagatagagaacagggttcaagaccaggctgcaccactaatagctatgacactaataccatgaggttcttagcccctcttgggctttgttaaatgaggggtttgtactatcccatccctccaagccctccagccctataattgtgttcagttgcctcacttttcccaacatagcttaccatataccacatcacagctagagtaatttt

SEQ ID NO: 333604 - DNA, 437 bp, Homo Sapiens
ttttcaagatctctattggctttgctttggttcctgtttcccccctaaaaaaatctaacttctaaaaacattctgctcagacaaccatttcaagttataggacacatgctctaaaggaaaccatccaggagaaacatttgcacaagttctcctatgacttgagattgcatctgagaagggtgcagggggagaacagacagaaacagcccactctgtgtgcagaacgccgtgtgtcctcagtgtttctcggggcccatagctcattagctgcagttggtatgaagcctgcaacctgtgaggccataaaattccgaataataattcatcaggtcctgagaattctcctaagtacatttagatcaagcgcatgacatttcgcccctaatagcagcattggcaaatggcctaacggaatttagatggctccaccaagccgg

SEQ ID NO: 333605 - DNA, 505 bp, Homo Sapiens
  misc_feature (100)..(114): n is a, c, g, or t
ttacagcgttattagtctttttatttgcttattgcatcttgggagcgcgtgggtgggtgaagggagcgaggataggaagtctatggagatttacaccagnnnnnnnnnnnnnnnaaacaaaaacacagccagataattataattcttcccttacgtccccccagcccccacctgggcaggtcgctctcccggctgcgtcccttttcgtccatgtcctagcagagactacagagcagtacagaggctctcgctgaaaccagtcccaggctccacagagtcagatcacggcttcacaccagtcgttctggtcacttaggcgttcgcgtgagccgtcaggccccttaccgccacctcatcgtcactctacaccattccagcacacggcaaaatgcagaggactacctttccctggtccgccccctggccgccccttgggagatgcagacttcgtgttctgctgcggagcagacgcccaggccaggtgggagtctgcactcttcaaggg

SEQ ID NO: 333606 - DNA, 260 bp, Homo Sapiens
gaaacaggaagcagggatctggtgtctatttctttttccaagcacaatgtaagcacagttctaggctgtgtttgtcttgtgagtccttcctggctcccctcaggcactggctttctctcctctctcctgccttctctttctggatccaccctccaaatgttggagttccttagggtttgattcttggaactcttctgtgtttatgtgttctccctagatagcatcatccgtaagtgacttaaatagcactcataatgctt

SEQ ID NO: 333607 - DNA, 285 bp, Homo Sapiens
attctaatctaactttatctttctagtggatttattcataccagttacattggtagagttgtctttcattgttacttaataaatgggtagtcttgttaatttaaattaaaattttaaaaatggagaaagaggatgacaaagccaataaggagataaagcccagatgactgcgaaatcaattctaactttgtaaatctctaatcttgagatgctacatggcagatgagtgaaacatttcaggtctttaaggcgatatttattcaaaaggctgctttttattttata

SEQ ID NO: 333608 - DNA, 442 bp, Homo Sapiens
tttttttctccaatttctatgcagggtgcacagttatattcaaaaaaaggttttctaaatcaatgccctggcagaaacacattctatctccatcatgtccttcacagttaattccaaatcctaatctctgagtgggtcaagaaactagtcttatttgtagtcccagcacctggcacagtgtctggcatacagatgatgctcattaaatgtctgctgaaggagtggctggatgaatcatcaccttacagaccctttggaatgggacgcactttcacctccacattcagagcatatgggttctcaccctgtgagcccggggcttccacccaggggagcattccagcaaagaggcaccagggacaccagggaaagtgccctgctgtcgtctgagaagcacacatccttccctgggtggggcaatggtctcattacacacagccaa

SEQ ID NO: 333609 - DNA, 353 bp, Homo Sapiens
agatacatccaaatagcactgatggcttttattgcagattcgtgtcattacaaggataatctgggaatatatttttaaaaaaaccctcccttttatatacacaaaacatgctacatagtacactttgtgagaaatgctgaggtaataggcacacacccagacatggacagtaccaaacatccaacatctcacacagcctggcccacgtgcccaccgggaagggtctcaccttcttgactcatcccttgccccttcttggcaatagtcccgggagtgctgaggctgacacttggtggccaacaggactcagaaagccaccatgctgcagtgcatcaaccaaggggtccggtgac

SEQ ID NO: 333610 - DNA, 484 bp, Homo Sapiens
cctcgccaacgtgctcacagatctgatcctaaaagagtctctttttcccatgctttgtagctcggattgtatttctgctgggtgggctgctcctgtctcggccctcctccctcccacccagcctgcctggcccgctgcacttcccggtgtccccgcggctttggagtccttggcccaggtgggtcctctgagtctctagggggacggggcaggtgggaagcgcccaaggtctaggagcactggatggacatgtaaggccagttgaagctgctcccagacagtaacatatcgcggatgagagtttcgatgggggttttactaccaaacggacgaagaagagctgctcgatgacggaggaggacacggtgcgcagagagggcagtcgcagcagcagtttgccaaaacggctgggctggtttggggtactgggcttctcacgtacttctccagtgcgcactgaacctcgttgcgaaattctgggccg

SEQ ID NO: 333611 - DNA, 428 bp, Homo Sapiens
ttttcctgcttttctgcttagaacaaatatgggctttctctttgccccctgcttcgatcacttcctatctgacagtagcagtggaagtgctataaccagccgacagcgggcacgagggggggtactaaggatgaaactgggcttcctgagagggagaagtggagcacgcacccagggacgcttcctgcccagcccgatgacatgtgaccaggggccgctaaggaaagtgttccctgaatgccgagatgagagaataatggggtcccaccatccatgggaaatgaggggggatctgcagaggctggaggtgcagctaagaggactgactcaaattcagctgttaaagattccccaaagcatctgagacaccatctggggtgcagcacaacagagacgtttagatggtacagaaagagatgtatagctct

SEQ ID NO: 333612 - DNA, 444 bp, Homo Sapiens
tccacacgcgaatcacgcactttattattgcgtatagtcagtgactgtcaggaacctgaaaagtatgtccttcaacacagctctgcgtgcccgcggccctggggtgcaagcgagtctcctccgccctccgccgcctccccccgcgcgcgtccccctctcctccctgcagtgactccgcgggtcgcttcctccacccgcccggagcgcagaggagaaagcgagcggctgcagatttgccccggtggcaccgtagccacaagccaacccgtaattgcaaagcaaacaaggctgaaatactggattggtctcaatcgtgacaagatctacgcttttgccgccaatctgtttgtgcagctctatttaaaggcacttgattgaggaaatgttgaaaatagcggtgagggtttcctaatgagacctcaggagggaagcggaggccttagc

SEQ ID NO: 333613 - DNA, 388 bp, Homo Sapiens
  misc_feature (233)..(233): n is a, c, g, or t
tttttcgtctcaggaaactttttaatgaaagtgtcggccacggtggtgtgtaggtggctgagctcagattgcagctgctaagacaccagccacttaccaagagaaagccaggctgcttcaaacccagggcccaaggcaaaaaagcatcacttccggccggggagtctggaagccacgccttgtgggaggtcacactggcatctaggccttcgcctgcattgcagaaggagagnccgggtccccctcctggagaacgcctgcgttccccagccccacaccggctttgcaccacacaggctgttgaggcaggaggtgggtaagacgtagctgtagacccaaagcaaccaccagccctgggaccctgcaggagaggagcacttttagaaca

SEQ ID NO: 333614 - DNA, 1085 bp, Homo Sapiens
ggcatttgtagctgttttcggcaaaagggtttctccattttatgtggcttaccactaagaggaagattatttactgtattgctttttcctacctaaggccccctacctgtatgataaagacaaaccagagactgggcaatttacaaaagaaagaggtttaattggacttacagttccatgtggctggggaagtctcacaatcatggtggaaggcaaggaggagcaagtcatgtcttacatggatggcagcaggcagagagagtttgtgtatgaaaatttccccttataatacacattaaacctcatgagacttactcactatcacaagaacagctcgggaaagacctgccccatgatgcaattacctctcactgggtgcctcccacaacacatgggaattcaagatgagatttgggtggtgaccagccaaaccatatcacagacattgagagtaagcatttaaaaactcatatagcaatttgacatttccttaataaccaagtgggtgaatccaccttgttggacaggaaatagacaagtgtggtaccatcagactcagtggtgggtcacttctgacatgagtgtgtatgagtcacaacattaagaagtttgggatcttaaggttattttctcaactacaatccaactgtgcataaaaatctgaaattcacatattaccttcttgcaaaataataacaaataattgtgaaatttacaggataacttgttggaaatagttattgatgatttactgaaaataaaatttgaaaacacggcatcatttgcattatttggggtaagatttaaaaacaaataaccttaacttgcagaaattatcttaaaatttctttctctgttctcttgaatatagatctttgaaatcagttctacttttaatggtaaatagaaatacttgaggtactctttctcttcagtgaacagaatcttgtcataaatgcaacctcgtaagctcatttctcacattacaactttacatattaatataaataaaatttattcacagtgtgggtgtaggcatttaatataggaaatacaatttcatacttaaacgggattagttacag

SEQ ID NO: 333615 - DNA, 441 bp, Homo Sapiens
aaaaaaagttctcatagctcaattttcaaaagggaactttctctattttaccaacgtcacaattatgacctgtcagatgaatggaaaccagcaggggaagttcatttgcattcaggggaaagagaaaagcagtttagagagaactcttggttttgtgctaatagtctcagatcttcagagaagttcagtgctgagaaaatgtttttaagagcctcaaacagcttgagggtgtttaattttacttaggcagctgggtcttctgcaaaagcgtaactcctggggggctgcagcggcggggggtggtgacagtgcgtttgcaggcaggccctacggcggcaggcctcaggaactgaagccaagcagcattagctataaagagctcccaggtcaacaagcccctcatctctgccttcagtccagctactccaggaatctgaagca

SEQ ID NO: 333616 - DNA, 369 bp, Homo Sapiens
ttgtatgccttattctggggcccaggctgaaggggcagtggctatccatgataagcttttctcaaggcaccagcagaagtacaagaagtcaaggccaactgcataagcgtagttcaaatgtctggttatgccacatctgctaagattgcattgaccaaagcaagtcacatgatcatgcccaaagacttaggagtgggtagtagactgcaaccaccatgcagccaagcaaactacagagccaagcctataacatcactggagagaggtgtattcctcccttggccaggctgggggagggagtgaatattggctgaataataatctaatctaccacagatggttaacagaggtggagtgggatggaaggag

SEQ ID NO: 333617 - DNA, 389 bp, Homo Sapiens
agcaaggagcatggagaggtttagaagaacccttgccctccttcattcattctgccctgactcagccctgagctctgcaaagatgcatgctcagcacaaatacatcttcacatcttagtccaaattctggaaagtctgaatgctcacaaccagtgtgttttgctgagaaaacgggctgatgacaagtcagcctactctgtccctgtacatgtgtggcctgggggtcagcaggatagggtagggttccgggggagtacccagaactggttgtctgcctgccgtctttccaagtgacatcgcagtgtcttaggtacacatggagaaatgatcagagggggacaacctgctcattgagtctcttctttgtattctttcccagttttgcttgc

SEQ ID NO: 333618 - DNA, 383 bp, Homo Sapiens
ggtgtttatttatttatttatttatttggcaactgaaaaagcttagtagcccagccctgtggttatccactaactccaaagttatcaactagtgctcagctagttacctgcttataaacaccagaattctagctcagcttcagcaaagattagtcaatagctggcaaaaagaaacacagacagatggacaagagccagagaacaccagagacaagagcgaggctgattaggaggccagagctgcgaagccagacagccagcagcctctttccagccctgttcctccaccacgtcgtcactcaggtttctctttcctttgctgctttcctggctcacttgaatcaatttacaggtgactccatacacctgtctgcctctgcact

SEQ ID NO: 333619 - DNA, 352 bp, Homo Sapiens
catgtagatgttgaactgacatcatttgttgaaaggacccatgtgtgttttataatgtttcttcaaccatttctgctgacaagtgtctaatgaacaaacagcatactgtaaggtggttcggtacagtctgcatcatgaatctctatatcactgtgatagtgcctataagagtcttccttctaggaataagaatgtatagggttggtcacagatcagggtaaagaaaaatactgttacgtgcttcaaataaacttttaaggctctttaatgtgaaaatttaaatatttgtaaactaagatatcagagttttattatttctaagtctttttgcccaaaaccacaataaattaca

SEQ ID NO: 333620 - DNA, 437 bp, Homo Sapiens
  misc_feature (39)..(39): n is a, c, g, or t
  misc_feature (43)..(43): n is a, c, g, or t
  misc_feature (265)..(265): n is a, c, g, or t
  misc_feature (318)..(318): n is a, c, g, or t
gcctggtcctttttgggctctttaaatatgcggcggccngganagggagcccggggcaggggctacggggagcctggttccccgcagacggggtctaactcgcccagctaaggggccgttgaaaggagtgtccaagagagtgcagggtagccagggtcgcttccttgtcaggggcccggtcccccttttgcccctggatctcgcgcctcagagctgcagccattaaatgctcttctccaaggccagtggcggggcggttgagtanggggacgatcgaggggcgcccgggaccctgcggagttggaagggttttgtctngcggatgaaccaattaagcgtgcagccggcgcttgcagactgcgctcagcgcagggctgggggttttgttcgctgtaatttccaagccgcgggggcagagttggagcgggatatgtcta

SEQ ID NO: 333621 - DNA, 807 bp, Homo Sapiens
aaggagagaatatcaacaaaatttctcattttacttcttgctaagacgacagcagggaattgtaagcagatggatgggcaatccccaccttcagcaggggaggccaaggcccaacacacctggggagaagagctgggggcagtgaatggctgaggctttcttggggagctgggccatcttcttcggttttacttcctgaggaattcacaggcttccaggaggggggaggttgagcactttttcagattagtaatgcctgcgacatactgtggtcccaaatatttttcatatgttgttttgccatggagtctggccagacactcagtgttgtcattgaacagaaggtttttggtttcagactggaataagcaaaacttgtccgggcagtcagatccatttctcccaaatttagcctgttggtggagcagcacctgtttcaggcgttccaccttatccatccgagacaccacggcatgattcgggggcatggcaagatggcagcttctagcctcagtcacaggcttccgtttgccatggaggcacagcagcggaaagtctgccagcttcaaatccttagcccatgcctcattgttatttccatcagtgtttcgcaagacagtgacatctttcaacaatgcaacgtctccagcattctcagccaggcacccgaaaagccccagtgtagccgtaatatctcccggtggccttggggacgcacttattttcaacccggtcggtggcaaaatacccggggcccgggtttaagatcccggttaaacccaggggacaagtttgacggaaatattc

SEQ ID NO: 333622 - DNA, 319 bp, Homo Sapiens
gtctcattttaaatgttttatttcatttacatttattcctttacttggggtttgtttttataatgcttaacaagcagaatgaagccaaaaagaaaaaggccttctccatctctcccttcagctcctctgcttctcaactccaaacttattgaagaattctacccttaggaaattcaggtcattttctaggccttatgcctcagagtacacatgtgatttacgtgacaaatgttgctccctagcatctcactccaccgaaaacttttttcggtgttactctttcgcccaggctagaaagtggcaccatctcggctcacta

SEQ ID NO: 333623 - DNA, 284 bp, Homo Sapiens
  misc_feature (227)..(227): n is a, c, g, or t
  misc_feature (265)..(265): n is a, c, g, or t
acacaaaaaacttggcatgcaacagttgtcgctgatcttgttgtttcaaaaactttaagcgctgttccttagttgccagcaattgttgctgggcttcaatctgttgctgctggcgagatgccctttcctgaagttcagcaagagtcagatccatcctaggactattaacaccgttctcctttcttcgatattcaccaggaacttttacaccatttctttttaaactngggatcctggagatcttgggtccactcacaatgtcccntgccagggggggcgttcat

SEQ ID NO: 333624 - DNA, 231 bp, Homo Sapiens
taagaaaaaatgtctattatttattacacaataattctgaccaccaacaaccaacggcgggggcgggcaggagagaagaacatcttgcttctcaacaaactttcctcccttgctttaacatttttgaggattctttcccaaacctattacacctgtattatgatggttacaaattttccaactcttccactccttccagtgcattatttttagtatcttcattaaacgggc

SEQ ID NO: 333625 - DNA, 907 bp, Homo Sapiens
ttaagttaactgcagctttatttttcccttttctgggatctattaggaaccaacagaggagatttaagagtgttaaaagcaagaaaaaaccctgaagcctcaggcagttcgtcgtgggaggtcacgttatttacaagaagtttctgcttcctttcacacatttctgttgttccatctcaagtattcccaaagatcctcactgaggaaagtaggccatcaaagagacattgatgtatactcaggataggccctctagttttcaaactgagatatcaccatgttcaccgaaatttaatccagacaccctgaatttgagtcctcccctcctgccccccaactcttgcgcttggcaggtggccacttcccgaaaatgcaaaggaaagcttccaggagtaaatttcaatcagggttctatttactgaatgttcattttggcaatgttctgggtgcaaaattgtagccagaaatgctggccctcttaagatttcaaaaaaattctaataaactaaaaaatgaacctgatttttgtagttaaatgtgttgcatctttatcttactttgcctaccttcttcctgctcctaaaagcaactcatgcaaaagagaagacagaagcacttcccactttttacttaacattttatgaagtgacttccataaaggaaaccattttgaaccatcaaaacgagtcactgggttttgttcttgcaacttgagtttctttttgctttgccataaaatgcaggaataaaggcaagaggcaatgttccgaatgcactggaagagccatccaaaagccccatttctttcccctttgatgcaaatagacatggataatctggaaagcttatcccaaacaaaagtccttataaaatcttctctgaagccagagaagattttttaaaacta

SEQ ID NO: 333626 - DNA, 860 bp, Homo Sapiens
acaaaagctagccggcgtcggacttagcaagacggaccggaccgcgagccctagtaggaggcttccgacgcacgatggcatcaccgtaacccgcaaaccccaggccgcgcaatttttattcttaatccgcttaccaatatttttacgttggaaggaagatgcactgtacacacaacgagctaactaccttcgtagtccctccatgtgatgactcaatcagtacactcagtgtgataagagcacagccttcacagaaatacgtaactgtaaaatatttaaaataacacttctgaactgtcctaaggcatatgcaagtgagaaatgaagcacattgttcactgacactattaaatattggtaaggaagagagagttggtgacatttgagctataacctgtgccccgctgcaggtcagcctgatggaagctcctcttggggaagggggtttgtaagaacacagacttccttcccccagcccctggtcagggctgcagtatatccacaggagaggcttctgccagcatttctcttcccgcagctccttgtacagaagctccattccaggcaagagcagctgagaggtctggagcttccttcctccacccagaacccatgtgtaagtgaaggctccagcctagcacaacagtccaggagcaccaggaccccactcactcttgccccagttcacctgtggggcaaaagctccaccctgacagaggcaagccaagctactaccccacccaaggctgcagggatgtcactccaagagaagggagccactgccccagcctccagctctggagcaacggcacagagatcttgggcagacagagagacaggctgcaagagcagagagctcc

SEQ ID NO: 333627 - DNA, 516 bp, Homo Sapiens
  misc_feature (43)..(63): n is a, c, g, or t
attaatttccttcagtttttaaagggatacaagtttaacaatnnnnnnnnnnnnnnnnnnnnntagctcccctttttcttgcaaggctgttttttaccccaataatttagagtcctggggtgaaaggacagaaaaacaaaaatagaattttcaacaatctctatcttacaaagatatttagctatccaatgaaattgcactttactcaattcaaaattcgattgttttgattgattcctgtcagtttctgtcaaaacagaccatcttccccatttccatgtgaatttttgtgtcattgttgaaattgttgaaaaaatgttgttgttgtttttttaaatgtaagtgcagcatttcaaaacttttaaaaaactgaacagtagtagtagtagtttgccattttcggaattgttctgcaatgtgagtggattcattgtccttgcgggccatgttatatacttaactgctgactgctgaaccaaaacaaactaaaggaacaaataaaaaaggaatataact

SEQ ID NO: 333628 - DNA, 415 bp, Homo Sapiens
  misc_feature (140)..(151): n is a, c, g, or t
tgagacaaggtcactctgtcgccggaggaggtggcatgatcataggtcactgtaacctggaactcctgggttcaggcaatcttcccgcttcagcttcctgagtagctggaattacaggtgtgtgctaccattctggcagnnnnnnnnnnnnagagactatatctctatgggatataaatttctctctaagcaactcactttattccttcaagtgttaataactgtattttcactattattcacttataaataattcacttttgtatttaaaaagaataagtattctttcttgtttgggagtatagagttccatataatgcctattcaaatttgctgattatattgtttaaatcttttaaatcaaaggtattttatctacttattctattagttattgatagtatgttgaaatatt

SEQ ID NO: 333629 - DNA, 485 bp, Homo Sapiens
atgaaacatatatttgttaatggactattccgggatgacttttaaatatttacactgaataaatacctgtatctggttggcccatgtcctagctgctgaatattcaggaaagaataagggatggctcctgaccttgagaagcttagatttctggtgaaagtagctttctcagtgcaattatactgtgagtggcatcttcttcctctctgggccctccccctggttcctgctccccactactattgccacagctgagtgtcaggctgaatgaatcatggagctatctgaggatggcagtacttacattactttattacgttgtaaaatacttcctgataagaacgtactagtggttttttgagtgtctggaaacattgtaaacctgtcaaataattctaaagattccgctgttaacatcagcttaaagatttgttagtaacgtaacttgccaaattccttgccccatcacagtggtctccctaatt

SEQ ID NO: 333630 - DNA, 415 bp, Homo Sapiens
tccaaagcaaagagtttattcaggaatagcagaggactgaagtccaggataaacctgccataagcagactataggtacatccaagagggttaggggaaaacgggaaacttttaaagacaaaaaacaagtccacataagctaaacaagaccattggctagaggggcttgttgcagaagctgacatcagttcagtggtggagacagccactgcaaggcaagtgtccttgtgcaagtagcttatctggttggagaaatttcccatgataaggtctgttacaagggtacatgtaagacatgcaggaatttcttgtaataaaacctgttacaggcattcatatgtgaaggctccttcttcctggcctcctgactccatttagttagtttgacataagtcaaatatgccattttggtacct

SEQ ID NO: 333631 - DNA, 319 bp, Homo Sapiens
ctgctgacagtctcatcagatgttgtgagtgatccaaatgctttatgatagctctccttggtgctcctgtttcctttgaatggaattcctacagaagaaaaagggaagcaaatatccctctcttttcccaggctctaacactcttcttgggtcctcagtgtagcaccgtgggagaagttcttgccctttcagctcagaagactcattttgaagccaaaacatgatgatagatgcaccactggcatttgctgatcaagaaaactcatgtctgcctggtatggtggcttgtatctgcagttccagctattttgggaggctg

SEQ ID NO: 333632 - DNA, 665 bp, Homo Sapiens
tcaatataattgattttctttgtaattctattattctatgcatttaaaaatattatgctgaggagtccacaggctaccccagcccattaagacatctatgacacagaaaaagattaagaaccctgccatagatacacacctttcatatccactggcacaatagaataactgacttcggtgataataatgaaagggcagtaaaaggtttgataagacttagtaaactctgttaaccaaaataggaaaatgtatcaatattttatttagcaagatcccatttttaaaaaagaaatttgagacaagttttgttgcttaaaaggttgttgcctgaaagttctcccaaccaaataactgaaattttataaaacgttccatgcccctgaagcttctccccctccctcaaagctttgcatggctccagacactgatcatgcttgcctgaggagaacgtaaagtctgttctatggagccccagacagcttatcagaatctccaaatgaccaaaatgatgaggcagaatcagtgcatgcaaaacgggccaaagatggccccgcctactaaaaagcatagaagaggtaacaatcagaagaaatcataaatgacagttttcctactattttaataatttgaacaatataaagacttatggcatgtttacactattt

SEQ ID NO: 333633 - DNA, 557 bp, Homo Sapiens
  misc_feature (80)..(194): n is a, c, g, or t
tgggctcaagcgatcttcccacttcagcttttcgagtagttgggaccaaacacaagcatgtgccaccatgcccagctaannnnnnnnnnnnnnnnnnnnnnnnnnnnnnnnnnnnnnnnnnnnnnnnnnnnnnnnnnnnnnnnnnnnnnnnnnnnnnnnnnnnnnnnnnnnnnnnnnnnnnnnnnnnnnnnnnngtgtgagccactgcatgcatccctttagtggtatcttttgcaacttttagttcttcaaacttaatttttaattacagttattaatacccttttctaagtgagaaatgtgtacctttttcacaagattttagattgatttgaaattgaggattttatcttataatttcctcttaacagcccttgggagaggcaggttttgcttgttgaagtcaaaggaagagagaacgaacacagacacttcagttcatccttcattctggtgattcacacagcacgattctctctctgttcttatctaaaagcatctagtggagggcaggccagagtatgatcatctccaccagcttttgtggagtggagcaa

SEQ ID NO: 333634 - DNA, 430 bp, Homo Sapiens
tgccctgtttttgtttgttttgaggcacaatgaaactttagccaaactctgcaagagggtcccatctcctgccatggccaggtgtgagagaccaaaccgagaaaacagcatactctatcacttaagccttgggtagaatgggaattctttaccctgggtaaacgttttaacaaaaaaatggaacttaacttcggtttggactgtggtcgtgctgaggcaggagtggggttgccctcttggggctgaatctccaggcctcacgaggtccgctgtggggatgctgctatttctaagatgcaaattgcacatttcctagattttgtatctgtggatttggataagggaggggaacacggacaaattgcttgtacaatttgaaatgggcctcaatggtacttcaaaccttttgattattcctaaatacaaacat

SEQ ID NO: 333635 - DNA, 451 bp, Homo Sapiens
ggtccattcgagaaattttattggttaaatgatgcccagatggggtcacatcctcagaacttctcagcctggtagcacaagtggatgcttgaagaaactcagtcttggaactcagacagcaatggagacgggatgtgagtgggaccagcaaggggctaaggtccattatgagggtgaggaagggcttctagaagtaacaaacatcccaggtccctgactggggagaatgaagacactgaccaagagatgtgaagccactcagggctgtgcagggtctgaggatctcactggggacggcctcccagcggccagctatcagcacgagttggagggaaagagccatggtgggggtcagtcacgtggctcccaggaatggtctcccgacttaggaagcccttgctagccttttctccttgcatcctcacaaccacccagtcaggcactcaagtct

SEQ ID NO: 333636 - DNA, 826 bp, Homo Sapiens
aaatcacggcctctccaaatgctaaccctcaaaacgatgggtggggttggagaaaggcaagttatgtcaggaagcacacctcggaaggcgcgcgcggcactaggccggttcctcgccgggctctgggcagccgggcggagtggctagattatgtaagtagcagccctccatgtgctcaccaccatctgttaatatcttggtattggaaagttcggtgcctgaggcaaagccagggttggcggcgaagagctcccagcctacacttcactactccagggcagggaatgtacttccctttgattgttttcgcccacttccataaaatcaagtagtagtgtgtcccttcaatcactgacaacctcctcatccccgcgggtgtgtctttgtgggcgaagagtgattttcttcgaggtcaacttattgtaattagccctttcgatgaaattatattttcatgacaattctgcgctccttaaagcaatgtggcagactcttatttgggagtgggttctttatcattttaaaaattactttctttctgccagcacccctggatccaaattcttgtaagggttatatttcaacttctttggagtgattggcttctgtttactttgaaagctgttggttaaacaaacatcactcaggaggcttctaagcagtggggttcccaggagagaaaacgctgcagctgctacttgctactgatcttgtggcatttcacttcccccccattcagaacaaatccaggttgggcttggcgtcacactgagcacaggagatgagagtgagaggccgtcagtcagttttgcctctagaaagcttg

SEQ ID NO: 333637 - DNA, 313 bp, Homo Sapiens
atcccagaaacctttgcaaaaagcttgcaatgaaatttaagaagttcttcgatttcggcgccattttcgagtggagccagaggtgacatgcgattttttaaaaaagggacttgtggctggcgtctttcccgactgtaacgtgggttacggcaggcagaaaaacatctggtgataattctgaaaaaagtgctgtggcgtttgggggggttgtaaagcacgttttgcgggcgggatgggggcaaatctgacatttaaagtgtttaacaaatgagtgcggccgggaaattctcaggaaacggactgggaaaaaaaa

SEQ ID NO: 333638 - DNA, 250 bp, Homo Sapiens
tcgtctttgaaatgaataatttaatatttttatgtataattttatgtatgtacattcatgaaaagactaaattatactagttttagtttaaatgcaacttaaatattccaataaggaggaagtgtacattgactttaccccagatctggtttcctagccagactggaggcaaataaaataatgtttctgtttatgttaagtgacatacataatgtctacttataatatctctcaatagaattcataagag

SEQ ID NO: 333639 - DNA, 479 bp, Homo Sapiens
  misc_feature (41)..(86): n is a, c, g, or t
  misc_feature (443)..(443): n is a, c, g, or t
  misc_feature (445)..(445): n is a, c, g, or t
ttttcttctgggacggtgactcagaatctttggttgaggcnnnnnnnnnnnnnnnnnnnnnnnnnnnnnnnnnnnnnnnnnnnnnnctcttgtcggatttcttcttctccttcttgctctttgggttgctttgatctccaccttcaaccgtccccatccccttctgaagctcctcttctggctcgtccttggccccttgggagccaagagaccccttccctttcttctccttgacatcaccacttgctttgtctctctttgctttccccttggaagtcgtggaggtcttttctggggaaacagaggcctccccaccttccccggcccccagcttcttcttcttcttgctcctgggggtcctggcagctggctggtctcccgatagcttccgcttgtgagttctcccagcccttcctgctgctctcctttgtggtgtccacacntntctttctttcctgtttcagcagctcagtcaggac

SEQ ID NO: 333640 - DNA, 854 bp, Homo Sapiens
  misc_feature (119)..(119): n is a, c, g, or t
  misc_feature (151)..(151): n is a, c, g, or t
  misc_feature (154)..(154): n is a, c, g, or t
  misc_feature (292)..(292): n is a, c, g, or t
aagatgtcttcctttgcaaaatcagaagatgaaagtgtgactccttccaggggctgtgagtgttgatctgcggaagccctggggccgaggttgctggccataggcagcagaggggccgngaggcgactcatggccaacaccggagtggggnggncccagtcctggttgcctgtagtgaaggaatctctagatgcaagtttaaaaccgtgcctagccctctggccaaatgctgttttcaagatgcactgttccacaatgaaagataaaagctcttttattaaaacaaagcagntgtaaaacagtttgtatctgatcctgagttaaaggcattactaagggaaccacatagggacagagtgaatgtcacttcttccattaagtttcatagtgtttgctgcgcgcacatgcttgtacctgtcttgtcacttttcccttctgcctgggagacgggtcagtaaattccaaagggccttttgctaatctaacagccagaaaaccaagcaaaggcttctcccctactgatctccaagagcttagcaagaaaatgaaattcttgtggttctagggcacagctgtgataaccagggaccaacacccgcaagtgtgttgaaacaataggcctgaagtccaaaagctaaaagaataagtgttagaatccaagctcaggattcacaatgagttcgagatgaactctacattcagtttttggagaaaaacagttgtattaagtagtgactgagtatttaaggatgaagtattaagtttcaaaactgttcaatattatattaagtattaaaaactaaagtgaccttttaaatactgttgaattatgcctcctttcatagagttcttta

SEQ ID NO: 333641 - DNA, 419 bp, Homo Sapiens
ggtgatttttagagcaatatttaatcaggtgaataccagcaaagagagaaaatacagaaaaagaaatttccataaggcatgatatgaataaataagtgaaaaaaacaatctcgggtttaaaagtaaagcatgagaatttgaagcctgtgaaattttatttatacaaaagaataaaaagttatttaaaaagaactgatttaaacttatgtttttccatttttcctgttccttgaacatgaatctactaccaactcagaaagatttaagataggtaattactaaacactctttacctccccttgcaaaaaacagaggcaagtttcccattttacttatgataaaccagattattttcagttatgaatattggcaactgcatgaaagagatgatcagatatgtcagcaggaaagtatgagct

SEQ ID NO: 333642 - DNA, 792 bp, Homo Sapiens
atagagattatattttaatgttttaaatgtatttgatacattacaaaattattttagttacaagcatatcattaaagctattctttattattacaaaatgcttttacaatgctattcttgacaacaggaaaatatttaccctcactgaggtatgtggggtaccattttttggaaaccatttcaggcataatgggaatattccggttccatcttcctataggtctggtcaatatttatctaaaccttagcttctattcttttcacatgttattagttatattttcacttaaaaaattggagggtggaggggtaagcaaacaaacttttgaagtagacaaagctcatctttaatcaacagactttagagtccagtctttccaaatctgtgtttttaacgacagaaacttctccctcccctgccccattttgtcctccccattaaatggtactgtgtcaataaaattcccaagcgacctctttaaatcagcgttctttccgatgctggctaccacagtcatggaaaagggatatgtgttggacaggcctgtcattacaggtagtagttggtggtacatccagtctgtatttcttacacaaaattacatccaaatatgttgcctgaggccattttgttatcataggcgttcacaagaatttctagttcttttcactcgattgaggctacaatgttgttatgtggtattggcccccaggatacaaaagacagccctcagctttgtgcggaatatttctaccattagaccaatttcattaatcgtgtagggatggcat

SEQ ID NO: 333643 - DNA, 411 bp, Homo Sapiens
gagcagcagctccaccaaccccagttctgtgaccaacagcggcctcttaagtaaccgtttgtttcctcaaaataacactccacctttcacctagcaagaaggatggttatctgcatgggtgccatctttctgggccctccaaatgcggacagctcacctttgctgctaaaaacacctgcttcacctcccagctccaggtcattcctctgagatcttatggaaaagctctcagctaaattggacattaaatactagaggaatggattggttcacatactgggaaagtccagaggtcactggtgaatgcagggctccagttgtatcatcaggtcttagtttctctcctcctgactctgcctgctgctgtatcggcttcgttctcagtttgcacatgatgatcttctaggattg

SEQ ID NO: 333644 - DNA, 654 bp, Homo Sapiens
  misc_feature (185)..(185): n is a, c, g, or t
aggaattacctgtgaccgttgcctgaagaagaaaactcttgggcttggtttactcatggttctgcatgatctgttggtatcacctgaaagtggacagctgcagtactgcaatcccactctgggatgcttctgaaggacggcggtgaagggaaatcctcccagtgggaagaagataagagtaatgngcctggttgttcattttgcctggttagaagtatagatctatactttttcatgagcagtggctaatgacttggctggatggtcagtacttgagaggaacataattaggaagttggtgacaaagaggtctaggaaacaggtatgtggatggacttcagcccagaatgtgaagataattatttcccacatgagtgcttatcaaagggcgacctccacagaggattttaatgaggtggatagaataacccatttagtggatgtcagtcagcctctttacttagccaaatggactcatgaataaagggctagggatggaggttacacatggggtcaacgtggactttcactcgccagggacaatctggctacagctcctgatatggcaacactcctggggctcagccagctatctggttgtaggttggatatggatttgctgttcctgcccacaatgcatctgccaaaacaact

SEQ ID NO: 333645 - DNA, 441 bp, Homo Sapiens
ctgtactcatcagaatgggatactccacaactgtctcaccaactcagtgccagtacacatgctctagaggacttctggactcgcagctacaactgtacaagtgcacacaagtgaatctaccctgttatcctccacccactgattgaggatcgaattgcacatttctcttaaccatgacaggagaaagcaaacagtgaaacagaatcatgggtgatctttctcactttccctcttgttttcattggtttgtccataccattctaattaacatgaaagggctctgcatatagagagattgtctcactgacttcctggatcaccgaaaaccatcagggttgaaatttcatctgagtctttcctgacgcccagcaaatattcccctcggattattttacaccttgagggcattttggtcttcagttcaacactcttgctctgttc

SEQ ID NO: 333646 - DNA, 712 bp, Homo Sapiens
ccattgtttttattattttattaccattactttaattacattgaactgctgtatttcagtatcttcattttaaaaatgatgatagcaggattattataaaaattcattgtgtgacataatatttaaaaaggctttttatggcattatgactatcataaaaacattgaacgtgattcacaggaagttttactatcttcatattaaaaatgttcctggaacactattatcttagatttttatctctaacctttcctcctaccctaagaagataactatcttatcatggtggtgattgaatcaattctgtgcccaccttccaaccataccaggcaccagagcactaattttcagtgagattttgtgcctttgtaaactccagtgtcacctgaatttggaatgtagttgggggatttctgtgtaggacttcagagtttatacccaccatctgctagctcagactaacggtcaaatgaaacatagcaacccagtaatcaagtggtttaccttcttgcccctgcagaatttgaccaaataattctctgcaaagctctgtccataattcttccttttagagcaactctgcttagtcctcctccctgcataggctcagcccaagcctcaggtcagaccagtgagccacattctcacttgtccagagagagtttggaaatacattaaccgcctcaacctgtattactcttgcttccagcaa

SEQ ID NO: 333647 - DNA, 196 bp, Homo Sapiens
ggtgcttttaagctaatgtggcatctttctcttttcaaagagtggcatctccaaggaatagctctgcctggaaggtgtttgtgggtgtccacttaaaagctgaaattaggtcagtgttattttgtcttgagataacaaaaataagacccccagggagtagtgacttgggatttcatttaagtacttaatttacagg

SEQ ID NO: 333648 - DNA, 858 bp, Homo Sapiens
gcactcctttgaatagtttatttcagaaccaacagaggggatggtgtgagtgaatataaaataattaggtttagagtaatgtaacaaatcattatttaaatgttctgagatttgtagtctaaagtaactaacagtcaacagaaagacaacatccaaaattgtatagactggtactatgccattcacaagggggaaatgatagccactgtgttcatgtaatttgtttcattttttttgaattgtattaagtcaagaaatgtacatcatctagatatcagtttaatgacacaaatttcagctcagaagctagaatgcaagtccgcaagcaagtcctgactgcatatttctgaagttaatttacactaggtgctgattctatttttccttcaattttgattggcttgtctgcaagtacttgtgacttttttcctacttgatgctgaacatgattctatttcccaagaacctttgtgccgtcagtccagtgtgatgagtcgccaacaggtttgaatttggcgtccatggtgagataagccatgagtgcagtgccgagctgtgtctgtctttgcttgtcctcttgtatttccccttggcccgtttatttacgtaattttaaaagtttgtttcctgtctcttcaatcgttgtggagcaggaagaagacttcataagtaagactagaataaaatcaggtcatccacgtgaataattcccatgattttctatctgcattcttactcacaagctccacttttatgcaactgtttgcatcaagatctagaaaaaggcatacgttttcatttaaatgaaaaatatctcaaagaactaagaatgaccaaagatgcttcctcatacctaat

SEQ ID NO: 333649 - DNA, 466 bp, Homo Sapiens
agtaatttttataagtataaaagtgcatttcattctcaaaaagttataaaggaaaaagtacaagttctcccatcttctacccatgaatttcttctcttttctccagaggtgcccattgttaacgatttggtgtgtatctttctttcttttttgagacagagaatcgcttgaacccgggaagcagaggttgcagtgagccaagatcactggctttgtgccaggagaacatgggatgtgtggcctcctcagctgttttcaggcaggtgcgatgcctcaggggagggagcacaggtacctgcaaggtaattctgtcaccccaccccatgaccagatggcaaagtacttccaccctacacatggatgtgagaaaacaaccaaagacaagcagcaatacaaattccaaaagtgtaaaaagaaaaccataccagggagcaacaagaatgaacgcatgacattttaaattttg

SEQ ID NO: 333650 - DNA, 412 bp, Homo Sapiens
cccacctatgccctttccagggcagtttaattggtatcatttgtaaaaggtcttttccatcacccccaaagcctttgcattccctttccaagaaggtggctgtttactggttttggccccatgtgcaacagtaggccttggtatgatgctgccataacactcccatgtgacactccaggtgacatccaagtgcaagtctatgttcagctctggacagcaggggggaaggtgaggagagtcaggtctgtaaattgaagctgggcagggccctggctggctggagatgtgtgagcaaggtgagcaggccccatgtgcaccccagctccagtgcccactgatgtggctgaagccaggttggttgtggtcaaattagaggtcctgagagagaagcccttaggccaaagaagtgtgt

SEQ ID NO: 333651 - DNA, 423 bp, Homo Sapiens
tgagaccatcttggccaatatagcaagaccctgtgtctaaaacaaacaaaaaaatttttaattggattttgatatggtttggatctgtgtccccaccaaatctcacgttgaagtgtaatccccaatgttagaggtggggccggctgggaggcgactggatcatgggtgtgaagccttcatgaatggtttggcaccgtcccctcagtgctggtctcatgacagtgagttatcgtgagatctggtagtttaaaagtgtgtagcacctccccactctctctttctcctgctttggccacgtgaagatgcctgctcccactttgccttctgccatgagtaaaaattccctgaggactccctagaagcagatgttgccacgcttcctatatagcctgtgagctaattaaaccccttttcttacaaact

SEQ ID NO: 333652 - DNA, 682 bp, Homo Sapiens
  misc_feature (463)..(471): n is a, c, g, or t
gctccttagcatatgaattgaggcgcatcggagccctcactgctgggccagcccctcccgggctcctccggttccgggaggtccacagcccagcagcagctgcccctgcacgttgtcccctccgtccagcatcccggggccgaggagacagtgcccctggccgggggctgcgctggcttcaacttcccatgggcaaaacggggtcccgggtcagtgttcacagagggtctcaaaccctgcaggaccctgaaattgtctgggatccacaccagtcggaagaaaaaaagaatagaaaacgcagggattcacctcctctgcaggcaccctcatgccgaacactaaacaggatgatgttgaaaaggatttggagatttatgcaggtcacgagcttgaggaatttttccattgaatgcaccatgccttgggtttcccgtttcccactgaaaatcccatggctgacacnnnnnnnnnatcattaccttgggagatgaagaaaaactcatctgttagggcagctctgtgaatgcagatgctttgggttgttttgaatgaatgactgaatgttctgagataaagcaggaaggtgcctgcgggataatgactggtttcgcaactcttggccgggagtctagacccctctgataatcaatagaaatggatgtatattaaatttagcaataga

SEQ ID NO: 333653 - DNA, 391 bp, Homo Sapiens
tcaccaagaaaaggaaaaagacagcgtgccctaaacgatgacccccatgtttgcagttgacaaatgtgtagactaatggcctcttgtcttctccctgccttcctgttctgttcccctccttcctcttgcctccctcctgccctcaaccctctggctccctagttttcggccgcaacatgaagagcagcaatgacttcatcgggaggatcgtcattggccagtactcttcaggcccctctgagaccaaccactggaggcgcatgctcaacacgcaccgcacagccgtggagcagttgcatagcctgaggtcccgagctgagtgtgaccgcgtgtctcctgcctccctggaggtgacctgagggctgcagggaaggcagctttcatttgttta

SEQ ID NO: 333654 - DNA, 389 bp, Homo Sapiens
ttttttaagtggggttggccccatgaagtgggtgccccactcacttctctgagatcaaacggactgtgaatccgctctttgtcggaagctgagcaagctgtggcttttttccaactccgtgtgacgtttctgagtgtagtgtggtagggacccggcgggtgttgcagcaactgccctggagccccagcccctgcgtccatctgtgctgtgcgccccacagtagacgtgcagacgtccctgagaggttcttgaagatgtttatttatattgtccttttttactggaagacgtacgcatactccatcgatgttgtatttgcagtggctgaggaattcttgtacgcagttttctttggctttacgaagccgattaaaagaccgtgtgatatg

SEQ ID NO: 333655 - DNA, 457 bp, Homo Sapiens
acatcagatgcataatgtactctatctgcgatattagcttctcggtcttgcagtgttgcctaacacacacagtgatcagcacattttttgagactgcaataatcagaggaatgtaacagtgatgtgggaacaagaggaaataacatggaataataatgtacccatcattgttctgttgtcatccctcctagccagtttggtttcccttagagcctaacaaaagcttcacgaattcaatggaataaaacatggaactgggtgcaaaattaatacatctattcccaagctccatattcatagaaaaaaggaaaatattgactacatagggaacagactttccctgaaagctttgtggatctatgcatatgcttatgtaatcttcaaacaagttgtgcagccttttacaaatgtgtctagcctcatttaatctcaagtaagcctgtggataccacaaagg

SEQ ID NO: 333656 - DNA, 183 bp, Homo Sapiens
cctgtttcaagttgttgagtgaaatgacactgccttaacagttgtttgtcttcaccaaactagaaaacacagagtcctctggcctaagtacaaaacctttgatggtccagtaaagagccctccattggtgctcttcaatttgcaaattaggccttaaattctactgaagatcatcatctgatt

SEQ ID NO: 333657 - DNA, 468 bp, Homo Sapiens
cgtgctcacggacatggatacagaccctgctgtgctccacaccctgcaggcgcctcgggaagcgcccaaaggattccccttcacgttggtgcacctgctccatagctccgggcgctgcgtcccgaggggccacagtctccatttcagcgtcttgcatggcctggcaccgggtggggtggtatgccccaggacccttgtttgtgtcaaaaatgactttccctgcccttgccgtgggtccggcgttcctcccagccgggatcacagtgggcagccggcacccggcaccactttggcgagcgtcctgcttccgccctcgccctcatctacgctgctccgctttcctcagacccctttttgccgtgcaaagggaattcttgacattaaataaaaggtatccagattgcagactgcatgttcacagagctgggggttctccagcttgcctacagtaaagcctcaatgaactgg

SEQ ID NO: 333658 - DNA, 726 bp, Homo Sapiens
taatttggaatttagtcctattaagaaaaagttgggcaggcacccaccatagaagtgtgtcaagggaaggaggcaggattcaggatgtggatgctccatctctcagcagcaagactgggtgtgagtgcaggtggaacagagacagatgaacctgacaggaggcctggcttgggaccccaggacaaggtgaccccaggtctggctgaccccttcactgtttccagcatagctagtagctttagggggggaacagcaaagatcttgaggtatgtgcacagtatttcacatgcaaatgccaacaaagcccactttctctgattcagcaaacattgtccagcaagagcctgccaggtactctagctctgtgggtccagtgtatgtccaactaaaggataacatagcttaaaacatcacttctgtcataccagtttttgccactgtatagggacacatgcatccctttaagtctcacattttttcaatcgggtagcactacctgctggtcacgagttatgtgtcacaaaggctagcgctgagtctcagatctgccactcactgtggggccatgggcaacgacttcacctctcagagcctcaattttctcatctgaaaaatgggaggtagtcataagagtagttatctcacagggttattatgaagattaggaatcatgtagggagagtgcccaaagcacagaaggtgctcgataaacagtagctatttatt

SEQ ID NO: 333659 - DNA, 530 bp, Homo Sapiens
ctatttgctacagagctagaacctttattactttttaaaaataatttcaacttttattttagattcatagggtatatgtacagttttgttatataagaatatgggcaatgccaaggtttggggtatgattgatcacatcagctggttactgagcaagctacctaatagttagttttacaacccttgccccctttttaggagtccccattgtctattattgccaactgtatctccatgaatatacacttataagtgacagcaaacatgcagtatttcgttttctacaatatgaggctacagtaaccaaaacagcatgattctagtgcaaaaacagatacatagaccaatggaaccgaatagagaacccagaaataaagccacacgcctacaggcaactggtctttgacaaagttggcaaaagtaagcgatgaggaaagaactccccattcagtaaatgatgctgggatacctggctagctatatgcagaagaatgaaactggatccctttctctcaccacgtactaaaatt

SEQ ID NO: 333660 - DNA, 356 bp, Homo Sapiens
ttgagcttgggcaagagggagatgctgtctctaacatttttttcaataaaaataaaaatatcaaagtattttttaaaaacttgcattcccctccacttaataagttatcaggacagaagattatcactaaaataagagactgtcttcattgcccttttctatactgtacactgttttagacttgaaaaaacatattgacttgaatataaaaatgggataattttttatagcagcctaagtgtctataaagccctcttaactttatagtgtttctatgatggctaagaactatgagagcataaatcaggtcactatatttcccaacactatccacaaatttctgggttcaaacaaaa

SEQ ID NO: 333661 - DNA, 384 bp, Homo Sapiens
ttttattatttcaagaatggtgtttgtttcccacattactgtagaggcacacattggactctgacaattccccttgcagcagacatttgtgaagctgctggtcggcacacccatcaatcagtgactcctgcactgcagaggggccacatgcacgatgctcacgtgtgcacaggggggaggacagcacccccaccaggcagacgggcccagaaacagcatctgcccagcactccagaccatgcctgccaccagggcttctcagttctctagcatttgaacctctgatttaacattcatctctctccaagactgggtggggcactgcctgtggccagacgtctcccacagcagggacagcaccaggcaagaagggggcctggtctc

SEQ ID NO: 333662 - DNA, 679 bp, Homo Sapiens
  misc_feature (213)..(221): n is a, c, g, or t
aaagcaataagattaagacatattttgaagcatagcggctttcttattttttctgttaattcctgatgttataatcttctcccaggcaaagtattctttctccgtgtggaaagaatcgtaacagctgccaccatgtacaagcacacacacctacacgcccacaaacacggaaaaccagggcttagagaagagtgatgtgtttctgaaagcagnnnnnnnnntcttgctaagacagaaagaagaaacaatcaattctggttttatgtgtcacatacataaataaataaggcactatcaaatgtttaagataagcctgctctgatttacaatccatcaaattctgctatcaaaacatttagagaggctgcgagactacagggatttataatatcgacaattcttggtgtaaccttttcatttccttccttgtgggtgattcgtgcacactccatcttcctggagctgggagaggaatgagatttctctgctccccaggcacagatcagggcgagacagggcttttcagcagttcttagattccgtctgtcagatctttctccattctaccctccatccccgcctccaggccaccctttgcagctttcccttgaacgcctttcatctctacctcgaagagacttccctttatctcaaagccttggataaatggtgaaggttt

SEQ ID NO: 333663 - DNA, 204 bp, Homo Sapiens
ctctcacacatgcgaaggagggcctcctttgtcttgagcatctgaccctggagcctctcaagcctgcaactgctgcaaaaacagaacgactcctcaatgccttttgactctggctcaccgaatgtcttgacatgttcagcatcttgggatgaaggaaatacataggtcaagacatccctggcattacaatgggctagggttagg

SEQ ID NO: 333664 - DNA, 439 bp, Homo Sapiens
  misc_feature (14)..(14): n is a, c, g, or t
  misc_feature (31)..(31): n is a, c, g, or t
acaagtgccattcnaaccaaatacttatttnaatggtattggtggttagagggttgttgttgattaaggtacattaatggatccgtgtcctcccctgtatcccaagattctgccatttgtctctgcagttcctcccactgaagaatcggagtatatttctccagtccctaatgttgggtttagtcatgtgtcttagcttttggccactgggaattatttaatctgtatgaccaaaaacttggaaagtgtgcattcatttgtgctcactcactcctgctatcaccatgagaacaagcccaggccagcctgctgcttccagcagaagataagagacagcaagagcaacgtcgagcttcccagacatgcttatgctagattgaccaatcctcagctgacccatagatccatgaaaataaatgattgttgtattaagccactg

SEQ ID NO: 333665 - DNA, 463 bp, Homo Sapiens
aggcaaattgagtctgaagaaatgattgtttccccataatatcctgtccccatggtgtagctgtattggactggagacagatgacccatttacaaatgttctggtgttcttctgaggagtcagcataacctggccttctgacgtgatgtctataatacagtgttcaggaagaattcccatgccgcacagttggatatcttgggaatttgctgaccctatcaatgtatgttcctttaaatagtacaccagaagctcattcagagctgggtcagcattcagattcacaaggaagcatttatcatccccaactttgattccccgaagactgaagagatattccaagactctcaagctgtttctgtcgttcctgtgcaatctcctccgttttccttaatttctcctcccaggtcacagtcatttcctggattagcttctcagattcttccagcccgtcctttagctc

SEQ ID NO: 333666 - DNA, 863 bp, Homo Sapiens
aaaagacattttaaactttttgctctgcttcaggcagctgatgtcatggtgatgattcaccacatcaggaacaccctgtccagtgggctcaggcaagcctgccaggccacttctctaaagacaccacctgaggcctcctgcaataaatctcacagagtattctgaacacacatgtaaagtgttatgtccctgatcatataggccccatgtgtgcaatgtgtgaaatgggacttgcctaatttctgactagctctttctaattttggtttgcagaaaatcacaacgttaagaaaaatgaagacaggcaaaagccactggctcctaggtaactctatatgatgaaggggctgataatggactgaccaaatctagagaggattccagaagcaaggactcaagaggttaaaggtcccagatatagaaaaagcagaaactgctgattgttcctttttttgttgactgattatacaatgtgtccttttaaaaatggttctctgttctctttgcagttcttgtattggttcctagttcctactaatttctcacacttagttaactagtcagtcttactgaaaagtaaactaaccagggatccctggtttctgtatctttcaaacctatagggttacaaaccaaagtgagatgcctatctggtttctgcacagttgtcctgaattatgttggcagatattttatacctagaaattcaccttgaaaaataaattgaaaccataccaagtatttagagctaggggtctaaagtctgcaaaagccctgggaggttgcgttgtctcaagagccagtattcaatggaccactccacatcatagtaaataaaatttgaacacagcattttgaagcca

SEQ ID NO: 333667 - DNA, 338 bp, Homo Sapiens
aattcttggctttaaatatccctgtgccccagcaccgcccccaccgccccttatttcactaattcatgttttcagcttctgagctcaggatctgtaattcagacacctgcttgatttctccagacgcatgtctaatagtcacgtcaaacttgccctgcttctcaaacctgttcttcttccagtccttcctccttatttgtggccccatcttgcagggcctctcatgcttgaaacctgtgaccatcttctattcttccctctcttttgtccggtaatctgtctagcagcagccattgactctggccaaagcatcttgatctcaccttgctctccatctc

SEQ ID NO: 333668 - DNA, 157 bp, Homo Sapiens
ataaaccactgcaacccgcccaatttacatacttttaaaatgatagacaatatgaagaaaggtagaaagaaatataaatatcaagtattcctgctatctaaatcagtttaaatatttataattttatctttataattggtatttaactctgatgcct

SEQ ID NO: 333669 - DNA, 456 bp, Homo Sapiens
atgtcaagaaatgaaaatgaatgagtcttcatcaacccaaattccagactacacctgagcctttccatgatgacatcccaacagaaaacattcactacagactgcccattctgggccccaggacagctgtcttccacggattactgacagaggcctacaaaactctaaaagagagacaacgttcttccttgcccagaaaggaaccaataggcaagacaacgaggcagtgagcggtaggagctcatcacctcccagactcccagagagaaaataacctcgccaagccaatctttgacactggcaccttctcctcacaattttctctcttctcccaaaagatgatttaattttgccttcctaagattgctggtattctagctcttacctctatgttctttctcacgtctcctaaagacaaaattgtttaatttacatgattataaagatctgtttatg

SEQ ID NO: 333670 - DNA, 468 bp, Homo Sapiens
agataggctggacaaagcgatgattcacatccccagcaggacggagcagcaggatagtgggagacttttatcacactactcagaatagtgtacaatttaaaacttaggaattattatttctggacttttccatttaatattttcagactgcagttgaccaccaataactgaaaccttagaaagcaaaacctcaaataagggggaactactgtacctaacacagaatcctttcttggtacataggatttacagtgaaattaatccctaaagatctagtccttagtttttctgtgctaagcagttaaagaagatatttcctgccattgtgccttcagaacagtgaatttggctgggaacagtggcccacacctgtaaccccagcacttttacgagaccgagacaggttgattgcttaaagctcagtagtttgagaccaccctgggcaacatggtgaaacctggtctctat

SEQ ID NO: 333671 - DNA, 169 bp, Homo Sapiens
aaactgttaattctgcaaacatttattcattatttgctagtgccaaggatgatattaggtgttggggtagaggtagggcttcacaaagatgaaatggcatgaggaactgggatttggtgagaaggcgagagcgtgcacacaagtgtctatcggtcaaggctggaggcgg

SEQ ID NO: 333672 - DNA, 1024 bp, Homo Sapiens
ttccattgctatcacacagccttttcaaaaagtttaatagtaataccaccttagaccctcccaaattcactttctatatgggcatctactaaaaaggctgattgcaaaaattcctatgagggagaaacaggccctaaatagctttttaaaccttaacaaagttcacataaccattgatgtgtttaacccactaaatgggtgttaaatctaacctctgagtctgtgtttctgaccctaacccttggatttaggatcaagacaaaaactcagtaaaacaccagagaaaactgttctgcttccctccactcccatctggggcaatctcaccctcagacactaccatataccaaatcaccttctctggaaaatcaaggctggttggtccaacaactgttgggcccctgattactgcttagagtcaaatcaatgaggcatgttattgggaatcagctctcaacctagataaattcatctgtagccacaactgcttaatgggattcgttctagagatgaggcaaggaattccctggtggctcatattgttggtagaatatgttgaaagtttcagcagtgattgcgaacccttctaccgcttcaccccgcccccaccacacccaaacttcatgcctctccccaaccaagtctgcatgactttttaaattactatttatattactacacatattattgtacacaggactaaagtggccccgcctagtttcaataacttgtgtctcgtaaaaagataaccttcttaaggagagaaaaccttgctaaactcaaaatctcccttgccttcagcagtatgcagaaagttctcacacttgtcctgaagagaaatggttggctgtgaacttttgtcagtgtacaaagaactagatcaaaagttaaatgtaggcagaagtcattgcaaatgcaattcccccgggggtgatgtaaaaattcactggtcttaagcctatgaatgcctcaaaaatagttatggggtgggatgtttactgggaaactggttcgcttcttttgt

SEQ ID NO: 333673 - DNA, 515 bp, Homo Sapiens
gattaactgaactcactttatattgtagcctggcagtcattttacattatttggagtattgcaaccttcaccaattttaaaattttctatggatgccaagttgccataaaaagcaggcctcgcctacttttccggaggcctttggaaactgtccagaagcatatgatgcacggcacagaaaagtagtaagtgtacgaaccatcctgttacactgccaaactcactcaagtgacatgaagcctaacaaacaattattctttctttataaaaagttccctaaaaatgcttttggtaatgtgaattaataaccctggggccagcattctgctgcagatttagaggtggtagctgtgcttatcttagaaactacagaataggatgaaaaattatggtaaaacttaatcaattaccaagttttataaggcttaattatataccaaatatgtaataccttaggtataagacaatctcaagtgctacaaaatgttaaataagaatttattatttattaacct

SEQ ID NO: 333674 - DNA, 243 bp, Homo Sapiens
catattgtgtgcagtgtgagatggaatgtaagtgggtggctttgtccttccttgaaacataacttgtgccaaaaataacatcatttgaattgtgtgtctttggtaacaacatgacatatgccaccgcaagtacattcatccaatatgtgcatgttacagggctatgcactgcgaagtcttgtttgcttgttttttgagatgggagtttcactctcgtcgcccaggctcggagtacagtgtcgc

SEQ ID NO: 333675 - DNA, 444 bp, Homo Sapiens
gcaaccaaaattatcaaatgaattttatttaaatggaaaagtcagttaaaaccagaatatcctttgtccaatcagtcaataaactattaccatactgtcaaatttccattccataaacaagatttcaaaaacaggtatgaatctggggtagcagtggtttgaaaattaggattcaatttaaaacagagctagaatccaaaatttacttgctgaaatgtttaaggtctttaatttcaaaacacttactaagcataatatatccagagattggcaattaattttaacaatttaggtctttagtaaaattaatgtgggcagaaaatgttacttcattacaaagtgttactatatactttgtcttgtgactaactagagcttacaggagtataaacaagttaactgaatttttcagtggctgaggattttgatacttcctcattttga

SEQ ID NO: 333676 - DNA, 413 bp, Homo Sapiens
caaagtaaaggttttatttgaaaaatgtaacagtcattttatttcagcagtttaaaaattgtcctttttcttaaagaggaagaaggcattttcacacaaggctggccagatgggaagaatcttcagcttcagcttcagcttggcctcattcatttgaaaataaaatgtttacatgaggccgcgcctgtgtccagctgaaagtgggtccttcagagcgtgtgggggattctctgccggcttgatgggctagctcctctaagccggctgctggagacatcaccggctgagggactcctgcaaacgttcatacatgatttgatccttttttgatatagatgatcttactttcttgaaagcttcttcaaaatgcttatgactaaccttgagttcacctatggagtaaatgcacaaat

SEQ ID NO: 333677 - DNA, 458 bp, Homo Sapiens
cactataaaaatgtttgaacaattggatttcaaacattttcgttttgtggagtggtgctcaccaagtggtacagccctaagcaagtgaacacaaacacatttaagtgtattttgtctgattagatgttagccagttatgctatttcattcaaatgtctgaaaaaatcaattgactattcccttttcctaaagggcagagacagataatctcacttccagagaaatgacttggagaaaaaaaagtgttggtctttttgctcttttgtaattaaatccggatgtacctcaaaagacttaagactgtggtgataagatgctttcctcagcagaaaggagggaaaaaaaacaactggaactcaaagcttgaaattctgtggcaaaacatgagatgtccaggattggaggttgaaaagatttcactacagtgttctgcaatagttggagcaatgatcctttct

SEQ ID NO: 333678 - DNA, 819 bp, Homo Sapiens
gtattttaagtttgtgtagcaaattaagtaaagttgcaaattctttgtcattttctccaccaatagatggagtttaattctcttcctcttgaatctgggctgactctgtcttcttagccaacaaaatacagcagaagtaatgctctatcagttcctagcctagcctttaaggggactaggtttttccactttttgcctcttgaaatgcttgttcttagagcactccttcttagaaactaccagtcatggccaggccacaggaaaaggcctcatttagtacctctagtaaatagccctagctgagctcctggacagcagccagcataaactgccagctatgtaagtgagccatttggaagtagataatctaacccccactgagctgacaccagatgaaacgaagataaactaccctcaatgagtcctacaaaaatcataaaatcatgagtaaataaatattactgttgttttaagctgcaaagttttgaagccatttgtcacacggcagttaacaaccagaacagcctcttatttactgctgtatttttaacacatagaacagtacctggtattggacatctatttttaacaagcacgccaccagaagtattaaagtaaagatgttatacgtggccctggcactcacagagcagtcaaaagcatgacatagactaatgagtaaaaaggtaattataattcacaataaatattataattcataattcataatatttatgtattatgagtaatacataaatattatagtatagagtatttggccaaacaggaagagcacaacacagacttggtagtataaag

SEQ ID NO: 333679 - DNA, 340 bp, Homo Sapiens
gaagcggaggcgttactttattcaggcagggactagccaggcagggccacagcgtggcagggatggggggagtcagcacatgggagtgccgtcacctccattagccacaggccagacggcccaggagggcgtgctactgcagtgagatggtgcactactgcagtgaggtggcgcagggctggtgagcttgggcacaaaagccagcatgtcaccctccctttggagaagcctctgggccacaggccttttccagctgacgggatgcggagggaaggggacctagtactatcgggattcagctgacttagcctatgagatggagcaggcaagagattccctt

SEQ ID NO: 333680 - DNA, 525 bp, Homo Sapiens
ttgacaatattaagtatttcttatttcaacacgttgcagtacttttgaatttccaaaacttatcacaatgcaagttccaacttgagagcaggagaaacaagaatatacattgagcacatgtatctccgtgaggatgtgtttgtggaaggtgtatacacaagtctatctctatatataattatgtacacacatataaaaactaaacacatgacatctgaaacacgttcaaacattggtccttgccttctgcaagaggtgctcagtgggatcctgcttcctctcttcttcacctgaagataaattccttgctagagatgagctctggcatacagcctcctaggcagagggtgtgtggcaggcccactgcacaaatatcagtcctgccagattctgctgcacttactgcctgccatttcagattaatttctgagaagtttcaaaattcattccaacgaccttgtggagttcagcccaccataccccagatggtcattcatcccatctatgacatgcccagcagcagcc

SEQ ID NO: 333681 - DNA, 754 bp, Homo Sapiens
  misc_feature (46)..(404): n is a, c, g, or t
atgaattttctgggaaaggggtgggcaattcacgaactgagggttnnnnnnnnnnnnnnnnnnnnnnnnnnnnnnnnnnnnnnnnnnnnnnnnnnnnnnnnnnnnnnnnnnnnnnnnnnnnnnnnnnnnnnnnnnnnnnnnnnnnnnnnnnnnnnnnnnnnnnnnnnnnnnnnnnnnnnnnnnnnnnnnnnnnnnnnnnnnnnnnnnnnnnnnnnnnnnnnnnnnnnnnnnnnnnnnnnnnnnnnnnnnnnnnnnnnnnnnnnnnnnnnnnnnnnnnnnnnnnnnnnnnnnnnnnnnnnnnnnnnnnnnnnnnnnnnnnnnnnnnnnnnnnnnnnnnnnnnnnnnnnnnnnnnnnnnnnnnnnnnnnnnnnnnnnnnnnnnnnnnnnnnnnnnnnnnnnnnnnnagagtagagaagtggtgaacagaggccacagaaatgatgagcagtctacctaccatgtggagaagacacctcagaaatggagagattttatatttttgttgcatgatggtaaacagctgtaaccaccagcttggcctttttggcagctggctttatttagcattttaagctttaagtttgcctctggtgcctggaattgttcaattaaaattttaaatttattcttatcatcctctaacacaaagcttacttatacaataccaaatctagcctgagacacttgttcttgaatcgattcttttttaaataataagttcaatatgaaataaatctattctgctacaacaacc

SEQ ID NO: 333682 - DNA, 531 bp, Homo Sapiens
ttttttttgccaggatgtgggcagcgtcagaggtttccctttggctttcagcacaatgagagtcctgactccacagactagggacccagtgtgggggtgactccacttaacagtgcatcagtgttaattatgcactcagggaattggaagataaccagggctgtgtctatggatccagtagttccattgtgggccgtaatgtgtccaggtttactccctgacctccgtaagccccactgtgatgggagacatgatagtgctgtgggcatctgggcatcaatgtcagctctcactcagtgtcaataatctgaccagttctgcatctttcctttcgccagtgtacaatctcctgagtaaatggctataggttcctttgctgaaggactgagggaattgtgccagcatttacttccacggagttgcagggtattcctcctagggatatggactcctcctctgtcactgagatctgaatctgaactttggctgaggtctaggcattgaggatgggatcatgactttgtattgggt

SEQ ID NO: 333683 - DNA, 218 bp, Homo Sapiens
cactatgtgtggctcctgtattaattttcacccatgaatctgggttcttaataaaaagggccccagctcccacacggaaccatgcaggagcccattctccttcagcggtgccatgccccttactggcagtggctctccttgcccagaaagtgtctgtaatgtgggacaaagtgaaattttgtttctctgaccttccttgtgactcatatttaaaaaaa

SEQ ID NO: 333684 - DNA, 454 bp, Homo Sapiens
gtatattcagagttgtgcagcgatcaccacaatcaattttagaccatttcatcaccctgaaaataaatgtcatatctttagctctcacttcccagtgtatcccattttccccagccgtaggcagctttctgtttctgtagatttgcctgtcctggacatttgatataaatggagttgctgtatcatgttcgacttctctcacctagcatgatgttttcaagacacatccatgctgtagcatgcgtcagtgcttcattccttttaatggccaaatattccattgcatgggtatgccatgatttgtttattcagcaatttattcaacatttgggtgtttttttggctactatgaacaatactactgtgaacaatctgtgtacaagtttgcatgtgaacactttcagttctcttgggtgtatatgtagaagtgagatttctgagtaaatggtaactt

SEQ ID NO: 333685 - DNA, 410 bp, Homo Sapiens
  misc_feature (45)..(65): n is a, c, g, or t
tcatgccactgcactcagcctggatgacagcaagaccctgtctcnnnnnnnnnnnnnnnnnnnnntggcctcagtaattgtagacttttattattctctgttaattttagagagtcttatgagtttctgcaaaaaacaaatctggaatttgtattagaattgcgcattgagttttcaaggttgggagaagtgagagggattttggcatgaagattctagaagacagaagagaaagaagcccatgggtttgcttcagatttctttctccaacgtcatcccacccaatgaagttcattcactcaacaaatatgttcattcattcaacaaatacagagcatcagctgtatactaggtagttattcctaggtgggaagagacagatcataaacaaatacaaaaagttagaaaaa

SEQ ID NO: 333686 - DNA, 530 bp, Homo Sapiens
ctatttatactcttttggcccgtgtaggaaaacttcaaaaaagacaatatgattttctgggctacaaaatagcatttactgaataccatttgtgaaaatattgatatgcctacaacagaaaacatctttggaaggacataccagacatttgctgtgaggagaacagtatggatagtgagtgaccagtaaggagagatttctactttaaaaaatatatttgtgtatattttcagtttcaaattaaatacacaaataagtataaaatatctactttctgaacagtgagcaggttctctgcagtatttccatcctttgacttatctctgcttttggtctccatgtgtatgttcccgactttccaactccaccagacagaggatgaataaagaggaagctccaggctgtgaagcgtctagtccttgctcccctcagaagctgggacatgttggaccaaggtggtaaggatagtgaggtatggctttaccttgtacaattcaaaacaatcatattccttgactcagcaattctat

SEQ ID NO: 333687 - DNA, 253 bp, Homo Sapiens
aacaggaagaaatatgccttttattaggagttgcatatgtacagagaaagctgtttctcacagctcaggggaggctgtgagaaagagccactgtcatccaaggtcactgcgcgtacactggtaacaccacttagacaccgccgcacgtgattaagaaacagaaccatgacacagaaatgcagaagagacacgggtacgtgtgtggacacatcatttctaaaaacaagtcaacacaaaaatacaatgtgccaat

SEQ ID NO: 333688 - DNA, 465 bp, Homo Sapiens
gtgtgaagacagaagagcatttattattggtgctacagtccagctttcactattcatacagtgatttcaatttaactcaacatttttggagtccctattatgtctcctgcactgtgctcagacagtatgaacaaaaaagataacacaaggttcctacctttgagaagctctagctagaaaattaccttcagattactcagatgcgggggataacctgaatccctaaattactcgccattgtcgtgtcaaagcttcgcatcccatattcttcaaatgagctgatttcctctcattcctttgctcagatttatccagagcaacctactgcctccacaatagctaaatcgatagagattctgactaaagatatggacttcctcctccagaaacatgcgccgaagtgcatacaccatttacttcgtttcactgcactggaagatgatttactgaacataagcaatattt

SEQ ID NO: 333689 - DNA, 466 bp, Homo Sapiens
tggtttgtcctgtttgtgaaacttgcctgctctcccttgtgaaacttgctggccccacacatcccaagtgtcacccaaaggaatttggagacaaaatcattctggagaagttaccagatggggcatatctcacctgcctgttttttcctggggagaggggggcaagtggaggcagggagactccactggctcgctggagttgccattgcgggaggacagagaactcagatgtacctgccagcttacctttcctgaccagcacgaaaggcccccagcccaaaagtaccagccttggccctatgtcagccagggctgtcaccccaacacaaccatttgggagatttcctgagtattttagggaaaaggaactttcaggcagttcacttctacaaagagctgaataaatgggtgtagttatccccataacaacattctctgcactcaccccgcccatgagttttcttga

SEQ ID NO: 333690 - DNA, 490 bp, Homo Sapiens
ctagaactctttgctttctagtaaagctgcaaccacaatgttctctctcttaatgccaccataaaaaatcaaaacactttaaaacaaattgatgtactctttaatacagtcaccacatcatcacaggacccttgcaccctgcatggtgacaaccgtagggatgcataccacacatctctttctttgttgcctgcttcaatgcttaaagaaaaatcgagagagagtgtgtgtctctcaattgagatatgggcacctttgattgacaggacctaatcagcttatctccacactaataaagttggggcctgtggagctggtatatgcccagcaccaagtgaatttttactagccaaagctgcacaggccaggtctcaggctctgcttctctaaactggttcagatcaattcttaatgggctattttcatcttgataaacctctatagtcttcattcatgatagcattagaggctatttagctggatgaattgc

SEQ ID NO: 333691 - DNA, 497 bp, Homo Sapiens
taatacaggatttaataagttgtcttaatatttctgataaatattcagatgattactttgaagtattttgaaataaagatactttccatatttcataaagctacttttaatatattaacatttattgctcttgagttcaaggtatatcttattctagccaccaaaacatttagaaaatagaaaaaaaggtaaaaactaatttttttatctcttatatttcagacacttaatacccttaccccattcactgaatccaatttcattgctatttccttgttttgtccttttgagtggttcgggatctgcttcaaatgacaaagagatgtgagtaatagggttcaacgtctttcttattttcagatttaaagctcttcaatgatgtagctcaaaatgaaagttctttcaatccaacaactttgcagagatgctgatccctctcccaggtgaatcctggccaggcctttctgacaatcctgggataccctggggccagtata

SEQ ID NO: 333692 - DNA, 783 bp, Homo Sapiens
  misc_feature (45)..(45): n is a, c, g, or t
cccaaccaccaaaacaacccatttgcatgtcggcgacacgcctgngtctcgggctccctttctggggctgtcctcccaggcggctcccaggtcctcatccagggaagagcccagcctcggccagaagccaccgcggcctccagttccgcaccgtgacaacctgggacccagcctttcagaaaggccaccaggaactgtttttaaagcatagggctgcactaggaggaagttttcccttgaggctgagagttatttcttgtggagaaatttcattttattgcctagtcccttcaggaacttattgacaccgctgtgctctccactggggagtgtttccagatactcttgggctcggacctcaaacagacctttggcatcctgccggcgcagctcccgctcctggatgaagccccgaaacatctgagtctccatgaagacctccaggaagtggcggaggctcttggaggagacagctttgcggaaggcctcccgctgcagggttctctcctcacgctcgcccgacgtcaggaacaaagagtagtgtcccacaatctccacgaagaagcggacaaaggcttcagacaccacctcgttcaaggggctggactctggaccgtgcctgccgtctaggggcccttcgtcctgctcacaagccagctcgttcctctgttccagaatgtgttccagggccacctgaagcttccggggcaggatggagtcctcatcgtccatctgtctgaggaaccggctgttgacgaggtcaaccacaaggacctcttccag

SEQ ID NO: 333693 - DNA, 827 bp, Homo Sapiens
aaactgaaaatgctgtgttgcatgagggcaaaatctctcagtgttttgcttttcttgaatactgctataactttttggtgggtcttcaggaaacccacttttttcgagtgatctttctatacccgagggaatagagcttaagctggctgcctttcggaaagaaaaaacatcagttttttcctggaatgttatttcgcttgtgttgacatcatctaaatgtttcttcctctttgcgcaatatggagtgctgtctttttctgaaatcctttcatccagttcactaacttttacttctgtttcactgtctttagcaggagaagtgttcacacagtcagaccaactgcttacagcactcggcagaagtttctgtttaacgctgtcagctacaacttctgtcttcttttgctgaataccatctcccagtgcagagtttagggtaacagattcctgctgtaccagtcccctggataaaggagctggctgttcttttgaaggctgactgctgctcttcttcttgccttcattttcattgtttgccccaactgactctttgtcacctccagtttttttgatcggttttcttctgaaatattttcttccaggagagtatttttcagggttcaaaggagttttggcaggatctacatattgttcttctttctcagctcttacacatccacagacattccccatttgatttgtaggagatcacagctccatagattcactcatttcaaaatccagagcttacttagatcctctccattaagtctgaaaattccactctgacatctgttccacacagactttatgaccatcctcttcag

SEQ ID NO: 333694 - DNA, 771 bp, Homo Sapiens
agatacattttaacagctttaagaatctccttcccaggctgtctggcttcttagaaggcatgtgataatctgtttcagtgagaggaaagagaaaaaccacagataagcgcataccacaattggtctcatccagtcctttagcagaagtggagaataggagtttttgaagaagcgaaacaaacagctctctgaggcctggacgcttgttccatcttcagcacctctgacacagcaaaagatgtctagccgatttttctgaggggacagagggaaacaaaggttatacccgctagctgcttcctctagattctagactcaaattaaatagactataatcctggcaccaacttacctcttgacgtttaatgtctaaccccaagagactcacgaaacaggtaatctgcagaagaaagtcaatgaagactgccaatcccgcaaagagagagaaggtgtgcacggctggcatcacggacaatgctcctgtcggggagagaagggctctgcgtcacttctgtttacagccgggggctctctgcaggtcttatgttcatgtgcatgtacagatacaaggagccagcacaggccaaacgcatgagaaggcatgctgcggctggacattacaccagaagtgggacaggaggtgataagccagtgcttttcaaagcacactcagcaccagaccatttgggaagccccatcctagttatgacaggaattcaaccccaattctactatactcaggttcacagcaaattcacacacattaaaatt

SEQ ID NO: 333695 - DNA, 415 bp, Homo Sapiens
aaaaaagcccaagaattgaacactctaaaatgtgaaaacagcaatctgagatggagagaccaatgataagtggaattgtaaggaaactgagtatatagcacagttaaaatctgataggaagcagtaaaacatagaattaatactgtaggaaatggaaccattgacataaaggatgatattggaagttctcacaaaatactgagaaaaaaggaaaaaagatttataaaatggtgagaaactgacaaacatgaaggataaagaatagaaatctggcctaagaaattgatgatcttgaggccgggtgcagtggcttacacctgtgatcccagcattttggaggtcaaggcagggggattgcttaagcccaggagtttgaaaccagcctggacaacacggtgagaccctgtctctaaat

SEQ ID NO: 333696 - DNA, 717 bp, Homo Sapiens
agatttctgtttaacctgtgcagttgtgggtatgtggtggggaaaggggtcattcttttgacagagtcctacacgccacttgaccctgcactctgaaaacatggtttccagccagtctgggctgctcccccgtgcagttctcaggctcgtgatcgagaaggcaggtgcagcactcagctgccaggagtggggcctgccagaaacaagagtcacagagatgtgcaacagccatgagcaagctttactgcttatttcatacaggatggggagccacacccacttcctgggacatcacacccgtactgaagtccaaaaacatcatccctcccgtctttccactgacaagtccccatcccctacaagccccaaggaacctgaaagtgctgctggcagccgccagcatgacgaatccacagccttaaagcccacctgcctcactgtcgcccttccatttagctcggcctcatccttgacctctgtcccccaccttgaggaaactcgaggacttcttcccaggcagctgctccaggacacattccagttggggatgtctccccttattccctctgggtgcagaccatctctaagacttgtttccagatgccatcagcatctcctctccttgcctaccttttctctgttctcggggcgagttcctcactgactcccaggtcctgcccaactaaagcacctgggcctgtcatctatggggcctct

SEQ ID NO: 333697 - DNA, 623 bp, Homo Sapiens
  misc_feature (483)..(567): n is a, c, g, or t
agcacgagccattgtgcccagcctggcacttaatttgtgaaagccacaccatttctaacaggaacataaaaataccaggtcatttcataagccccagacttgggcaactccactcactaacttgcagcgtgctacctcaaagccagtgtggcacgaggcttcaagcacagcactggggctgcgctgacagatcctggttcaaatcccagctcccagcccttagaccttacagtgacctaagtgcaccaagactccctcaatgtgttctgctgcagccagtgagtcagtgcacgtgcccggcccatgagctaactgaactcatggcttctgaatctgaatgtctctaaatatcagacaaagctgtatgaaaaaagcccccaagactctgaaaccagatgggatgccagttataaaacttgtctttaaagttacccatcctggtgaatgaagcatcaagaagctactgcagctcgtgtctgattnnnnnnnnnnnnnnnnnnnnnnnnnnnnnnnnnnnnnnnnnnnnnnnnnnnnnnnnnnnnnnnnnnnnnnnnnnnnnnnnnnnnncgagacctcatctctaccaagaataaaaaattaagtggacctggtggtgcacgcct

SEQ ID NO: 333698 - DNA, 498 bp, Homo Sapiens
agaagttcagccgaacccacaccccaactccctcccaagaacttcggtgcctaaagcctcctgttccacctcaggttttcacaggtgctcccaccccagttgaggctcccacccacagggctgtctgtcacaaacccacctctgttgggagctattgagccacctgggatgagatgacacaaggcactcctaccactgagcgcctttgccaggtccagcctgggctcaggttccaagactcagctgcctaatcccagggttgagccttgtgctcgtggcggaccccaaaccactgccctcctgggtaccagccctcagtgtggaggctgagctggtgcctggccccagtcttatctgtgcctttactgctttgcgcatctcagatgctaacttggttctttttccagaagcctttgtattggttaaaaattattttccattgcagaagcagctggactatgcaaaaagtatttatatgtcccgttccccaactctact

SEQ ID NO: 333699 - DNA, 919 bp, Homo Sapiens
  misc_feature (674)..(762): n is a, c, g, or t
  misc_feature (765)..(789): n is a, c, g, or t
  misc_feature (814)..(876): n is a, c, g, or t
atgctgaggttcttataagtacattacatgagcacaggtgctatgaatgaagccaactggtttaacgagcttggctacatctgggtcatgtggttgggtgaaaagcctagaaaataaagattccctttctttatttgactataaaatgcaaactaagaaaagtctgactcatgaaaaatactgtgtagttatatgacagagatctagactatcctaactgtatcagcatttctctcaatatgttctgcactctcagatgttaatcgatatccaagcctaaataagtttggaaaatttatcacataaacaggttatgttacttctgaacttttcggtggctttaatatgtacatgtgcattgtgagttagtctcattgattaacttaagtgtaagaaatattaataacgttagtatgcaacaataaagtattgctttattattgtattcagtgtacatggaatattgagattccatgtagcatgtcatataagagaagaattttgtcacaaaaccttagggatgtagattatcatttgttcaacaagcaaatatcctggaatttaaggaagcttttgactttcattgatagggtgtttgggtcagtgatcagcacttaaaagtgcgtcagcaatcaacatataaaagcgcatgggccagacatggtcactcactnnnnnnnnnnnnnnnnnnnnnnnnnnnnnnnnnnnnnnnnnnnnnnnnnnnnnnnnnnnnnnnnnnnnnnnnnnnnnnnnnnnnnnnnnttnnnnnnnnnnnnnnnnnnnnnnnnnttgactgggaatggtggcacgcacnnnnnnnnnnnnnnnnnnnnnnnnnnnnnnnnnnnnnnnnnnnnnnnnnnnnnnnnnnnnnnntgcagtgagctatgacagagcaagaccctgtctctcttaaaga

SEQ ID NO: 333700 - DNA, 555 bp, Homo Sapiens
ttttgaacacttacatccatttatttgggaaattgcttcacctgtaaactcacaactgataaggcacattattgcaaaactgtcggggtggagggagggaggcaactctaaggatcctgaaaaggggcaaagggcacacacttgcgatgatgtggaaaacatgtttctccttccctccccctactccagaacaccaaaggccacagtcttcaaagtctgctgcctccttcccccactctcgttatcaaggcttcttttaaagaaacaccgttttaaacaatgaaatcctcggtgtgaaaggatcataccataaccaaaaaccatcacctggggatgcactcttcctatggaacgtgagtaattcccaagaattcatgtagaacaagaggcatagattaaagtcttggcaagactcttggccaaaccaaatcatcaacccagcagatgatgcccaaaagcagcagtctggtaagtcctgatgagttactcctgtggggtgcaggatcacagggctggtcagtttaggtgccaaggtccttctgtctttggaagcat

SEQ ID NO: 333701 - DNA, 412 bp, Homo Sapiens
  misc_feature (66)..(66): n is a, c, g, or t
  misc_feature (203)..(221): n is a, c, g, or t
  misc_feature (236)..(296): n is a, c, g, or t
ttggaaggatgtaccaggtccatgacggtgttacgtctggggaaggggagatggagggcgtggcanggtggtaatcaaagagtcctttagtttggaagcaaatatgactaccaatgctaacaattaacataagttaattctacatatagagaagatatgggtgtaggctgcctttgtacttttctatatttttccatttcttnnnnnnnnnnnnnnnnnnnctttaacaacttcannnnnnnnnnnnnnnnnnnnnnnnnnnnnnnnnnnnnnnnnnnnnnnnnnnnnnnnnnnnnttaagacaccgagatatctgccactatcataaactgtgctataatgaacatctgtgtagttatttttgcacatttttaaaaaaggataaattccagctgggttccgtggctcacgc

SEQ ID NO: 333702 - DNA, 732 bp, Homo Sapiens
gcttcctcccctttttagttgatgctatgggattccctgtcctgccttttcctgttttccatacctatcggggcaaacaaaatttggccaggtagatgggtcccagttctgtaaataacttgaatccagttgtcttgtataggtcattttatttaatatgtttttgggtatatgtacatgtattgtgatgtgtgttacatctagcgtgctgtcaaactggcttatagataaaagaacactcatacattcaacaaataagactactgaaagcttattagtttgaagagaatcttgtatcttctaaaatttaactttaggatttttacctaggtaagtcactgatgttcataggctttaaaatggttaaaatggctttaaatggtgaccagctttgcatggtaccttggttctcggtgatctagataaagttaaaagtgaaataattaaatacacgtaaatgggatatgcttaatgtgtggtttaaaatcataaaatggtagaatggttctcagctatagaatgacaatgtctagtgtgaagttcatgacttcttccttcctaggtttccataaaatgtgctaaagaaatgtattctttattgagaaaaaattttttgtctaatccggaagttactaaatgggaggttcaaaacatgagtgaaccagtgagtagaaaagagagatgtaaagaatattatgaatagaaaatgtattttttgtttgttttgcaagg

SEQ ID NO: 333703 - DNA, 645 bp, Homo Sapiens
ggtaatataaagtttgttctgttgaaaactgattaacattttaaacagggggaaagaaaagcggtctactagattaaattttaaaaggattttgttatttgctatacaaatatacatttcaacttttacaacattcactccagtctgacctccttgtctatagaagactaagagatcaacatttccagtctctgacttcaaggacattattacggatacacaatgccctctgaaagcttttgcaaatgacagaaaatactgaagatgaccagaggctcaggtgttaaggatgcattttccatgttttccaacagcacacaaactccttacaaaaaacaagcttatctagatggtcccacgagctggtcatcttcagtttacaatatgctgtggctgctggcccatgtcactgggctttcctataaaagctttcttttcttggaactgctgtcctcctgctccagtgtcctcttgtcccacctagagttcctcctggtgtgatgggtctcggaaccacacttctcctgctccccttcactgaaagccctggcctctctcctgtgacagagctcctcttccgggtcatcacatttgctctgacacgtggaagcctcgggactggcagctggaggttcgccccgcacg

SEQ ID NO: 333704 - DNA, 150 bp, Homo Sapiens
ttttttaatcagatatatatttttcaaatattttctcctagactatagattgtctcttcatcttaacagatcttttgaagacccaaagttttaaatttagattaagttaaaaaaatttcttaaactaaaaaattatttagtttctatgct

SEQ ID NO: 333705 - DNA, 613 bp, Homo Sapiens
ggtagagaaggggtctcactgtgttgccaaggcaagttatccatgttctgattttggttctgctttccctgctagcgttacgaccatgggcaagaaacctggcaagttacagtctggccctctaaagtggagtatgttggatttttgcgtataaccctttatcttctaaactgtgtgcttaagcttccttttcttgcagtttaacactctggctagtcctaacctgctaaactcaacgcaaatgctgaggtgctccagccaactggtggttgaagaccagaatgagtagtctaccaaaggcaactgagtgctacagggttaaggcccaagccttctaggtactctggcccagaaaccacccacacatagtttaagctgccagccactggggaccatgctagtgcctggggatacagaactagtcagagctgcttgttatggaaaccacaatgtggttgtcagaggggaatccagcctaagatacctggagggcaccaggagaactgaacttgactctgcttaaggtggcaaatgcaggaaagcttaggaaacaagtataaatggtttattttcacaaatcagtgaaccaaactgatgtgtgatgataccagtt

SEQ ID NO: 333706 - DNA, 578 bp, Homo Sapiens
ttaatgccagtaccatgttattttaggttttaaagctttgtagtaaattttgaagtctggtagtgtgatgcttccagccttgttctttttgctcagggttgctttggctatttggggcttttatggttctgtatatattttagaatgatgccctttgtgtttgatccacaaaaagggagacatccagagctggagagttttccctgagaattttgtcaagagctagaagagaaaggggaagaagtacatgaacaactgcatatggtgatattcactcttaagtctgctatacagaaatttaaggggtggggggcggtggttatagtgtggagccaggaacccaaggaagcctatccatagttccacatcgctgatgtaattcttagtatatggacacttgaacaattcaatatattaataagtctaaatttctatctggacaagggtctggggtaaggagctgggggtattttgtttccttatatgttgcgggaagtcagggaccccaaatggagggaccggctggagccgtggcagaggaacataaattgtgaagatttcatggacatttatcagtt

SEQ ID NO: 333707 - DNA, 335 bp, Homo Sapiens
aatggttacatactgaaatagtagtttgggtatattgggttgaatcaaatatattattaaaatgaattttacccatttctttttactttttaaatgtactgttggaaaatttaactttacatacggggctcacatttgaagctcacattgtatttgcgtggggcagcattgggctggagtatgctggagaagcatctgtttatcacccctctttgctttagtgtaatctcttcactgtgactggaaaggcccagaaccctgcccctcccgacacagcacatacacacattgacgttttgctactacagcatatagcctttgctgggaccctctcc

SEQ ID NO: 333708 - DNA, 322 bp, Homo Sapiens
agtataggtttttagtccattactaaacttaaagactctttgaagtttgaatcttcgtcagagatttctttttatttttaaaaccttcagaacagtgtctggcacatggtacataattagtggagagaagtgcattagaaagctccaatccagaaatctgtatgatgatggggaagctggacagccctttgttgtagtctagtctttcatcaagcgtctatcaggacccacttgttgagttgtgaaagaaattgagtgagccaatgctgggaatttttaaataatagaatagaaaatatctgccaggcatgatgatggctca

SEQ ID NO: 333709 - DNA, 410 bp, Homo Sapiens
ttcaaagaaaatgttttaatgtatgattttaatatattcacctttatcccaatgccgttggaaagtataattttttaaatggaggatggggcaccagatcttatgtggctctgcccacctgaccttcaggtccgcaggcctgtgtccttgccaggaatgaatgtctctgggatgcttctctaacaggaggaacctggagtgagaccagtaacctggagaactagcagctgggtgactggaaaggaaaccatctggggtggggttgggtctgcaaggcaggcggtgtctgggcagagaaagcagggctggggcggagggtcctgcctcatcccattctcctgctcactctttcctagatccctgtcaggtcagtaaccatgagcaaggcttgaggctacttcttataaaca

SEQ ID NO: 333710 - DNA, 305 bp, Homo Sapiens
tcattctttccctggagaacgcctgcggccccaaagccaggcctactgatttccagtgaggccacaaatcccctccctggttagcaattcagttttcaccgccttgggggagagggcctgcccttccttgaggggaagaacctggaaggctcggctcagtgtcttctcttggaagagaagagtgtgcatgcagaagggtgtagaaattgctagacgtgtttcatcttcttgacaaaatgacattgtaagatgtgtgtatatgtttttaaaaatattacataggggctgaacatggtggcccactc

SEQ ID NO: 333711 - DNA, 443 bp, Homo Sapiens
ctcatacccataatacgtttatgctgttgaatagttataccttttaccccaaagtgaactttattacatagacatttttattacatacagtttaatgcttttcctcataaacatccactgagtacttactgtgtcaaaaactttcaaaattttaatatataagatgaacacagctatgatcccgacttccaaagatttcagagtactctcacagattcattaataaattaggaccttcagcttgttttctctttattgatcaataccatgaatccttcatctgcacatacctgacttcttttcttcattgttgtctctctcaccattatcacggtgcacaaattcatccccgtcactttctccatctgatttgtcggtgtcactgtcatcagtactgtcatcatgcttatcttgatccatgtcctcaggatagccatcatctt

SEQ ID NO: 333712 - DNA, 638 bp, Homo Sapiens
tagatattatagatatagatgtttattttaaggaattggcacacatgattgtggggactcagtttctgcttgagtccaaaggcaacctgctggcagaattccttccttctctggggaggtcagtctttgatttatgaaggccttcaaccgattgatgaggcccgtccatattatggaaagtaatctgctttacttaaaatccactggttaaaatgttaatctcatccaaaaacaccttcaccaaaacatccagaataacgtttaaccaaatatctgggtaccacagcccagccaagttgtcaaataaaataaccatcacagttgcctatttctttacatcacagtctcaaagtcgtaggagatctatatggtgaaatagctcaaccctcctccagatgcagctgcaatgcctggcaaagagaaagcatttagcaaatatatgctgatttgaattgaactgaatgtatatgaatttaattaaatatccctagtggtggctaggttctgccaggcttccagtgcggtgctgggaggtaatggaagatagaagttaggcacaggctctggagtcagataggtccatatactgaggctcccctacttaccttatatgtacctttggatgaataacttaattt

SEQ ID NO: 333713 - DNA, 896 bp, Homo Sapiens
  misc_feature (153)..(166): n is a, c, g, or t
  misc_feature (495)..(508): n is a, c, g, or t
ttttctggacagtttgctttatgtgttcagacaatcaaggctcgccttccaggcacagcccagtgctctggatggcatcagcacaggctcccctgccccggccttgaagcatggctgtgtgcacgattcatacccatgcttggcagacgggtnnnnnnnnnnnnnncgcacagagaccacaagagtatggcagcacctgctgtggtggtgcctgggaacagcaagacacagcgaggctccccaacctttaggggaacacatgtgcacgaagctttggttcacaggcgcatctggctggctaagggcaacagtcacagtcaaatgactattcacagctgcagacaggaggcaagacagaagcaagtgtctaattatagcaatttgagttgagggtttcttttttaaaggtcaacagaagccaaccttggtcacacaggtagtgagggaaggatatgttgtgggcggcccacaggccaacattgttttcctgacagnnnnnnnnnnnnnngcgccatcagtaccgcctgtagggggcatggtgggggacagacacggcagaacgctggactcttgcttcagatggcgcaccacaagcacacggcacttctgcacaggtgccagtccaccaccagggccagcctttgagcacaccctggtgcctcagactccggcaggaacacatttccatcgcacacccgacccataggggccaccagtcgagaagcaagctgggcagccaggcagctgcctttgacatccagagaaaccgctgtcacaggcaacagctctggatcaagaatgggctacactgaaggcccttgcttcctgtttcaacaagtccacttgctaaaatgcatgattccaaatctaccttctactctcactgtgaaagtctt

SEQ ID NO: 333714 - DNA, 301 bp, Homo Sapiens
gaccctccccctttttaaaaaataaatcgctgacaagtgtgaatcccgtgaagactttattttgtgttgtgtgtatcctgtacagcaaggttggtccttcgtaacaacggatgaaatggttcccttttttaaagcgccctctctccctccaccctcagcgcccctgtccttggcatgttttgtatcagcgatcattctgaactgtacatatttatgttgcgagaggcaaagggcaagttttggattttgcttcttccaagtttgtttttaaacgacaaataaaaaaagaacattttaaata

SEQ ID NO: 333715 - DNA, 344 bp, Homo Sapiens
gggagagtactacatcaaggggtacatcccgtgggacaaaagaatctgaacaacagccttcagtcctaggccttccttcagacagcctacccaaatgagaaggaaccggaaaaacaaccctagtaatatgacaaaacaaggctcttcaacaccccctcaaaatcatactagttcaccagcaatgggtccaaccaagaagaaattcctgatttacctaaaaaagaattcaggaggttagttattaagccaatcagggaaggactggagaaaggcaaagcccagtgcaagggaaaaaaatgattcaggaaatgaacggagaaatattcatgggaatagacagctta

SEQ ID NO: 333716 - DNA, 439 bp, Homo Sapiens
tttaaacttggctaagttgccctttattaacgaaaacatagagctttcggtcaattccaccacggagaacacaaaccagagataaaacccacaccaagggctatttcccaagctggggaatttgagaacacacgggcagagttcacgccacacaactacactgggctcgtccttgggaggcgttcacaggaagcaatcacgagcgccaagcacccacaaggcagtgcggcaaggctcccgggatccttacaggcatccaagcgaggtacagaaacctccacagcagtggggataaggggaaaatattttctcttgctaaagaatatccttagttctcaacataaacatgactacgtatatattcagcttcaaatgaaaaacaagtttacaaatcactactggatacttaaactctatgttgcttttctttttggcagca

SEQ ID NO: 333717 - DNA, 640 bp, Homo Sapiens
tccttggtgggtcctgaactccaacttttatctcattaatatgacactgccaaaacctgctgcttttcatagcctttctgcatagcttaactcagcagatgcctcaaggggaaagtgttccttttctgtgtctcccttctacatgatatcttggccccttcagttccagctgccttgacaacctcagtctccatttcttgtctctccagctgaagactctgctgcctttgctgcctcttagctatggccgtctgcccaaatgctcggcctcttagctaaaatcagcacgtttcctgaagggaaaagtagttcacagagggccagcttgcctccttgtgttttttcttcttttgagattatgacccttcaaatgtttgttaactgggaagctttccaaaaacttttttaaaaagttttctgtgttttattcagcctttccagttgttcttggaatgagtgttggtctgcctcaagcagaaaaaaaattctcagaattcttttctcagaaaaaggattctcagcagagagtgattttatacagggaatgggattaaacaattcttgggaaagctggtgaagccaacgagggaacagttacttttatcagtgtgcaatttttttgctataatggtgcataaca

SEQ ID NO: 333718 - DNA, 501 bp, Homo Sapiens
  misc_feature (454)..(454): n is a, c, g, or t
caactttgaccccttcccatctttccctcaccccgtacattactcacggtattttaagaagggaagaaaaattatatcccaagaaaaatgttgccctctgccttcttctctctggctctgaaatagtaaccgtggtgcccaccaaggtttctcaaagcaggctattgaccttgcccgagctgacaaattgttcacctgtactccatctcccaacaatgccagatgacagctcactctatgatattattattatagttggcactaaaccaaatagataattgattcattctctgttcaccaaaagctgaaatcctaccccagcaacaatctgacaagaatattggcatcacagatgagttgagacgttattttctagatcagggcttctcagactttaatgcacacaagaaacacctgaggatcttgtgacactgcagcttcttgttcagtaggntcgcagcaagcctgacatcatgcatatctaacaagcactcaggcgag

SEQ ID NO: 333719 - DNA, 490 bp, Homo Sapiens
ctctagtctgggcaagggagaacgagcaagagcaataggtttgtaaatggccaagggggacaggcagagggcacaagcaggaaaatgcaaggaggagagataacatgagcctccaaggggtagccatgctggctctgaaaaccgtgagtgtgtgtgcacaagtggctctgtgtacactgcagttcccagctcaccccacactcattgaggatgatcctgtttactattttgccctgcagacctttccccatggccacagtccctactcacccatttcttgacatcaaagggttgaggggttgagttcttggagtaagaaaatggaaggaagtggaggagttggcactggaggtggggtgtgggctgcaaaggattcaaagctaagcagaagggattggtgagggaataagctcttgtttaactttcacgtgacacctcctccaggcagcctttctggatttcacccatttcattatcagaaggaaaacag

SEQ ID NO: 333720 - DNA, 435 bp, Homo Sapiens
ggaccaagaccatatatcactttaataacagaactccttggaccagttcacagaactgtcatttaaaaccaatgtcctagaccaactccaaccttcttgttttccagtgtacccaccccacacagggccagccacagccaggtgagaacaggaaggggagtggagagggagagtggagagggtcctgactcccataggcttcatctgggctggcccagccttgaccccatctgcccaggagcctctcagccatggagtcctctagggaggcacttagcccacctagagcacaggaaaaaggtgggacggggggcaccttccagcaccctcccaaaagactcacacaggggcagggaggggagagggcagaagggcaggcttcctgctgcttctagcagcctcttcatctccagctcctaccttttttcttcccct

SEQ ID NO: 333721 - DNA, 385 bp, Homo Sapiens
gatttaaacttctttattaacagaatatatgttcaaacaaagcttaaagtcccattttctttccattggcgtctaggcccctattactcaactatccgttggttagggcctgcacctcaaggtaggcttaattgtaaatcaaaatatttactatccacacttagagggctatctgtaacatcgtttttatttatccccgtccattcgataatcgtctgaaatgcaagacattaagttgaacatcatccagctttctccctgtttttctaagcgcgatccaaatctgttacaacagggtagtctctcattctcttggtagctcaattctaccccctggccgacttaagaaattttggagtctaatacacccacctcatctttagtt

SEQ ID NO: 333722 - DNA, 855 bp, Homo Sapiens
  misc_feature (246)..(246): n is a, c, g, or t
tgggaaagccttttgtcacaggtcacacctcatccgacaccagcggatccacactgggaagaaaccatacaaatgcgatgagtgcgggaaggccttcagccagagctccaacctcattgagcaccgcaagacccacactggcgagaagccctacaaatgccagaagtgtgggaaagccttcagccagagctcctccctcattgagcaccagcgcatccacaccggtgagaagccctacgagtgctntcagtgtggcaaggccttttgccacagctctgcgctgatccagcaccagagaatccacaccggcaagaagccctacacctgcgagtgtggcaaagccttccggcaccggtcagccctcattgagcactataaaacccacaccagagagaagccctacgtgtgcaatctgtgcggcaagtccttccgggggagctcgcacctgattcgccatcagaagattcattctggggagaagctatagaaagaggagcccacacaaagcttgaaagcctgtgccagatggagcctttattccacgtcgcgtggtctccaagaccccacctacctccctgatgctgaatggaaaccttcccacctaagcgctcttgaacatcccactagcaggaaggccctgtgttgccctgggccaagcacgccagctctcagcaggttttctgcatggaagggaaggtggggtgatagggagggcagccagaaaagacagctggccttcagtttctccttcttgcatttgactcccaagcctacaggatttcattttgccctgtcttcacatttcccagaatctagaagaataaatgccaagagggagaaagttgaattaaaccc

SEQ ID NO: 333723 - DNA, 434 bp, Homo Sapiens
cttgggcttgtgtcatcagcagttgtgaagtccccattggggacttggtagcatggaaagccacacaaagatgtgctgcatctgtttttgtctgtgtgggtactttgttttcaataatattttgtctccttgcctaattttatttgtctatgcacatgtgtgcgtgtgtgtgctcgaatgcatgcgtgtatatgtgtttagggtctcttcccagtgatccgtaactcaccaaaaatcacctgtttttcccaaaattccctggagcagtaaattaccattcttaaagaaggatagagaaaggccaggtgcaatggctgacacctgtaatctcagtgctttgggaggctgcagcaggagactagcttgaggccagtagttcaaggctgtatgccacacctccagactgagcgacagggtgagaccctgtatcttaa

SEQ ID NO: 333724 - DNA, 511 bp, Homo Sapiens
ttttacatagagatgggtcttgctatgtcacccaggctagatgcagtggttattcacaggagcaatcattgcacactaaaatcccaaacacctgggctcaaaagcgcctcctgccatagcctcctaagtaggctgagtagctgagaatacacacatgggccaccatgcccagcctagaagctttcaattcagcaaccaacaggcacccatcatgggaccaggctaggctctgaagaagcaactaagacatgacccgaatcttcgaaactctcatcatttttagtggatcggtgggtagagaacatgtcacaagtggttataagcacttacattagcattgaaagaaacagattgtcttcaagaatgagtatctactttaagaggaaaagaaaatcagggtacaaaaactagttatttaaagtttgcccacctacagagacaagctgatagatgttgataactagaccttcagcacctataccagttaaacattatggtgtccctatttaat

SEQ ID NO: 333725 - DNA, 340 bp, Homo Sapiens
tttgtgtgacagcaagcccacgctcctcagccactagttttgtgtaaaattgttgttctctttccccgtctcctgcttaaggaaagatatattgtttcctggaaaaacaaaaatgttagcatatagtttgcaaactacaacttattatttggttatgcaggtgtgtgtgtgttgtataaacattatatatatttcacttggatatattccacttgataggaactgctttgtttttgaatgaatatatgagaaaggaaaatgcctgggtttttgtttgttaccccaatgtagcaacattatgaaaggtaaaatgctctttctttaacagcagcagcaaaaa

SEQ ID NO: 333726 - DNA, 525 bp, Homo Sapiens
ttaaggctaatatttctgtgttggcaaaatttgagagtaaattcggtcttgaatggaatggattgtcttgactcacacattgcggacgagagcccgtcctgaagaaaggtgttgctgtggtggcgatcttcccacgagggtccttgcctgcttctcctaggggatggttgctgggtgccctgggctactggggagagcgtacggggctggagaagatggccattcctgggctgtttcctagggaatgagttgtacatctcatggctggattttgtaaaatcagtttttaaaataccgcatatatctgttttcttactggaacacctttttcttggtctgttgtgcacagcccaggtttggggggtactggtcattgactgtttcacgacagccgctgtgtttggggcactgccctggcggcttcagaggtgtgtgtgggttgaagggcaggcagctctgcaatagacctcaccttggactaacacctgagggctgcctcgccaggaaggattcaggggctcaacc

SEQ ID NO: 333727 - DNA, 445 bp, Homo Sapiens
  misc_feature (362)..(378): n is a, c, g, or t
agtctacttagaggtattattactaattttatttaccacataaacaactactggtttcattaatttttctctagttttttctgtcactgacttttgctttcatctttaatatttcctcttttctatctacttgtagggtttaacatgttctttttattctagttataactggaagcctagatgattcactttagacattttttcttttctaatataaacatttaaaactacatatttccttctaagaacaactctagtggaaccccacaaatttcattaagttacggtttcattttatttctgttcaaagtagcttcgaatatcccttgtgacaacttctttgatcaatgggttaagtttannnnnnnnnnnnnnnnnactatttgggaaatttttcctccagatatttgaagatcttgttttgatttctaatagaattctaatg

SEQ ID NO: 333728 - DNA, 745 bp, Homo Sapiens
  misc_feature (484)..(484): n is a, c, g, or t
tttcacttcaccgcctgcttttcccctgcatccgcctgtattgaattacagcccctcaaactacagcccagcctgcagcccactatcatgtgctattcctcctgcctttaatgtcctccctgcctcatctgcctgccagactcctatgcattctgcaagcttcagctcagttctaacgttctccgggagttctcaccatcgttttctccaggccaattccagctgagttagctactctctctttattgccatgatcatgattctctctgttttcttctatttttctatctagcttcacattgcaataaacattagaggaacttatgccctttttaatctatcttttcttctactacagctataaatccatgagaatgaggactatttttcacttctttttctgtctttaggggttacatcgtgtccatcatacaatgaaaacctagttcctgataagaaattaaagattaggtatcattcttcntgacttccaaaggagtattctttgtaatacgcttacaataataatggacccaattggttaaaggagggggaggtatattaacaaagtaagtaatctgcaaaaaataagatagctcttcacactatacagaaatataactgtacaactctctcatgatttcaaagaccctgtaactggaactgtgtttcaataacagaaataattcttatttaagtgtctcctaagaattaagttattcattcaagtatgtatatgtgtcaa

SEQ ID NO: 333729 - DNA, 536 bp, Homo Sapiens
  misc_feature (116)..(124): n is a, c, g, or t
aaagctaaattcaaagagaagttgtttctgtattatagcaaggaaaactcacatggaaagattgattccttggcttaaaaatccatagagcctgattatattatttggagtttagnnnnnnnnngatttatgtctatgtgatggtgtcttagggctcccccaaaagcagatcctgagaaaaggctgcgggtcgtttatttgagaagtagtcccaggcctgtttgagggtgcatgaatgagcaagttacctcttggacatccagggcatggtcctgctggaaccctttgaggcactccatggcacacacctcagaagtgacacaactggggacagcgaggtggagcatttatctatcaactcccgtccctccttggctgagggttgagcacagaatcaactccacgtccaaacttcttacaggatacacctgtattcagcctagctcctagagggaaatgttcaggcaagaaattcagcctgcctgggactagcctcagctgcagacaagtgcaggtgggctgagggcatagtggtc

SEQ ID NO: 333730 - DNA, 463 bp, Homo Sapiens
ctataggaactgtggcataaggaatcttgttctaagctactgtcttttggtgtcatttgttatccagccatggataactgatagacttcttcatccacatctgctacctgtagtcaaccaaagcagttttatacaaaggtactattttctggctttttattccaaccagatttcacaatttttttgagtgtgggtgtagaggatggtgaaatatccatggaatagaagattgttgaataagaaagtcagaggtagcaaggaaaatgtgtatttagttcaaaaaaatcctatcaacctagttgtatgtgttgataataaagatctctctgtctttcccagcaattcggatcaaccttgttaaggttgaacagagacagacccaggtgtttgaatggttcatatttgtgttttactcctaagggtgaagcacctgtaatttttagggcttaagatatcatcaaga

SEQ ID NO: 333731 - DNA, 543 bp, Homo Sapiens
agcctcgtcgacttaagccatgtaactgacaatctaattttaggagcatttgttactgagccacagataataccagagcgtcccctttcaaataaattcacgcgtaaaaggtgacctacatcaggccttcatcgtgaggattttatcaagaacgccagttttggcggttcaaaagactcctgaaatgataaattcggggaactatccaaccggagcagaatggtcaagtgatgaatattactaatagtggtcatgagaataaaacaaaaggtgattctattcggaatgagaaaaatcctaacccaatagaatcactcgaaaaagaatctgctttcaaaacgaaagctgaacctataagcagcagtataagcaatatggaactcgaattaaatatccacaattcaaaagcacctaaaaagaataggctgaggaggaagtcttctaccatgcatattcatgcgcttgaactagtagtcagtagaaatgtaagcccacctaattgtactgaattgcaaattgatagttgttctagcagtgaagaga

SEQ ID NO: 333732 - DNA, 668 bp, Homo Sapiens
  misc_feature (604)..(604): n is a, c, g, or t
  misc_feature (657)..(657): n is a, c, g, or t
atagtaagaacccaattttatttagaaaccagcaagcagcgtatgcagttaagaacccaattttattacaatttgtacataaatgcccaggaaaagttggaaggtgctacattaaggtgttaagagtcgccatgggggtggctgatgtgagaatttaaggtgttttctctttaggataaaatatcctaccgcccccaggagtgaccacgtgaggctgcataatggccgtctctgtgtctgcagtgatgtctgcagtgacgaacgcccggggtggtgagctctaatggccttctctgtgtctgcagtgatgtctgcagtgacgaacgcccggggtggtgagctctaatggccgtctctgtgtctgcagtgatgtctgcagtgacgaacgcccggggtggtgagctctcgactttagagagagaattgcatcctcctgagtacaagggcgcagtctgtgtttaatgcacagggcactgctctctggagttttcaggaccctgccactggtgaagggggtgccgggcatgggggtcggctgatgaggccctccttgctgccgagtcagggagcctctgcatgctgacgaggtttggagaatcgaaantggctccgtgggcagtttcctaaaatgtgcctcctcgagttgcccttcctccncgtgccgaatc

SEQ ID NO: 333733 - DNA, 458 bp, Homo Sapiens
  misc_feature (152)..(152): n is a, c, g, or t
acagaaccattaaatacaacttatacacaagcaagctgggcggcgtccggggggcagggagagtgcaagagggtcaggggtgagcagtccgggcccgttcctggagggggctgaggctgccgtcgtgggaggggcttggctggcggaggcgnggctgcctgtggaggccttgaagctttgccagcagctcctggatgaagtcctcgacaggtttcccacatgacttcaggagtccctggattttccggcttctctcctcttcactctctaactccaacaattcatcaatgttgatctcatcgggcatgtctgcctccatgccgcggtacagctcctccaggcgcccgtcgatccacttctccacgtccagccgccgctgcagctcccgccggtcatacttgacggtgacgcgcgcgtgcgcttctgcagcccccgggactgcccctggcccgcgggcc

SEQ ID NO: 333734 - DNA, 461 bp, Homo Sapiens
agcaggggatggtgaggcactaacatcacagggataatttatacaagatggatgatattgtagattcatttgcattgaagccaaatcctcaatctcttcttcatacatattgctgctaaattgtattactctaattccaagccagtactcttggcttttttgaaccatacaggaaggatttagatttattcctattacttatcaccctgttagattcatcaaccatttgcccctggccaaggatgttttccacttattgctgcagaatgcttctagtctctcccatgtttatgaaatccatgatttgctctttaggtactctaaatgctcacaaaccatctgaataatactttggggactgataccaaactttcagtctataatttacagcacacgtttccctttaacttgctcctgcttcccagaattccacactgatcataatcagtgattactgatat

SEQ ID NO: 333735 - DNA, 202 bp, Homo Sapiens
aaaatgtattttctgcttccaaagttaaatatatatatatacacattgacatcttttttacacactagatccaagttgatagcgcttccaggcacctgcgagatgccaactcagatcatccctggtggaatatacctcaaccctggcttcaaagaattcttaaagatagattaccaccatatgtgagcttataatagtaacc

SEQ ID NO: 333736 - DNA, 870 bp, Homo Sapiens
  misc_feature (163)..(281): n is a, c, g, or t
  misc_feature (324)..(393): n is a, c, g, or t
agcagccatgactagctgaaatcagactgattccaaacacaaaacaacccccaagtgctcaacggccaccagacttccttgcttattgaagcccaaattttcctggagcataagatggttccttgggtcatcacgaaatggattcattccaattctttatttnnnnnnnnnnnnnnnnnnnnnnnnnnnnnnnnnnnnnnnnnnnnnnnnnnnnnnnnnnnnnnnnnnnnnnnnnnnnnnnnnnnnnnnnnnnnnnnnnnnnnnnnnnnnnnnnnnnnnnncttcctcagcctcccgccctgccctgccaggatgggacatacnnnnnnnnnnnnnnnnnnnnnnnnnnnnnnnnnnnnnnnnnnnnnnnnnnnnnnnnnnnnnnnnnnnnnngttgagaaccacggacttagatgacaaatagtttttatttacttttgctctaagtagttcttctaactttgaataaaatgtctcttacatcatgaactaaatgaaatttgacatgccaaggctattccaggaggctgaaagtttggaggcagtaattctctactggggctgtctgccttaggacaaaattcactttattttgctttaggcccagttctaaggtttcccactagaaacaaattgctttttataccacagttcttatacaattatacatttggtagaatttataaggtgacaattgccaagaaatacagcctgaacacaggtgcagagtagagagagactgaaattcttcttggacccagcacttgagcagggataatttatgagtagttctgtttgccacactaaagcaacaccacccccagaatttcacaactcttgtttctcctcagttggcaaatgttgtttttg

SEQ ID NO: 333737 - DNA, 822 bp, Homo Sapiens
  misc_feature (489)..(511): n is a, c, g, or t
  misc_feature (579)..(659): n is a, c, g, or t
aagttttggagtaggctcttgtagattttgcttttatttgtaaggagactacacttaaattcttctagctttcaggatgatactagtgttgtttttaaataataaattttctgagataaagtggcctagcacatagtgtgtagtcctgataagataagtaagtcctgacaaggtaagtaagcaacaaagaggaaggggcccaggtgggggagaacaatgagtaattactctgagagatgacctcctacaggtagccccaggagcacggctacattctgcaagcagtcccctccagcaggaccatgtaaaacgtccctcaagccgctgcgtctttgcagacttccccttctctgctgtgctgctcactgcaaccttgcaacatattttcacactttctccaataaatctgcctttacctatgactgtcttggtaaattcctttacagcccgtgacactggccccaactagtcacgcccacgacatatagnnnnnnnnnnnnnnnnnnnnnnngaggcagggtctcactatatcatccagctgggattgctgtgctgtggtcaccgctcactccacccctnnnnnnnnnnnnnnnnnnnnnnnnnnnnnnnnnnnnnnnnnnnnnnnnnnnnnnnnnnnnnnnnnnnnnnnnnnnnnnnnntgcacatggtatatttaaaaggccatgtgattttgactttatgtcttttgttataagtagtctcaaaggattttttaaggaagccaattatactcaattacaaaccattaactgttatcctttcccataaatttaagttcttacagagtttatttgattcaat

SEQ ID NO: 333738 - DNA, 440 bp, Homo Sapiens
ttcagtcttcaatgccagtttattaagttacatctattaaatatattaacacatacaacatttcatttacagagattagaattcatacactagtacccaaagacatgggatgcataccagttaagtacgtatccaacaacatacaatatgcattttaccttgcggttgatgttttaacataaaacataaaatcaatgaaagcacatggggtttgtcactaaaaccacataaacacctacacttcttcaatctgtacacccctgaaacaaaaaaaggggaacattacatgctttaatgactttaagaataaaatcatttgatgaagttcagctactttatttacttggcactgtgtgtcttgttcctcctgaatgtatacactgtgagagtaggacttgcctgtcgcattccttctcagctctccagtatccaggcaagtg

SEQ ID NO: 333739 - DNA, 476 bp, Homo Sapiens
caagcacaaaagacgcctttattggtgcccagatctaaagggcaggatgggctggtgtgaagatgacgtggaagatgacagtgcttccccttttcccctgggagtcagccttttcccctttggcacggggcctagggttgggggctttagactcagacccccacagcccagggcaggggaagggttttgagcttggtcgtgttttcctcctgggccaatcacagaggcaatagtgggagtcctggggaggggcatggttggcgtgggggtggggcctggagccctcaatgcagcaccctgcaaaccccaggggcagccccccaacctgtgcctggccctgcagggtcagttaaggcacagtggctgggtcctgtcctgccggagcagcagcactcccggcgacctggccctctcaggacgtgcagctgggagaacacagctacttctttcgccgggtggtcctcgaactactggag

SEQ ID NO: 333740 - DNA, 442 bp, Homo Sapiens
  misc_feature (291)..(300): n is a, c, g, or t
gcacacttatactttttccttggggtgcccatcttttcgcttgatgtgcctaacagggagaactctgcacacaggagattttcagtttagtatttgtttggtgaacgaatcgtgtctctatggtaggtagtccggcaggggtcagaagcacagccctggagacaaacttaacagtttgagttctaatagctggctgcctccctgggtctctgttttctcacgtgaatcctgaggataataattacatctacatccctctgtcatgtaatgaatgaaaaagatgatgtgttnnnnnnnnnnttaggatgctggtagctagtggtcagtaattgttagatcttatgacttctgctcttactgccatcatggtgagtgtgtttctatgtaaaaaagctaacaaccaacaaagggtgaaaattaaagttcaacttttgattattga

SEQ ID NO: 333741 - DNA, 461 bp, Homo Sapiens
tcctaaaataaaccatttattgaaaaaagaacctttttcttaaatttcagtaatcagccttttgcattacaaacctgcagcttgccaacaacaacaaaaaaggtaaaggtttcacagtcagtgcactcaacaaacaggagattaaaaacaaggtatgggacgcctgataacactacaacttcttttgaacctagaaaggtcaaaacactacgctgatgtcacggttctcagtcgcgcgagacacggaggagacagaggcgatggtccgtgtacagtagtaatggcacttaacatgcagcttctttaacctcgtggccaccagccctccagagggcctttgtgccacatcagacaaacaggagcagcaggagaagtgacgcttgtcacctgtgcagtcttcagtcttggaaggttaaaaaggcttatactgcttctcagcacagtctttatgtaaatattac

SEQ ID NO: 333742 - DNA, 204 bp, Homo Sapiens
cctttactttctcttacgtctcatctatccataaaacagtgtctttcaagaatatttcagtaaaaatacaacagaactcattcttactttcctttgaaaaattaaattttcatctctttgatctttaaaaaggagggaaaaataacttgtgtactgctttcaaaatattacaaatgcaaaagctagttaagacaaaaacaatgt

SEQ ID NO: 333743 - DNA, 318 bp, Homo Sapiens
  misc_feature (69)..(137): n is a, c, g, or t
gcccttgtttagccctctctaatgttaagagtcataatgagggtagtatgggttatcgggaaaggtgtnnnnnnnnnnnnnnnnnnnnnnnnnnnnnnnnnnnnnnnnnnnnnnnnnnnnnnnnnnnnnnnnnnnnngcaggaaattcagactcagagaagttatgtgaattagccacagttataaccttactggttagaacccagatacataactacactcagagaaagagaagccagtccctgggcttgggacaaggaccatgttgaggagcccagagtgaaaattaaagcagaagggctgggcacaatctcacaa

SEQ ID NO: 333744 - DNA, 432 bp, Homo Sapiens
tttcacaggatctacaaagtttattacagataaagtacagaataaccaatctacaaagatcattatcataaagaacacgagaaaatgaaaacggagtctgtaggtatctgtgtttgttgtgcaatatcactcaaatgggtacaaatgagtttctcatatcaattccaaatatacacatacccttgtatataaaaaatgatattagccagttgtaatactcatttagcatcttgattattagtggcaatataattatcttaacatagggcatgtaacaggacaaatgagataaaataatgacaaccaagtaagttttatccagtccatttctaaactgacaagaataccttattcaataccttatataggtcatctgacagatacttgagggctgtttgcacacatcaagtgtgttggcaggcagggagggga

SEQ ID NO: 333745 - DNA, 503 bp, Homo Sapiens
tcaataaacattggattacagctggtttgctgtgtggcatgcctacatggagggaacacactgagccaatgatttcatcatctgggtccctttggtttatatcagtttccaacatgacttgtttgtggggcttgtgggaggggcacatacatcggccccaggattctaacatctcctggtctctgaggttataattttcacttaacattgtcgagttggcattttggttttagtccaatggttcagttctttgaaactgactccagagatggctctgttcattaatagattgttttgttgaccctgtgaggattagtctgtggatcttggaaattcggcaggtgactacaattctagaaggcctcttgtgagatataaggtgttttccttaagtgacatggccctgcgttgcaaagctgagaagtaatatgaaggagcgttttgtaagtttgaatctctataatcaaaaaccagactaatgacacattcgcttttagaactta

SEQ ID NO: 333746 - DNA, 452 bp, Homo Sapiens
ttagaatttcagttttattaaaataagcacaatgtataaaagcaccgtggtgttgtataaacgtctgcctgacaaatgcaaatctattttctttatgtaactcaatagttccacttatctgaatggctgtaccttcatgcacacgggcagcaggcactgcattgctcaaacagggaagtgaggcttcaccctagtgtggcttcaccttaggcacagagcactatctaactgcccagatctgtgccacccacacaagacctggggacacagcagcagacaccgatgctgtctctaagttcatcacaggaacagcttaaaatcagaataatagggaactgctgattaaaacccaagtgcatggacattctagaaagaagagcaagccgttccactctctgggaagttcatgggcttgcagtgggagtttaaggtatcatctttgatggaacagc

SEQ ID NO: 333747 - DNA, 1049 bp, Homo Sapiens
  misc_feature (392)..(415): n is a, c, g, or t
aattatcatcatggatccatttatttttggggtctgggtggagaaaattcaactggagctagaaatggaggttgcaatgccaagaatggctgggtagaaaatgtgaccacagggagccctgggcctcttctggtgaaattggacttctcaaaattttctgggtcactgttgctaacaagattgtgtggagttttactgtattgggattttggctgctctttccccagagttagggtattctcaggggggacagcatctgaagagctccaaaagcaaacagaagagctcagggcccatcgatactcaacaaggccagtggttggggccagcaaaaaaccagggtagggacagcagactggcaggaatgagtgacagttctatgcaaatggagnnnnnnnnnnnnnnnnnnnnnnnnataagggcaggtttgtaccagaactgcccagtatggcctgtgacttctgcgcagcaattatttctccagggacagggcctgaagctacctcacagtgatgcaaaaaaatgggattccccactaacccccacacacacccccttcctaccaaaccacacatctctcagtcctctccagcagcccagaggtgaacgtcaggacccacgctgacaaagatgagccaatgcctttcacaaaaagcctggccttgaggagaggaggagaaataccatagggggataggaggaggccaagagaagggaatgggatatttaaatgctaattttacagcatcttcacaaaaataaatgcctttcaattacatcccttggcctgtgcacttcagtgttcattatggcctcgccagggtcaggagcttcactaatccttttgggcaattctcaacatgcacagtggcctgtagaggcaccaagcagtggcctggctcaggtcagacagcactaacttggggaagccaggatttctgaggccagggtgcttggggaggaactggagttcagcagtagggacagaaccttccacacagcaaagaacaaggcagttcgctccaaacgggtcttggctttaatgtggt

SEQ ID NO: 333748 - DNA, 450 bp, Homo Sapiens
tttactacatacatgtaattttccaaatatagtcacctattattcaaacctaggcagatggaaggtggtctgggagtgtcatcccatctcctttcccacaatggttggcaaacatgaatgaacattcttataagttggtttgctgatgtgaaaatttccttagagacctggggcttccttttaaaacataaagatgacaacaactgtttcattaagaaatccacacgcagcctgctacctgcttaaggaggaaaccatttccttcgggtctaaatcaagtgagtaaatgtaacataactgcgagggttgggtgcactgaatttctggcagaagtccataactaaaagaggtaatgcattatttaattttatttctttatgagaaataacaatctgctgccacacccagctcaggaatcagaaggggtggagagcaatttgcagcccattg

SEQ ID NO: 333749 - DNA, 129 bp, Homo Sapiens
tttgagggtgttgcaactatgtttatttctcattctgtgttagtgtcactctcagccaggctctcccctcatgggcataaaaggatcccccatagctgcaggtatctcctaccaccctagggtttattt

SEQ ID NO: 333750 - DNA, 246 bp, Homo Sapiens
tgtctatgaagtgtaggctatataggtaaatatgcacacagggagagctagagagtgccctgtgctaaggactgcaggataaatatgtctacagggatttccatagcctacggttttctcctgttcctggttcagttagtgctagactgttgcaggggagtccgcgtggtgtttggaaagagcctaggctttagattcaggcagatgtgggttaaaatagtggccttggccgagtgcggtggctca

SEQ ID NO: 333751 - DNA, 934 bp, Homo Sapiens
  misc_feature (900)..(900): n is a, c, g, or t
caaaattgaagcttttttgggtcacgtttatgtctgctgtagagagaaggtaggacattggtctgtctgtcaagggaagggaagaaggtttggaggggggggccactggaggccttcattccagaaagtgggataggcagggatgattgggaaacaggtcctagaaagagctcagttaatagggatctgtgtcttggaaagagggcaggtcggcttagctggcttctttataaggtgggaagaatgcaagcaaccaaccaagggttgtatcttatcgtgggagggaggaccaatcactgaaggttgcctgcccggggaatggaggaggaaatgtatgagggcaggtccccagtgaattgctaacacccaggtgcagggatggccccaccatcaattttattggccaccacgatgcatgggatctctggcctgaactcccgaagctctgtataccaggtgctcaggttcctataggtgactttcctctgtacatcaaacaccatgatgcaggcgtgggccttgtggtagtaggaggcatgcatgctctggaaccgttcctggcctgccgtgtcccaaaagtccacaaggatggtccttccatctaccgtggctgtgtgcttgtacagggtcagggcgtacgtggacagctgctgtgctgaaagccatccatgagaaatctctccatgagtttggatttgcccactgcgctgtctcccaggcagatgatcttcacgttgtcatcagcatcatacttcccttggtccaactcactcggtttggttttgtcttctccattggctcctagctgtagagaggggtccagcccaagggaggggagggtattgtcagtgcggttccgagtgagggctggagagaccagggacgctgcgggtcgagccntcggccctgccgccagtctggactctgcgcgctc

SEQ ID NO: 333752 - DNA, 452 bp, Homo Sapiens
tgttttccattgtaagtccttctatgctaatacatttttagaatgacattactttgattctataaaaaaccctctaatgaccagtagaaacagatacaatagcaaacactaagaatacacaaaagaacacactttgccaggttaatgactgtgagatacattcttataacatcacaaaaactacgttttgtgtatctgtccttttatttgaaggttcgaaatgagttttacaaggacacacagggtgtgatactggtctatgatgttgggcagaaagactcctttgacgcccttgatgcgtggctggcagaaatgaagcaagagcttggacctcatggaaacatggaaaatattatatttgtagtttgtgccaacaaggtaacccctctggaaatggtgtgttcagatttctagggaaagagtggagctttgagtgttgggaaacaaaaaga

SEQ ID NO: 333753 - DNA, 620 bp, Homo Sapiens
  misc_feature (231)..(248): n is a, c, g, or t
cagcgttcacctaaccttcccgccaacggtaacgccatctttctaaccgtaagccgtgaacatgagcgcgggggtgctttttctaaagacgcagaaacgacgtcgccgtaaagcagcgtggcgtgtgcacaatttaactgtgtgatgtcccgctagtgagaccgagccatcgatgccctgaaaaggaaaggaaaagggaagcttcggatgcattttccttgatccctgttnnnnnnnnnnnnnnnnnnttgcatactcagatagtcacggttattttgcttcttgcgaatgtataacagccaaggggaaaacatggctcttctgctccaaaactgagggggtcctggtgtgcatttgcaccctaaagctgcttacggtgaaaaggcaaataggtatagctattttgcaggcacctttaggaataaactttgcttttaagcctgtagtcctgatgtggtctttaaggatggtgaatgagctttgtgctgggcggacgtccccgagacacttctccaggggtaacttcatctcctgggaccacgggcatccaggctggggcaccttctcctcaacctgcctgcccctcacccgccgtgggaatggctccttttcactcatac

SEQ ID NO: 333754 - DNA, 1186 bp, Homo Sapiens
gaatgaaagtcatttatttgagaagcgatcccaggatgcaagagagatgcacaggagtgaaacaaaagaggaaagccaatataaggatggttattgccaaacccgccacagaagtctcctcctcttttgaggagacttacgaaatgcatttcagaactgtctgcccaggtgatgaaaagagtaatcagttatccactagcaactttccacctaggtcaaggatggccccatgggcacctaactcccctgcacctttgggctgtgcaattgggagtaccaaacaagttctgcagacattccacgtcagggaggctgaagtgaaaggtatacagctagaatccaaagagaggtactatcatattctctgagaacctggtcaaagacttcatggaattagttaccacagcagtgactggagtagaaggcagggcagagaagatctgaagtggggcccaacatttctgatgcgtagatcaaaggcttaaggctggaataaactcagcatgtttgaggaatgcaagagaagggagagtgggtgaagacatactaagccttggtgagtatggtactgagttgaagcaggaagagatcagatcccacaggagtctgcaaggctgaataaggaatatacatagaatgaatagtgcttactactgaataaagtagtccaggaaagacattctttttaatattaaaagataaagccccaatatataacccatctgaggatttctaatcataatcttcagcatcaaattactgcctttataacatagtttggggagatgaaaacaaaaatcacagatcaactattttctcccactaccagcaaagaaaaaatgaggaacctatgacttaagagcagttgctagaaattttaaagaaagggttcacttttatgtcaagatcagacaactttaaattatttaaagatcctgttacccttgctctgttgactgccacttcagtgtttctttcaggacactccaaacagcagacaagagataaagtgtttcaactgtgtcacaagaggacagaaagtggctgtttgcatctgtttgggtctagtgtcaacctcaaagttactcattagtatccataaaaataaaaacttaggacaaaaggttaagtgtacaaatagaggaaacacacattccataaaggagagggggaaagattgaattct

SEQ ID NO: 333755 - DNA, 585 bp, Homo Sapiens
  misc_feature (83)..(200): n is a, c, g, or t
attgaggtcttgacctcctgggctcaagccaaatcctcagcctctggaataactgggaccacaggtacgtactaccacacctnnnnnnnnnnnnnnnnnnnnnnnnnnnnnnnnnnnnnnnnnnnnnnnnnnnnnnnnnnnnnnnnnnnnnnnnnnnnnnnnnnnnnnnnnnnnnnnnnnnnnnnnnnnnnnnnnnnnnnggtgaaccaccactcctggcccaaaaacatttttaaagactgatttaatgaaaattctgtggttagtatagccaataaaaagactgacttggctttgacttccagctctactaccaaaacccacgagagtgtgacaacctcaccaagccttaagttcttcatccataaaatggggataaaagttacacctaccacatatgattgttatgaaaagaaagaggtagcaagtagcatatttagcacagtcctggcatacaataaatgctcaagaaacacttcataaatcggagacattctgaacaactgtgtttatagtctgtcgaacttttagatgacaacaaatgtgtttcaaaatattggatgtaatcataaatttgaattcagt

SEQ ID NO: 333756 - DNA, 599 bp, Homo Sapiens
taattacaaaacatatatttatgtgtaatgtgttcttaaagctgtaatttacaaatattcataatgatttccaagcttcagtctgcctcttgatataggtccatttcatttatataatcataaataataataagttagtatttattttgctgatttaaggtgttcatccaaaagttcagcaatggcttcttcatctgctgattgaagcagtctctgaattagctgatccaggcccttcccaccacataaaaattcctaacagaagaagtcataatgagaataccaggtgatctcacagaatccaaggataggaatgtggaatgtgcagggtcacgactaccacccgtggaatgagactgagccttaatatcacgaacttcatatgctatcctgtggtcactgactctatcctgggtgaaattatatgtccgaattcgctctgactgggctcttgttcccacctgcagttttctagcactttgttgctgacgcttgtctttctcaataatctgctggtagagtctagctctcaacacacgaaaggctatttctttattttttatctgtgatctttcttgttggcattctactactagccc

SEQ ID NO: 333757 - DNA, 872 bp, Homo Sapiens
aaatgcatggttgttaagaactcaggatagagagtcacacagactcaaatcctggttccactactaaaagtcagcaagtgagctcgtcaccacatctgtaacacgggacaaataacagtacctggctaggacctgggaattaaaggagatgatgtataacgcactcagcaaatgcaagcataattcttcctctggatgcagatgtgggagggtgaggaccacagaggcaaagctggcagagggggtccatgctcatgccctgccccaccctgcccgcaggctgaacatgatatcctcctgggtcatctcactgtgatgcagagagcacaggttcagtttgaattcaagctcggctgtacccttctgtgccacctccctaggcctgttttctcatctacaccaggaggaccataatctgcacctcattaggaggttgtgaggatgaatgaaactgcacattgaagtcagtaagcccaggaagtggtcttcagcaaatggccaagttggtattattatccctgcctctgggctctaactctggaagcttgttgggtgaagcctgctttggtccttccctgcatctactccaaactctgcaggggaaggcgagtgacctggagggcagaggtgggcaggcagcctgtggaggtggggtggagcaggcccaggtgagctaggggctcaggcaggagaggtggtagcaggcagccagggctgctctcagggactgagggtccagacaggtctggcctcttgggtgcaggaggctggacagagaaggaggtaccctagaaacacccttgcatgtgtctagggaggtgtaacatctaggcccacgagcagcatggtcccatgggggctgtggaggcttg

SEQ ID NO: 333758 - DNA, 913 bp, Homo Sapiens
caatctggttggaaagaggaaaacattcaagtacggtatttgttaatattaccagatgcttgctaacccatttcagagtctctctctaattctgactgctgttttcagcagctgtgctttatctgcattgcttcatgctggctccaagtgccctttgttcacatttcaggggaaaggaatcagagcatagctactcaacagatgttttgattggccagtcactgtgaaagacctgcagataactaaaacttgaacatccctgttctatggaacttaaagacacaaatcttaatgtccttagtgagcttgcacctaaaagtcctagttctgctctttgtagtctcctagaatatgtctgaagtcctttctgcatgaaacctctgaactaatacatgttcattttcaaaattttgtaaaacagtcaagtataaagaagaaaataaaattacctatacccccatctgccagagataaaggatattaatggtctttatccttcctatataaatccgtctgtctctatctgtccatctagaatttttcacaaatttggggtcatgaggtgtgtacaaagtggtatgtttgcagaataggagaatcaaaaggagagactggaaagagataagggccgtgaggccaggctcatgtagggccctgtaagccacaggtgagaaggtaggctttgattctaagtgcaatggggagccattggagaagttaaagaaagggaataccacaatgaaattcatgttttgcacagcccactcccactctcttcccacaacggaggcaggaaggcagttaggggcagttacagtcgtcagagtgagagatgaagggatgagaaattgagaggtggacggaagtggcaaaatgtagaggacttgctactggattggctattgggatgtaa

SEQ ID NO: 333759 - DNA, 507 bp, Homo Sapiens
  misc_feature (335)..(402): n is a, c, g, or t
  misc_feature (412)..(437): n is a, c, g, or t
ttatttgggacaagaaactaaatgccttttcagtggttcatttgaatctaccatacttcaaaaattataaatctaccatcaccaaagaagtacagcgccatttgtattagttgcaaaattaggctatttacttttctgtatgtacttttgtgaggtttaaaacgttaggcttattacttctccttggtatgagagaaaaagcacaggcactggaaagaaaaaggaataggtgtgaaatcttgattttgtgaattaggatgaatgtgaccttatgtaaattacaaagttcctgaatctgtttgcgcagatgaaaatggaaatatactaactgcacnnnnnnnnnnnnnnnnnnnnnnnnnnnnnnnnnnnnnnnnnnnnnnnnnnnnnnnnnnnnnnnnnnnngaaactccannnnnnnnnnnnnnnnnnnnnnnnnngtgttatcttctacgccagtttttctgattctcagtttatagatgggaaaggagacgcttccagcagcag

SEQ ID NO: 333760 - DNA, 176 bp, Homo Sapiens
catagatcttttctgcattcacattttaactcacagatattgttcaggtcctggaagtgtgagctttctctctttcttcttgaatgtcttgtatataggtccttaagcaactcattcatttcagagatattctttttattccaggcttttgagatacaacagtgaccaagacagac

SEQ ID NO: 333761 - DNA, 502 bp, Homo Sapiens
tgtaaataacaaacaccactttgttatgaagaccttacaaacctcttcttaagacattcttactctgatccaggcaaaaacacttcaaggtttgtaaatgactctttcctgacataaatccttttttattaaaatgcaaaatgttcttcagaataaaactgtgtaataatttttatacttgggagtgctccttgcacagagctgtcatttgccagtgagagcctccgacggggcaggtactgtgccagggcagctctgaaattatggatattcttatcctcctggttccttcggtgccaatggtaacctaataccagccgcagggagcgccatttctcctaaagggctacaccactgtcaacattatcctggactctgtgtctctctctgttgggtcttgtggcatcacatcaggccaaaattgccagaccaggaccctaagtgtctgatagaggcgatgatcttttccaaagtcagtacttacaaactggcattcttacag

SEQ ID NO: 333762 - DNA, 550 bp, Homo Sapiens
  misc_feature (232)..(240): n is a, c, g, or t
  misc_feature (393)..(474): n is a, c, g, or t
ttttggagtcctgatctcctttatttccaaggaggctgcagttacccttgatggggaggctcaccacaggaagctggccgcagaagacttatcggggatggcttccagtcatgggttttgttgtggttttcatttcaatctggttaatgattaaatttcatgaaaattttgagctgtacatttatgacaggaatgactttttgctatgtatacaatatttcaattaaaagtnnnnnnnnngaagaaataaacagcatgtctcaaacacattatgaaaatctcagccgggcgcggtggctcacacctgtaatcccagtactttgactgttaggtttttgttattttaattgaagtgtaatattcatacagagaagccaccagtccccagagggnnnnnnnnnnnnnnnnnnnnnnnnnnnnnnnnnnnnnnnnnnnnnnnnnnnnnnnnnnnnnnnnnnnnnnnnnnnnnnnnnntcccccagagcactaagatcatcgctatcctgacttctcaccagatgtttctttggcctgttttagggcttcgcag

SEQ ID NO: 333763 - DNA, 256 bp, Homo Sapiens
ttttttttctcttactcattcagattatttattaagagcaaaagtcgggccatcccatcgtgtgatattgcaacatgaaaagtcacatacatactaaggagaccccacagaattgagagcctttcaacagtacagagccatagattacaaagttaaaatacaaatgatcccccagatttggcaggaaacaagtacaatatgaggaggcctggaatggaagggcacttacttttcaataaggcagttacaaaatggg

SEQ ID NO: 333764 - DNA, 679 bp, Homo Sapiens
  misc_feature (669)..(669): n is a, c, g, or t
ttttctctttgtcattcagatcttctttctttgttccacttggttcgacactaccatctgcagaattaaaaaatttcttaatctgtcaccgcttttcagaatgtcataccattagtctctgcaaatgtccctccccgaaaagttacaacacacatgattaactgaatggcatgcggtgtcccccaccccagggctgtgagcatgcgtgactaataaactgctatttcatctgtccagtgtcggtgtcctacgttcagccatcccatatccctagggcaggaatcttctagggttataaacagaactttaatcaacctctccttggttattttactggttccatgatacagctttttccgtgcaaaagatctgaacagaaacttcacagaggatacaagagtggcaaagaagaacacgatattcagcattcttagccattacggaagtgcaaattaaaaccacaatgagatcccactagacttgttagaatggctcaactaaaaaacactgataacaccaagtgctaacaaagacacagagcaacagaaacgtgacagattgccagtgggaatgcaaactaaaacagccacttcggaaaacagttcagcacatgacccaactttcacactactaggtctttatcctagggaaatggaaactatattcctngtgccgaaat

SEQ ID NO: 333765 - DNA, 695 bp, Homo Sapiens
tttttttaagtttcaaaggctaaaactctgcagaaagccaggtatacagttaattccctctatatattgggaatggaaagtgacagcctgggtaaagagaagcttcagagaaggataagggagcttagctgccagtcagacccagaggcaggcctggccctgtctgcctgcctgggaataagcctggaagggatagatgatagcagaccggagcccagacagggagggcaacccaagaatagaggagctgtgtagcttcctccccagataaagcctgagggggtggcaatgctttagagaagtcccctagccctgctttggagagtagctgtacagcataagtgggaataaggcaggtctaggcagggagggcttgagatagcatccccccacccaataggctcttatgacatctgagaggcaaggggcaacgtccaaaagttctacatgccccttagagggacctagagtggctgacagtatgctagcagtggcggatctgggggggtctgcagcaaacttgattcttgcctcctcggaggaaggaatttggctgaggggcatatgccagagtgagagaccgaggaaagtttaagagcgggagtgggagtttatttaaaagttttagagcaggaatgaaaggaagtaaagtactcatggaagagggccaagtggttgacttgagagatccaagt

SEQ ID NO: 333766 - DNA, 412 bp, Homo Sapiens
  misc_feature (304)..(314): n is a, c, g, or t
ctaactctcatctgcccaaaaaaacttctcctttttatttaatttacatctgagttattctaacaatataacaatgattttaggtctctcttttagctgtggacgaaatgcacatgagcttacccaagatgaagaaggacatttactgggacgattctgctgctcgcccaccatacacattggcagctgctgactactgcataccctcatttctggggtcaacagtccagatggggtaagtgcatttttaaaaaatctctaatattttccagcctgagcaacatagtgagaccttgtctctatnnnnnnnnnnngaaataaaataatttaaagtagccaactgtgatgtcacctgtagtcctagctacttggggaggctgcagttggaggattgcttgagcccaggggttca

SEQ ID NO: 333767 - DNA, 1122 bp, Homo Sapiens
  misc_feature (954)..(1003): n is a, c, g, or t
agaaactgataactttaatagttattctcaaaagaaaagtacagcaaaaagtggaaatgtaaaaaacttcttggtccaatcgaggttcagggctgagtaaaagttacagtagactaactgttaatcatcctttcctcattttgaactgattgaaagctccaactcttacataagtgctacaaatatcctaaactgcctgtgattttcctaagcctcactggtttagaattaatatcactaaagctccattctcaccacatacaggactatctcacaaaaaaagcctgtgttcaccatcgacaaatacccacagcttgagattaatagtcaggatttaggagggcaggaaccttccataaaaaccacatgtgaaggccaaagtggatttttaatattgggggacaacaagcattaactaatttttcctactggagtgcactgtcctttagtctctatttttgctcctaattgttcctgcaggtagtaggttaacatgtaacgtacttacagaaggaagcaattgaacatggcatagatactgaaagaaagggctcaataaaagagcagcatgtgctctaatctggccttttacaacatccactatcaaagagctttgggggtttaaggggattagataccataacccatctgtcaggtcattatggaaggaaacactcctgctgttttcaagggaagatgccctactgtatattattatcattaagcatttacagagtactgtaggcttgcaaagcactttgaaagcatttttatttgttgttcctcataaaatgctgtcaactctaagaattatctacaaatgaagaaactgaggttcaggaagatggtgacaaatgtttcagtcacccagggagtggcaggagctatgaggagtacttggatccttcagaagagggaataccttctatctcctacctaaaaacatgccaaagnnnnnnnnnnnnnnnnnnnnnnnnnnnnnnnnnnnnnnnnnnnnnnnnnnaaggcctaaaccaattctcttgggttttcctgcaatcttatacattattccataacgagcacttatgagttattttctgtagacacaggatgtatcttaacagcagtcgtacgtcatga

SEQ ID NO: 333768 - DNA, 124 bp, Homo Sapiens
cacacttgtcagcgatttattttttaaaaagggggagggtcctggaggtgaggggagaagactgtaaaggggaaaactgaaaactgagtatgtgcgagtgtaaaccaacccaaaatacaaacac

SEQ ID NO: 333769 - DNA, 436 bp, Homo Sapiens
ttttaccagaagaaaacccatctttactattttattacattccttttgggaccagaagattaaactacacaaggagctctagcaggtaggaatctggaggtgcaactgccttacctcttctaaatagactgatgatgagtatattcctctcattaaactccaacggtcactttgctgccagtccagcactgtcaacttacgatcaaggtgagcccaggcaattcttcgagtaccaaaaacgatagatatgatactattaactgccttaagtctttctctttctatgtctggtttgaggagctttctcaggaaccggttttccggtgactttcttttttcccgtccagtctttggacaaagtatggagttacaaacttgaactgtacttttatacttaaacaagggcacattcattaaactctctaaattctgaaat

SEQ ID NO: 333770 - DNA, 441 bp, Homo Sapiens
ctattctggctcacgcagtggatggaagatggcattgaaggagctcttaagtcctctccaagcctcgctgtttgtgatgtgatcatggcagtgaagggacacggctctggagtgctgggctccgtttgctctgcactcagcctcccatctggatggggtttggaatgctgcctaggctctgccttctctcacacaggaaggacgtttggccccaaaccagctgctgaagggtttggcagaagcacccgatgcctgagctatcgcacagcacggtgccctgggcggctccacactcacctggctcaccaccaccctcttccttccttcccaccgggctgccctctcacctgcatttcctgtggtctatggaactgatacgacatgagcagcatttcaggacgtcccccttaaaacccgctcctctgttcttatccacatggc

SEQ ID NO: 333771 - DNA, 477 bp, Homo Sapiens
tccttgtcttatcattacaatctactatacagcttctagggtcgtcaggaactgaaacgctatcttcttctgtgtgaaatggttctaaagctgctttaataatggcccaatcattccatgctataagtggaatgatattacccttcctacctgcttgttttagttccttaccaattcttttccagtcttttagatctaaagttccttgttctggaatccatgggcaaaattgttctattatttgaaatagcttgattagatttttttgtagatactttaactccccctctttttaaaggaattttaataaagctgagataaagaggcatatttacttttaaattttacttttagtttgccccattattaccctagcttcttccgagctcacaagcttaccgtacggctgactgtatatgtactcgggatctctcgtcgacttgtgctcaatgaccacgccgagccctatgcagtctc

SEQ ID NO: 333772 - DNA, 442 bp, Homo Sapiens
aaagctccagattcattttatacaggtccttctgggctctcactgccagtctttgagcttgatccatctccccaagccgaagcccaaggggaaatgcaatgaggtatttcaaaggcttattcttagcttctgagcttctgaatgaattgcattctattcatccagggagccctggatgcccctgttttcttgaggatgtcttggtcccccagaagtccttaaatcccagccaccccatgccttccagaagctgggtgtgaaggaatatgggaaatgagacaggtcaaagctgaggctggagatggtgttctgccagccccaccctgtggcgattgtcccactgccaggccggcctgctgacagaaagccagccgcagcatctgctcacttccaaagagctggtggggaccaccctccagggttcatgggaaaggaaaagggg

SEQ ID NO: 333773 - DNA, 452 bp, Homo Sapiens
atggaataagggttatctttatttggattgcaaagtataaatatgaaccaggtttggaaatacaagttgtaacagttcagaaatggcaccagaaacttccagaaaggaccatgacagcataacttcatcgttttggtgaggtgggtgggattatacaaagccttccccacctccaaccttctcggtagcaatttgcaggtagtcatttagcaagaacagtcagctccaatgttccctgttccttctcagccttttgcttttctaataccttctccagactgtcctctgctgcactgaccccttcatgtagtagcaccataataatggcaggagttatataaatgtcttgacacaagggaaagtgagttcccacgctgtggtcctgtggccatgggggtgagggaccaggaaatacacatgtctggaagcccaaccccttctgatgacttggc

SEQ ID NO: 333774 - DNA, 552 bp, Homo Sapiens
tttttttaccacctagaaataaacattatattttcctctgatatgtaggtaagaacttcaaatataagacataatttaaaagtttataattgacatagtcagggattataaataatatcacacaaaataagctcttaatgcaagaaatgaatctccaggatagatcatactaatctatccaatccagccctctgttctgaaagcagcacatgaaaaggcagagaaagcaaaataatctctacgacctggcctgttaaacatgtatttatttcctgagtaactattaggtgctagctgtaatgggctattcagtggaggacagtggtcaaagcctcttatgatgtatggcagatgccagaaagatatgaaagatgtgatggtacaaaaaaggaagttggagtcacatccagccacaggactaactaagcctctttggggcaggagactttggaagtgttgaaggagagtagaatctattcagaaagaaacaactgggggcaggtccttccagtctgaatgaagattaactaggcgtaatgtaactggcatcat

SEQ ID NO: 333775 - DNA, 1026 bp, Homo Sapiens
  misc_feature (734)..(734): n is a, c, g, or t
tcctttctttttctgtttttcttgagacaggatctcactctgtctcccaggctggaatgcaattacacctaaatgtaacctcaacttcccagactcaggcgatcctctcacctcagcctccgagtagcagcggctacaggtatgtgccaccatgcctggctaattcttgtgtttttgtgtagaaaaggggtcttgccacattgcccaggctggtctcaaatttcctgggctcaagaaattacttatttttatctttttaagatcaagaatcaaacatggcacatagcaaatcccaggcaaaactctagagtgagattatttggtatttccttagttttcttttcagtgcttttctcatccttctaactgcatcttcccattgctttacctactctgccaggtcttctctccaaacacacgtttccaccacacccgttcgtctcgaaggtcccattctcagctagtttctctgcctcaaagtatctgaaactcattcatgaagaattattaatgaataaaggactagttggtggtggtattttactggaaggctcctgaagataaacaagacttagacccaaaagaataaatctaggagggccttcatcagcaagactgctggagtttgagttccatttctgccatctatgaataagcatcttatctaacacctctatgcctcagtgtccttgcctatgaaatgagataacaaagagcacctccctcatagggcntgttgtgagttaataatgtgtcaagagtctagaatcatggctagcacatggtaggagctccaagagatgtcagcgcttactgttatcattctaatggatgtaaagaaatatttctttataggggtgacctcggtagctttctactcaatctttctgtgatgaatagaaaagacacctgaatgggcgcacatttaaacaaggagctgttcttattcatgtttgcatggtggctcagcgtccacagcactttggacatagcgaccactcactacatgttgctgaatgacaaagg

SEQ ID NO: 333776 - DNA, 377 bp, Homo Sapiens
aaacaggatgtgggctttattaggggcttacatacaggggaacagtccagaggcggcaggctggacaggagaactgcttttcgtacagaaacagatggttcagtggcagcggttgaacaacacagcccacggcccaggtggggcaggaaaaccatcaccacttataaacagcatgcagtttatatagcattttcacttaaccttcccccaaggacctttacctgggaacctttttttaacccaaaactcagggcctcagttccctgtacagcccatgtcccatgaaacgggcttgggggctcaaatactcctcacaaacaaggaacaaatctccgggttggccactcctagattctctagctcaaaacaacattaaa

SEQ ID NO: 333777 - DNA, 449 bp, Homo Sapiens
ttttttcttaaatgtaaaaaacacctcggtacagcagagacagacacgaagggcgggcgggagggctgcatgcaggggcgtgcattggctgctgccgcttttgtaattgaattgttttaaacctcaaacaaacaggactgccgctgtcactcaggccctccagagccactggctgcgaaggttggacctccggctggaatctcctaaagcccctgtcaaacaggacagaatgtggtaacagaacagaggacaatgagcacacagatgagttccagcgactttagcacgctaaacacatggccaagtcggcctgagaaggtggggaaagtgggtgaagctaatgcttaaatacaaaactgcctcccatttgctaagcactaactaagtgctttacttatagtatcttacttaatcctcacaatgattaaatgaggtaggcacactctctg

SEQ ID NO: 333778 - DNA, 674 bp, Homo Sapiens
  misc_feature (86)..(190): n is a, c, g, or t
aggtttaataattgttaacaatttatttgatttcttttaacatttcaaatacatttacatatgtttctgtttgtacatataagcannnnnnnnnnnnnnnnnnnnnnnnnnnnnnnnnnnnnnnnnnnnnnnnnnnnnnnnnnnnnnnnnnnnnnnnnnnnnnnnnnnnnnnnnnnnnnnnnnnnnnnnngttcttatttgtatatgcaggtaggcttgtgtatcagctgggttcaatcagaaaagcagagtcactgtttatctgtatttcttcatatctgcaaggctgttcttcatgttttatgctggagcttaaggctcacaaagcaagagtcaagaaagcaagatggatgtggaatgggggagaccaagagcaggctggaacccactagtgtgagctgggccttcacctggatggacagatgactggtcttcagggagcaggtaagtctaccattggtagactcccgtcattcttgtcgcttccaaccctgatgaagtcggtggcctaatgaagccaggggtccctccctatgaagataaatgcacacaactgtcccaggagctggaacagctggaggaggattccagagaaggcggaatgcttgcaggccccgctgactcacaccaacaggtgaggggaagggggaagacacgggtccctccttatgaag

SEQ ID NO: 333779 - DNA, 446 bp, Homo Sapiens
tttttttcataaaaatgtaagttttattgagtgcctatagtgtgcatgggcctttattagacacgccaaattcaggcacaacagacacaagatccctggcctcaggtaccttatgatctaattaatagatattagaaacagtagaaagacaagttacacgtcaatgcccaatgactagagtcaacattaaagagttgtaatttaagtaatccaaactgacatctaattccaaaatcatttataaaatgtatttggctttggaatccacaggacttcaaacaagcaaagtttcactgcagatagtcacaaagatgcagatacactgaaatacttaagagccttattaatgatttttgttattttggatcttctgtttttttcttattatggtccgaagcctccttaataccaatttatcagacagaagcatgtcatcttgttgttca

SEQ ID NO: 333780 - DNA, 152 bp, Homo Sapiens
ttttaaaatttttttgggggggaagggtgtttgagggagttctcctgggaagcattcactgtttctgtaaagtaggaataggaggtgaagtctgagtgggaaaaagaacttgaagtaagataaaacatgtggaacagcgccacccaccctcc

SEQ ID NO: 333781 - DNA, 704 bp, Homo Sapiens
  misc_feature (645)..(645): n is a, c, g, or t
  misc_feature (667)..(668): n is a, c, g, or t
ttagcagtggaaaacaggtatccgtttatttttattttttattacccagaataagatgctgatggactaagccacgttgcttagctcttccgccgccaccttttaatactgggacagccccgtcaccccgccatgctggtaagcccgctctccctggtacgtggagtcctgtgagagcgccacgtcgatttgtgatttaaactcgtcaccaaggtaactgtcctgggacagctccggctgggagaggccgggctggctcatctgggaaggctggctcatggagatgtagccctgcgtcagggcgccctgagagaagggctgtgacgccacatcctggctggcttggctgttggggaggttagtctggctgggtccaggaagcccaaagcggttcttctggcgtcccccacgaccagtcttgcctttcggggtgcctcgccctgcagcaggcccgttggcttgtccaaaatagccaggcggtggcatgggtggcatgaccaggttgaaggggatgggaatgttcatggcagccacgtggctagggcccgcactgatcatgccaatctggtcatgggtcttgaagtacatgctggaaggccgggcctggctgctccgatcatagaccgagcctgggatgatggcctncccggcatcatacaatgcctgnngtcatgaagccggcttcccgggttgatagtgttgac

SEQ ID NO: 333782 - DNA, 444 bp, Homo Sapiens
ttttgctgagccagagggaccatttttattagattccagcaagactactgtacatgtttcatgcagattaaatatgtgtcttcactgcccctgggaggggagcactctcactgtcagctccttcattggtgtgtcaaggggtgagtgtcaaggggagctctcaatgtattccgtatggggggcagttgggatcatgactcggggtagaggtgagacagtaggtagctgagggtccctgggaccttgagtcttcagaggttcagggactgcaggaccttggtcctttgctggtactggcaccagaggatcttgatccttcagaggcactgggactataggaacttgattcttcagaggttcagggactatacgaccttgattctttggaggctgtaggactgtggggccttgatccttaactagtactgggagaatggggtcttg

SEQ ID NO: 333783 - DNA, 427 bp, Homo Sapiens
agggaagacatttttaatgatctagaagtaaccaccagtctttgttatctacatacattacgacacacacatacacaattgtctatatagacaaatacgtcttgctttaaaaaaagattaccaggattaacatactttttaaacaaacatttgttacagatgtgtatgcacgctaatatataatctattgattcaaagtgcaaacaaggcttttaatacagaaattctagtttctcaaggatatttctatgaaaaattccggtaattttctacctaaattgtaaaatgttcattaagttgtatttgttgtctctaaaactggattccctctctacaagagaaaaatgtgagtactgtacttcaggtccagaaggtctatttttaaacctgttggaatccctctgcaaatagctttctgcaaatagct

SEQ ID NO: 333784 - DNA, 427 bp, Homo Sapiens
aatgcacagaaggaaagggatagcaaggggatactgtgccttggtaagcgtggtgccaccgcagactaaaagcagatataagtcaagtgctactgacttaagtttggcaaaatcactcctcacagcccgctctgttttagaaatgtttatatttctgatatcacttttgttaatttgaagaacttttaaaataccatcattgtttcaaaacaaaatgtggaaggtgtggatcaccttcctgaatttacagaaaagtttttgggtacatttctttgcggaagattggctgagatgtggttcacggcagggtggtgcccgtgccttgcggatcacgttgtctgtacactgactgacataccaacttagagtctttgaaaatgcccattggtaagtcaacattgttttccctgaaagtcctgagacagaa

SEQ ID NO: 333785 - DNA, 434 bp, Homo Sapiens
  misc_feature (324)..(324): n is a, c, g, or t
cactgacttctctttatcctttcaacatagaacttcaacagttcatgtttctgtttcttcaggtcatatatataatgatcccaacaccctattcttttgtaagacatttcacatttacaccactgtccagtttctccagccgcttgactttctctgttatatataaacacaaatgcttcatttttcttattactattacccataagggtatctgcaggcctttttggcatttgtaacagtatctttacaccacagagaataagcaaaacaaaacaaaaccagagtgagtcatgcacgtaggtcttggccccatgtggggcactngtggggaacctgccatttggtgtgtgtggcctgcacacatgtcattttattgtcttttgtggacatgcttgcatgggggaatctggaaaaaagatatactgcagctaaag

SEQ ID NO: 333786 - DNA, 376 bp, Homo Sapiens
  misc_feature (349)..(349): n is a, c, g, or t
aagggaagggcctaagcgtaaggtgagggctacacccgtgaagaccgccatcttggcttcatagatacaaccttggatgcacgttcacattgtcattactttccagtcacatttccacccagctttttccatcaggcgacaaacagtaaggtgatggtaacgttgaggctacccgccctatgtggggttcatgacaacacctgtgagacatacacatgcttctcttcttagcttccaggtgtcaacatcgactctgatcacagaactggatacactggcctccttctgaatttagtcaccattctagtgttaccatcagactgcaaggtaaagcactcctaaatagccnaacaccgtaggtggaaccaactatgcc

SEQ ID NO: 333787 - DNA, 401 bp, Homo Sapiens
  misc_feature (16)..(16): n is a, c, g, or t
tctccttgtctccctnttttagaaatttttctagataaacatgttactattatgctaatacaaaaataaaactactcagttggttattttataccattagtccctcataattttcctctccagattataatctcttttaaaatttttgtgtctcatttagtaagtttcttggaggaagaaccatactatatatgtttcgcagttttttgcttagcattcaagtagatcttagcaaatcctaccagtatcaaataattgcccttcttctatccccacacctttagagtttcaggtctctactatccgattccttgacttcccaacccagtcaaagatacatgatttgcttggaattgtgtgtttggggcatgtacacacatgctgaaattaattaagcggcc

SEQ ID NO: 333788 - DNA, 207 bp, Homo Sapiens
ttttgaaaaagtcatggagcagcaaaagttatttgaaaacagggaacttaacaacggacgtgcatcactgatttataaagaattcctttatattaataataaaaagggcagatcaacagaaaactgacataaaattaaataagcacttcaaaaatatttcccatggcaaagtcctcaatctgattttaattagggaaaaacaaattc

SEQ ID NO: 333789 - DNA, 453 bp, Homo Sapiens
tatgagtaaatatttcataaacattttattccaatcatatatgtacgaacacatatgtactgagtcatgacataaattttacaattctctagggcaaaacattgctctaaagaaaagcatacttggccgatcagtcccttgagaagacttttgtttttgattttttgttcacttctgagcaatgactctacatcctgagtacacggaagccctctctcctcaacttgatagcagtgctctttagcacagccagttcccggctcaggctgttttctggagggatgtgtcctcctcttgcagccctgtgaactaactgaaggacagctgcagcggtgcatctgaacctgcagcggaggcagctcaggtcctgcctacagcatgcacatgtgatgccaggggctttccaccatgatttttcactgacatgatttcctttcattcaccggtagctct

SEQ ID NO: 333790 - DNA, 607 bp, Homo Sapiens
  misc_feature (286)..(287): n is a, c, g, or t
tttttttgaacgtaagtgtatgaacatatttattatcataaatatatgaacataaattcagtgaaacagtgaggctccctcaggcccaggtgtgaagtccccactgtgttgaaatagcagctgctccctgatgctctccacgctaccttcacggcgttttctactccagctctcctggatttcacgtattttgtttgttttcagacggatcctcaaagaggcatcttgactttctggtttggacactgtcctcacagaacagcatctgtaggccatcctttccttnnttgactttttggggaaaaccccctttttgcccatgttctctgcttgctcctgtgtgctgggaaggtgggagggccaccaggattaggttagatttgaggttagatgggctgagcgtggcatagtcataaatgaaagaatctgtcacatccttgggacggagcattgtccaactcaagggcgtggagacaacgacagccagggaccaattcctcattaggatatgtactgagcatgggctgtaaggcagactgtccactcctcacatgattctatctcactcacgactgcagtgcataaacaggtgctcaggttccacatg

SEQ ID NO: 333791 - DNA, 351 bp, Homo Sapiens
ttacaagctccaatttttttaattagacccaacagaaacaaaaacactccaataaattgtttataaaagcttcctgtcagtatctgtacttatttcctcacagaccagtaacatctggttggcaggcactggtctgaggaccacacttcggtgctaaaagcctgtactatagtgcatccaattcagtcagcagaaccggggttcaagacctgacttcattactactagctggatagccagagaaagatcacttagcctttctaaggtccactttactcatttggatcaggttaattatatctatgattaagctttctgtgagagctcaataataatgtactaacctctcag

SEQ ID NO: 333792 - DNA, 605 bp, Homo Sapiens
  misc_feature (287)..(288): n is a, c, g, or t
  misc_feature (294)..(295): n is a, c, g, or t
  misc_feature (297)..(297): n is a, c, g, or t
  misc_feature (300)..(300): n is a, c, g, or t
  misc_feature (304)..(304): n is a, c, g, or t
ttttttttccctagatggcatgaacccgtttatttcagggacattacttcccctgacttcgcatttacagattggatatgaacaaaatcaacttctcagtctctcacaagactcttagtaagccaggcataacagttcccatctcacagatgaagaaaatgaggcaccaaaatgtttgaccacctcccacttaatcaagtgatagagctgccatctttataactggtagggttggctatgaagatggtgagctcaggtgacttttgagaatagctttcatatacatnngctatnntnttnttcnccccttttcccccaatgtatttttagtacacgctgtgttcccagggaataaaaatcactgtgatgatttcaatgaaaacattaccttccctttccccatgattctcaggtcctcaaatgaagctagcaaaagttcacatgagccatgttcttatacaactctttcctccagagcaataggtcaggaccaagaacatagtgtggtataacattttggaaaattaatacagtgtgcctaatataaaacaaaaattaaacagaatcaagtccattaaagacattgtaagtactgtatggggctc

SEQ ID NO: 333793 - DNA, 672 bp, Homo Sapiens
cttaaatatcttccaactctgtgtgagctctgggaatttttctgctcatagaaactcaggactcctgtgaagagttattgatctctttgcatagttgcttcttctctggtactttgcctcaaacttccaggcacctcatgttcctgaacactgatctctgctccattcagtgtgattttctcttcctgtattccagtccagaaagccaaagtgatagtaggacatacctcacttggtttcattctctcagggatcacagtcgcatactcactgatttcattgtctgaaaacaatttttttcatgtattttgttcagtttttctaattgtttatagcagaaggccaagtctagtaccagttactccaacatgtgaaaagaattttacttttatagttttctgattttacattttttactttatagatatacagtatcacctgcagtaataataacttattatttctaatattcacacgttgtagttagttatcttgtctaattcattggctagtacttccaggacaatgttaaataatagtattgatattttcctggtatttttctgtaagggtagatgggacaacattttaaagggaggccgggcatggtggctcacacctataatcccagaacttgaagctcaggcaggtggattgaagaatcacttgggc

SEQ ID NO: 333794 - DNA, 430 bp, Homo Sapiens
tggtacaaaaggtgtctttattgaggtctgggttaaaattaggcacttggccagagcagcagcttaaatatgaggcaagcagtcaggggttagccatgcctggggctgggttggggtcatgaggctacaggcacagactgtccccaggtggacagaagttggagcaggaagaggaggaggaaggggccgcagagcagcctgggtcagaggcctggtgggccagcccagtgggactaggcaggaagctctgggtggcaggtccagcagggaggggaccaggatctcttgctccacgtgccccttagacccaggcctgagcctctggcaggggcagccgcacttggcagggcggtcttcccaagcctcacttcttcaccttggcatcgtaggtgcctgcattcttgtaggcgctcacgtagccactgtcgtc

SEQ ID NO: 333795 - DNA, 346 bp, Homo Sapiens
tggccaacagagtaaagaacgaaatgtgtgtatactaacctgcatatgcatatatatctacaaatatttctatatgtaaccatctgtatctatatttaacagatttcatattcttactggcataaaattggaaataactaagtgttttaacatgaggaatggctacaactatgttaatactacctccatgatgcaactgttataagggacaggttggaaaactgtggaaacataatactttacattaaaaagtagtattttttattgtagagtctccaacaaaggtctctgttggagttacgcttacaatgtgatagttgtgtgtgtgtacggatatgaactttaa

SEQ ID NO: 333796 - DNA, 231 bp, Homo Sapiens
ctcttttagtgtatagttcttgggcttgacaaaaacatacaattgtgccactaccacattccagacattgaacatcttcaccaccacccagaattcctttgtgctctcttgtggttaacccctcctcaaccccagtccgtggaaaccactggtttgttttctatcctctatccatcacctcaccatttccagaaatagtgtgcagctgtttgcacgtggctgcttttactg

SEQ ID NO: 333797 - DNA, 485 bp, Homo Sapiens
cctttccttttcttactctaatgaaagaattatccttaacccaattttacagatgagaaaactgaatccaaggagattaaaaaactgctcaaactcctacagctaataagtgcctgagctaggattaaaaacctagcctagtactcactgggatgggctgtgcagggctgcacttggtgatctttagtgtctacagagacaatggtctgagcttagtcagggacaagcacgagtgcctgtctcctctaagaaccttctcagactctgcttgtaaactgtggttcatctaccaaaagagaaaggaaactaacaattactgagtcctgcgttatatcaggcactctcctatgtcagctcacttaattctctgtgaactaagcatcatgatgattcttactttagaggcatggactctaagacacagcagcttacatgaattacatgggtcacacagttcataggtgatggtgtcagaagctagagtc

SEQ ID NO: 333798 - DNA, 470 bp, Homo Sapiens
tttacaaaataacacaatttattaccattttgaaacaaatcacaaaataacattcagaaactcaacatttctaaataacttaattcacaataagtttagtcataaagtcatgctacaaaactcctgtgtataaaagattattaccaaggtattcatagatgttaaaatgttcttcagaatggagttggttctagaagccaaagattctggaatgatgctcgtaatcatgactgccagcctgggagaggagctggctatgcgcatgtgctcttagcttccaactcaccagtcttttgatgggagtgatccctccaggcagtagcacctcagaggcaggtaccctactgatcacagaggcaaagagcctcccacccatataatgttagacaactctacattcatttaaaatctagaggtgggaatgataattcgcaaagcttctattctgagtaggagaactacttgacaca

SEQ ID NO: 333799 - DNA, 532 bp, Homo Sapiens
ttttttttcagagaccttatttcggctggcaattaccttacccgcttgttcattatctgactcctgcactcctcccaagtgttcaatgttaaccagatggcaaagttaaccagacagaggaaatccacataattactctagatgaagccccctaactgcggattagaaggaaaagagatgaagggtgctgcactaataataacaaccattttcaaccaaggcaggattctgggcctagaatcttcagtgacaaattaccaggagaggaggagggaaatgaagagctggaggcctagggagatggtgtgaggagaggagactgtgcctttccacttcttaataattaatgttctcctgctgctctgagtctgcatgtaagtggatttgtgacctctcagctgatgaaaaccatagcacaagaagagtaaaagtgtgctgccttgtttcttacttgctaattagccacctgagaccaggggggtttataagtggcctcaagccaattactgattttgttccagagcagagaagg

SEQ ID NO: 333800 - DNA, 426 bp, Homo Sapiens
ccaaatcatgccatttatttttccttaatggattttacagctcatctgagtctctgctgtgttctctgaggagctgtagaatttgtgtcgatgctctgtgtcctccgtccttccccaaatgagcacatatgcagggcaggcaagagcatgctggatttgtcttagttgttaattcaccttctggcttcactgtgacacacatttatctctacatgacattctcaagaaaaatgattaggacagaatcacagcaaggagtgtggaagagggagtttttttaaaaagtcagttaaagagaagcaatgaaccacgagggtcctttaggtaaaggacccccactcctcatctcttcctcttcattcttgatctttcaaaaagaagcacaggaagaggactaggctagcaagggtgctggtaggctgcatg

SEQ ID NO: 333801 - DNA, 649 bp, Homo Sapiens
  misc_feature (376)..(409): n is a, c, g, or t
  misc_feature (555)..(591): n is a, c, g, or t
gttattattcatactgtgttgctcatttgacaaaataaggtaaggatttcataatcaggttgtctgggtttcagagctgtttttaattaactgagttacctacaggcacccaatctagaccctaattctgtggttggtgttcctctgtagatttcaagacaagtagtgatgtcattttctccctgagctgtagggtggacctggacccctcagagatgctcgactgcagggtcctggggtccctagagtggtcctgcagcagcccctggcaatgagctgcctgatgatgagtcccaaggtacattgttctactgttttatacccaggtagaagttacacagcaatttagcaatgttgttaacagacatacagaatnnnnnnnnnnnnnnnnnnnnnnnnnnnnnnnnnnagtgttttgatataaacgtgcaattaaaattcaaagtttattttttatcacaagcacctttgaaatgtacgtggaaaacgtcggctgctcgtgagaatcatgtgtgacttacgttccttatgttttatggaactctcggaacagtnnnnnnnnnnnnnnnnnnnnnnnnnnnnnnnnnnnnnagatcgcaccactgcactccagcactccagcctgggtgacagagcaagactctctctc

SEQ ID NO: 333802 - DNA, 700 bp, Homo Sapiens
  misc_feature (670)..(670): n is a, c, g, or t
ctgcaggtttttattttctcccttaaggctataggaaaatttcattattaagctgctcatggcgctctactacctgctgcaaatgtgagtgtaactgtgcggtctttctcacatcagcagtttcccagccattgggccccttatccttcaaatgctactgcttgtttagttggcttttgggcatttttcttgctgcagcaggtgccaagtgctgcggaagtgtgggagtgtgtggaggggtctgacatgtaacagggacatgccttgatagcagtttcttatttcccagttcttgtcaggcaggtggatgggtggccttagggaatagaccttcctctgttcatctcttcttcactttggtgccagcaaagctggattatgcagcgtatctctaaacattgtgtatatctttatatggttatatatacacagtatatctttacttgattactggctcttaaaagattggaagaggaaccttggtgacagagtaattctgagattgaacgctacccctcattttccctcctagctctgatctgcctttccatcagaggagagatggggaaggggagaaggaagccgaactaagtctagcatatacctacaaatgcctgttttgtgattttctatacaaacacacttataatcaagaaagccaggccgaggnatgatggctcatgcttgtaatcctagtact

SEQ ID NO: 333803 - DNA, 406 bp, Homo Sapiens
aaaattataatttatatttaatgttacaagtatttaaaaaaacgtatatttaaaacaccataaaaagtattaattcgctgtttttaccttcttttgcctgtaccaagtcttcaagagccagtgtgcattttacttccagcacctctccctttggaccagctgcattcccagcagccagtagccacatgctgccagcaggcttgtattggctagcacagccccagcctttagcaaacagggaaatgtaatattcaacatgcacagctgctcttagtaagagaaatccttctagactgtataaagcccttccctttgtcatccctgggcaatttttactacagcaaacccaaaaggtgaagaagtgcttactttttggtaagaggattttgaagagccttcttgggga

SEQ ID NO: 333804 - DNA, 519 bp, Homo Sapiens
tggtatcagaattgaatatatttagctgttgctctctgctaagtaaactgagacctaggtgtgcttaccattgttttctgtgaaaaccagctgatccgtgttacaaatgactgttttagctatgaaacaagacacctctgtgaatatgattccttgtgtggtgggcatcactagagagcaatgactgtattccctaaagagaaagtgcgagagcggcagtacagaccaaggcagaggtggctgaggagattgttccggtcagcaatgtagaattcctgcccctgtgttctgtgaccccaacagagggagccagcacccactgtgcacctcccacacagcccacactgcacaaggcatttagacagtgccttaaattcactccatcaatactgtgagagccccactggcttcccctttggggttttagacatttagggtattcactgaatactttacgttgaagtgtttttctataacattagaaccaggttcaacttagaaagaaagaaaagaacatct

SEQ ID NO: 333805 - DNA, 464 bp, Homo Sapiens
  misc_feature (400)..(408): n is a, c, g, or t
agtattgcttctctctcatttcttctcttctctccccttggggctcctgttgtatattataaaaccctcacaacttatcctatacatttctcaactgctctggtacatttttaatgaatttttctccctgtattgtgtcccagatcaatttcttagcactgcgtttaacttactaattctctgtttgattgtttttgtttagtatttgagggaggaggtattcttcctttcattatcactttaagcttcctcaatgcactaattttaaactaaatttcagattgttgtagtgttttagtctttaggtaaacttatctcccagttgctgattttgttagcatttgtctttatcttatgtgtaggatttttgtttgaagactcattttgagtggcagtatannnnnnnnnccttcttttgaaaaactatcctgccctgtctactagtttcatagtcacttctacct

SEQ ID NO: 333806 - DNA, 938 bp, Homo Sapiens
  misc_feature (557)..(599): n is a, c, g, or t
ttttttatcattttacaaagcttcaatgtaatcatcagcacttgctgtaactaatgttactaaacgctctggagccgaaattgaacagcagcatttaccgttatatataggtgctgtttaactatgtatggacctcaccaattatcagtaatagtccaaccctgaaaagctattggcaccaattttctttcccacaattaacttactatggaacactaattctcaacagacagctggaagacatgtcttccgagaaaagcatcagaacttcaagtgggaagggaatgaagatgcaagctctccatccaatcacagaaatttcacgatgtcctccctgggagttatcgcttctcccatctctctcctgtggaaagtcactgcatttaacgacagatgtaactgaaccaagtgcggcactgtgtaacagagccttctgcaacagtggagatgtccccatccatgctatccaacaccagagctaccaaccacaaaggactaaggagtacttcacatctagtacaactgaggaatgtttcagtttaatttaaaatacggannnnnnnnnnnnnnnnnnnnnnnnnnnnnnnnnnnnnnnnnnntgggaagtcagaaaaagataccaactcttcttataaaacagaggaataacaggaactgtgtatgaatatatagggtaagcctagcagattacgcccaagcacatctcctaagaattgtctttcttaacatatgcaaggctgagtggaccagttccaaaaataatttgtttagttaaagttggaacaagcatcaagttatgttgcaattacctctaaaatttgaaattaaaataattttaatttacccaaactctatgtttgattatgcattctgttttacatttttcctggcatgacgttgcatgtggatcacactaaattaacagtttaccctgttag

SEQ ID NO: 333807 - DNA, 459 bp, Homo Sapiens
ttgcccttatgggatttatattattttctctgtgctggttaaaccaaggagcttctgctcttttccttagtcacctgggggaggcagaaacaaaggagaatattgataaacctggaaatagggccggagagtatcagagaaggaagccttcgggaaagtaaagatgtggcagccagtattcccgttataaaaggatacaactccggcctcatagtccagaaaaattcccacaagcaggggctgctcatgcagatgaagggaagttgggggagaagtaagtgctacatagcctttctttttgcacagcctgagggtccagaatccagactgaggctcttgcttcatgccagtgcccctctgcacattttccatacaaactcctaaatcccatccggttccttcgccaacatccacttcaaagtaacgtcttcctgaggtgaaggcttcacaacccaagac

SEQ ID NO: 333808 - DNA, 529 bp, Homo Sapiens
cagcattttaacaatgttttgcacttcctttggacttcacagttttgataagaaatctgcagttatctgaaccatttttcccctataagtaatgcactgtttttctttgactgctttcaagacttttttttgtctatagttttcagagtgtgtttataacgtgtgggattgtgtttccttggatttctctcatttgaggtttgccgatctgttgaattggtaggtttatgcatttcacagaatttgagaagttttcagccattatttatccaaatatttgtttagtaatacattctttctcttctccttctgggacatgactgttagttagatctttcggtattttcccacagtctctaaggctcttggcattataaaatatttttactcgctgcagtttgaattgggtaacttctattgctctatcctcaagttcactgactcattcctctgtcatatccattctgctcttgagcctatccagtgagttcttaaagtttctgttattgtatttttcagttctaaaatt

SEQ ID NO: 333809 - DNA, 489 bp, Homo Sapiens
ttttgcatggagcacagattactgctctactctaggttacaattccaaggaaataatgactaaagaaaaatactgctgtttcaacatttctgagtcatttagtaagaatggaaggttaacattagcaatttaacatttcaaatgtggtgggagtatttattgatgtactaatttgcattttgttcctgccaaatctttttactctgttggctccagggagtttgaaagtctaggacagaatttttcttcctaggtttgtttacatattgtggaaaagaagtgagcatctttggagttaaggagagttaagacccaaggagaagaaagaaaaagactatgaaagatttttaaaatgtttatccctgtgtaagatctccaaagcccctcccttgacccagtagtagcatatggagccacagtgatggctgaaattgaatatcccactaacttggtaaaagttgggcaggctcacagtcagacttaaatcat

SEQ ID NO: 333810 - DNA, 817 bp, Homo Sapiens
  misc_feature (506)..(545): n is a, c, g, or t
aaggataccaaggcagttttatttttggtgatggtgatgcttgggaggaggcggggcgtgacactgaggagtagggaagggaatgttcttggtcattggagcctctgaagggcctcttcttccaaagtcaacgagtgactaagtagcagcagtgacacagaagggcagcctagttgagaagtgtccactggacagggagaagcattagtttgggcagcaaatcttaggttgctagttgatcctggggatgcttgcaggtcacctggtcaacgtggttgtcagaggcatgctacctgttctttctagaagggagacctcacaaggccacatagctacttctactggtggagaaagaagcttgggagagtctgtagggccaatgcacccactgaacagctactgttaggtaggaaaggcatttaggcaacaggggtagacagctcagcgtaaaggggacccataaatcctgccaagagagccctgtgatgacggaggtgttctgaacnnnnnnnnnnnnnnnnnnnnnnnnnnnnnnnnnnnnnnnncatgagcacttaaaatgtggctagtgtggatgaggaactggtttttaaactttatttaattttaattcatttaaattgaggtttaaatagccgcatatggctctgattgcggcattggatagtgagaatctcacattaccaaccacatcccagtgctggaatggaggcagctctgggtgaaatggctgctctgtctagtcctgagggaggtctgggtgctttgtaagtcagaggctggggatttgaggcttcctgactccttccagcctact

SEQ ID NO: 333811 - DNA, 1092 bp, Homo Sapiens
ttttttttctgagatttgggtatttgataaagtagccatctctcccagtcttcatggactggtttcatacaagagaagactttcacctatcatcccagctaattattctgggtacctttcaaactttttgggggcatgcattttctctggaattgtgcatataaatttccaattagagatgtatgtttggtcctttttcagaatcttgtaataacttgcttcttctagcacctatctgtggtactgtggtttctctggtgcttccacaaactccagagctctcctttgttcttagtgacccctaggcatccaaagtatgctatatctccatcactgctctgagtcaggtgagacagaaaccaattcctcaggcagccccatgaaaagccagaacattggatgtgtgttcccctttctttctctctcccaagacagaagctgtgttttgggcattttttctttattgcaccaagctgtgctggtttgtggagggctatcatgaatgaaatacagtagcttttcttaattgtttcatttcagttgttcttggcttggtgcatgcctggggtatggcaacttctaagctggtttctgaagtcctggtaaagctttttggctaatatattgttattaagttactgtcttagttggagaattcttccatcttactactgttgttctgaaagtttgatttctttacacaaactctggaccatcctgagaatattccttgagatataatgataacttgtggggaaagttttgacaatgaatcttactccttacttggaatacagacctcacttttattactaaaataattatagaaaactcacttatagtttttagttatgaagtatgtacaatacctgttacatagatggtgctcagtaaatatttgattccttcccctttaagaataaagtgtttcaatgtaaacataatttcattgcattttatatgtagcaatcattgaaaatacataatttagaaataatttttactatagtttactaatgataggttagcaaactgagaattgtatcttattttatcaaatgtgataattagaatgtgaaattttcattcgca

SEQ ID NO: 333812 - DNA, 469 bp, Homo Sapiens
tttacaagtcaggtttattgcggtatcacgtacacacataaggctcacccgttttcgatgtacagccgacgacttggtaagggtctagagttgggcacttctgcgccgagcagaggcagcccacatttttgcccctctgcattcaggccccttccgggcccccagccacgacctgtctctcctcgctcctacagctttgcgtcctccagaattgtcctgtgagtgactcccgcaggttggagacttttgtgtctggcttccttcacttggcagcaggcttcgcgggacccgtgtggtggcaccagcgtccagcccttggtactgctgagttgtaggttgtgggacaggtggaggtaccacagttgctcacgggttcacctgtggatgggcatgtgggctgttgtgagtgaagccacttcagacgtttgcgtgcaggtttggtggggacgtgcagtttcatttcttttga

SEQ ID NO: 333813 - DNA, 930 bp, Homo Sapiens
gtaatgtcataaatgcataaattatttatattaaatgaagattgtagcctggattgatacaaagtagtgaaaagcactgctccaacctttttcctgtcgtgatccacagtgcttaatgtgggcaacattaaaggcatggaccgtaaaggaaagaaggcagacgttatgcaaaacaactgaatgtagacaattgctgaggcaggtgcttaggaccaagtctggcctatattgcttgagggcaaggagccattggtgattcctaaaatgtccatcttcattaacataatagttcagtaataaatagtgggaagcctcacaagccgaagaaaaggtattcatctgtccagagcctctccctactagagtgatggacaagcttttcaaaagtgctcagctctaactgcagtgggctctcagtcagatcctcttgataaggttcagaatgaagcaagataaattgcaatgacgttcattctccagcagcgatgaacaatttcatgaccaaaaagtagttttccaaagtccctttgtgacagagtccaattatgtggcctgagcctcagttaagatggatcatatttccttttcttcatgtcctggctcttcctatgagattcccagtttcctgttgtgcgttggtcagcgctataagtttggaggtcccaagatccagattttgcttgtggtttctggtggcaaacgctgtgtggagtcctgttctgggtcaccatctggttgttcaaggctaatgtgtcagaggtctgggctgggtctgctctagacgagggcttgaccacaccatcccctgcatcgggagtcacagcccacttttcagagttgtcttcaagagtctctacagaggtcaaggaaaagtgcgtcatcagcaaataatgaagtattctcacagaaagcactggaaaaactggccct

SEQ ID NO: 333814 - DNA, 593 bp, Homo Sapiens
gggccttctgtagctcctgaaacacaagccaagtaggaggagagattaaggagtgaagaagacaagttcccaggaaaggaactaactagacaatgtccaatatggttgtgcaacctgccaccctctcccttacctgcaccaagtctagcctggatgtacacacagcacataacaggccttccaatacctgagatcatctctttgttaccatccatccttaagtcaccactgtcacttattagtacagtgccaagaaagctgtaaatgaatttggagactaggattttggtcctagtgttgccactaatgaggtagacattggacacgtctaatgataataactaaatttacatcagcagctgagacactttatatactttatctcatttaatcctcataacagctctaagaagaaaaaatcctaattttacatatgagaaaatggaagtgcagggatattaagtaacttgagcccaaagcctcacagctgaaaagtagttgggaccactatctaaccaggtctatctgaagagacaccttgcaaacttctcaaagtggaaaatctgagcgtagaaagattagaaagattatta

SEQ ID NO: 333815 - DNA, 782 bp, Homo Sapiens
  misc_feature (278)..(278): n is a, c, g, or t
cctgccttttattttaaataacactgcagtgagcatgatattatgtacatcttgtgtcatgtgtgacaattctcttgggttcttttcagcagtgttgagaaggtggtgtaaaggacagctggtccaggcccctcagcaacatttgaccagtcttggtagaatttcgaggaggaaacgctataagtgtgcgaggtgacaaatggggcaaagacatctgaagcccataggctccaagaaggagcctgtgtctgaactattaatgggtttgggagtccttnaagggtgagaaggagggggaggggccacatccaggcatctctgaggcactgaaggaaattctgaggtgcttctgtctgtgagccccaggccccatgaggtccagctgactttccaaccccacggtcccaggagagaggcagcagctgcttttcctttcaggtgaaattttcataggtaggactttcaggaatctcaagatcattctgttgtggtggtggcaccacctgaggtttccgtatggagcagtagattgtggctgagctctcttccttctgagaaactggggtctttccctgtaagttgaacacttgtgcatacatggtgttctctccaaccacagactcaacttccgtgacatatggagtgacgggatcatagtctgcttggccctcaggggctgggtcatgtccagcgccctcctgagtgacctggtcaaatacctcatatcttccactgatgggcttgtgcacctcaggcctgtcctcatcctcctcagttgtgag

SEQ ID NO: 333816 - DNA, 666 bp, Homo Sapiens
  misc_feature (339)..(339): n is a, c, g, or t
  misc_feature (484)..(484): n is a, c, g, or t
ttccatctttgtaacatctttacttccttggagcaaattcccaggaatgggttttcggggtccaagggtatgcacctctagcactacgacaaacgcggccaacacgcttcagggaaacggtgccccagtttgcattctgcttcccctcgccctgccctgggggtctgactggtgaaacatgggatggcagagtggtcgggtgtttcagattccacggtgggccggggtcttttcctaccctcgggagccgtctgaatttctcctctgccgagttcctgcgggtgtccttcgcccaccggcccggggggagtgagtagcaggcaccaggtgagcaggccntccgctcgcagcggctacgtgcacgggcaggagcaccgccccacgccccaggtggccgcagggtgaggggaccggggggcgggaggcgcacaatggggggcacgcccgtatctctagcccggccggcagcgggcagcgaggctcnagtcctcgccccttctcccagctgctattcggggctcccgaggcgctcagaggtgtcgactgcgtcggtgtggcacaacccaggggccaggctaagacgccacacacggcaacgaccctcaacgacaacgacccccacgacgccccgcgccccagggccagcaggctggggtccgagaacct

SEQ ID NO: 333817 - DNA, 432 bp, Homo Sapiens
gcagagttttatagcactcagaaccttttggttgctcagaacatagcttgaaaatcctgatctttcacatattgcagcctcagtccttttataaatgatgagattcaggtcttgggggtgaagtgactttccaaatgtaattccagaagttactgggaaagccaagaggaagagttcttgggtctctttatgctcctctaagctatttttctctgctgagcagttaggactcctggagggggcaggaagctgtgtgctcaagtgacatcctttctttagttttgtgtgtgcatatttgtgtaggcacatgaatgcactcttgtatacctactaggtgcagtgagagctggcttcagggagaaagggaaatgcgtgattttggggtccccagcctgagcctactttttctcgcagtattctttgttctggaat

SEQ ID NO: 333818 - DNA, 639 bp, Homo Sapiens
tttgtcttttaagattttatttataattttatatttgataccactattcaagaacaatgtttggtctatatcaattttgtctcatgttctagatgcatttctataaacagctttatttcattattctagttatgaataatgaaacagaaaggtggtttccttacaaaaaataatccgattattatttccatttgtatttaaaggttaatctaaggaagaagtgttaaggaaaaatgaggaaacaatgggcggggaggaaaatggaaacagggtgggtttaaagagatcagaggtggtaaaagataaagagataggaccaagaaaaaccacagcatatcagcaggttgtgaggctttaaagagataaactcatcacactaatgatacactgtgggaacattatctcaccctttggaattatgattagttgattgattactgcttgtggcttttgggccactcataactctacaattttagctctccaggaaagtctttctttgggaggcagtctcacagtggcctgtgctatgtcatccctgtagctgcagcctctggtttcttgcccctggtgaaattcacccactaagatagcatttagtaactgatataaataaatgaacatatggtaatagttggg

SEQ ID NO: 333819 - DNA, 422 bp, Homo Sapiens
ttttctattttgcactgtggaaatctttgcccaaattactgcaagagtctcgagcatcctgctgtcataagtgcagagtcaaaggaagaaaacgatgattttttaaaccatctttctgctttctagtctcacctgagtgcctcacatttggcagaatcaacctggaatcctgctcataagactatcagggaaatataattcccagacttccatttccagaaaaatgtaataaatacttttaaaggggatggagatggtaccgtgtgctaaccccactctgagacaaacctgggtcacaggaaccatagggaagatgtctgcagtagaaggggacctcgaagtactcaagtacttggctcacaacagcactattcacataaagcctggcctgccccttggtgacctccttcccttacgcctct

SEQ ID NO: 333820 - DNA, 424 bp, Homo Sapiens
aatgaaacgggtcttcattactgtttaattatccttatttatcttcttaaaggccagttttaaaaagcagttccaaagctcagccattttgccatcaatagctcagtcatttgagcataatcattaagcttatctccctattcatttaatgctaggcctcctttatctctagtatgctttcctttctcttctttattatgtttgtattattaccctttgcaccactgatcgccataaatacttcttggttgtaactctggaacctctttgatgattcatgctctcctgtgagagtcctatagacagacttgatttactttcagctttctcctttttttccttctatttttgcacagttgtcattgtcacttttagactgcgtctggtttttacaatgatgtccagtcttcgaggtgaaaccgct

SEQ ID NO: 333821 - DNA, 404 bp, Homo Sapiens
cttcttcgttttaatttccctcatttgagaatgttgtagtcatcattgggtgtcatcattcaccagtttgtgaagggagttaaaggaaagtgcattcctctcccatcttttctttctttggggtttaataaattgtgggaaactaagactgtgttctagactgtacaccatgcagtttatattatgatcttctgtcatctttgcagcctcagattccatttttagctaagactggggttttaaataacttgtttaaggttcctacaactaattgtcacaattggaattcaaacaattctaggtatttttgactacaaagatctaagatctttgcagagcaagcttatctgatgcttaaaaaaatatatattttttaaatttttgagactccatctcaaaaaaaa

SEQ ID NO: 333822 - DNA, 451 bp, Homo Sapiens
acaacatattcttttattgcaacattttcctcagtttggaaaactgtgtccccacacgtaggtccttctagaatattgtaagtcaatagaagaaggcctgtcgctcacacactgggattcccacctcgctggaccccaggtcagatagcaccagggcctgtgtttcttaggccgaagtcctgcctccaggaaggtgggcttcccttcgtggtccataaagaaagacagatacttggatgcaaccaccaggggaacagccatcctccaatagaggcacacgactcacttaggcctgggcgacacccaacgggatggcctgagaaccccagagaggctggtgtcccaaggactctgcccgagtacccagaggccaccatcaaaagggagcagggaggggcagggtggggaggtggggcatgaatttcttcagatgaactcatcaaccacttct

SEQ ID NO: 333823 - DNA, 653 bp, Homo Sapiens
aattcagcagaagggctttattttagttagtgtaactgagattttgccatataaatgattttttcttcatcccatttggatttcaaagccactgataaacctttttttggagtgatcctaatggaattaatcaaatttaaggagatgttgacttaaaatctttattagtggaaagaaaagaatattaataaaaggctaaaccactgcatcttgcatccctaaaaggattattttaaattcaatttttgcactgttattattaaagcagttcactcaaccagtcactaggtttgaactttgatttgaatcgaggtttgcagggcttccatcaaatctctgctaaatccagcttcggagaggagcagttaagtgtaactgcagccaaggttagaaaccttggctcacaacacttggccttgaccagcaggtaccaatggcaattctgtacactgaggactagccagggccagaagaaaggaagttgaaattagaacaggcagatttcaatctaatatagagaacaaattcctacaggaagcaagaggcctaataagtgattagagaaatgatcaaaacctctggagggattacaatcaggataaaccttccctgatccctgaagttcttgaagactgtgtctggttcatctttgt

SEQ ID NO: 333824 - DNA, 554 bp, Homo Sapiens
gcacatcacgtcttttatacacatcaagccttctctcactggtttcacaaatgtttgtcatccctaaaatgaaatgagaaatacatgcaaaacaggggtggtatgtgcccgggatgggtttagagggaaaccagtctctgaggagtactgggtgaactgctgatatgcgggggctccgggtccgtccaggcactgcccttgtgctaagttgaccagacgcctggtgcagactgggccttcttctggcattccccgtgtgtatatgcagacaggtccccatgtacgtacacagatcaagtccaaaacatctgctgtttggttttgtgttcccccaaataaaaggcagtcggaggttcagaccttacttggatacactctttcagcctttaggaattcctgacgtgtccaaaaccatcacctgtacttacgaggccattactttcagtgtaatcctgagtagggccagcccaacctgagagtcctgggcagtcacaaatcatggccgaagcagagtctgggcctccttccccacccagaatgcccttccagaagtg

SEQ ID NO: 333825 - DNA, 907 bp, Homo Sapiens
gggttttttacagaggaggaaaccaagacttaaatatgttacctactaacttgcccagagttacatggagatccagaatttatgttggtctgagcatctctgttcctgggtgagcttggacactaattataacaataaagacagctaacatgtaacaggcactttcttctaggtgccagccaccatgcgagcactgtacatacagcacttcacctcattctcacagcagccttctgagacaggttctccccatcttacagatgcaggagctatggcttggggaggggaagagctgcctgaggtcagacactagaaagcgacagagcttgcttgtgaacctgggcaactcactgcaggctccatggtcttagcacagttggttctccaagagtggttccccccgacccctgcataccaccaccacactaccccgggcagcgcttcccgagagccctcttgggtgaactgggtgtgaggcccgggggcagcaatcctaaggcaaatgtgacatctttgctgaaaagctcttgaggtgtccttaagatgcctctgagccttgtcaaggccgctggctacagggctaacatacaggcctctctccatgatcctttcctgcctccaaataccctgtgggacaccgtatccatgaccaggcgcaagccacgcacatgccaacatgtcatccaaagataaatcctatcagcctctgcagctttaaaatcacacaaattgggttaccaagagccccaaatcaatatggaaatacatgtttatgagctactaggaggagattttaaaccataaagaatactcgcaaatcaaagggccatgggccaaattctaaaagcatttaagtttctggctcattcttttcgcccagcagtgagagagttttgagtcagtaatc

SEQ ID NO: 333826 - DNA, 401 bp, Homo Sapiens
ttgatgaagttgctatccatcatcctgaacttaagtttttgatttttccaagcaaggaacaattattacagttgtatgtaaaaattgaaagacttgaaaactctattatatataattgcacagaatccttgcattaaatttaggacaaggaagaaacagaatagtctattaatttattttcatagttccaggaagggataagagagtgaggaccataaacaaccagaatctgataaaatatccttaactttagcctcctgccatgagttagtatgttggaacagtgaatggcagagaaacacactaaggcaaggccaagtgagaacaagaaaatgtctgcaattcactttttcagtaagtactaccatgtgccaggttctagttatgtcaaaggacagaag

SEQ ID NO: 333827 - DNA, 1150 bp, Homo Sapiens
  misc_feature (252)..(260): n is a, c, g, or t
cagaaacctgttggtttggtgattctgcagttctctttggtcactgccaggtgtgaccatggtttactatgggtcagaggcacagtgtattatttagaagaatagagtgacgcatggtaggtagaaatcttttgggatggggccttatcgcagaaatttctgtgttgggacagtaggatatctgtgctttttataggcttcaagcacgtagatgaatgcaggcagcaacatcaagaaaagcagatttcaggnnnnnnnnncatttacaaggagttcttggcagaagttttgctgccaaatcagaaatcataatgaaagatattaaaattattttgtgaggtggtcgtctctttgcagtgcagttactgacgggtttaagagcaggctgccaagatagagacagaaaatgttgcataatgcaagttgctggccaggttagtgtttatctctactgaagagcctacttgcttttgtcttcaaggtaaaaatatgtatgaataagacctaaaatggtggttttaattggccacaggaaggcagtgccgtaagataaaatgtagttaacagaatagaatgctaattatcccattttgttctgtgtatgttggaaaaaaattacagaactctcagtttcatagtaaagataggtaagtagtgtctggataatgtccagaggatagactgaaactctgtgataaacgtgagcaggcagcaggatgctacctgataactgagtataacagcatgcaggggaggactgtgtggctggaggcagctgcagtagaagttggcagtgccactgtggacttttaaagggacaactctgggtacaagcctgaagtgtaaggaggacataaaattaaatacaattgagcttgtctccttgaaaactggttctctctttttactacattaaaaagatcaagtggacagttaagtcattaattcaggtaattccaatcacaaaactacttttttcctgaagtgtcctaatcattgatttttaaaaatgatatttctttcatcataaattatcagcataattgctttggttccatatttcatattaagcttgggctgagtgatgtttaaagcctcctgcttaccttccccccttttcttcctattttattttacttaatacctaaaa

SEQ ID NO: 333828 - DNA, 461 bp, Homo Sapiens
aatgagactgtgctattcactgttcttttaggaatctctggctccccacaaacactattttgtgaagacatgctccagaccactgtgtatgccaatatctctttctccccagagcactgctgacacccctacacaaattaatgtccccatctctactgatacatctgataggtacaaacgatgtgtccgtgatgactggtggggctcatgtaatccccacctaagaaaagtagaaagtgcaacttatcttttaggttaataagtgctgagagatggaggtttttccttctcattttgatggagatgcctagaaaacctcgcctgtcactctttgtccaacgcaggatagagaacatagcaacagaaagggtgaggcaaaaggcatggctggtgaagaggcactgcatgttatcaggatgtggggcctggtcctgtatcgtattcacatgtttttcttcttt

SEQ ID NO: 333829 - DNA, 771 bp, Homo Sapiens
  misc_feature (189)..(248): n is a, c, g, or t
  misc_feature (464)..(464): n is a, c, g, or t
ccttttctactttaaaactacagtaaggttatgctttgaaaagcaatttttgaagttaccattagccaaaagaacatcattaccattgtttgtcctgtcaaacatataaaaatattctaacccaagcatttgccatcttgaacagagtatgtgtttgcaggcagacagttcaattctcatttctactannnnnnnnnnnnnnnnnnnnnnnnnnnnnnnnnnnnnnnnnnnnnnnnnnnnnnnnnnnnagtgggaagatcaacttcagagtgtaataaggggattagacgggatgaccaacctaaatcaccaggcacagtgtgaggcacagaaagggggctcctcttcatccctgggagggaagttagagtgaagcttccactccccctgcttttacatataaattgttcactcccctgtggaagaacagtaaattgccttaatcattttttattaccacaagntagtttaaactggtaatctataatagtttattcattatggttttctaccacttttctatgcttgtgccttaaggaattttgggttgatatgtttgaaatttaaataaagtagtattaagttataaatctgtatccagaaaaacaactgaagtgaaagttcggccaactgcggtctaaatagtaaaccattatcttcagaatgcctttaaaagcaaatcaagggttgtacctaatgccacagaactgtacacttaaatatagttaaaatggcatattttattttatgtatattttaccacaataaaag

SEQ ID NO: 333830 - DNA, 563 bp, Homo Sapiens
tttttttaaaaattcattttattaggtaaatttagtagggactcactgggagcctctgaaatacaccagcccgcttctgcttactttctccgtctttcagagtcttaaaatgaaaatcaaagtcactccccctccccttcttatccgatgtttgcatagaaattgtagagtttcttttcctaaaagtggagaatggtgctgagagccgagggggtgagttcagacaagaagccctggagaaagggaactccgcgctgaaggcagggaaggctgcgagatggaggaaggggtcagaggcgccggggaagaccggggggcactcacagttcccgagtccgcttctgtcttcctggccctgattccaaaaggaaatgtgactcttttgtgcagaaccagaaatgaacatccaggaagtcggcaaaatcactaactaaacaaccaatggaggaaaaacaacattaaaattccaaatttggggttttttttccataatggaacagaaaatgaattgaagggaggggaggggaagaggacagttttcagtatattttaattttttcctg

SEQ ID NO: 333831 - DNA, 523 bp, Homo Sapiens
  misc_feature (329)..(329): n is a, c, g, or t
  misc_feature (333)..(333): n is a, c, g, or t
  misc_feature (486)..(486): n is a, c, g, or t
taacaattaggaattttttatcgttataggtgttgttaaaggactccagtagcaaagatcaaagtctccgaattttgcctttggagaagggggtttcatttcagacatcaaaggtaaggctctcaagtcaatttatgctctgctgggttgagtcagtcaggatacaaattaaggtccatatatttcagtgacaagaaggaaacggttatgtaaatacacaagtattaacatcaatctgtattaaattatgtaaacatatacatcttctgaggtcagcacatagatcctcttctttgagcagagctctactgaagcattgctcgaatctngttntgaagttgattcatcgttcaagtgctttgtagtgaacctgagggcatttagcagcccctccacactgtctggggcctgctcctttcaaacttttatgcagcctttcatatcgatcttgatgtcttgagaaagctcccacagggtggacatggncatagaggatgatgactcccaccatcaccctcatgca

SEQ ID NO: 333832 - DNA, 467 bp, Homo Sapiens
ccagttagcttggggtgtacatattattttggattctactaatgattaccttttatgttcttaagaaatatatccttaaacctctatttttttaattagccaagacccaataaagcagtttattttggctttccttatttaagagtatgataacaattcagccatttttctgccttatattgtacatctcctggccctcgttcacatcctctggacccagttttactgtaaccactgctatggcaacgagctccacacaggtgaaactgacagcacttcacttcagctgcatcaatttttttctgcctcagggcgtctctaatatcgtgccattgcctagaacaccgtgagggaaccgctccattcagttacacgtgcatgacagcaacatcccatgcgtcagccatgcatgaagggggttggaagtcaatgaacacgcccacacctgttctgtcacaagaatggag

SEQ ID NO: 333833 - DNA, 346 bp, Homo Sapiens
tttgagaatgtattgtctttaacgtggccaaattagtgtactctaggatactacccatgtggcagatatttgagaatgcattttgtgtgacttacagattaagcatacaatttgccaaaattttatgtaattaatttcctagtttacatttagggctagatgaagactagtactgtttcatcttttagaaaaactaacacttttcctttagtaaaagtgttaatttttgcaatacttttgcaaaaggttaaacttatagcaattttgtcatagctataatcttacactgttataaaatttagaggatttttaatttttatttattatcattatttgagacagtttt

SEQ ID NO: 333834 - DNA, 753 bp, Homo Sapiens
  misc_feature (116)..(116): n is a, c, g, or t
  misc_feature (118)..(118): n is a, c, g, or t
  misc_feature (212)..(212): n is a, c, g, or t
  misc_feature (215)..(215): n is a, c, g, or t
  misc_feature (217)..(217): n is a, c, g, or t
  misc_feature (229)..(229): n is a, c, g, or t
  misc_feature (233)..(233): n is a, c, g, or t
  misc_feature (267)..(267): n is a, c, g, or t
  misc_feature (525)..(525): n is a, c, g, or t
ccacagattgtacgatttcagagtacttcctgggcccctgtgtgatccgacagaggcctggtcatcaagttggacttccctatgtgaaaccataaactaacctgaggaagatactnangggagaggggctgtgtaacggtgactgcctctaggcagccttctgccaggcagagaacaggaagctggcatgcagggtgtctggcactggtaanatnanaccatgtttgtnagtncattgtcctggcttttggtgggccgtgcatggangttcctgactgaattatagtctttccatctcatactcttcatgtggagccctcaagctttagacaagtcttttatctccgttttcaggtggctcccattatcttgagacctcataatgcttgctttccttaaatttgttttacactggacgctagtcatcacagagctactcacatttctgggccaccactcggctccattatcttgacttctctcctgccctcttacggttggattttcttctttttacaccactgnttttacatgttgctcctccttaagccattggttcctgttggcttttgttcttttacctgagttggaaatctgggaagacaattccaactcagtggtctgggcattctggtggtgctgccaaccccagggcaggaagaacagtgagtgagatactgtgccattacctgcttctccagccttgaagcccaaagcagccaaataactctcaaatgacgatcacttttactc

SEQ ID NO: 333835 - DNA, 379 bp, Homo Sapiens
aaaggttgagcatgtttttgtattgctgtctctggaagaggaaatgaggcatctcttggggtgagaacaagggagaattgaactctcgggcctggccagatggattcctcacactggcacagagctgtgaagggaagggcctttcatcctccagaggaaagagggctggggtctcagaggccagagcatagggacaggcaggagtcctgcagccctgatgcctgcccctcccagtacagaatctctgtcctgacccccacctgttgaacctttcaaatcccagtgactcgccagctttctctgtggatattggctgaattggtggcttgtgtggctgcctgggagagcaatttacccctgagccaaggagggggtgggc

SEQ ID NO: 333836 - DNA, 465 bp, Homo Sapiens
agtaaacttttttggaagacttagaacagcgggttgatattagcgctcctagcaatgtgcctgatttagagtcggtgaatggcttaggtactgagatcatctgactcttcaaagggcattaacttctaatctacttgagagtaaccaagtcttaaatggtatacaatatgcaaaacaaaatcctccaagttaagtaattatagtattttagaacatactaaaactatgtgagtatttaattattgtaaagttttatattatattagattttatactctattttgaggcaggagtatcatcataaaatagaattaagtacaggcatacctcgttttattgtactttgctttgccatgctttgcagatactgagtttttagcaaattgaaggtttgtggcagccctgtgtccagcatgtctatcagtgccattttcctagcaacatgtacctacttcgttagcattt

SEQ ID NO: 333837 - DNA, 691 bp, Homo Sapiens
tttttctttttctcatgtaggcaatttttccaacacttaggagctgaggaaagcccagagtctattcttacacatcacatcaaggaatttcttccccaaaaaaattctctttgcatttatgtcattgggatgaactcctttatgtgtatgtattttttatttcgatgaactttccagagtgggaatccatccttatgactttttattcatatgaccgctttgctttctaagatggctgtacccagtcacaacccccaaggcaatgcattcacacccaacaattagttttctctggtatgagaaccaggagaaaagtccagtcctgagggcactggtctggctactcttacaccccgggtctgcagggaaaagttcccccaaagtgatgatgcttctcaagtacgtgaggtgcttgttcatctcaaacatgtcatcatccacatttatgcattccagacatgaagtgtctacctggggcctggcatgggccgtgccctgggataagcatggcagtggtgcgtaaccagcacggtgacctctggcctctggcaatgtgacctgtggatgacgagtccactcacagagcagtggcttacacagacaagagaatccttagctgccctgtgtccatcccatcattagaggagatccgccaaactcaaaaaggagtctagaatcacaagcatcacgt

SEQ ID NO: 333838 - DNA, 522 bp, Homo Sapiens
  misc_feature (171)..(171): n is a, c, g, or t
  misc_feature (178)..(178): n is a, c, g, or t
  misc_feature (180)..(180): n is a, c, g, or t
  misc_feature (184)..(184): n is a, c, g, or t
  misc_feature (186)..(186): n is a, c, g, or t
  misc_feature (188)..(188): n is a, c, g, or t
  misc_feature (197)..(197): n is a, c, g, or t
  misc_feature (199)..(199): n is a, c, g, or t
  misc_feature (201)..(202): n is a, c, g, or t
  misc_feature (205)..(206): n is a, c, g, or t
  misc_feature (214)..(214): n is a, c, g, or t
  misc_feature (216)..(216): n is a, c, g, or t
  misc_feature (219)..(219): n is a, c, g, or t
  misc_feature (222)..(226): n is a, c, g, or t
  misc_feature (241)..(241): n is a, c, g, or t
  misc_feature (243)..(243): n is a, c, g, or t
  misc_feature (253)..(253): n is a, c, g, or t
  misc_feature (261)..(261): n is a, c, g, or t
  misc_feature (272)..(272): n is a, c, g, or t
  misc_feature (277)..(279): n is a, c, g, or t
  misc_feature (282)..(282): n is a, c, g, or t
  misc_feature (288)..(288): n is a, c, g, or t
  misc_feature (299)..(299): n is a, c, g, or t
  misc_feature (312)..(312): n is a, c, g, or t
  misc_feature (314)..(314): n is a, c, g, or t
  misc_feature (324)..(324): n is a, c, g, or t
  misc_feature (331)..(331): n is a, c, g, or t
  misc_feature (339)..(339): n is a, c, g, or t
  misc_feature (358)..(358): n is a, c, g, or t
  misc_feature (370)..(370): n is a, c, g, or t
  misc_feature (379)..(379): n is a, c, g, or t
  misc_feature (405)..(405): n is a, c, g, or t
  misc_feature (419)..(419): n is a, c, g, or t
gcttttgaagttgtgggaaggcaggcggattgtccccaaaggaggtgcccttagttgatgtctgtcatcctacacaggtggggtcttttatttcatggccagggctctcaaaggcttccttttggccacaatgagagaaatctgggggtgagtgagtgtcctcccaggtcnggggggnanggangntntaaagaacngngnnagnncggtcgtncncgnccnnnnnggttgtaattttgtnanggtccctggntgcctttntacctggtganggtgnnnatnctgttntcctctagcanttgggaaactttnanagaaatattntggccgnttcctgangctactttattggtaagangaataggttggngaatcctgntgactagggctatgagttataagggngaaaggtctccctngagttgccaggttggggcatagaggttttaaatggggaaggaataggtgataagaatatgtaagaaggttcactctacctccattttgaagacagagggttaa

SEQ ID NO: 333839 - DNA, 454 bp, Homo Sapiens
tcatcgtgtcattttcagccatatattttgacaggtatctctttaaattttgactttttaatatattttcctatcctagaggaattcccactcacttattcagaccgtgaaaggaggttagcagaacatgaagaaaaaaccttaagcaaatagtgctgcaaatctctgatacccattcaaagaggaaaggggaatggcagtcctgggcttccacaaagaactgtcattaattgtgatagagggatggggaaagattttctggttccactttcttatttagagaccacagctagtcaggtggtaacagttttatactagtgtacaggcctgggttccaagaataagccattagacaagggtaacaaagaagctcacacgcatcccaggctcctctgatgacagacgtaacactttctcatccttcctttcacccaatatcaaaagctgagaagcc

SEQ ID NO: 333840 - DNA, 460 bp, Homo Sapiens
attggctatttattgctgagatgctccctgtggctccagggtactcttgaggttggtgtagacacccatagctcatgacttgaagtgcaggtgcccaacctcgatcatcttgtgtgtttctccaggattcagtgcaggtgaagggcagcagtgatttttttagtagaggtgagggagcagacaggtaaaaacttatcccaaggtggtgaacaggtggtggcaggtaggtccatgcatgaacagagggtcccagcccctgacacatgttcattgacccattggacttcaccagcaaaatacaaatgcaaagacagttatacaaaattttaagattatgagtagaaaatcataagccactgatgagggccaccttctgaggatgtggtgctatgtgggtgtatggtctcatgcccttgaggctgggccccagcagaagtagaaggtagagagcatgagggcc

SEQ ID NO: 333841 - DNA, 873 bp, Homo Sapiens
aattgttcaccactttggcaaggtggatataatccagtgaatttgtattctcagagcacatgttgaccactggttggtaaagtggtccaggaagaacctctttatgggagagtgtagtgatctggggattcaacctttactgggcatgaaatgataggcagttaattgacagttggcagtagagataaaggtaattctttctttaattttcgggcttagagaatggcttatctccacggttgctttaaactcccagtactccagtgtggtagtgacattttggcctgccttttacagaggcagagtccatggtggccccaggcacggtctttgatttaaagtctgagctcctgatacccaggtgcgccctctgcaaagtcatgttctttcaggctaaataacagaagggtaaccttcagctgggttccctaagatgatttctttcgccagcaatcatcactttccccaccggtttttaatgcagccatttctttcatctgtattcctatcttgatttgtgagaaattaaatgagcatgtaagatgtggtttagataatgattaattaggggaaaaggcgtcattccaatagcaagtcactattatatgctaaggaaattagttcatatttttggatggcaaattgacttgtcctgcatttaaaaagataccttttaaaaaatgcctgttatggctttttttggttcattagtagagcaacctgcacttaatcctttggatgattttaataggcatctattattttccctacaagtcatgaagcaaccagtttgggatatcattaattcttttgtttaatattaatttaatgataatgcattattattttcagcacaaagtacttttgttagcg

SEQ ID NO: 333842 - DNA, 452 bp, Homo Sapiens
ttttatactttgtttaaaattttctacaaaattgtatattttttaataattaaggaaagagaaatctttttttaaaaaaatacatttatttcaaccatattgtaacttctgtttaactccattgcctaattccaatggaaaaaatgtatctatctgtagccttctttggaatattttccagatcttctccccgtcatcatttctatagccactactgcaggaaggttttatcatcgtgtatcccctcttcggtgtgattatgtcaggagcagtcaatgctagagaaatttttgctcctctaatttaataataataactaacatacattaggtacaccaagtaccaggctccttgtaaataccctgcatacaatatctcatatgattatcttttattttagagtgaagactattggaggctttggaaaagttaagcaattgctcaaggtcaca

SEQ ID NO: 333843 - DNA, 341 bp, Homo Sapiens
ggcttctttgagtctttatttccttggtgaggcagggccccagggtgggttgggctgcctggctgaggctcctgtagacccaccaacctaggggcacttttctgggcaccacaggtaaggcactgcctgtggggtggaggaggctggaggaggatgcccaagctccccacactcctcaccccagaccggggaagctggatatcctccgtgttgtcctctccccatagctggtctgaggctgtggtttacacgcaggcacaggtaggcgattctgagcatcaacgcagatggaggggagggtgagccgtcgtgggagaactggcccaagaccagcacctggc

SEQ ID NO: 333844 - DNA, 265 bp, Homo Sapiens
  misc_feature (101)..(131): n is a, c, g, or t
gtatgcattctccaccacactcagctatattgttttaattttttttgtaaagacagggtgtctcactatgtcgcccagactggtctggaaattctgggctnnnnnnnnnnnnnnnnnnnnnnnnnnnnnnnattacaggtgtgagccaccacacctggcctcctgaaaggaaatcttccttcctaaactgaactaaaaacaaaatcttccactgaagaggggaggcaactgactgaactaattggatacatagagctgacataag

SEQ ID NO: 333845 - DNA, 429 bp, Homo Sapiens
ttacgaaggaataagtaactcgatgagtgaataaatagctagcccatgtcagtttttccaggttttagggactcaatcccatttacaaatttttgttgatatatgttatccacttttaaaattttcttaaatcacatccttttatatagaaaatgtgttttatgccccattatttttgccaaatccttaatttttaatattttgaggtcacattcaaaagaaaatattgtgaaagagatgcaatctttaaatcataattataagcaaattgggagaatacaaattttccacttggggataaaatacaggtaattcattttcaatctgttcatttccagtccactaataaattgttgcccctatctatacctttgttcaaggatgggttttctggcatattttgacattaaatttcctctacaattctct

SEQ ID NO: 333846 - DNA, 665 bp, Homo Sapiens
  misc_feature (56)..(66): n is a, c, g, or t
ttttttttcctagttctttaatgagatccctagaaaccgggtttaagacaattgannnnnnnnnnngctttctcggtcagataatttcagaaactccctccctgtgcacctgtgggcattcccacttccacacaccaacaagacaaggttagacagatcttctaaggcagcttctaaggcctttcagcatgtcaaaatgcatctttggggtatccgtttctgagtaccaacaagggaacggaatgggttaagatttcattctctcagtagaggaaaatctagggattcattctacatttgaagccaaaaacagttatctgactccttccagagcctttaaatgttgatcccttcccctcttctcccatcaaacatacacttggaagtttaagaagaatggagggatctcaaggtgtaaagttttctttctgtgcgatgaccagtgctggtcctcggatgtcaactgccaaccagggtagctcatggttacaacctcccgtacagctctcacttatccagaactactgaggctccaagctcagtatcaaactgttcacttgcactatgtcctctatgatgtcactgtcatcatcattttacagacacactgcgactccaagtggtcgttactagttcacaatcaagtagctctcgttcatcttctc

SEQ ID NO: 333847 - DNA, 463 bp, Homo Sapiens
  misc_feature (399)..(399): n is a, c, g, or t
tggaaaagatgagaaacgagtctttatttgctccaacagatattaaaagtatgagaaccacaaccatgaaaacaacagaagctgatgtgagaaacaacactaaaattaaacagtgcagacacaggtccagcgacaatgattttagcactcatacaggtggcatttcggtcagtgcatgatgattcagtgggcgacgatttcagatccttgtctcatatcacacctcgaaatacattcctggtcaattaaacactgaaacgtactcagagaaaaagagatgaaagtgtaaataatctttgtgtgagaaaggactttccaagcatgacctcaaaggctagagcataagagtcttcgttttaaaatgtgcaggcatttctgatttaaaaatgtaaactatangcaggttacatgaaaaaggaaaaaaatacagttaaatggcaaatgatgcatgaggaataatgat

SEQ ID NO: 333848 - DNA, 420 bp, Homo Sapiens
attgcaaaacatttgttacagaaatttcagaaagtttttcccgtggtatctgccaacttctgctctgaattgtatatctaaacaatcaaactcaaagtgcattgtgaatccaataatagacctttaaaaaagaacaattcttctaaggatttatatatatttatagtgtcgatagatatgcataccgtggtctatccatacacaaagaaggaaaagatgtatatatattcagcaaacccaattttaaaaccattgtatttgtaggaattcatttaaaaatgatatctgaataatttcccccattataaactagggttagaacgtttacaaatgagagtctaggtcctatattatgaaatggctatgagtacagtatactgcacgtactgtttttacacagcggtagcagcaatataaact

SEQ ID NO: 333849 - DNA, 484 bp, Homo Sapiens
gaaacaaaacaattttaatttcagaatattacaagaatataaaagaaagacaatgcataggatcgtttctttacaattacatatacatagtcaaataagaatgaaaactttaaccaaaacacttaagaaaccttgtttctcttgttgagcaagctcagggataggacaaaggcaacccttgctctgcagaaataaccctggggtgagggaatatttcccccaacaggttctatctgtccccagacatggccaggggagggctccatggctctttagcacaggctgtggcctcacacactccagtctccatggtaacccaagcactcaggctattatgtcccacacctcctcgctggcctgcttctgtcaactctacgctggtagaagatctcggcattagctgtctggggaagctaacttcctacagtggggttttagttgagttaatcaccactggtgtaaaacgcttgtgcatcttaggaac

SEQ ID NO: 333850 - DNA, 887 bp, Homo Sapiens
taagctttgtacaggttctttgtcaaccataatgaggttttatgttttctttcctttttgtttttctgcaatctgtccaaccaaggtttattttgcaggaatttgtgactgggggcatgcctgagatgagcaaacggtgcaaatctttaaggctgtgacacttggctgttaatagcttaagaagctcttggttgtaggagtaagtcataaagccacaaaaggatttagcttcttgagaaagcagaaatctacttagcatttttatgagaaaatggagtgactcctccattagagtcaagcattaaggcttcagcgtcaactagaatatttcccatagtttggcaagttgccttttaacccatggcttcccacacctggaacctgtttcctctagttgctccatcgcaggcaggctactgtgttttgatcagaacccagaagaaaagaacctgggatctgggtatcacaggtagcattttatagcatcagacatgttccagtgactaactcttggctgccccatccccagacactttcctgcagtgggttggggctggggaggttgtggagctcactgatgcacattttgcagtttggctcaatgggtccacaggccttacataacctaaactccctgacttttcatcacttcctgcagaatgtgatgtgggtgggctgagggattcaagtagagactagtgggtgatacttaaacttgctcaaagggaacatcttttagggagccttctagagtgccacaaaattgggctatgactgtttctgccatctgagagagggctatcactctttctattatcttaacaagcagaagatatatttctattgtaagtagtgaagctcttcgtatcttaacattgaataatgta

SEQ ID NO: 333851 - DNA, 362 bp, Homo Sapiens
  misc_feature (337)..(337): n is a, c, g, or t
actttagttttatttgcatggcatcttcgcaaggaaaacgttctttaagaaaagaaacatttcaacccagaatatatgtagaaaggttgaagcagataaacatcacaatcctgatacggatgatgctgccgctggtgttgaccggggtctgctgacgcgccaggccctctcctgcgcactgtgaatgtgcgtgctcatttcagctgtcaccactctgctgtcaccacccttgagccccggacaacagcggggtaaagaggggcagggcgtggctatgcgagcagcctggtacacatggggaggggggtgccagatgcagcccacctactggtcccanaacccaggtcctaagtgctcctgag

SEQ ID NO: 333852 - DNA, 470 bp, Homo Sapiens
ctaatcacacttcatttctttttcctgtcatcttgcattggctggattctttagtacaacgtcaaagagctatggtgatagctatcatgccctaactgctcctgtttcaatatatcttgatggtaacgcattttaaatttcagcataaaacataagactttgatagatatttgattaagcaagtttccttctaagttttccaagaactttacatgtgcgtatacatgtaaaattttaaattttatccagtgcttgttctttatctactgatactttttcactcttcaccactttatgtggtaaaccacactgaaagatttttctaatgcttaatcatccttgccatggaaggcactgtgattacattccctacataaatgcatcacagccctattgtgtaacagtttgagctatacctatacttaccctgtaccaaggttcatttggttcagaaatgaatcacgagtttc

SEQ ID NO: 333853 - DNA, 796 bp, Homo Sapiens
  misc_feature (238)..(251): n is a, c, g, or t
ttttttaggtggagatgacggctaggggttaggttggggagccagaactcccccactgcacgagtgtgtgttaaagaaggcaacacggacctcacgccacctgccctgcggtcctctcccggcccagctctcggtggggaaagggggtaggacaggaggggcagagggccgggaacatgcagcacccaccgcgggtcctggggagggacagacagtagctcatgaccaagatggcagnnnnnnnnnnnnnntgggaggggaagtgtgcggccccgcgggaggctgggcgggttactgcagggcttcagccgagggacccgcctcgccctcgtggctggcggtctcgaagccatgctccacacccatcatgtccggctcgatcttgcccgtttcactgatgaaggtggtgtaggcgtcatcctcagccttgagcaccttgaccttgggcatccagctcttgcgcacgacgcggcgggcgttggtgcacatgtcggccgcgatggcattcatctcgctctccttgaagttgggggcgaagttctggcagtagtacttgacagcgtggagcacgcggctgtccaggggcttccgacggggatcgttggtagaagagcggatgccggtgccgcagctgttggccagcgtgttccggtcaaagaaggaggccaggagccgccgcagtaggaccttgtgccgcgtgcctgcgctgacgtggcagttcatcagctgcgcccttgtgatgtacacgttggtgcctgtcaccagctccagcttctcagaggggtcgccctcgtcg

SEQ ID NO: 333854 - DNA, 377 bp, Homo Sapiens
  misc_feature (106)..(147): n is a, c, g, or t
  misc_feature (236)..(236): n is a, c, g, or t
  misc_feature (240)..(240): n is a, c, g, or t
  misc_feature (259)..(259): n is a, c, g, or t
  misc_feature (309)..(309): n is a, c, g, or t
  misc_feature (336)..(336): n is a, c, g, or t
catatccaagtggtgcctggaacaccagtgggacagaaccgttcactcccctggaaagggggctgaagccagggagccaagtgatctagctcagcagatcccaccnnnnnnnnnnnnnnnnnnnnnnnnnnnnnnnnnnnnnnnnnngaatgagtacaaaatgtcagatatatatcattgatgaatccttccaaaagaagagctgtgagtcagaattttatatgtcttatctctcngganatgaaaatactctgtagcntctatatctattattcagatcttgaatgtatggaagtagggcatttcctngcagataaacttgcttttgctttgacnctgtgtttgaaatagaaaatcattaatttgtaggcaacagt

SEQ ID NO: 333855 - DNA, 504 bp, Homo Sapiens
ttttacaggtaatagaagttttattaatactttgtgaattatcaacaatagctgtttcactttcaatttctaaaggtcaaactacatcagattaaagatattccaattatttccctgactaaagtgaagttaccacaaaataaaacaggccagaagtcaccatcacatcctcaatcacatgcctgcctttgaagagaggaaaagaaaggacagggttttctgagcagtccccatttgctgtggaaggagcggagtggtggtggggagtggactgtgttttccctgcaccccacctgcactcaattcctcttggatacggccacaaaagcaaatcaggatctccttccaatttgtctctaaagcaagactctcttcaagatatttttcaaattttggagaaaaaaacaggtttctcattcaggattcacaataattatttcaaagttcactattactagcatcaaagcacccatattctttattaaaaacctacagaaaaagtaa

SEQ ID NO: 333856 - DNA, 388 bp, Homo Sapiens
ttttgcagagtagtattgcattgtgtaaatatcacgatttctttacctacaaacccattagtatccattgatggttacttaggttgatgccatatctttgctgttgtgtatggtgtttcaataaacatagaagtgcagatttatttttcatatactgatttcatttcctctgcatagatacagtagtaagattgctagattgaatagtaatcgagttttagttctttgagaaatcatactgttttccatagagtttatactatttactttccaatcagggtgtataagagctctcctttctccacatccatcccaacatctgttttgtttgtttgtttgttttaatcatagccattctgaatagggtaaggtgatagtgtggttttga

SEQ ID NO: 333857 - DNA, 417 bp, Homo Sapiens
cttaatgccttcctcccaactaaacagaggcagaacttctttcccaaggactaagatgaaagcagtaaatcctcatgagaaaagctgtgatgagatatggtctgcagatcaggttttgagtgggaagggaggaacactgggtggtagaatccaaagcctgtgcagaagggttgcggagaggcctggttgggcctcccacctccaggccagcccacaagctggtgccacctgaggtccaagctgagcaacctttagagcagcagtggaggaacagacacgctctcctgggagccccataaaggacccatgacagctagagttggccaagttctttaagcacaatccacgcaggccctcttagggtgcagtccagaaaggtgcggaaatccagtcctaggagagggttgcccagttccc

SEQ ID NO: 333858 - DNA, 438 bp, Homo Sapiens
taatgcattgctctggtttattgaacaacagtccaactttacagcattaaataaggggcaaccgttcaggaggggaacgatggcttaaaaataaaaatgaagacagagccgggacagttcacatttccacgtgagtgaggaaaagcgaaggattgttagagacgtgaagagaacgctggcaatgctacagaatggagcccacggaggcgtgggctgccctgcgtccccggcctcggggcagaacagggagcaaccccaaagcctgccccactgtgtcccttccagctgcccttctgccgagaacacccggagctgagggttccaagttcacggcggaaccgcttcccttaaaaagaaagcaaaggttacgtggatttcttccgtgcttccttttccacagacttaaaccggctcaggacgtaaggataacattctgtg

SEQ ID NO: 333859 - DNA, 427 bp, Homo Sapiens
gagggtattagctgtttactgacaaaagagacatttcaggacctcagaaggccagacactcccataggttggatggccctttggggagtctgagcccatttccacaaaatgcattcgttagacccacacacagtgcttgagccccctagacacagaatagtcttgtcctgttcttcaagtgactgggctatcatctgaggaatagtcagcttccccccaatactgggggtgacgggagacttttaagggtcatccccaggtttgtatggcattcttggggcaaacagcagaagggatgactgccctgatgcctcctcatctctggcagcattgcctagtgcaacagctctggccagaacccagcctggtctacagccataccatcctgaacatgccagatcttgtctgacctctgaagctaagcagg

SEQ ID NO: 333860 - DNA, 797 bp, Homo Sapiens
  misc_feature (314)..(322): n is a, c, g, or t
  misc_feature (523)..(523): n is a, c, g, or t
tgcttattaacactaatgtgttttactgagtttccctgagtgcatgtattataaaaatatcatgaatccccaaggattcatgaccacaatcggtcactgtgagaaacagctggtaatactgggtaacatcccagggtagagaactcaaaatcagaccagataatagaaagaaaagcacagctttcacctcacatttgggaactgacaattctccttccatttcctctctcagtgtggctcttgggtgtttggttagcagaaggggataggaagataatacggtttatttataggctcccttttcctttcggggnnnnnnnnntcaccctttcctactaagagtatggcagaggagggatttttagtgtaatggaaaggcaatagacacgataatccggaagatcagaaagatgatctgtctcagccctatcacatagacagctgggcaatttaagaatgtgtctcacctaaaacatgggacccagggcaggaaatgaaggtagcaccaggaagtgcactctcnttactttcagtgaaaaccgttctttgcctgtgaggagctaatattgagtgacactctattacacccctaaatggggctacacgctgcggccactctgttgactgttcatgttaacactcacacaggtgtcacagcaaacaaccatcaatgctacttctaaagtcgcccggttccatgaggaaaagaccacatgctttgtaccacccaggcccaggccgttcataggtaggggcttagctgacgccttttgagatactatgtttctctgcgtcct

SEQ ID NO: 333861 - DNA, 433 bp, Homo Sapiens
tatttttttagcttgctctttcttgtcatgtgaaagaatattgtcaaatatctggtgattaattattgtccttttcatgtttaagaatgaagcataaaactgcctagagactttgctttagagtaagctgacaggaagcctactgttaaactgggggtctcccaaattcccatatacagagagctttgctgtagggtaccaacatccctaccagctaccttagtaaatcccagaaattgtgttcggtttaactagagaagagtccttattccctccccaccttccttctaaccccctgacttagctattataaataccctgctctgtgtcattctgtgcatgggaatgagccttcctgggcctgtgacctgcattgcacagaagggccctgcacttggtttgtaccatcattatcttgaaattcttaattttt

SEQ ID NO: 333862 - DNA, 786 bp, Homo Sapiens
ggaaaatatctagggctgtttctaaaacagcactttctaattttgttaacaccttcctttcctttaagttaacttgatagattgtgcctttctaagcttcagattacctcagacttttcaatacctagttccaacatgttatgaggacaactcaaagatcatgaaacctggttccgctgtccaaacatttacttctgtgcttcattcaaactgaattcattcactgctgtgctagaataactctctatctcccgcctccccagcttctctcacctacctgcctgcttcctgttgcatcctcagtgacacccctggccttgtcacacagcacagcagttcatgtctttccctgctcccatcttccctataccatgtctgagcccttgagccataacatggatggacagcagcaaatggctctgtcttgatggcagggatggggaaggaacagcaagggagctggtgattctgcttagacccacagtgggccccgggatgactgacagtgagggaggctgtcccaacactactggaggggaagctgacctgctttgcagctcttcccaaggcagtctgggccccatctgcagagagtctgacttaattattttcagagtcccagatgacctaatgcacagtcctaggatctactagatggccacagtagcaaggggtagtaggacaagcaagggctttcacatcagaagacctgggtttgaaccttggtctactaatggctagctgtaacatctggggcacatcaactctctactctagattttcaca

SEQ ID NO: 333863 - DNA, 637 bp, Homo Sapiens
tcaagtacagcaattacgtgcggcccatctgcctgcctggcacggactatgtgttgaaggaccattcccgctgcactgtgacgggctggggactttccaaggctgacggcatgtggcctcagttccggaccattcaggagaaggaagtcatcatcctgaccaacaaagagtgtgacaatttctaccacaacttcaccaaaatccccactctggttcagatcatcaagtcccagatgatgtgtgcggaggacacccacagggagaagttctgctatgagctaactggagagcccttggtctgctccatggagggcacgtggtacctggtgggattggtgagctggggtgcaggctgccagaagagcgaggccccacccatctacctacaggtctcctcctaccaacactggatctgggactgcctcaacgggcaggccctggccgtgccagccccatccaggaccctgctcctggcactcccactgcccctcagcctccttgctgccctctgactctgtgtgccctccctcacttgtgggccccccttgcctccgtgcccaggttgctgtgggtgcagctgtcacagccctgagagtcagggtggagatgaggtgctcaattaaacactactgtttaa

SEQ ID NO: 333864 - DNA, 775 bp, Homo Sapiens
  misc_feature (581)..(594): n is a, c, g, or t
cctcggggtcaagaatcagctttatttgcattcagtaaacatcaaaaaattgcaggtttaagccactgaaatgagctaagtgacagatttgaggcaagaacggaatgggggcagtatggcatttttggcctaagaccctatccaagagaagtaaagaggagatttaggctatttgcccagaaaagcagaaatatatgccaaacaccagccatggaacatggaaatcccacgccaacttcagctctcagccaaacactctccaaggcctgacactcctcacactctgactcctctagcccaggcaataaacagtgtgttcctcattcttgctactggacaaaattctattatttccctctatacttcccaaaacttcatttctgccagtggaagcagtatgaggtatgtgaagcatagtctctagaataagcctaccttggttcaaatcttggccctgacacctgggtgatcttaggcaaatcatttaacgtttctgagcttcattctcctcattgtgaaatggggatgatgataataatagttttcaagatgacataagataatgctagtatagtgcttgnnnnnnnnnnnnnngcaaaataaatacaggctatggctattccttaacttaattcagggttcaggagtatatacgaagatcttacatggttctcacctattggttcctacatttgagaggcagcctcaggagtgttataggagggaaaaggagagataaaaaacaggagaggttccttggcttatagatgcatgg

SEQ ID NO: 333865 - DNA, 263 bp, Homo Sapiens
tagtgtgcacttcccccaaagatgaagaaggttttcttttaatttaacttttttgacaatagtagctggctagagtcaagttagcagaaccagtgaaaaaatctaagggtaaaattattcttacttagggcaggtagcatagtaaagatgctattcattttattttattttgtaactcttaaaagtagtttccagattctgttttcttctttaaaggtcatctttaataattaactggtcctggctgggtgcagtgctcatgc

SEQ ID NO: 333866 - DNA, 344 bp, Homo Sapiens
ccatacaagctgttgttaatttgggggtaaagttttgattttcaaacttcatcatattgttcccaagtggattctccttgtttgtctccccctaccaaccccaaagttaccatatttgatgtaagaatcaggcatgttagaatgttgtgtcacactaactgattctgctctttttgtcttgtcattcaagttccgttagcttctgtacgcggtgccctttgcagtctggtgtctcttccagaggcgagggggctgaggatggggtgctgcatctcactagctatactggcatcatcttggtaaacattcattcccatgccattggggttgcttttgccaaggtc

SEQ ID NO: 333867 - DNA, 468 bp, Homo Sapiens
  misc_feature (17)..(17): n is a, c, g, or t
  misc_feature (40)..(40): n is a, c, g, or t
  misc_feature (65)..(65): n is a, c, g, or t
tgtgattccgttaaccntgagaaggaaggggaggcttctncaaggccaaaggccaaacctgcacntggccgtggggagctttcttaaacccggcgatcttttgtgagactgaagggacacaggcctgaacagaacctgtgcttcggggagcagtggggagaacagagcatctcagaggcttgtttcaccctctagtgtaagtcttctgtgccttttctgttctaaagaaacttttggaattgctacctgcttattgtatttttttggtctctttaaactgctctgacaagttcaatacaacatttcccacttaaaaaaaataggcagtatgaatatcacacaaagagcagtggatgagcctttaaatatcaggcaaaataaacagaccagaaaaatatggacattctagaagctgaggcattttttaaatagctgttttgtttttataattactttgtttggataaat

SEQ ID NO: 333868 - DNA, 748 bp, Homo Sapiens
  misc_feature (672)..(695): n is a, c, g, or t
ctcaagtatgactctttgggcctcaccaaaatacaatttcacaaaataatgtcacattatttgggggaggggagaggccaccaaatttcatctcgaagcctcttccctcatttccaaggaaataggcattgttggaacaggtaaggctgtaatatttggtttagctttgccctcctgagccacctacctctagaggcacgtgggggtctctttctttgccaactgcaccaattcctccacaggaccgtgcagtagctgaataacaacccccgaagacgcccacatcctaatatccgtaacctacaaatatgttaccttctacagcaaaggaaactttgcagatgcgatcaagtgaaggatctttggatagaggagatgatcgtggattatccagggggcctgatgcaatcacaggggtccttacaacaggggcaaaggagaggacagagtcaggcagaagaaggagatgtaacagaagcatgacacagagtgatgtgaggaaggggccatcaacccagaaatgtgggggcctccagaacctagaccatgcaaggaaatgggttcctcctcgaaaccgctacgagaaaccagccctgccaacaccctgacttcagcctactgaaactgatttcagacttctaggctccagctacaaggcaatcagtttgcggnnnnnnnnnnnnnnnnnnnnnnnnggaaaaatgaaagctgatttttattttatcatcaacagccattctttagacat

SEQ ID NO: 333869 - DNA, 493 bp, Homo Sapiens
  misc_feature (86)..(108): n is a, c, g, or t
aacacagaaatacccttttatcttaaagtatatcagctatgattctcaaaggtatacgattctcaaatattggtccacttgcacannnnnnnnnnnnnnnnnnnnnnntatttcctcacatataaaatgtaggtaggaaagtatatggattacatttctttacttgcatcatggatacatagttcaattcagttcaaatcaaaaccattcaatacatatttactgagtcccttctgcgtgtcaggcactgttttaggcacttgtgatatatcagtgaaaaaaacaaaggcccctgcccacatggagcttacattatagccaggggaaacaacagtaaacaataaacacaaatatgtgaagtatctagggtgataggtgatatgaaaaacatagagcaggtgaaaggggtatgggatttctcgatctggaaggtagacagctgcagtattaaatagtatggacaggataggcttcagtaagaaggcaacaattg

SEQ ID NO: 333870 - DNA, 771 bp, Homo Sapiens
  misc_feature (67)..(67): n is a, c, g, or t
ggcacgagggatattttaattacgcaataaaaagaaatgccatttatggcccaacagaataattttnttttttaaagacaatccttggtattagtgagaagtactgggaaatggagatgttcctgtttctttttagagataagttttcgtcatgttttcctgcatgttaaagatttattggaggaatgttcttcaggttgtttaataatagagcacttcatcgttaaaagggaagaaacaagttcattcgtttggtagacttttatatttattgaagactgttacataccagtcactcttatagcgtagttgaagtgggatatgagtagtcagatgttactctaaagtatgatagagtgagtcccgaaagatggaagaatgggaaatataggagacattgcagggggcactccattggaggcagtggttttgggagaggccttgagaccaaagggaatgtggagtgtttggggagctgctgcggtatggagaggaaggggttcatggccgtctcgaagggctgtgcccacagtatggaactggaactgtgtgttgaaacagtggagagcctttggaggattttaagcatggaagtgatgtattcaaacttgctttgacatgctgaggttcataatggactggctcttgaattaacagggaagtccacactgcaatggagattactaaaactgacatggaggatcctgaaaaagaaaaactttggaagacagtctatttttaaaagttcccaggaaatgcaaaggaattaag

SEQ ID NO: 333871 - DNA, 615 bp, Homo Sapiens
catttgaagaaaagatataaaaatatcaactttatctttctatttaatacacacagattttaaaatcattttgcacaggcagatgcccctggtcatgatcctatgtaccttcgtttaattgacaaaggttctaaacagatggaaaccatttgtgcccaggagtaggtcgacgtgcctctggtctacggtctgacgatcacaacagaggcccaggcacagctggcactttcatccagtgctatcctggaggactctagcaagtcactctcttttgctaacagcagctgccattcagtttaagtgatttactctcgcctctgcatttagctttagcatttcctgaaagcctatgatgggccctaccccgtgtgggctcctggagaggtggctcagacatcaatacctcagttctggggctcagactgctctagggcagggtaaacaccaggcagtaaagagactgcccagcacgatcccgtggtaccttggagcagggggcctggctccttgattctcacccaggcccagccctacctgaggtcccctcttccctgatgttctctacccttccagggacttcttcttatctttcgggtggatccatacacagacagg

SEQ ID NO: 333872 - DNA, 686 bp, Homo Sapiens
tttttttgagattctattcatagaatcattcttcgaatgccacattcacagcaaaatttggcccattctacagggtatttagtcccacactcatggcagaattttggtaagtttccaggtgaatgtccttcaatgcctttaatatttccaccattaagggaagatgcacagtccccatctggcctggctatgtagctctcagtatatgtttttcttttgtttgtaagcacacctggggcaggatttcttgccaaactaggtggtgtggaatttcggggtttgacattagctcctgcatgaggggctgctatccctttatgagagggagacaaggtctgaagtttgtttcccaaagagctgctacttgaagacactttacctgaaggaacacctacaacagttttgccagcgccacttggctgcggtaatcgtgaagatcctgatgatgcagttccaggagaatttgactttttaagtgcgggtggcttatacacctgtgtccgagaagatggttttcctttggtatctgtagaaaattccccttcattactaatacgtgctgcctgttctttacagaaatttatatgtctatcagctgcattttcattgaatctcctctgacaatatggacattcgatataatcaggatcataagaaggtggaagaggaggtagaaggttggcacc

SEQ ID NO: 333873 - DNA, 450 bp, Homo Sapiens
  misc_feature (84)..(125): n is a, c, g, or t
cacagtatgtctttgtgaatctggatgtgtactttataatgaaagcatatctcaatgtgaaccagccacatttcaagtgctccnnnnnnnnnnnnnnnnnnnnnnnnnnnnnnnnnnnnnnnnnnctttagagctcagcttaaatgttagtttctgtaggccagtggttctcaaactttaatgtatatcaaaatcaaattaaacagattgcttgggcccacttccagagcttgatttagtaggtctggggtgggactgtgaatatgcatttctagcaagtcctcaggtgatggtgacatggctggtccaaggaccatgttttgagaacccctggctttagacttcctcttcacccattgggaagtaggtcaggcctgctgacctactcctgtagcatcccgcttaaccacatttggtgcacttgcgatggatcccttgagatatattacc

SEQ ID NO: 333874 - DNA, 161 bp, Homo Sapiens
ttttctagtgcaagggggcagaccataaatacaatgagtaatgaaatatggaaatgtttaagtgcctagagaaaagtacagcaggtaaggggaaccaagagccatattttcagttgtgtttcccataaagccttgtggcatttactcatagtcagattaaa

SEQ ID NO: 333875 - DNA, 546 bp, Homo Sapiens
tgctaatcaaaaaggattaaaaagacttggtatacttagacaccataaatagtttctgcagagaagacagtagagaaagagaaagcaatactttggtattctagaaggcaatgaatatttctgtgaaatctcttaaaattcatcattcactcaaccttgaataggatgtgtagtctcaaaatgcccatcacttatattcttctaagaaaaatggtcccatgctttgccatgtgactgacaccctatgcaactcactggtctaggagcagacacttgacccaaacaggcatctacagatcaaccaggctcagtggatgacccaatcagatcaattactgggcaaaagaactgaagtactttaatgcagtctcttttatggatccagggagagcaaatatttcagagaaccactgtaccattgcgacttcaagcctccaatctatagtgctttactttcacaaattaaatgtaaccattttgaatggaggcaagaagaagtggaccatgtgaggtgccatgcattcagacctatctacttacctattg

SEQ ID NO: 333876 - DNA, 814 bp, Homo Sapiens
ctttgttattaagtgtactcctcatatgacattacacaatgtgagcttacacatcccacagaaagcagaggctcccagctgtgcacaatcaggatgaaaatagtctggctgcctggtccaatcctagagtctgatttaattgtttgaggctagactggacatagggagttttaaaggatccccacgaggctgttaagggcatcgcagttaaagaaccactgatctaaagagcatgcggatgacagggaacgtgacatctgtaaaatccgtaggcactgttgaaacacctgaaatcaacaaaagactctcttggctttcacagttatttttaacctttccaaaacatttttatataattgacagttcacttctggccttcagtgtatgtttgcctgtccattaataagttgatctggcatttttcctgtaacatttttgtttttccttccacacactgaagttctgccctcagccaaagcccactgctcatggacaggtcttgctcctgccccaggggcctcagtggtggtaggcagggaataggccgttggcaagttgaagctcaggaaggaagggagggctcagtaactgattcaggggccagccactctggcttcacctgggagcttgttacatgtgcagaatctcagggcgtagacctactcatcagaatccgcactttagcaagatacccaggtgatttgtgtgcacattacacttgagaagcactgcctagagtgttgtgattaactaggctgcaagctaaaatcacccaggaagctttaaagctcccaacgcctaaactgtagcccag

SEQ ID NO: 333877 - DNA, 670 bp, Homo Sapiens
  misc_feature (141)..(141): n is a, c, g, or t
ggtgcaaaatgattcagttttaatgcattattttaacaagcaaaagcaaacagtttctgatatacatgccatactgcaaagctgtaaacccgtgttgcatggtgatgtgacaagcaccacatttctggagggatttttttngctctcctacaagctccccctccccaagccgtggctataattatttcacaaaatgcagtttgccatttctagagacaaacacttccttctccctcaccaaaacttcaagttcaggccaaatattgaatgaaaatagaacttgagaggcaggctttgtttgtagcatgttgtttctgctaagagttgccccctacccagggctccaccccagtggtcggactgaagtgtacatgttatgttttaacagatgggccggctggcggctgctgggctgtaaaacaggaacgcggattctgcactgagtggtattgaactgaacgctcgtaaagttcatggacatactctgacccagacagaccaggcagatgcagacatgcttacgcatacacactcactaacaccccacagctcagaggatccatctctgtgacccaagggaagttcaaggctgaatttccccttcatatatttacctcattcaccttttaattttatatatacacacactcacacatatacacgtatgtat

SEQ ID NO: 333878 - DNA, 765 bp, Homo Sapiens
  misc_feature (70)..(88): n is a, c, g, or t
  misc_feature (204)..(235): n is a, c, g, or t
actaaataataaacacttgtgtgctgggattacaggcgtgagccaccaaccttggacataaaatgggttnnnnnnnnnnnnnnnnnnngacttaagtaatttaaagtttttatcatccctcccactttcaaaatagaaaatcatggggaaaaggaaataagtaaatgtcttttattggctatctaatttgaatgtttttttctnnnnnnnnnnnnnnnnnnnnnnnnnnnnnnnnatacagtggaacatgatctggatcagattgactacatagacagctgcaccgcagaggaagaggaggccgaggtgagacagcccaagggaccagacccagacagccttagttcacagtttatggcgtatattgaacagcggcgaatctctcatgaggtagtacacagattgaagcctaaatatgttgctatcccttcataaaaataattcataatagtataaagttttgttatatcagtgatttgttgactgaagcctaattgttttcattatgttcacttctgatttcagtcctgagtttttcagatttattcagaaaactcagacagcagcctcaagtaggctttaggtttatttttcaaacaagaagaaagatttcagaattttgcaggaggaataaaagaagtctaggtactgttaaggccttggaagaaagtacaaagaaaaatacagtgatgcttttcattgttgtttttattgcttttttattgttactaactgataaatcatagtttgtcgagtagttaattg

SEQ ID NO: 333879 - DNA, 928 bp, Homo Sapiens
  misc_feature (573)..(573): n is a, c, g, or t
  misc_feature (677)..(677): n is a, c, g, or t
cctaacgctgacagaaccccacctatagcagcataaagtgcctctactctcagtctttttaacgacttgaaacacagtaagaaacactgacctggtttgacattaaggattttgggtctggaggactcaggagaggaaagtgctggggctgcttcccagtgtcaccactggtgttgggaaccctgcatgtaaacatggtcggactcaatcctcaactgctggcagtcagccttctcaaccatacctcagggccaagtgaaactaaacattttagctttttcaacactccaaacctacgcgggcataaactcgagaatcttctgccatttactttgtttttctattcagacttctgagtttctcatacatacattggttggttttcctcccaattcagaaagggtaactgggtaggtttcacatgtatctttccaacatgtcacgaaaggctggattaaagatgtgagacgcgtgatattcatcctaatgcagctaagtgtatggacaaagggccacttggcctttcttcagaagatgaggttcaacagaaggagaagaacagctgtgctagtngtcagcactggccatgcagaagccagacgtaccctgcatgttactgaggtcactaatgggacaggagaaagaacctgacaccggttctgcgctcccatgggacntaagttgtctcatattaccttccctcttctctccagccacctgcaaaacatctcaagtcagtcagccttcagttttgaatgtttacgtttcagatacccttgaaatagaaatgcatttggtaaaccttaacttcttccaattgggaggcaacacagggaaatgacaacttaaaaattactctgagaacagctgcattctcatttgtttgaccactagtttgatggatgttaagatttttttaacaggtcga

SEQ ID NO: 333880 - DNA, 553 bp, Homo Sapiens
cagagaggtttcctgcattttatttctatttggtataccctccactgttgtccactgccctgtgtggccttctggttgacctctgcccgatcttctgtctctctgagggaatcagagtccagcatccagccccagctggcacagctgaagtcacaagcctcctctaagccaaggccagtgtgttcagaggtgactgccacccatactaggacaaacacagctcagatcaccaggtcaagcacctaggcctggcttctcctgagacagaggactcagaagtggcctttcctccaaagcctgctcagacacaggtctgtagggccagggtgttctgcttggctgggctgcagctgctacccctcggttggggctgagtcagccagatcctccccctacttctccccaagggccaagaactgctcagggacattaaaggtcaaaagtccagccacactcattcatcctttccccaggcccatgaagagaggcatctcattgtagaatgtatgaggaagtgggaagtatctcagagaatcagctaagtttcctaact

SEQ ID NO: 333881 - DNA, 467 bp, Homo Sapiens
ccttcaagaattgttgaggataggaggaggtcatattgagagtttgtcatctcgtagaataatcagtatgagattagaaaaggtagaggttttttggattagaggcagtttagaaattgtgtgactggcttattattaatcgaattagcagtttctgttttctggtttccccatcatttcacctgctactcagccgtaaaagtttatttttgattcaaatgcagagattgagttttgaaacaaatctagattagtaaacatctatacttatatatagatttataaaatataaccagattatctaaaacttataaatgcatcttaaaattttttctttcttttacaggcaggaatttatacgtgcatgtttaaaggcgatacttttcaaatgccagacttcctcagcttgtgctatacttcccgttcacacacctgccgtgtctttgctatgccctcccatacgaccg

SEQ ID NO: 333882 - DNA, 440 bp, Homo Sapiens
ataagaggacgagaagatgttagtaattttgatgatgaatttacctcagaagcacctattctgactccacctcgagaaccaaggatactttcggaagaggagcaggaaatgttcagagattttgactacattgctgattggtgttaagttgctagacactgcgaaaccaagctgactcacaagaagacctcttaaaaatagcaacccttcatttgctctctgtgccaccaatagcttctgagttttttgttgttgttgtttttattgaaacacgtgaagatttgtttaaaagtaccattctaatacttcttcaaaagtggctcctcattgtacttcagcgtaaatatgagcactggaaacagtttcatggagtttaagttgagtgaacatcggccatgaaaatccatcacgaatacttttggatcaatagtctattttta

SEQ ID NO: 333883 - DNA, 353 bp, Homo Sapiens
ggtggcagttgtttgttttaaactgaccacttggaagaaacaccttggttatctgtggttttcttgccttgtccttgcctctacccccaccccttttgagtcgggtgactcatttttctgtgtagagactcggtggcccaggcaggaggtgaaagcggccatccggaaggccctggggatccttgtgcctgttgctcgccttcaggtcaccagctgagctgcgataggaaaatctgaatggaggcagcaaacagccaaaacaaacattccccacccggccctgtgcatatgaagtcgttcttcccccaactcttgaacgatgatgatattcagacgaagcattgatgttatgg

SEQ ID NO: 333884 - DNA, 142 bp, Homo Sapiens
ctggaagctttgttctttaatgagccatggggtgatttgttcatcaagctgcttttgtgtagccatacagtgcatattttgagtgacacaaactgcactttatacagatgatatcttgttacccctcaaccccccagcaaag

SEQ ID NO: 333885 - DNA, 394 bp, Homo Sapiens
  misc_feature (259)..(317): n is a, c, g, or t
gcttgggaaaatggattattctaataaaactttattttttcaaacacagccacagaggcagaacctcatgtttaacacacacagacttatggatttttcttttaatataaaacaaagtttacgaaaatttttttccactttttgtatttgtaatcccattagcacagggactttggcagcaggcgggagtgaagggcagctgagctgccactgggcagtcactgggcacaggaggagagcaccagcctggggagtggcnnnnnnnnnnnnnnnnnnnnnnnnnnnnnnnnnnnnnnnnnnnnnnnnnnnnnnnnnnngatgcagacattgacccagtgtcagccacatgccctggaggtgtgctcactctgggtaagccaatatgtgaaattca

SEQ ID NO: 333886 - DNA, 590 bp, Homo Sapiens
  misc_feature (383)..(383): n is a, c, g, or t
  misc_feature (492)..(492): n is a, c, g, or t
accagaggcaccaagtttcataaagtttttacttggaaaaaaaagttttacaaaatatctttccaaagaaattttcccatagagtacaattaattcatgtagctttcttccttaaagattacagtatgacattcagaggggcgaggtttcttgaatagccaactagccgcaaaacctacaagagaagtagatttttttaaagtgcctttaaaatgtgaaagcaagtaatgtaattgttgaatctatttgaaattttaaaattttctttaaaatggtccatatggtatgcacaatatcacagctggcacaaaactgcctgtatttagtttgaaacacaaaaacaatgcatatgaacagtattctttgaaaagtaattcaaaatngctgccactgcatccataaaggcaaacttagataagagtgttgacagtattcagagaattcacaaaacaagctgatattaaagtattcagacagttaccttgatttttnttcaaataccacgggtaagggtaaaagaacttgttgccaaagtaactcaggataccttatttcaaactacatgtaacctattttgctatagatactct

SEQ ID NO: 333887 - DNA, 460 bp, Homo Sapiens
actccagaagtggtccagagcacacggccgataattgagggttccatttcccagggcacaccaataaagtttgacaacaactcaggtcaatctgccatcaaacacaatgtcaaatccttaatcacggggcctagcaaactatcccgtggaatgcctccgctggaaattgtgccagagaacataaaagtggtagaacggggaaaatatgaggatgtgaaagcaggcgagaccgtgcgttcccggcacacgtcagttggtaagctctggcccctccgttcttaggtccacactgcatgaagctcccaaagcacaactgagccctgggatttatgatgacaccagtgcacggaggacccctgtgagttatcaaaacaccatgtccagaggctcacccatgatgaacagaacttctgatggtatgttacttttgttgcttggtctgatactttttattgcattt

SEQ ID NO: 333888 - DNA, 468 bp, Homo Sapiens
ttttttgcaacctcggatgtttatttggtatttccctctccgatgagtcagcttccaggaccaacgcctccactcccgacggggagacccctgggtggagggtcgggggtgagaggcggctctgagacccccgaggcctgggcacacgggcgtcgtgcccggctggcatttgctgtcttggcctgcatgcatgtgggcgagcccctaaacccgctcagtgcagggagcgcggctcacccacagcccacggggcgcggtgctcgggaaagtgcgggtgggcaatggggggtggcggagctgtcgtgacatgcccccttcgcaccccctcttggcggattactggcactttatatcagattcatgaatgcaagtgtgtgtgcgcatgtgtgcttacatagagaggtcgggtcgtagaggaacactgtgacatagacagaaacaaaataaactcaaaaacagggtattagc

SEQ ID NO: 333889 - DNA, 536 bp, Homo Sapiens
gtctctacagctcagggaggttcactcgtgggaactgccttagctcaggaaaacacactgcttctgctcacagtacagtctgtcgggcacaggtcacaaggctccaacttcactgctggagaagctggaaaacaaacaggaagcacatggatatttgatgagctcagtctcagtcatccatacatttaattggttctgaattttctcatctgtgaaacaaggataatcaaatctgctttgttttaaggaattattatgagtttcaaatcaaataagcttttcctacagctcctccaaacatgtaaactttaaacaaatgttaatatgttatttaaaaaggaaaatgatgtattttaacctagtaggcattttgttataccttcttatttattctcaatagaaggcatttaaaaagagacgttggtattcatatatcaataaggaaggcataactgtgttttagtttccgttgctatttactcctatcacattaggttggtattacttgggttagtttacagtacatcattaaagag

SEQ ID NO: 333890 - DNA, 710 bp, Homo Sapiens
ggcagcaaagaaagaatttaataatcacagggctagccaagtggtaatgaaatgggaggacttggagggggcctgaacaatccctgaggaggagtagaatagcagacggaacactgagaagtgatttccttgaggatagattttcatgatggaaaggaaatgagaggttctaagaggtgggctagcggcttgtaacctacatggaagaggctatgaaatgatgacagaatagaatgggcctgtgaggctggaaggagatattttccttggtctaagaaccatttgccttgtgtgggaagagattgataggtggaagtttcagtgggggagtaggtgggagtgaccgatgagaaggagaaaaactggccatgagggacagaagttggaatgctagctgcttttttagctaccttatcagcataagtgttgccctgagcgatgggatctgacgccttttgatggcccttgcagtgaatgaatccagcttcctttggaagtaaagtggccttgagaagagtttttattaaagaggcattaatgatggaggacccttgcgtagtgaggaaacctcttttagcccatataacagtatggtggtgcaagatatgggaggcattattagagtcagtataaatatttgacacgtagtcctttgcaagggtgagggcttgagttaaggcaatgagtttgacttgctgagaagtagtgga

SEQ ID NO: 333891 - DNA, 174 bp, Homo Sapiens
aagtctcttctctgtctttgtactggaatcgaaatcataagataaacagatcaaacgtgcttaagagctaactcgtgacactatgcagtattgtttgaagacctgttgttcaacctctgtctctttatgttaactggatttctgcattaaatgactgcccccttgttaaaaaaa

SEQ ID NO: 333892 - DNA, 496 bp, Homo Sapiens
aaggtggggaggaatgttaaatctaccatgtccgtgtgtcatctggtttgtgtttttccctgtttgtagcaagactctgatgataattctgtttctcatctgcccattcagtattttgttttccttccgtcaagttgtcttattttttcaaatgactacctctcccatcattgaggttctggtgaagctctctgcagctgtctcattccttcccaacgatagtaacaggaaatgactctttagcatcgatacctcaacatcaatttagggtagagattcctgcccctcttttgtcacagattaggaaattgagaactagggttaaccttgactatatttagaggtctttttgcctcttttccccttaacaaggatttcttatggtggtttcagtttcatttgcataaaggtattgagagggaacaaaaaacataaagctgagaatcttgagagagctcatctaccctgtctgttggtcagactcaaatgagagtta

SEQ ID NO: 333893 - DNA, 451 bp, Homo Sapiens
caaaatatacatacagttctttattaaacaactgtaaacacttcactgtaaaaatccataaaactttataaacaaacattttgtaaatagaatctatgctacagtaaaataattaacacaattatttacatgcaatactgacaaatttggcactttttgaaaagaaatgtacaaaacacttgctttaaaagaaatttaaaattataaaaactccgagcattactatcatgcactttgcaaatacctcacaagcacttatggcacagctatcagagagcatcaggctctctggtaatatttatgtaacttttaatgtgcttccataagtttgttgtaaaaccacctggacattgtcaagaataaagtcaaatgccatattccaaaccgattccaccgattgctgcatcagccttttcatgtattttataactagatccagtttttccaaatc

SEQ ID NO: 333894 - DNA, 464 bp, Homo Sapiens
gtaatatataccattacactcagataagggaatttaggttagaagttcggaaaactttcatattacaagttcacattcatacatcccaattttagtttgggttctattcagtctttctcagccttgaaggctttcaactgtgggttccaaagttgtttggttaatccagacaaagcctcttccaccagtggctgtggctatgagttattcttgctacctgcaacacttgctcagtgagttctcatcattcatgttccagattctacagtgttccccactgagcctatggatatttgcatatacctcactggagtcctgacttaacttcagttcatatagctgggttctgactccctggctagcttttgctcaccttttcctgaccttttcctcctggggccttgatcttgaattctgtggcctccataaccagctgtaagcctgctatgaatcagagagatcca

SEQ ID NO: 333895 - DNA, 466 bp, Homo Sapiens
gtgggtagctagtcaggtgtgagcagggcaggggagggcctcctccatccaccagggatgtcaggtgaccatcaggtgatggttaggcagttgtcacactgcctctctaaaataataattggtcatagccagcaccagggaaactgaagctggtgatcagcagcttcccgataagatctcaggaattgggcaagtgggctcaagcatgtgcactaaggcacagaatggtggagtttaactggtgtgtgaccttccaggtactttacaccgggaagggaagatcgcctcaggtgagcatgcgcatgctccagtaaacacactacgcatgctccctcccaagtgctagcaggccagtgtgtgtgcaggcagcccaccccaagggaggaattgggagaagggacgcgaggccttgaagtatgccaacacctagaaccctacatcagaggccggatggggcacttgcctc

SEQ ID NO: 333896 - DNA, 647 bp, Homo Sapiens
tttaggttgttcataacttgttccatgtcccacagctagtaactggcacagcgagagcattcataaagctttcagcacatagcaacataaataaaatcaagtcaccagctgttactataacaccccaaaatggcttcatgtgaaaacaggctatacggcatagaaaatattccctctgggagccatgaaaaactagaaaagctgaaactaagctgcaggaggcctgtgtaactacatagcaggggaaacacgagccccatattcagacagggctttgggcggcccttgatgaaacagtaccctgtggttatcttttgccgcttgccaagaaattgcagttctccctctcccgggcacttagtagcgttgcacctccctgcccccttgcaggtaagcagtgtcatgtgacttgctttggccaatcaagtgtgagtgggagggagctgcggcatcgcatccaaggagaagccttcgcagccaccgctgccagatatggtaattacgttgggctgaatgcccatcctcctgggtcccagaatgactcagataaacagtactcccccaacatcccgtggtggctgtgtaagtgagcaagaaataaaattcaatgagttcagccactgagatttgagggctgttcattatta

SEQ ID NO: 333897 - DNA, 747 bp, Homo Sapiens
aaaccctgtacctggtcaaaaagaaacaacaacaacaacaataataatgataataataaattccaaacaaacatctcctgggtaccaggtctttccaggccccccagtatgccacagactggccctctcattctgacttctcgcctctcttcatctgtgatgggggcgcagccaacatgcttaaacaaggccatgccccagaggacattattttcccttccagctgggcagggaggctgcgctcctttctcacacagagccgggctggacacacctgggggcctcaggctgtggaaggggcctcttcactgcacctgcctccccagggagcctcagagatgctgcccggacttcacctctgacttttgctttcctctagggaccccctggaaagcagggattctatggacctcctggttccaaggtgagtgggcactggctgggcttgagaggagaagctcacgagtggatgaagcccagctgcaagttacggctttagccacagagaggagacacaggaaggccagtgggcagggggcaaaaatgcagaacttggagcaggatagtgtctgaaaatttctcacatggggtcattagctgtggttggggggaaggaaatctccagttcatttactcactgattgactgattgattcattcattgtttccatttcccgagcactcccttgctcctgctcacattccaggcccttgtcctggcctcaggtaaacagaggtccctgaaca

SEQ ID NO: 333898 - DNA, 697 bp, Homo Sapiens
aaagtactgtgataagcattttagattcattgtatcattttaaatttacagggcaactcattgaggttaaaatcattctatctcctttagaaacttcaaaactgatcttagttcaagaaagaagttactattcagtgatcaccgaggctctaacaagtggagcctagattcgaaaccaaaccctgtgacttcaacacccaaacatttacgttcttacgttttactgtacagccttcctcctgggataaatcagattaaaattttgaagacatgtatatagcttgtcaggggtagtacagttattaattctgtgggttaccacattcttttatatctcagggctcccagccccaggatctaagtcatagctcttgattatggcccacccccagtagggagctgaacttactacttctgatatgaaagaagccagagtagttgtttcttccaagtcactcacatctgagatggccctcaaaccctccttggtggtctccggctgagagatgtttgcgtctttctgatcttggtaatactggatcaactgctgaaccccagaccttaatgcaggtttaagtgcagcactgatcgctagacccataggcccccctgacatcccagccatggtcatcagaaggtcatatcccagatctatggccccatctcggcctcgttccctggccttgcccaggcagtt

SEQ ID NO: 333899 - DNA, 418 bp, Homo Sapiens
ccctaggagcagtgttaaaatctgggtcacattcctgaccaaggacagcatcctgccttctgcccatccccttcagttcacaaaagctgacattttaaacaaatcatgactcacacgtattaattggttataaatatgttgtgtacactggttagataaaacttaaggccacaaggagggcccaggtaggcgatgtcagtgtgtgaaggggctggattgggcgtggtgaggatgttggcaaaccagtgcatgcacctggttggaagatgctcagcctcacaaaagctccaagccctttgggagccaaagtgtctgagagtgtgaccctctcctgtaaagtatttatcccacccattaatataatttctgtataataaacttgacctgaaattatttcattctttatattaaactttta

SEQ ID NO: 333900 - DNA, 459 bp, Homo Sapiens
taattagccagttaattttggtattgtaataaaaattgttttatgtttttctcaatctgagcctgggagatctattacaaaacaaatcgagacattcataatgaatgcaaataatattatatatgcacatgtgatggtacactggtgcatcactaggtgccctgtttgggactggacactcactcttccagctcttgatcgttttggtgaatgtcagctgccagatgagtcaccatctgggcagcaccctcagcccaaaagagccacctggcccaagattattccccttcccatccagagctgcatcttgcattcaaggactcatcaatgtgaggggtgtaaaaagacctgatcccctctgtctaaactgggacaaccttaagagccattccaacccatcagatcaagggattgtgagatattgtgacagctcaggctctccttctgctggttcctgat

SEQ ID NO: 333901 - DNA, 398 bp, Homo Sapiens
tatgttggaaaatgtaattatttatggcacctgtgacaactgggcactttggaatcacaaagtttatggttgaagaccacttggggtgattatcctccaaaatgtttatttggcttcttgaagttctgcagaggttgaggcagctgtctcaaaactagaggacagagccctgtgggcaggtgggtgtgagaaacttaaacaccgcagtcttcacagacccacaagctattggcgggtgcaatgtgtttcttggggcagcagctatcctgagacaggatatcacagggtcacatcaaggaccccagtcatctcacaactcttagaccacagctgctgctgcagtttctggttgtaggtgacgtggagggacttggtctctttcttgttgtataggtaac

SEQ ID NO: 333902 - DNA, 1067 bp, Homo Sapiens
gacacagagtctcagtgcacttcatccatcattaactactatcgataaccatcttacccacaaatctgattagaacgctgccttctggcctcttaatttccttaaagagtcagagctgtgggagctattaactttaggttccctatcaaactatcattggcaaggacattgagtagcgagaagcttttcatcattctcacattgttttttttaaaaaatacatttctttaaagataaagaatgaaactgcagttgctgggaggaccatccagttcacttctcatgttttacaagtggaggaatccagagaagtgaagtgacttaccagcctcgggtcacctggctagagtgagaggtagaaaccagcgccagaacacagaagtcctgacttcactgggctgggcgctcttcccccagtctcacgggtctttccaagagagaagcacagctctttccaagcagctttctaacttgctccaggagagggtgatgtctacgaactggtcctccttcaaggagccactaaaatacttacagattgccccatttaggtttaccttagttccacttagttacaagttcaaacttctatcaggacatgtgtcaacagttccatgatctttagaggaaagacaagggagtgagttctctcttttctggctgttgtcaggaaaaggagatggcagtactccagctttttccccctcccctctgtattgccatgtatccaaggcattcttttctttattactgtaagataccctgcaaagggcaagaggaagccatgtgggacagcagatagaacatgagacttggaatcagagaaggctagattgtaatattccctctacttttcacttgcagggtagcttgtctgaactacagacagacttagcttgtctgaactagagtgtcttcacttgtaaaatgtaaaacatcgcctactccacaaggtttttgcaaggatgaaatgagattctatatgcaaagcacctagtacagtgtctggtttgcatgagctcctcatagaaattagtttccttctctcttctgctgttatggttaag

SEQ ID NO: 333903 - DNA, 935 bp, Homo Sapiens
  misc_feature (497)..(497): n is a, c, g, or t
  misc_feature (600)..(600): n is a, c, g, or t
  misc_feature (760)..(760): n is a, c, g, or t
  misc_feature (837)..(837): n is a, c, g, or t
  misc_feature (848)..(848): n is a, c, g, or t
agtacgattttctagcaaccttgatctaagaggtgttgaagtagatgtcaaagaaggaatcgtccgagttattccacttcctgctacagtcttaatcgatcctctacccggattaccaagaacttttcgaaatcggaatatcatctttagtttccaaacttcctctttttgcagaagcctgattgtctgagtaagaaagctgcctgctggtttccttctgtgaggtcctgctgcccagaatggctccaaaactaccagacccctgagacggtttcatggctgcaggaagtctgttttgatggactgcatctagaaacaacctcatttcctctgcatccttacttggtactttgtcaatagacaagaagctgttatcttgcagagttaacattaggcggctttgtttcgctccactgggtcgaagcaccacatttttaatgttatgacttagctgaaatatccttggagttcctccagtattggtagtgaactactanggctgactttattctctttttctacaatttcaaaggatcctttctttccactttgtaatcccagtctgcatacttcggaattctgataggaccatgtatcttnagaggagacatattttcttttaaaaattgcttctggctaaattaaaaagcaaaaatatacctttacctggcaggttctacaggcaggatacagtttgggggcccctagttggaggtctctggttactgtatggcaaataactttattctgatcctttgtncaaaggcaaagcactcttcttgggacactactcatattctgcagctatgccagttctccggaagccatcaactcacngcgccgatggnccggagcccccggacagacccgcggaaagcacggagcccccgaggagtgggaggagccgagggtaatggaagtagggatacagaacc

SEQ ID NO: 333904 - DNA, 208 bp, Homo Sapiens
aaagggcgaagatttcattttattccactgccttcaggggcctgctagaggaggcccagttggtacagtaatacttattcaccaagctggtcatcgacgaaattgaggatgtcctagacggagcaagaataggcagaggctggaaggtagaggttttctttttatatatacaagacacattaatccattaaatttgaggacacagtac

SEQ ID NO: 333905 - DNA, 620 bp, Homo Sapiens
  misc_feature (496)..(496): n is a, c, g, or t
  misc_feature (536)..(536): n is a, c, g, or t
  misc_feature (576)..(576): n is a, c, g, or t
  misc_feature (593)..(593): n is a, c, g, or t
  misc_feature (606)..(606): n is a, c, g, or t
tcagcatagtgaacgttaatatttttatttcttttgtaatgaagagttcaaatggttgggagcatgacatgccaggaggaggaaagatggcgccatctctgcggaagaactgctgagccacacacaggaaggaaagttgatccccagggcagcctttcccaccaaaaaaatcaggcccaatccaggagagtttgccagtagctccccagggttccagggtgtctgccagccttcctaaggaatcgtgggcaggcttctaggtgccagtgactcaaactcctttttccacttcccaagttcaacctggtcactctcatccccacaagttcccaatctgaatcccattctctgaccattctctgcttccttgtttttaatctcatttgagagtgatcctcacgggttcccctgggccctgcactcattttccttactgggtaatgctaacgttgtcttctaattcaggaatccttccaacctgtttcagctctgctcnaaaccttcatttcccatttactccagtctctaatcctggngaaaggccgaactggattgtaagctgaatggtcagtgagnaggggatggaaattccnaggagaaacctgntttgggggaactag

SEQ ID NO: 333906 - DNA, 574 bp, Homo Sapiens
ctgtgcagctcagttcctccctggtctctgtttccatttactccacgtcgaatctttttgccacctgcagggtctgccttcagagaatgtgttataaatgaatgcaagtgcctgcggtgaggaggaggccagtgcgattcttccagactcgagttagaaaggaaaagtaaatatttattgaggtcttaatgtggtctagctggatttgtgacatttcttatctttaatccttggctccacctgctgaagtagtggatattacctctattttcccaatcagtaaaccatggctcacttttctaactttcgtttcacattgatgagctgtaattcttctgtgaagaactttccatcttccaggactagtttgttaccttgaagtatggtacgagaaaggcagtttaatgcttaactgttccttttgatgactaattttcaggatagagagttggagcttactccaaatgttgaccagagttgagggtttgtttgggggtagggaaggggttctctttttttctccagcatcattgtgaacttttatgtgtttgtcagttgcatgaattgcttgaac

SEQ ID NO: 333907 - DNA, 559 bp, Homo Sapiens
ttttttttgataaattggaatattttcagagtaaaaagttagagataaaaagacatgttcaacatagagctcttttggataatttgccattgttgtacccatactgaaagccaaaatccagattttgtcaactttactccaacaataatacagcaaaatccacatacagattctatctgaaactgcctccttccagatcaatattaaaccaagtagagggtgagccttcagggctgcaggctagagaattaggggttaccacttgtgccattaggaaagagaacttcatttttatttaatactttttggatcataattatgcactgagtactcttctaactttctaaatgccaattcatttacttcttataaaaacccatcttgtaggtactattattatccccactttgcatttaaagaacccaaggcacttgcccaacattacacagctagcaagtggcaaagccgggattcaaacctaggcaaggtggctccagagcacagctcctcacaatgccgccacattgcccatcttcagagaacaagtatcaatccttca

SEQ ID NO: 333908 - DNA, 366 bp, Homo Sapiens
ctatttcttcccctctttctctcctctatcttctagagacctaggtagttcccacaggaatagtgctttacagattctaatggtgatttattaggtaaaaacagaaaatgatttttttaacctaaaagttccataacaaaaaatgaatataagcttttgatgcagtttcacacattgaaaatgcaggtaattttaatttcattgcatttttatcagaattctcaatcacaatcctctgacagctgttgaagatccgtagctcttggaactgccggcattaatatatctgtaagtactatagtactctcatgagtcatgagatgacttatgctcttttaaatttgtcatcaaagattaagtattttg

SEQ ID NO: 333909 - DNA, 373 bp, Homo Sapiens
ttgttctctgacaatgtaaacatcatacatttttattaagagagaaaataaaaagcaaagaatccacttgaagctctctagggagcatcccgtcaccgccatgtgcaagaaatctggtcttcacccgcattttagctgtgttgcccagcatgatgtcccgtccagggccacactgggatgttcgtgggccccaggcatttctgccttcatgaactcctttctcttctccttggggtccttggctcttccttgatgaggggcacgacggtcccagagcttggggccgggctcaaagatggggtcaagcggccgtagcgggtgcggcgcggcgcgctcccggaaaaaggcaggggcaggggcgcggggctgggca

SEQ ID NO: 333910 - DNA, 570 bp, Homo Sapiens
  misc_feature (479)..(517): n is a, c, g, or t
cagtataagccaccaagcccagcccccagctttattctttacatgttcctttcgtttaatcttttaaaatgagaatgtacttgcaaattacttaaataataacgaactagaaatgggatattaaatgtcattttaagaggacactgtgtgtgctaagtgaataagtcaaacaaagaaagacaaataacacattatctcacttacatatgtaatctaaaaaagctgaactcacattagtagagagtagaaaaatagtcaccagaggctgggggagggaggagtgaacagggaaggggtgatgatggtcaaagtacaaagtttcagacaggaagaataggttctggtgatctaccgcacagcatggcaactactgtaatgcataatactgtattgtgacattgtaaaatagacatttggtcctcaaccccatttcctggcatacaactctaaattcctaataaatctccaaaatgatatannnnnnnnnnnnnnnnnnnnnnnnnnnnnnnnnnnnnnnactttaagatggggactggtcacctgaaagatcaaggcatgattagaggctta

SEQ ID NO: 333911 - DNA, 597 bp, Homo Sapiens
gcagctaataaagagctgaacttggccactttgttgtgcccaggatacaaactgctgttaatttcagtacctgtttcttctgctgttagaactaggaagaaaggatttagtgaccctctttcaaaaggtggatcacaagcttagaggcattgctggataaattcaacagcaagactttatttcttccccagaggtgacgtctgatggttctgtataaataaagtcacaccacctttcttatgctgaattgatgctgctgacctgctgttagtaggacatgcacttttatggcgtttccaggagtggtgatgtgtgttgctgagctcatctaatctctgctttgagcaaaggcaatcctctatatcatggcagggattagaggtatagcctggggctgcagaatggtgtgatttaaattttcccatgcaggttcaaagcttgtaactttgcctgcgtgtacatccacactgggttccagccacatgaactgggccaccttcatagacctccctggtaaccacagcctgacgtgacaaggaatcacagttttactttctgcttactatccatgttagaaatatctaaggaaattcagga

SEQ ID NO: 333912 - DNA, 360 bp, Homo Sapiens
gaacatttgatccactttttggaaaaataattaaagtactgaaaatggcaagacagttattaattcattcaacaatcaattactgaaatctttttgtgtaccaggtactgtgctatgcatagcagatacggtcaagactagttgctccaggcagaaaacattatggaactaccatggaagggacacagacttatatacaaataatccgtcaactatttaaccacagtttctacaaatccaatcaccaaaaattcttcccacctctcaatgctcaatgtcactcctcccatcaaaaatagcatccctagttccctctccttgaatttagccttatgatgcggtttgaccagtagaatgagg

SEQ ID NO: 333913 - DNA, 438 bp, Homo Sapiens
actttaaaaaaaggtttattgataaaaaatactaaagattatctgaccttcaataatttgtaatttttttgttggtggagggtcttgcctcaaggttgatggctgctgactgatcagggtggtggttgctgaaggccggggtggctgtggcaatttcttaagctgagacagcaataaaattgctgtattgatggactcttcctttcacaaaagatttttctagcatgcaatgctgtttgataacattttaccctctgaactgctttcaaaattggagttaatcctcccgatactgctgctgctttatcacctaagtttttgtaatattctgtatcctttgtggtcattttcacaatgctcatgtcatcatcaccaggaagacactccacctcaaaaaaaccactttctctgctgattcatgagaagcaactcctcatc

SEQ ID NO: 333914 - DNA, 443 bp, Homo Sapiens
  misc_feature (389)..(389): n is a, c, g, or t
ttttttcagtgtccataaatcaagttttattggaatatagcacactcattttatttacatactatctgtggctacttttggagttaagtagccttgacagacaccatatggcccacaaagccgaaagtatttaccctctggccctctgtggaaattcgacatctgttctataaagtaaaaatactggtatttcaataattgcacttatttaaaagatgattgtcagtgtagggctggaatcctaacaattttctcactttacgaaaccaaaacccacagtgttaagcataaaattacgtacaattttgataatgtttacagtaatagcagcaacatgatgctttaagaaccttggacttccacctatagaattgaagtaatcacaaatngaaggaaccattgggaacaaacatcaaacattctttacctcgtttatttcatta

SEQ ID NO: 333915 - DNA, 430 bp, Homo Sapiens
tttttttgtgtggaccagttactttattttttagttccaaaatgtccatttggttcttctttacatctcttattttttcctgagacaacttttcttcattcgtttccagcatgttcataattgcttgctgaagcatttatatgactgctttaaagtccttgccagataattgtaacatccgttccatttcagtgttggcttctcttgtcttttctcaaatcttcctgattctttggattacaatgccttttttaaaaattgagacctagcattgtaagactctggatcttatgttttagcaggcctcctgtgacaatgctccaactaaaaagaagggacattgccttatttctgttagatcaaagtagaagtccagttcctctacttggcatctgttgatatctggaaagggtggtgttcctagatactg

SEQ ID NO: 333916 - DNA, 483 bp, Homo Sapiens
gagactgcatagggctcggcgtggccaggggggccaggtcaagcaacaccaggatactatcctataaagagaagaggaaaatgcagtaaggatgggtatagtccaggaaggaattattcagttgaaactcacattagctaagggagaagactggggctcaacataggaaaaagagctaagccatgtacagatcccacactgatgtgagccaggccagaaccttgtgcagtatcccagggacttactcaactagctccatgtgagtcacaaacagtactgacatctatcaacatatcttatcctcacacaatcacaaagtctttgaggtaaaccggacaagtgtctttctatttctacccatggaaacacttaggttctgaggagttaagtgactaacattacacagcttcaaagtagcagcagcctggctcaaaccctagcctcctggcagctgtatttattcttctctgggcactaactgct

SEQ ID NO: 333917 - DNA, 509 bp, Homo Sapiens
cgcacctggctgttagctcttaaggggagcatgttttctgtgatatctgtgtgatcgtcccattaaatagaatgaattctactattctttggttttatcaagaatcgactttctggtctgttggccagtgaggcaggcattactggttacctaactgatagtcttcccttgtgcctgcttctttcatgctcaagaaccgtaattttgttcagatattgagtaagcaacaatgcacttaggggaggtattaacattggcttaaacctttcatgataattctttagtaatcccagtgactggcatagactggtctcatctaattggttctggccaatcaaagaaagtctcctgggggagggttcttggaaagattttcttttttgatcagaatgggagacagttctgtgaagaaagcctctttttgctgccactcacatttcctgcgtttgaatgtggtagtgtgagtgtgattctgaaagctatagcagccgactcgtaaccccgaggca

SEQ ID NO: 333918 - DNA, 485 bp, Homo Sapiens
  misc_feature (418)..(418): n is a, c, g, or t
gctctcaaccagacagagcgcacctcctggccactaggtgagcatttgtctttcaaggtttattatttacagaaactgttttcccattggttttgtttccttcccccaaggtaagacaatgcccggagagaaactccattgctagggcattggcaaaagatttgccagaccctgacacctgactcaaccttgctctcctccaatcggtgcctccaactgcacccacccaagagagtgaagaccaaagtgcttctaccaagagggtacaggttcctagcctggctctatttttcagagggaagcattgtttctgcggggacatgcctgttcacttccatggcactgctgacttgtgctcaccctatgacgcctcgcccagagcacaggaggacagtatccactgcggggcgttcacccncacgcgagcggggacaacaggtctagccctaaacaactgcttgcctggctataagaggagccttggc

SEQ ID NO: 333919 - DNA, 421 bp, Homo Sapiens
ttactgctagagccaaccaaatctttattagtctcggcagcagaactaatggagcccccatttacaggggagctttagtgggctagtctggctaccaggcagggatgttagcatttctattggtgattgggatagaaagggggaagagactggaagggaaccaaagggggagactggtggaccacctgagggcaggcacagatggggcttcctgggctggtgtagaggtggatcaggccccagaggagaacactgccatcttattcagaatgaaggatgagacaaagcctgagagggtgacagtcacagctacaaagagagggccgagctcctggtgtgagaggcatttctggacggaggcagctttctagggctggaagtctcaaatagaactcacctgttccccaaccaggggtcccca

SEQ ID NO: 333920 - DNA, 525 bp, Homo Sapiens
  misc_feature (269)..(429): n is a, c, g, or t
tgagagggtcagacaaaaattttactattaaaggagggcttgactgtttttctctggactcctgaccactcaggggccatgtgatgtgttctgagaaatggtgtcacggcagtaaaagatagtggccttcttcagagtcatgccttacagagcctccttagtgtttcacttggctgtgttatatggtggaggtgggtgccgtgttctggaaggactgtcagactcaagttggttctcttcaggatctgcccaacccatggcgacctggnnnnnnnnnnnnnnnnnnnnnnnnnnnnnnnnnnnnnnnnnnnnnnnnnnnnnnnnnnnnnnnnnnnnnnnnnnnnnnnnnnnnnnnnnnnnnnnnnnnnnnnnnnnnnnnnnnnnnnnnnnnnnnnnnnnnnnnnnnnnnnnnnnnnnnnnnnnnnnnnnaaaagtgaagagtttgcccaagtttagatagctaataataatttttattaaatgatattacaatataatcttcactgggtttgtttatagattttt

SEQ ID NO: 333921 - DNA, 810 bp, Homo Sapiens
  misc_feature (314)..(322): n is a, c, g, or t
  misc_feature (689)..(718): n is a, c, g, or t
attcaaacataatcgatgttagaaaaacattttaaaaccttgatactttctaatgatcagtaagtactaaaaatccgaagccctctcttgtacccataaaccctgaaactgtgaacctttggtatgaaaattgtttctagtcccagtgattcagattcatcaaataatttcattctctctataccattcatgaaaactaatctatagctctcacttcctctacatgacaaattaactgtggcctgaagacaggttggcaaacctaataaaactgatagtctttaaatccatgaaagttatttttcacccaccannnnnnnnngtatctcaaaaatctttaaagtttatcttggccctcttactaccttaatgacatcatcttgggagaatgttagatattgataagacactgatggtgtaaagttatgagccaaatctatgtaaaaatgtaccagttaacaaaacctgtggctattatgaaaaacttacttgaataagactttctgcttttgtgttaatgtgtccagaacccacctgtagaagttctttgtgtatgcagtcttttcaccctacagtgctttcattctgatacacttaatcagagatagtagttttctgggttaaatctagtcgcttatcctcctggatatagcagaaagatagtgggatatataggtgtgttgtataannnnnnnnnnnnnnnnnnnnnnnnnnnnnnaataagaaaactgggattgaaatagaataagttgaagttaatggtaaaaattccaaacctggctgggcaccgtgactcatgcctgtacccag

SEQ ID NO: 333922 - DNA, 748 bp, Homo Sapiens
  misc_feature (494)..(513): n is a, c, g, or t
  misc_feature (531)..(531): n is a, c, g, or t
ttttttcccatttctcaaggtatttcttttgtaaaggagccagatttggcaactagactgaaaatcttccaaaattctgtacaaatgtgtaatatacaaatatacacaaggcttttgccaagaaaagacatcacaacaaatgacagaggtggctttggtgtcacataccacctacagcatctcaaacccctaggaatgtgaggggctgatggaccacaacataggctacacatgtaaacacgctacattacactatgtacactggagtataaacaatccactgtcctctccggtctgttcacaagccctctggcgggaaggaaggccattcaccaggcaacccacataaggggaacttctttaaggtgggagggagaaccctgcagaatgaagtggttcaccctaagatctattaacagcacaaggcatgcccttaaagagacaggcggtaacagcgaattcgggagatggaccacttctgtgcttcttggcannnnnnnnnnnnnnnnnnnnactcattctcaaagaccnggcaacatggcttttcgacagatcttgtaagaatcgcgcccgacaacatatgcctgctttggctctaggcagcttctttagccgactggacttggaaggacgagacgtcactggagaagggatgggcctttccaactttacatgcccactctacccacagaccaccaccagagacgagaagaaactgtttgaagacaggtttctccgagagacagac

SEQ ID NO: 333923 - DNA, 532 bp, Homo Sapiens
tacataacgtctctgaagatccctcttttgtaatttctcaacatatcagaaaaagctgggaaaacccacctcctgagaggagcccggcaagcagcccttgccagcccatctatgagtgtgagcttgccagtcaggccccagaaaaacagccagatgtcaggcatcaccaccttcccaaaacaaagccattgccctccatcgactccctgggtcctcctcccccaaagccttcaagacctcccatcgtgaacctccaggcctttcagaggcagccagctgctgttcccaagactcagggggaagtgactgtggaagagggctccctgtctccagagaggcttttcaatgcagaatttgaagaaccacataattacgaggcaacaatttcatatctgagacactctggcaactccattaacctgtgcactgcaaaagaaattgctgatccaacttatgaagttggaattgaagaactccaaaagcctgggaagaattttccctatccagaacctagtgctaaacatgaagataa

SEQ ID NO: 333924 - DNA, 1068 bp, Homo Sapiens
  misc_feature (704)..(734): n is a, c, g, or t
tttttaaagtgtgtcctctctaccaggaccagatctcaggcttcaggaagggaagaagactctgataaaggaatctgaaaggacaccaggataagaccttccagaagctggaagggacattgaagctcactaagagggacccaagtcctttcagagggtactgccctgacaaaatacagaaggacaacggaagaccagacctgaatcaacaggctctggccctttcaagaccaaggacagtctacctcagtgagttgagttggcctggcccaacattgagccatctggcgggaaaaagggctagatctgtttagtttccatttgatttctccatctcttgatgacgtgacctcagaccttggtcttactaagcctctccagctcccagtatgaagttcagagcatgtgtgtatgtcttggaaccacctgtgtgatcctgggagagttactagacttcctgaaccttatgttcttcatccttgtcacctaagattgttgtgagaactcagagagtttgtgtaccaaaaatgcctggcatacagtagctgctggcttatcatgtgtttgttaaattgcctttcttctcttaatcttctgaatttttatcacagtccacattttccaaattatctctccagacttttgccttttcaagacccaagggatcaatcagctagctaatctgataaaaattaatccctgannnnnnnnnnnnnnnnnnnnnnnnnnnnnnnatagactctttaatagttttgtggtggccctgtatgctatggttcagatgagtagtaactaagaatttcaggctggcctacttatggataagactggtcccattttcccactggagattttgggtgggaagcatttccacaaaattcttgtggatatctttggagagttcttctaaatagatgggtgagccatacctagtgtcccttattttttagctgagtttataaaactccccaggcagtactacattgccctgaacagagatttaattctgattcagggaacagtgccagcttcttaatgaaatgccaacagctccttttcagcctgcgg

SEQ ID NO: 333925 - DNA, 405 bp, Homo Sapiens
ataaaactgttgcatcaagagaaaggttgtgttttattttctgaaatgagcacaaagtacacctttcacaataacactgaaagcaggtgcaaagactgacagtgacctttgactaaaggtagctttgtaaaaagaaaaataccaaataaatcagtgccctttctgattgttgtaaaactggaggtggggaggggctgtttgttacataaaagttggtccaaacttacaaaaaaagcacaaatgtgcatagttcagaagatctgcaagagggccataaaaggcttatgcccctaaaattagcatccacttaaaactgcaagaatacaaaataaaattgttaactagaatttgtgaaagatgtacaaatcgatctagtttttagaacagcatgaatttaagcaaagg

SEQ ID NO: 333926 - DNA, 449 bp, Homo Sapiens
aaatgagtacataacactgaagaatagaataactgttagtcatctggtgacatggctttgatatgtggtaggaacctagcaagtacactcaccattgcttttgtaccatgagtgcaaatattgacacagtacaaaaagaaaaggccttcacagactgcctaaaaggtgttttgtgaccctaaaaaggtccatggaccactactgtgagaaccactaatctaatccaaccccttcattttctacatgaagaacatgaggccaggaaaagttatgtgatcagccaaacctttcctccccagcacattcatgtgtacagccatttggggctagaattcataggtcctgattcccaattcattgttatttctgctttaccacactcaatctaatctaaccagggctaatattgatttttaagacaagtatttatggtttaaaaagcaaaaagg

SEQ ID NO: 333927 - DNA, 655 bp, Homo Sapiens
ggattcatttacttcattactctttctagggcacttgaaaatttatataatcccatttgtagtttgtaagaccagacttcatgaggatttgaggagaaattgtataaatgtgaatatttttatcgagtttttcttccttcttccaagtataaccagccttactctagcttttccagccctcgctagaaggcactttgtaatagcaagagtttcccaagtgaaggcctcggccactcctctctgcctcatgctctgcctcattcatcgctagagaaccttccttagtgccaggaccccccatctcctctagacttacttcattcactgtgctcttactgcaagtccggtttacatgcttatctgtttcctcaagtagactgtgaacaaccagagggtatcaaccatctcttacctgtttttgttttcttgaatctccagcgcaactagttacacaggtgactagcagagaagaggtgattaaataaaggtttgtcaaatgaatgagtgcccaaaccctctgctcttgttacaaggcaaaacccagcctgtgccctctgacgatgcagcctatcctcctgtttgttcttcagctgcagctcactctaccccagcacctcccctttctgactacctgaatcttatctattatttaagg

SEQ ID NO: 333928 - DNA, 514 bp, Homo Sapiens
tcttgtttctataggagaagttcctaaaggaactgaatcaaagggtatcgtgggtttttatttttaaagacactgccaatgtattttcccccaaggcagcaatcatgaacactcccaccagtgtcctctgggactgcttgcttgcctgcagccaggccagcgctgggcattatgcctcttgtgtacgtgtgacgacagtaagggatggaaggtgacgttgactgatagggtttctcagcggaaatgcagctccacacagttccaaaaaacactgccaattccagagcattctgggcccaaatgaggctagaggggtgtgggggagcaggctgtccactcagggggccctgagcaagatggggacaccttcctcccaagcccctccccatccttgcaagccgactcctgagcctgcaccatcctcatttctgaaatggatttcacacccaggagtaacaaagatggctttgtcagtaggaaaggggaggggggcactgttgtcggaacattctgg

SEQ ID NO: 333929 - DNA, 938 bp, Homo Sapiens
  misc_feature (378)..(378): n is a, c, g, or t
  misc_feature (551)..(551): n is a, c, g, or t
tatccacagaagttttaaaagttttaatgttccagatatttttcctcaacgacttcacttttggacaaagctggataaatagggtattgctgaatgttactgcataaaaattgccactgcctacagaggaggtaggatgtacagttcacgaatttcctttgaagggttagagacgatgatccatatttaacaacagagttcagttcatatgctggtctgtactgccagcaattaatcagtaaaaatacttcagtcaaaatctaaacagggctacttgaaatttctcggaaaaactaaaaggaaaaagaaatctatcctgggagcattattttcactaccagcttcagtgatacaatgcaaatagctctgcctttttangagtttaaatgaagatggttagactaatgacaaatgggtcacaggaagataaatgtggtgaaacagacaacagtagaaatcatccgaaggcattaaaatattgactgttgagaagaatcagtcagaaacacacagtaaataacagaagggtctgagccattatcaaagatganagcaactcccgcaatctcattgtgacaatacctgctgtgggggagtttgcatggtgagacttttttggcaggttgaagatctgttcaccagggtcaggaggaggtattgcatcttgcccttgtcgtgcctctacaggatcatactccttcccatcgtagttagcatcatagaatttcttaaaccattgaataaaatccaggttgtcctggaaacgtcctttcactagcttctccactggaattacctgcaataaaaaatcactatgtgagttacaaacctcacgtttgggtatatacccaaaagaaaggaaatcagtatctcaaaaagatatctgcacttgtaagtttgtggcagcactgtttataatagctaagatttggaagcaa

SEQ ID NO: 333930 - DNA, 447 bp, Homo Sapiens
ccattttattccaaaagcatttaattgaatttctcaatgtttttcaaaaacaaaaagatccaaattagaggtaaaaaggaacatggaaaattccactcaagtgttgtcacgatctcagggtcatgctccaggcatggcagaacccaagcaggcgcaatacctgccctgggccagctaaaccttctgactaccacacgctgtagaccacggccagtgctccctgctccctgacccccaaacaccccagagatgggtgcctgagcaggtaaaggccagccgtgaccctgccccagcctaggcctgtctgctggccttcagtgccatcccacccctgggcaaggcaggcttagcagctaagggaggctgggggtcacgaggccatgcagcatgaggctgagacgccgagctgctttgccaagtgagttgtgtggctcagctgcaggaact

SEQ ID NO: 333931 - DNA, 486 bp, Homo Sapiens
gacatgagatggtgagttttcttttaatgccacattctttaagaataaaaacctccacttggctgtcagcattggaaatcagagtgatggtgcaagccctgatgaggacaatgtccttgtctatgaaaaggtgaaatcattgcttgaaatcgctaagcaggacatgcagtcccagatggaggggggaattcgggagctggttggaaaagagtatttggcactttgcagccttgagaggtgcagaagagacaccgaggggttcaccaccagagccaccattgtcagagaggcgtccagctgtgtccacctgggactctgccttcagggcttcttgcctggctgggagctgcacaggcagactcctgggacggtgtgccgacagctctgggcacccccttctaggatctgattcctgaggaatcacaatgtggatttcacaatcacttccagtgtcttttgccaacctctgtgagcatatgtgcaatt

SEQ ID NO: 333932 - DNA, 445 bp, Homo Sapiens
taaaagaagaagaagagacaagcttcttaaaggcaggaaaaggtgctccctggaggactggggcttctctagtttgtggtaaaatatgacttaaggtaaaacttttgttgacatcaatttaattcatggcaaaacttcacacagaaaattccataatatattgagagtagggaaattaagaaatcccaaatgaacaatagagaaggattcaggaactactttcagtctttttttattgacttctttttgatcatcaaagttactttcatctttgtagtgacaatagctttttagaatatttcttacactaattcctgatatcttctattaggctacagtttaccaaagaaatgtcaggaaatacccatgggtaaagctgaatatttcataatctttgtaaccaagagatgttgggttctttccacaaggtcctaggatgtagctg

SEQ ID NO: 333933 - DNA, 457 bp, Homo Sapiens
  misc_feature (363)..(409): n is a, c, g, or t
tgagccactgtgcctggccttactctgggtttctttctaatcctctcagatgcctccataaaaaacaatcctccccaagccctaatggataaactccaagctccttagatgacaaaaatctttctaatcttttaccttgacatttgaatatggagggaagattaaactctaataattagaggctggaagataattaaagtgtgacaatagcactgtggtgctggaagagaaaagtcctttttcttgggacttgccgaaggtgtctgtgggtgtgcaactccatttcaaatagtttaggaagtctgggcgcagtggctcatgcctgtaatccagcactttgggaggccagatcacttgaggtcnnnnnnnnnnnnnnnnnnnnnnnnnnnnnnnnnnnnnnnnnnnnnnnacacacacaaaattaaccagatgtggtggcaggcacctgtaatcccag

SEQ ID NO: 333934 - DNA, 397 bp, Homo Sapiens
ttacaaaagagtaaacattttattatttgtacatgaatcagtttggtctgaggatacacaagcatctggctaactcataaaagtagcctgaagtgattgataggagagtgtttgtagtcatttccatttgctgccacatcccttacattatctacttgctaagcactgagaggcccagaatggacacatcaaactgtcaggaggaacatatgggacactggcacctgcaatggtttttttaaaagcagagaatgcagagcagtcacagactccacttcaaagccagggtgtgtggaggtctccggggaagagctctgcacaacaggtttcctgggggccagagggcctctcggggaggaacagaaaaaaaccagccaggagtgctaccgaccagcct

SEQ ID NO: 333935 - DNA, 434 bp, Homo Sapiens
aaagggaacaatttaaaccagattttttaaatccatgctattaattctatccttctgtgggttccaggttattagaaaattctaatgttgttatcagatcctatttctcccctaaccttttccttaaattctttctgataggggctaggatgcaggcaagcagtctgggttaaagagactgaaagaccccatcaaagattctcacataagtacattgacgtcttgagacgaagagagggaaaccaattgcctgaacacccgctaaaaggtccattcctgacacactttaaagtttattgtgagcaaacatctcttgttaaatgtaaacagcatctcactggaggtcacagacttgctgctgcagcatatcccaaggtaataccactttaagctccacataaactcttaagcagtttctatcctaaaacctgacc

SEQ ID NO: 333936 - DNA, 988 bp, Homo Sapiens
catgaaagatgggtaattagttagctcattcatatcaattgacagatgaataaactgaggtcatacaatttttagtggactaatgaaaataagcagaaagtataacctatctgaactctaagtctgtgtgagtttaggttcatgaacgagtttccccagaacttaatcaactgtgcactaaataacatagacttttagttctggagggcagaaccagccttgagagttttgttaactacagatttttactgtacactgtcctagtcacagaccacccacccctcttctccggctacacagtagttacctcctcctcatgtgggcctgccagatccactgcagattcttaaatagccattgctgtaccaaatgaaattctatctgagaacctgttttgagggtattatttcttctctacaaccttgtggccatctcacctacactctctaagcctcaattattcatctgtaaatttagcataatgataattatctctgctcagcctccttcaaagcactgaattaatggaaagcttagaaaacatacactgaagcactttttagtgtgctctatcaattgaatattatagtgttcatattggctttttataataggtatactactattattgatattaacacaataatgtgttcaaactattgaaataggattacttaaaaactgcgttaatattcaatagcttaaatctgaattgtaattacttttagaactttatacactaagtgatttctaaagtgactaaaatagggaagaatatttcttgttttgaaggagcataatgatttgcaaatcatggatgataggttcaaagaaaaataattggttgaaaaacaaactgttgggtaccatgctcactatctgggtgacaggatcattcatactgcaaacctcagcatcatgcaatatgcccatgtaacaaacttgaacttgtacccctaaatctaaaataaaagttgaaattattaaa

SEQ ID NO: 333937 - DNA, 427 bp, Homo Sapiens
ttttgctgatgtccaagttatttattaacagaggggtcatcacagttgttggttatattcacagactcagctgtgactataaatgctctccaacctgctcagggtctttaatgaatggaagtgggctttgtgagactaaaaacaatttggaaagttcatgaagattacactgaggccctattgagaagctggaagtgggagcaataagatggccctctgagagcaaaaacataggagcaataccaggtatagatgggcagaccagcagagatgcctcatgggaccacaaagcagcaaggccatcagggtctcagaagaaagagagctggcctgatgtgggaacagggcaaggagagtccctgggggatacattggcagaacccacacaagccccggcagggctggtgcactcatgggagctgggaga

SEQ ID NO: 333938 - DNA, 851 bp, Homo Sapiens
  misc_feature (840)..(840): n is a, c, g, or t
tttttccaggtaatagtgacaagcccttattctacaagaagagagcacaaaagctctgtttgagaccctctcagaaactgccctgtgtgtctcttcattcagctgctcctgagttgtatcttctacaataaaactgtaagtataatgctttcctgaattctgtgtcattctagtgaatttttgagcttcaggaacgtcatgggaagctcagggatttgcagcctctgagtatgaagcgaggaccatcttgctggagaccatactctttaacttatggggtctgcactaactccagatggttatgagaactgaattgcagtgtaccagtttgagttgaaacggtatgtgacttccccagctgcaccctgggcagtgactgcatgcatcactgagaggtcctgtctacagcagataaaactccacagatcactcctcctgtaatccctctaagtgctccaaggcagcagaaaggcccagtgcattgaggctggaagcaggagcagagactctgggatatagtgcgaaagtctctttcccctgtagttgggctaatctggaaaaactcaaaaacctggcctgattacctaggtttcttttatggatatttagtatttagataaaatttttacagtattcttgaaatgaacccaattaaacacatagttctcagtcttgaccacacattagaatcatctggtagacttctgtaaactaccaatgcctggccagataaattcaaccatcatttttgaggaataaactgaggtgattctgctgtgcctagcattaagaaacattggatagagtgcaatgagagtgaaagagtttttggagcctggngcttcactaca

SEQ ID NO: 333939 - DNA, 337 bp, Homo Sapiens
gacggcttaacaacagaaatttatttctcactattctggagattagaagtcaaagatcaaggtgctggtgattttgtttcttctgaagcctctctctttgcttgcagataactgccttctcactgtgtcctctcctggtctttgttctgtgcacacattgctggtatctcttatgtccaaaggacaccatgttggattagactaacagcctcctttgaacttaagtcacctctttaaaggcctcatctccgaacagtcacattcaaaagaaatgggagttaggacctcaacaaatgaattgggggatacacagttcagcccataccaatgacctatt

SEQ ID NO: 333940 - DNA, 428 bp, Homo Sapiens
tttttaaaacaataacatcatttattttgctcagaaatctgcagactggacagggctcagcagggataggttgtctgtgctcactcagcataagctgggacaggttgcaggctgaggcctgaagtcatgtgaaggctctctctcacgcatctggtggttgatgctggctgatggctgagattcaagctggcgtgcctgccagagcactcacagatgcttctccatgtcacctgggcttccttccaacatggtggctggtgttccataggtaagtggctcaaaatagaaagagccaggtggaagctgtgttgccttttaggatttgtcttggaagtcacatgatatctttcttgccatagtctaaccattgaggcagtcttaaggggaagggaaatagactccacctttaaactgagagagtgaccggc

SEQ ID NO: 333941 - DNA, 149 bp, Homo Sapiens
tatctgtaataattgccagtttattcctctggctaagagatccagaggtaatttgaggtttacatttctttttaaagttctttcatcaagagtttaggtgcccccattgccctcataagctggttgcaaattatttgactcttacttgt

SEQ ID NO: 333942 - DNA, 445 bp, Homo Sapiens
attaaatagaataaagttaagtgtttattgggcttaaagatggggctcttcgaccgtttggctacataaatgtgctagagcaacagagcgagcggctcgcaggccaatctgccagtgttggttcgctgggaaagggggcgaaaccgaggacacttttaagctgaccagattggggttggctgccctacctgcggggtggctgtggggagttaccctcagctctgaagatgcctccccttaactgaaaacgtctttggccggtaaagccgcccacgcggccggcctcttccaagtctgcgcaggccgcctttgtccctgcagtgactgccgcgaggccaaggagcgagcgcggagaatgtcaccagagtttattgaagtgtttataagccgagaactctggtttttgcggggaggcggagtgcttatccaacttcactggagcaaa

SEQ ID NO: 333943 - DNA, 433 bp, Homo Sapiens
tctcgtcagacttggaagaaatattctgttctaaaatcttctcacttttataaaaaatatgcttttcttttggatttaggatgttatctaatttctgatgttttgaagtaccaagagagtcctgatttttctcacaaccagcatctttggcttctgttgaaaggcatgtgggctgctcatcagaactttcatcatcagaggcagtatttccatcactatcctcaactgctttacattttgtttcaagcaatttcgagaaaccacactggagtaaggtaagctgtcctggagagctggaagctttacttgaatcgggtgctttgtttttggcagtctttattcctgtggctcccactggctcttcatcactgaagtcactgcagagatcacatgcttcctttgccagtggctctgcagcttgttctgtacctct

SEQ ID NO: 333944 - DNA, 415 bp, Homo Sapiens
gacataggtgtttatgttataaacttcattcttagtactgcttttgtcatatcccataaattttgttacattgtattgccattttcattcgtttcaagcaatttttaaatttccttcttaatttcttcattgatccattagtctttcaggaacatgttgtttaacttacatgtgtttgtattttctgaggttcctcttgttattgatttctagttctattgtgttcagaaaagatacttaatataatttctattttttacaattttttcaagcttgttttgtggcctaaagtatagtttattctggagagtgttccatgtgctgatgaaaagaatattctgtagccgttgggtgaaatgttctgtaaattgcagttaggcctattagatctagtatgtagtttaactccactgtt

SEQ ID NO: 333945 - DNA, 686 bp, Homo Sapiens
acacttagtacttttttgtgttctaagaaatccttgcctaaccaaagttgatattatcttgtgctaagtttacttttaaaactttcatagttttagcttttctatttaggcctatgagccacttcaaattagtttttatgtattttatgagggaaaggtcaagtagacaaggttcattttttcccataccaatatccagttgttttaacatcatttgttgactaaaaaacaattgaccgtataacgtgggtctatttgagggctatattctgctccattgatctatatgtttattattatggtaagaccacaatactttcattcttgaagattttataataaatcttgaaattagagagtgtaaaagttccaaccttattcttcattttcaaaacaaattctgggtatcctaagtctttgcacttccatatgaattttagttccagcctgtcaatttctataatttttcactcactgctgaatgggggaaaaaagtagtatggaaaacaacactgaaaatataatccccctgtcaaaatagcatgaatttaaaaatatataaataaaatcccattttcattaaatcaagcctatattgaaagggacatgcactggtcgggtgtggtggctcacgcctataatcccaccactttagaaggctgaggtgggcggatcaccgagttcag

SEQ ID NO: 333946 - DNA, 426 bp, Homo Sapiens
ggcatcagcagcatttcaatcaatggtttttgagagtcttcttacacaatgtaggcggttctgtgttttggaagaagtgtcacattagactccagccaacagggcgggaggacaggaggaaaggtatggagccagagtgtgatggaacaacactgaaagcttcaggcaccggcaggaacagggacagccacctctccagtttccccactgaccctgcagaaaatgagtcatgatttatctcctcaaacttcctggaaaagccagccaagagcttaaagtagataagaagctccttatggcctacctttgttattcatttactttaaaggaagatgcatctttaagacaacagcttcttttgtcaggtgtggtgttgagtcttttatatcccgtattaggaacagtgtacctatcattttagtcacg

SEQ ID NO: 333947 - DNA, 1097 bp, Homo Sapiens
aggtgatgttgtgcctaatgtatacgccttctttctttcacttcttcattaatccttttgttcatgtcttttacttatgccaagctgtcacattgtgtgcatgaaccaaacgatttattttttctcccacagccccagagtccgcaaatgacagaccttaaacctaaaacacccattagtttccgtctttactcttgcagaatgagttatgaagccaaagatccgcaagaagagcacacttcttaacagccacttcagaggtgacagccagggaataagaaataaggaagaactttccagaggatggagccaccacaaataataatggaaaagaactttccagaggatggagccaccacaaataataatggaaaagaaggttcctcccagagattagatttagaggctatttaaggaatttccccactcccagtgtaggaagcttctcaatactcgctaatcaggatttccttatggttatattctagggactgctgcttgcctgcctgtcttctcttttttgaatagaaggtgtctttgtttgtttgattttattttttcttcaacttcgcccgttctacaatgacaagagatagaaccagagacattttctaccttcaacattgggaggcagaaaattcacctttttatccaagaataccaaaccagaagctgaaatatctggatctgatagagaggatagtctattcccccttggactttggactggatgcaataatggtatgagaccctggggtaggaatgagtgtcttctatgtgtgggaaagagaggaaagcagatatttggcgacctaaaaagaaggccatggcagaacctcattagttgttcaacaatcctattttccttttctcctggacacacagctatgcattttccagccatccttgtggttagatgcccagtgacagttctgagaatggaatatggacagatgtgataggcacttctgggcctgggccacaaaaaccttccacatgatgtccagtgcctcttttaccccactgacagttttttattgtcatccagagagaccttggatggtttagaagccatgtgtagaagatggcaaccttcc

SEQ ID NO: 333948 - DNA, 337 bp, Homo Sapiens
  misc_feature (103)..(187): n is a, c, g, or t
ttgaagttattaccataatgtttattgcatagggccatgtggctttacttttgggtttgtgcagtgggaaagactctgtatgagtttcttcagtataaacaannnnnnnnnnnnnnnnnnnnnnnnnnnnnnnnnnnnnnnnnnnnnnnnnnnnnnnnnnnnnnnnnnnnnnnnnnnnnnnnnnnnnaaacaaatgttttattggctcggggtcatcttttctcttaggttgattttgaattctaagtctaagtctaagtctcagaaaacaataaatttatctttgttgtgttggtcattgagggccagcacacctgacatgaaagagtaagaaggt

SEQ ID NO: 333949 - DNA, 960 bp, Homo Sapiens
  misc_feature (40)..(40): n is a, c, g, or t
  misc_feature (91)..(184): n is a, c, g, or t
  misc_feature (609)..(673): n is a, c, g, or t
gaagttattaccataatgtttattgcatagggccatgtgntttacttttgggtttgtgcagtgggaaagactctgtatgagtttcttcagnnnnnnnnnnnnnnnnnnnnnnnnnnnnnnnnnnnnnnnnnnnnnnnnnnnnnnnnnnnnnnnnnnnnnnnnnnnnnnnnnnnnnnnnnnnnnnaaacaaatgttttattggctcggggtcatcttttctcttaggttgattttgaattctaagtctaagtctaagtctcagaaaacaataaatttatctttgttgtgttggtcattgagggccagcacacctgacatgaaagagtaagaaggtagggtggggtagatggtgagaaattacttaatagttataatgtacattattccgagtgatggatacccataaaagccctgacttcaccactatgcaatctatgcatgtaactaaattatacttgcacccaacacatttgtataaataaattaaacacaaccactagttaaaacttgctatcttgcttattcatacatacaaatacgttataaatgtttcccatgacattaactattattgatacaggagttaaaagcaggagaacggcatgaacnnnnnnnnnnnnnnnnnnnnnnnnnnnnnnnnnnnnnnnnnnnnnnnnnnnnnnnnnnnnnnnnnaatccatctcaacaaaaacaaaaatgaataaataaataaataatttaggcagatagtgagtgagggcaaaaacagtccttggtaaagttttccttttaataaaaacccccaaattatttctttttaacaaagagcagcctgtaagattgagctgcagacatagataagcgagctggaagcttgcatgaataaatgcctgcagctctgctaataggaaaaggagctacctggaaaggacacatgttcaaaatggtggctccatcttcccttttctttgtaaaccacgt

SEQ ID NO: 333950 - DNA, 484 bp, Homo Sapiens
  misc_feature (21)..(21): n is a, c, g, or t
  misc_feature (31)..(31): n is a, c, g, or t
  misc_feature (221)..(221): n is a, c, g, or t
gtgcgggctataattgctctntctcttctcntcactttcccagcctctgcagtactttgacaagcttcactcctcctgcgagcagtgttttcagtgtgtgtcttatatgtgctgtcgacaggctctttccatgttctgtgggcctcctacctcggggaacgccaccactgccaccacccccgtattagtacaggatgggaaagcagagctgggcaaagtcnatttgtacttttaacatctgtgtgaacagcactcaagagtcccttttatccttcttggatcttttgcctgcactcagagttgttacccccaaacagttcttggtgccttgattatgggctcaagattcaaaaagccaagatttcctaaaagtataaatgacagaaagggaaaaaagactgtatttttccatttaaatgtcactgtaacattacttattagacaaataaattataaatatagcaacggaattctttttaatgaa

SEQ ID NO: 333951 - DNA, 238 bp, Homo Sapiens
ttcacatggtgcccaacttgtcattgaattttctattctcactatttcactttacaagggtaatttttcctaagccatcactatgagcattgtatcacttaacttaatggctttcactttctggaaaaaaatgtattttatatgctttgatatgatttttccatagtaataatatcaaggcacaatagtttcagtaaaatctaagtagttaatacaaagaactatacttcaagccagg

SEQ ID NO: 333952 - DNA, 900 bp, Homo Sapiens
  misc_feature (721)..(730): n is a, c, g, or t
ttaatcggtcagcaatgtctttttaatacagatgtggtacagaatgtttaattacagcagggcagtgattccagttaaataaaattaaaaacctttattttcccaaatataaaattactaaattaaagtcttaaaagaaaatataacatggtgacagctttaaagtacaccaccattcaccacaggatttatgatttaccaattacatactccaccattttggcaaaaggatgaaattcttaaaactgtttataaacctaatatagtaaagactgtatacatctccatattgcacatttttatgtacaagaataaaacattaaagtgtattgcatatactggaacagcacaaatttatcacaattaaacttaatgcataagcccatgtgagtattaaaaatgtagaaatgtaatacattatatgtacagaatgccaggactgtattaacaatgatatgtacataacaatatactgtactactttgtacttttcagcatagttgcggttattaatataggcctttggttctaaactgcttgactagttttaagctcacataattccttaagctttcatattttcttaaatgcaaggaaatgaatataaaagcactaaatctcctggttcactggtacaaaaattacaatggtcagttcccttaggtcatcaaaaactagtcacaaaaatagttcttgtattcaacctgaatgtgccacaggnnnnnnnnnntattttcaagattttccagctcagcctcgaggcaaaaggtcccccaggcatcaatgtcagtgcagccctccctgccatgtagatcccagaaccttttttttctgtaggccatctattctaacactactctgcaaggaagaataaaatctaagtccagctcaagagtgtct

SEQ ID NO: 333953 - DNA, 699 bp, Homo Sapiens
  misc_feature (195)..(251): n is a, c, g, or t
  misc_feature (662)..(662): n is a, c, g, or t
aagatctgataattttacttcagaactctagccatgagacaatataataaatttgtagtttttacaaaagacagttggacccaaattacttttgacaaaattgggacctgttatggctaagctctattttccctgataggtaatccaaggaaagctgtggatcaaaatttgggggaaagaagtttccatggcagnnnnnnnnnnnnnnnnnnnnnnnnnnnnnnnnnnnnnnnnnnnnnnnnnnnnnnnnnaactagaactggcttaattgtataagaaaaacaaaatctccaaataaccttgaattagtgttaccataaacagtgagttttatctcaacactgtggcttaataacagcagattcaaagcatgtgggaaaagaaagagagaaacagagagcatatgaagatgctatttaactctatagttgcagcttaaccatttgagctcttttttgttgttgttgttgttatttgcccatcagttttagaacgtgcacaagaataggccatcatatgtaacctgctggtgtcctagaaaacctggcatgcctttcaccttctgcaggagtttttaccctttctccctttcctgctctcatgatttctcagtagctacccttattgcaacaatagcacatttattatctttatcgtatttnaatatcttaacttcttacaataggtgattcagtttct

SEQ ID NO: 333954 - DNA, 254 bp, Homo Sapiens
ctgggctatgtgtggggcaactacatgtcagtatctttaggtttttccactagggctggtcagattctccggaagaatcctctagtctccttcctacaagttggaggcctggctgcctgtggtctggaagctaagtgggagaacaaggctgtagggggatcctcaattactgagtttattagatgtgttttcaaagaaggggactctactagtagtaaagtgtgaagacagggtgacagtgagaccctgtctgt

SEQ ID NO: 333955 - DNA, 520 bp, Homo Sapiens
  misc_feature (23)..(23): n is a, c, g, or t
  misc_feature (33)..(33): n is a, c, g, or t
  misc_feature (50)..(50): n is a, c, g, or t
  misc_feature (349)..(349): n is a, c, g, or t
caggtatggaattttccgcttanggcaccatgncagcactcaaaatgttntggattttggagcatttcaaatttcagatttttggattacggatactcatcctgtataaagctatataaatgaataaatcaatagcatactttggaaaagctatataatactgaatggggctgggcacggtggctcatgcctgtaatcccagcacctttgggaggtcatagtatttggttgactttttgtatcttgaatgttttctgcaagtacctctacttgtttcttgtaacgtaaaacagaagtactactttccacaaaatcattatttaaactatagtcttctttgctatcgtcngctactaatttcaattggagcttcattttcagttttaatattatttagttgatgagataaattaaccctctttcttttcttcttaaactctacatttgagaacatttccaaaggtgtcgtacagtctttgttgctgtcaacaggtactgattcaggtgactttatcttgca

SEQ ID NO: 333956 - DNA, 448 bp, Homo Sapiens
  misc_feature (421)..(421): n is a, c, g, or t
ttaggtctttagtcttcaattttatttctattttaaacagcaactaacagcttggaaatgtccctaacagctaggacccgccccatgcattccagaggctcccccaccaaggctggggtccaggttccaggaattccccctcatcaggcctgatttctctctggagacttgggacagaagaggctgtccagttagaggggaagttggcactaaaggtcaccgtttagaagggttgggctcagacacagctgcctttgttagtcttaggatattttgagatttggtagcgtgctcagattgtgggtatggagaagggttcctgaactcctctccggcctcacttgctcctgggcaagcctcacagcaccccttcgctcttgctggctcggcacgctgcctttggaagaggggcactgatagngcgggtactccgcatgccttgtgtgac

SEQ ID NO: 333957 - DNA, 566 bp, Homo Sapiens
gcctattggattttggaggcaacacattcctcgtttgagtgtgttactccagcacatttattgagtgacctgaaaggctgccagttttgagtggggtccagaacaggagaaagctctatgacaggtccaggctgttgtgcaagttgctctgccacttgggccatatgacccagcagatccaatgttgcttgaggtgtcagtggcagataaggatgctggctgcagcctttggcaggcccccataggtgaatcacagtggcggtctctaggctttcggagcaggccctgccatcttctgcagataactactcttcttttgagagacagctcttggcctgttactgggctttggtggaaactgaatgtttgactctgggtcatcaagtcaccatatgacctgaactgcctatcatgaactgggtgctttctgacccatttagccataaagttggtcatgaacagccgcattccatcatcaaatgggaagtggtatatacgtgatggggcttgagcaggtcctggaaggcacaagtaagttacatgaggaagtggctcaaatgcccatg

SEQ ID NO: 333958 - DNA, 766 bp, Homo Sapiens
ggcagtaaactcagtttatatttaacacaatatagctacggaccaagcaaaacactgttgttcacaatttcttgacctagcaatagttatacatttatcaacaacagttcgggctcacattacaatatatctttgccattttccaaacactacagaaagcacattttaactcctattcaaagtgtgaaaaagaagcgaaatgtgaacggtatttcttgggaacggaggtattacaggacagcaactgctaaagcctctcaaagctccaagggtggaacccggctccatcttgaaacagaaaaggaatcccaaccacacaggcgccctgcagtaggaaccaaggacagccctgcagaagtcatgacgtaacctgaagtttgatttaaacagaaaaaagaacagcagcccaaatgaaacatgactgagaaactcggaaacgtctcgattctgctgcagccattccctaagccaggcaggttccactgactaatagcgttcaagtttcacagcctcagcaaaccatcctcttaatgtcaataccttttctcttccttgtcctggccgctggtaaacatgtgaacaagactcccctccaggagtacagagaaggtggagtagcctttcccgtcatgagaagtcaggccacgcattgcgtttcccccaagaagtaaaggaacaggcccctcctgggctctttctgctcctaagcacagaagacccaaattcgcgtctgaggtcaggatccaaataccatttacttctcaga

SEQ ID NO: 333959 - DNA, 995 bp, Homo Sapiens
  misc_feature (497)..(507): n is a, c, g, or t
ctaggtcagtaattcccaggcactttgtagtttttgtgtctgggtagctggagtcttcatctctgtttcttttttgtatttgcttaattgttagtggaaaggtggttgctgttggtttcatatttttgatatttgcatgtggtagtctagttgtgatggtctgtctgttgcttctgttttccagctatatcatttgcaaacaaatgacaattttgtacttaaatatatatatattgcgaaggggcttaacactttctgcccttcccagaaatgtatctcttagcaatatgactcgtagaacctaacagttccatcacaggaggaagtgttctgcagtaactgtaatttggcctttgatggattcatctgttataaatcctgttgacatgaataaaacagagaataaataacagaataacccttgtggttttgaacagagaactgtaaataatcaaacctttctttcctgttgcctctaaagttagactatcagcggnnnnnnnnnnnaatgtatcccttcatgtcttaaaatttttatatgttacactgctgcagttatgttacggcataaatattcactcattggtaatgaatgataacacatacagaaaggctgcatgatattgctgaattgtaagaattttccgtaaagttgcttcttgggccattctagtttacatctaatttaataaatttagcaatttggagaacatctgcaggactgatgtaagtactgaaagtggaagtgtcagggaggcagcagaagcaggtgcttcctgatattaaccagagacggtcctggcacagatggggccgtgtgaatcacatgcagacatacgtatgcactcacgtgcgtgccattattttcatgtggaggtcaaacagtcagaaacgtttgggaagtgctgtgtaatgctaactgttcgtgcataatgttttcccatttagtaagtgctgttgcatgcgttttctgtgattctcaccacagcccaatg

SEQ ID NO: 333960 - DNA, 880 bp, Homo Sapiens
  misc_feature (215)..(223): n is a, c, g, or t
cattatcctgttgtacacattttaaacatacatatctgaacaagaacagaaaagggccataaaagtcttttcctcctttttagtagttctggccaaagacagtttaagaaaaggctaatataattgactcttttagggttatttatagattttagtaggaagcagcacatagagaaagagcatgaactttgaattcagacctaggtcaaaatccnnnnnnnnnctctctctctctctacccagagatggggctgctcaggctgctctgaacccctgggctcaagcagttttcccacctcagcctcccaaatagctgggactaccaggcacacaccaacaagaccagtgcaaaatcctgtctttaacttactgtgtacaagataggaaaaaccaaacacttatacccaatacagcacagaacacgaggtcaccaaaatgtgtggtttttcttcctcacgccagccaattttctgacaccagctgggtgtcctacaattcagttcaattctgatactcgtctacttggagttgacagcagaccccacaagtaaagggctcagttgcacaacactgcttccacttacttcagatgccaattgcaagtctgggcatctagtacttttgaccaaccagctataaatcaggggttccatgactcccttcttgggtttaataatttgctggaatgcctcacagaattaaaggaaacactttacttatgtttaccagtttatcataaaggatacaactcaggaatggccagatggaagagctgcataaggcaaggtatggcgggggtgggaggcaagggggtgcctgcagaccttctaggcttcctctgggcgtgccactctcccagcactaggttcgggaacctaga

SEQ ID NO: 333961 - DNA, 428 bp, Homo Sapiens
ttttttttggccagttatctgctgtgtctgatccagtgccctgaagagaggtagcatggctgagggccaggggctgctggcgccccctcccctgggcccggccccgggttgcaaggtggcgggctgctcggaggcgggtgtcagatcgtgaggcgggtactcctctgtgccagatcccaggcctctgtcccgccagtgcagcagcttgcaaaaatagttattctgtcaaataatattttcaactcccaaccttcacccctagatacccacccccaacttagagcaaggaaatgatgtgagtatgctttattgggaagaaaaataaggcctcctaaaatggctgatgttccggtgcttgagaactgaactcctcagtgtgtgtgtggggcacgcactgggctagttctctttagaaactaggcttgata

SEQ ID NO: 333962 - DNA, 615 bp, Homo Sapiens
aaggaatacacgaatgaactatcaaagcagctccagttctggactccaatcactgacgttggtaataatttggttgctaaaatctcctcttatgttctatagctcaaaaatgctatgcccagatgctttaaaatgatgccagttgattcactcaccggccatgagcatctgagcagttagttcccaatgacccaacatgccttgagttattgttcatttgatttaacttacagaaggtgaacttactttattttcctgccagaattctggctggatcacagttggtggtggtcctcagggaataaatctcaggcgatggcgctcagtcattttagggttgcctgttcagtataacttccatgtggctgtcttagtgaacacaggccttgaagctgatgatggcattttgtagacaggctacagtgacctacagttcatagaacagtagctggattatctacaagataacaacattctcacttgtgggtaaaatgtgtcattgtttctgggaactgaactttgaaaaataaataaaaatccctaccttgattcccaaagctttgacatttaactgggatgttagagtagatgaattcaatttacatgagttggggt

SEQ ID NO: 333963 - DNA, 509 bp, Homo Sapiens
aagccacaggtctacttggagggtcatgcagcaagtggcttataaataaaatcaaagtctatgaatagtgtcattgcattaagagacagaattgctgggttctttcattatgtaaaaagctcacatcttgggaatccatgagttggtaggttttatggaataccactttctggagattgagttgtaacccaacccattgacttcatcacagctttcttccatgtagaataacgaatttcactttcctccgcattaatctgaggttcaaaccgctccatcgtgacggcagacaaatccttcgggttcgagactccatacgccgactccttctgcagcccctgccggcatagccgcacccagtgcaagtggtttcgggcattgggggcttcactactggtatatccagaatgtctggcctgtagctgcatagaaatttgtggctgggcatttcttcatctacctgcaatgacttgagggggatttcccagtcctcgatcatgggatccaaa

SEQ ID NO: 333964 - DNA, 430 bp, Homo Sapiens
aaggttgtttgcaattattttattgattgctttaatacttagtagaccacaaggaatcagctaatgagatagttacaaggagtatacagagaacacattgacatctcgataatctaagagcatataacccattagtggaggcagacaggtgaatgagtacttaaaaatatcaggggcatcttgacattttttcacgatcactttatttccaatgtcttcggtgagcaaaataataccaacttctcacctttattaggcattttgtaatttccaaagcatgtccacatacattttttcacttgagcttcacaaaagcctctgtaatggaggaagttatcctaggaagaaactggggcttatacagagaaaatgatttgcataacagcctaagagtagtcaggaacagagttgaagccagaatgtagtattt

SEQ ID NO: 333965 - DNA, 506 bp, Homo Sapiens
ttgatttccatgtgttgatttctttaatgttcacaacaacctttgaggtagcatgcatgatctctgatttacagaatgggaaactgaggcacagagggatgcagtgaattgcttgatgacagtgccagggcctagatttgagcccacctctctaattccatcatctgttttctttctgctctgcttggagcacttaaacatcagttaatgttaacattgccacaagggctcttcgtgcttcagcaagtggtccctgacttgtcctttcccccagacaggctgtggctcctccagccaggactgaactctgggcaaatcctcacttgcttgtcttgatctccgagtactccgtggtgcttggggcctcctggtccttaggctccctcgacttcatctcagaaaaactaagggaggcataatggagctccttttgttcttccaagggaggggcatcccaggaggagatgcttgatctccggggctgtctggccagggcttcttccgag

SEQ ID NO: 333966 - DNA, 518 bp, Homo Sapiens
ggactggttgaaccacttttgcccaaaagcccaaagccaattatagaggtgtcatgctaacaaggtgaaggccctcaggaagtagggtatcaagaactgaaactgatggaatgcttagtatatgtcaatgactctctaagcactttgcagagtagctcatttaatccttaaaaccatttcatgacgtaggtgctgttatcctctttgtattggcaaggaatgctgacttgcctaatattacccagtgcaagaaccaggactcagccacaggcagcctgaggttgcaggtcaactctctaagccactatataatatattctctcatcaaagccacccttgacatcaacatgttcctctttttatcaaaacagtatcatttaacttaatctagatacatgttcacattgcaatatctcatgaagcttccctaacggttgtctgtctttaaaaatctcctctggtgttgcctatgattggaaaagtgtttgtttactagaggaggctgcatattttgaggc

SEQ ID NO: 333967 - DNA, 452 bp, Homo Sapiens
cttaagttcagtcgccatctgcatggctaacatcaaattctacttttccaccgtggtattttcttccccaattcaaactctatagttggctgagatggctttaatggatgtttcattggcaatgcaaataaaccttgggaaaagtatagagtctcagctctctcctgaaactatctttccttcaaacttaatgctatggaccttaaacaccatttcacacacaaaatgaaaacaaatgcaagacctcagaatcatctgattcttgtccactctttcaaaaagagggccaaaggagccaacacaagggctcattgggaaagtcaggcaggaaacgagctggaccatctggaagaagcttgtcctgggagtagccatgtataaagtcaggaggtgggaagaacacagcctggtggggtgaaaggcattataggccattgacaatgactcttggt

SEQ ID NO: 333968 - DNA, 462 bp, Homo Sapiens
aattgttctacatcattgactgagtgtttcaaaactgcatgctgtataaatttaaaaatatgattagggtccctatttattttttcttctccttcaggattaattcgtttttatagagggtcaagccttttcaataaagagacggtaaatattgcaaagtttgtgggtcatttggtttctcaaaactagtcaatgccaccaagtagacagaaatcagacatagacaacacataagcaaatgggcgtgactgaattccaataaaactttatttacaaacacagcagtgcactggattttgcctatggattatagtttgctggactttttttctggacatataatacaagtcccttcttttctatttccaagtcactcagataatgtaaaatcctaataatcaaatgccctattgctctgccaaccaattttaaattgcaaccaaatgcttattatttgtgaac

SEQ ID NO: 333969 - DNA, 591 bp, Homo Sapiens
tacgctcaaattctgaaagtgtctgatttattttcaaaataaattatatcttgattcctttcaggttcatgtggcaccggtcaggctgcctcaaatgctatcacgattcaaggtttggggtgagtttccatgatcagtgtcctcgtccagcattagagaattgtgcctcctccatctagaggtctgcagagccacacagtctgcaggacaatcagggacactgcccaggtctccccgggccacctactccagggctggtctgagaaagctgagggcagggctttcgtcctctggctgaaatctagggtgcagtgctggtttgcttcctgggctccaaccctgggagaaaagggaaagctggtttctagattctgtgtaataattcttcacaaacagatataagtagagcaggccaggaaacgaagggggctgaacgaacaagcccaccgggggtggcccaaacataagcgcatccctggatctctcctggtgcttggagccctgacccaccggactacagaaagcccagactgtggagtgaccccaagggctccctcaggaggcccctgcaggagccctgggaaaccccat

SEQ ID NO: 333970 - DNA, 399 bp, Homo Sapiens
  misc_feature (49)..(49): n is a, c, g, or t
  misc_feature (52)..(116): n is a, c, g, or t
  misc_feature (125)..(125): n is a, c, g, or t
  misc_feature (255)..(255): n is a, c, g, or t
ttagtatctttctgcagagatgaagttctgccatgttgcccagacagantgnnnnnnnnnnnnnnnnnnnnnnnnnnnnnnnnnnnnnnnnnnnnnnnnnnnnnnnnnnnnnnnnntgacaattncaagcccagccttctcttctcattcattagtccatccaacaaacattttaatgcctctgataccaggaacagttccaggtgctaggggtaaaaatctccgtctctcgtggcagggagaaacagacaatanaaataagtaaataatatatgtgaaggtggtaggtgctaaaaaaggaagaagatggaacatgctggcaagaggcaggctgggggaggttttcagcaacgtttaaggtggtcagaaaaggttctctccctatggtgacacttgagc

SEQ ID NO: 333971 - DNA, 583 bp, Homo Sapiens
aataatatggaataatctataagtctacaggaacaaagaaatctaagatggctgctcagccttgaaatgtacatgttttgcagcaaagttgttgaagaaccttccgttggcacagattgttctttttcacaagcatacagaagcctccttccgcccaggactcttccgttgcatccttgcaaatggctcccatttgacacattcctaagtctaagagatacccactagggcagcttgtacagttcttgaatcctgggccattgcacgtcaaacaactgatatcacattttttgcaggatttgtatccattctctgaagagtggtcaaagtaatagctgatactacagctctgcacgcatctcccatcctccatgaagtagccctctgtgcagttaatgcacccatcagctcctgccccagcacaagtggcgcagaagcggtggcagggctggcagtcctggccgttgaaataccgtccatcttcacaggagacagaccaccggtatccattgaagcttaacccatttctacattctgtacagttatgcgaatcagtccattgtctgcagttttcactgcgttt

SEQ ID NO: 333972 - DNA, 358 bp, Homo Sapiens
acaggaagtatttcctctttactgagggccccactggcggtgacattttaaccttaatcttgccaatcttgtcactatcagatttcagtggctggtgtgcattgagtaagagcttggatgaggaaatagactttttcttaaatgcattcgaatcataattttccctaatctttcttatgtgaagcagctctccactgcaagtatttgttttgtcatttaaaaaggatttagtgaaattcaagcctgggcaacatggcggaacccatctctggtaaaaatacaaaaattagccaggcgtagcatgtgtaccctctagttctagccacttgtgagactgaggtgaagggatcgcctgagt

SEQ ID NO: 333973 - DNA, 455 bp, Homo Sapiens
  misc_feature (321)..(332): n is a, c, g, or t
cccacaggaattgcctcattggattggagggaggggtttctggaactgctctgagtagagaagggggaacgcattctggccggaagggttggatagctctctcagtggggcaggttagggagatcagggcttaaaagattcaccctgatgaggttttgctctttcaatgaggaagctagctgtaaacatatcaggtaccaagagaagtcctgagatgttgaacatcagttttgggggcccgcatgcaagagagaggaaggaaagatatagataggagccactcattcgctgcgatgcaagatgaccttaaaccttggtggnnnnnnnnnnnngccctaagtgtcaccttgcaaatgtttagaaataaaccaaataacaagatttcctgaggccttacccgctatttgacttaccagctacttgaaagaagcaggttgattgattgccctgcttac

SEQ ID NO: 333974 - DNA, 450 bp, Homo Sapiens
ctttttgttttgaaagctttgagttgtgagacttgaactgactcatttcaactagaatttgttactgaacatggttgtttttgtttctgttaggcgtttagatgccaaccatattacctcagtccccgaggacagttttgaaggacttgttccagttacggcatctgtggctggatgacaacagcttgacggaggtgcctgtgcaccccctcagcaatctgcccaccctacaggcgctgaccctggctctcaacaagatctcaagtatccctgactttgcatttaccaacctttcaagcctggtagttctgcatcttcataacaataaaattagaagcctgagtcaacactgttttgatggactagataacctggagaccttgtaagtatattcatattttgggcaactgcattgtgatattgaaagtataattttatacttcactgcag

SEQ ID NO: 333975 - DNA, 275 bp, Homo Sapiens
tttctgttgaccctttatttcctggtctatcctccttcccgaactcctccaggccagcagcccagggtgccagggtccagaagttgcttgcacagacagcagatgggcagcagacagacagagttgcatggaggctggcaggtggccaggaagcagagggtgtgatcatcccagccggagagagcttgaccagtgttcaccgcaggcccccgggagggcttgggacttggcctaaatggactttgacagccttcagggtcccatgcaagtggcat

SEQ ID NO: 333976 - DNA, 287 bp, Homo Sapiens
tctaaataagtttttgaacctcccccccaccttaagtgagtggtatgttttttatatttagaaacaatctcccctcctccacaaacatgcaacattcttacacaataatgtggtataagaaaaaatagcattgctgcttatactgccgggattttttcccccccataagcttcttgatttaattcttttcttataaataatttagtctggaacaagatagggagttaatgacttaagtgctgctgatactgaaataagttaatatttattttaaatataatttggag

SEQ ID NO: 333977 - DNA, 640 bp, Homo Sapiens
ataatgtacattgttttgtattaagaatcattccaagtgacagaaaatttgcgaaatcaaagtattaacatttataaaacccttctgttgtttatactattctggccatgactttcaaaagcactgatttttagggggacagagtatcaaagaaagaccttggctaaagaaagctctttcaagtgggaagggcatcatagagaatggatcttgaggagtgaaagtcaggagatgccttcctactcagctgcatagctcatgaagctgacaacccgcagagttataaatgttgtgggtagattgccttcacactggccttgcaatcatctgctacactgagcaccattacatttcatggtggacattctaaggtgtgacactgtgtactctgctgtcaggaggctttccggggagaagggtcttgccaaggatttcttgcactcccagccacctgactggtttagtctgaaatttcagtattccagggtagtatgagaaaggccctatctggtaacaaagaaagcataagaaagatggctaagggaacaaagggacaaggcttttattttgttctttacccacagattgccttcaaaataaagataaagcgtctaagcctggcagtgcaggtctctttaag

SEQ ID NO: 333978 - DNA, 524 bp, Homo Sapiens
gtggaggactgtctttctttctggtgcatctgataaaccctaaatgaatattttcacatctataactaaaaaggcattagggctactggctcacagatgcaaagacagtatcaggttccctttcttaggctctcggttatttctcagaacagacagcattgcttgtcagttcttcaggtcacactctttcgaatgttcctctcctcacccccacaagtctgtccaatacctcaaaaccctcccagagtctgtaggcttctctcatcatagcccatcagtgtactgtccccttcttgccaccagctctccccactccacagggccaggggtgaccctaaagcttccagcaagtaatttcacaagacagaaaggttgccagttccctttatgtgcagcccttccaggaggcagggcagaccaggcgacctttcaaagtcttactggcatatgggcaggctccgctccagtctcatccacacggccactgacaggccgggaaccaacgcctgacaggaatataaaaa

SEQ ID NO: 333979 - DNA, 237 bp, Homo Sapiens
ttagatatggataacatttattaaatagcacaaacaaagtataggtcactaaaaagctgaaaacaaacaactgaattctatagtaaactcttagaaatgccattagaaaccaataggacaaaatttaaattcaaacaatacttaatgagtgcctgttgtgggcaaaacaacaacaaaacaaactataggggatattacagtagacacagaaatcaatattaaaaggtcacactggcc

SEQ ID NO: 333980 - DNA, 521 bp, Homo Sapiens
tcattctctacctacttgaggctgacttccacccccatcagtccacccagatgattcttactaatgactttcctgccattaaacgcagcaggcagctttcctgatctttgctctgttgattacccgctcctcagtcacacactctttcccaccagccctctccccgctgcagtcctggtttttacatgtttcagcttgtttttccattggtatttggccattaaggttgatgtagctcaggaatatgcattgtcctgcttttgttctcagtatgcttctgaggtctttggaatgagtggatcccaggaggactctagacaaaggctgggctgattctctgatttctgcagtacagggaggttaatacagttaagcttgatttagagactgtaccattgaatagagatataaacattattgtaatttcattctctcactctggttatttcaacctattctagttttataggttagtattttaaatgttaatgtaagttgttttataattattactgttggtg

SEQ ID NO: 333981 - DNA, 447 bp, Homo Sapiens
  misc_feature (47)..(62): n is a, c, g, or t
aagatttcatctgccaaactgcatttattagcttacaacttcatcannnnnnnnnnnnnnnnaaatcaaagacaaaatgtcaatcaaatttcatcagcaggaaacatctagaatgatcatactgagttgaaaaaaatgccaaccaagagaaaaagctgacattctaattaaaatgtgaaaacccgttgtgggataaacatgtgaccagtgataaactttctgaagaagacctcctgaagcgcacacacctacagctgcatcctgtgcgtgtctgtattacagctctcagcataccgtattgaaattctgtttctatgactggagcccgtcccacactctgaatttcctatagatagggaccatgtctcactcatttttacatctctagcagtgtccctgtgataagctgtaatgaagccattactacctcttcgtaatccccagaga

SEQ ID NO: 333982 - DNA, 884 bp, Homo Sapiens
acagataagggagactgaagaaacctgaacatccagtgctcatgaggaaaagctttaagagaaaataccaggtgctaagagtaattataactaccaggtaaggaccagtgagaaacagtgggtgagattaggctcgacagttccctaactcaggaaagtcgagtttctgagcataagtcataggaaattctcaaacatacttttgctttgtgcctgggaagcaggaaagtacaccagacccacctcatttcttacatctctccaagagaagcctttcgcttgtctgtttggtttatttggttcacatcagagtttgctaaaggcttggaggttctgtaggaaggaatgagccgcttcacctcctggagaaaggacgtctcgtttccagcatgtcgggggtcaggctgtgctgcactgaggctgaagggttctgggattttccactgtgtgtttggtttctgttgcttgttccaagctgctgacgcggtgtgctggatgagagttctactggccactggcttctggcctccagggccagctggctgtacagccacctgcaagtctttgttcccggggttagccttgccaccctctttcaggactgcctagaattgtttcctgtcatcggggtagtaaatgtgttctcaggagcacgtgtatcttaaatatgttttaacgaatgtttacttagtttcttagaaacaaaacgtggtaaacacccagtcttattttctgggacacatgaagtgtgtttaagctgtcagctccaaaaaccctttccaagtcaaataacttaaaacaaaaggttgtcagctaccactgcatcccagatgttagagtttatttctaaagctgttcttgggtgctgtttaatgttccagtgg

SEQ ID NO: 333983 - DNA, 452 bp, Homo Sapiens
atgatttgaagtttttaataattcaagcctatcaccaacacatcaatatgttttctgttttacattgaaattatatgagaatacagagaattgctctgaggattcctgtttctaaatacattatgggctttcttattttctattaggtcttgaaaaaaagcaaatgtcagttaatgtcacccaaaagaacaagggtttttactcaaatatttcttggatgatatagtactttttaggaaaaacatctgccacaaaaatgtttgtctcaaaatgatgttttgctggcatagatcactactgcaagtgccttgctctcctgtgcagaagggcatgctttgcacagtgcatggctgttatcggtgctatgtaattgtccatcatcacagcactatgatattagtgctcagagtctatcagtcagttgggagatattttggcttaaatgatgttgt

SEQ ID NO: 333984 - DNA, 617 bp, Homo Sapiens
gctttatatcattctttattttaaaagtgctttaccaacatatactaatcttcacaacattcaagggaggtagataagtattacaccactttcacagatggagaaactgaggcagagattagtaagttgtattgaggggcataatatacggcacaattaggaaaagaatttgttgcagtcatggatcactgaagacctttctcatgatttctgagtcccatcaacacaaaaagcagcagatgcagcatggaagcaggtcatcactagtttggctagtctaaggttaaacattaccttgttgataccagatgttgaatatgctgtcctttggcaagcatccccctcaaacgcattcttacatgcttccacctctaaacaggagaggggaagctgttgtgagtgcagcaggagggggtggagaaacagcgctgggaaggaagatgacagaagagaaaacatgaactgatataaaagcgagggcaaggacaaacaagaggaccctctgggaaccagtccaacagaaaggaaagccacagcagaaaagaagtatcatttgaaaagctcagacatccagaaatgctactcaaagtgtaattcttagcaatgacattcaaagc

SEQ ID NO: 333985 - DNA, 845 bp, Homo Sapiens
caagagcagagtttagggcttattttgccccactaccgaggcaaaccatctctgagtgttctacttgataccccctgaattatgaggttttctactctggctggtaggaagaggaactggccctgtatgaactttgaagatggttccctcttatcttttcaggtggttttctctggccttgatttgtacacacaaacacgcatgcccgcgtgcgcgcatcagctctcagctgaagacttgaatgggaccctctgcatatcctacaattctctgtgtagtgctatcctctctggtattgtgccctgctacctctaggtgtcttggctttcccagactgccagctccacctcctcagctcagggaaatggcctggctcctgttggattctccctccccgcagcacagtctggacaatctcaagaactactgttgaatgtactttgtctgttttttgtttatttgtttcagatgggaaagtaactctggtccctcttactctactggcccaaagtagatatccattagaatttaaaagtgtaaaaatgttttttaaaaaatgtttaatgtttaatgctagcactgtgttctttctttctttttttcctgacaaaatacatctcacagttaaatacttttaaggaagagaaagttataaaggtgcagaaaaaaggatgccatagtatgattgcccataatttagtaaaattcctttacatctttataaaatcctgtaacattctgtgacctgcttgtttccctcaacattacatcacaaacatgtttctatgtccttgatgtcactttgtgaacacatgcatatatgcctgtgtaatatctactgtgtt

SEQ ID NO: 333986 - DNA, 1032 bp, Homo Sapiens
atcttgcatactcttctgatgtcaaataaaattacatgtcaaaataccattatatagtgcttaagatttcactttccagttacactatctgttaaaccaaatattattcagaatgtaaataaacatctccttgataactgttatttctataagcacatactatgctataattcagtgagactttcaggaattactgaactgtttcaaccgacttgccaatatactaaacagccccaccccaaacagtattttgaaattcctgtgctttgtttacaatgatttatcttttctctcactattcctgtcagttgtcagtcactctcgctaatgataacagcccgcatttgtgcagcacctcagagccttcgaagcactcgcccatttattgctcccttctgtgattgtctcatagtccctttccagtttgccactaacatgccaggcctttgaaaacaacataatcaaactttaaaagagattcaatgtaaagagtaaacagtctctgtgagaggggcccaaggagtttccttgtgaataagtttggttcatggacatcagcatttattttgactgctcaaaacctgggtgtttcctgcagagctgggctctgaatggttgaggttggcagataagaagactccagctgtaggaaatatttctgttattgcccttttataaggaaatgtttagtgattccaagatgtacatttgaaatgataagtgaccttagagataatttattgcagtcactcatcctgtaactaaagaagctaaggaccagagaatttaaagtgttgaagatagaaccaagttaaggaaatgactcttgtgactcttaatccaatattgtttttatgaacaccacatcatgtatttgttctaaatagtcttggtattttaaagatactgaatttttgtaagtttggcatggtgatatgaaatggagataatatatttcaagtgcattactataacatgcaatggagtatgtaatagaaaattaactttcgtatattaaattttaaatattgt

SEQ ID NO: 333987 - DNA, 382 bp, Homo Sapiens
aatgttgcaggacctttttctttttgatctaaactttttgaggcttcgtttgcctaaggagttgtctccttggccacattaaaacaggtctagcagtggctattacggatcccccaggattgaggcaaagacagagtgaagctgtcaggtactgcaaggtgtaaacaactgactccaggtcagcccagagaagggacaatgaagtctgattgaccgcacagaggtattcactcacgtctgggggctgctgattgaaaagcaccatgctggatgtctggcaggttttggctagcttgtgcttgaatctccttcccagatatgctgaggcaccatctgtatgagtcttgcaggaaaggtctcttacttgttcatgctcactccc

SEQ ID NO: 333988 - DNA, 432 bp, Homo Sapiens
  misc_feature (170)..(170): n is a, c, g, or t
caatttcttgcacctcagagctatcataattttgtgacttttctatcatgttcttatcttactccagctaccacgctgtcatgttttttaggttaaggtgtactttttactcctgttttggcttttcaagctatgtcatacctgcctcccagaggtacttggaaaatatntggcttgacagcacatgcttatcccaaggcggaattcatctctacagtcttcacatgccccactccagccgtgtggtagcacgccttgcttgtgaccctgggatagagatggggatgttaagtaggttcctctcaaccccagcactaatttgagaggaaaaactattaaggataccgttcctttctcccttcctgtacttaaattgatgttgaaggaaattactagaattttttctccccaaaattttaaaacacaaatgct

SEQ ID NO: 333989 - DNA, 701 bp, Homo Sapiens
gattcttttggatcccatggaaaaatatttatctgcaacttctccacaaaatggaaatttgtttttaatcttatctaacaggagattcgcatatgaccaattcttatcttttaaataaaaatttacttatgtgcctgcctgaaaggactgaagatcatacctctacactctcttccatgtcctttcttctctctcccctgacacagctgcattggaagtagctgtaaatgggatggactaattttccctaccaagaagccccactgtaaatcagcggtcacccactccagctaggcattttgcccacaccagggctatgagatcagatttaattttccaatcagcagttctgtgcatgtctgattcttggctcaacatacaactgctatgctgtttattatacttcatctctccatggcctctgaaactccccaaggctcgggttcgtcatccgcaaaatcgtgggaggctggttccatggttcttgcagtcccttcgctttgaatccttttgtctgtactcttgctacatgggtgttctctgggagtttgttagacatgcagaacctcaggtcccacccagatccagggaatcagaatctgcatgttaatgtgatccccaggtgactctcatgcatgttaccatctgagaagacctaccctccaccacactgaccacagccacgagctgtaccaagacac

SEQ ID NO: 333990 - DNA, 521 bp, Homo Sapiens
ctataatgataattacattatattcctttaggtcttccattttctatgtagtctgaattgagaagcaaaatgtagttactatcatttgacagatatctttgtatatatttcccacataaaaaccaaaatgaatgtgagccacatataacttacacttgaaaataacaggaaaaggggtgagtaaatacagcaccttcatctgacacatccatgtacttgcattgggactaatcaaggaaacaacttgacccacagagaacaaagaaaagagaggcaggatgacagcccaccttggagcgacacagagcaaggtgaacctctctggcccagggaagcagtgagtgaacgtgtgaccctgggaaaccacgcttctccaacggatctttgcaacccttgggtcaagagacgcccttgtgaagccactccactagagccttcagtctgacatacagatatggggagtcttggcagagcagctgctccggcacaggcaaagacccaggaactccaaacttcccagc

SEQ ID NO: 333991 - DNA, 558 bp, Homo Sapiens
gtgatgaagtttgtagtaacgctatgtgtctgggaattctacgtgggttaacaataaataaactgtatagcacacatggaatgcatgcacacagtaggccttcaatgagtagcagtgtgtatgagagttattagtcaaacccgggaatggtcaaggaacagaaacgctcagccttccatctccctgcattttcacacgaatccttcattccacacacagtcttgagcccctgctgggtgctaagcattgagttgggaggtacagaaatgaagaacgcatgatgcctaacttcaagacgtcaatgatctagttgcgagggagacatagataaaacccagcatagtgagctcagtgacacagaaagaggatgtactcagggtggactggactggcatgaatttccacaagtggccaacaggaactagccaggtggaggaggagcaggagggtgacacagacggagggtgcagccagcctaaaaggtccataaaagagagggcagtgcacatgtgcaggacaacccggagctctccacggctgtagtgaacagaagaaaag

SEQ ID NO: 333992 - DNA, 427 bp, Homo Sapiens
acataactttgttttattttgtaagtctagaaactgccttaaaacagtaacaacttcatctccagtaagaccttcctaatccccttccatcttaactttaactgcatctgcctgtgggtccccagctttcctgggctctgtagcttctctcagtataaaggcttcttcatggctggtgtgagcaggctgggacatctgcaggggaggctccccaaaaagaacctaactgggcctttaataacctccttttgcaggctccatattagccttagcttagagtcactgggctgaagctttaatttccatgtcagaggtattaacttggtttttgaaagtaagtgtttaaaaaatccagcaaaatttactcaaacacagtgatcatataaggggaagacattttaaggtgtttacattttatacctcaaca

SEQ ID NO: 333993 - DNA, 430 bp, Homo Sapiens
gagatatgtgatgattttgatcaaaaggacaaacagatattttaagttacaaagcttgtgtttaaaagcagagaaaataggacagcttataactgctgaagcactgtaattttaactcaggacaaaagtacaatggattattgcctaagagttaaatggtaatttgatcttcaaatgtaaactccaattgtccttctagctaagaatcttcgcaccagggcactgggaggcaaattcagtaataccacataaaactgacatgttttaaaaaagcctaaattgtgttagacctatcaccagagagatgcattaattctcatgatttcagctagtggggccctacttggctgaacattattggaataaagcctacagtcaggtgtcaatgtctttgtcagtctctcactgacagttctacagataacgacga

SEQ ID NO: 333994 - DNA, 472 bp, Homo Sapiens
aagttaaaggtctgtcaattttgttagtcttctcaaacagccaactcttggtttaactgattttctctgttgtttaaaattctctttttgtttatctctgctctaatcattactgttcctttccttctgctagctttgggttttgtttgttgttttttgagcttcttatctccttgtactcttgttccttgtctctcatgttcagcccatctccaagggctgctgtgaggatcacaaccaacaggacacatgaaaagtctataacactggccagatgcctctcagaaccgcagcagaatgtgcctgtgattcattctggctgagaaaatgtcgggctcctctttgggtgcaccaggcccctggcgtgttctgggaggggtgacactgccactgcagaatggggatgccaccttctgagagccacatgttactgtgtcttcaaccctgccccctctcaccatgctagtttttt

SEQ ID NO: 333995 - DNA, 411 bp, Homo Sapiens
cacagagtgaatatttatttatcacagaggtcaagccgaagctctaattttataaatcctggaaaagctggccagaaaagtacagagacttgcccaaagtcaaagctaaagatgcttccagaggccaggagagaagaagatgttttagtagcactccataactggaccctcaaatctactcactccaagcatcccttcaagttcctggccccaaagtaggaatctcagtaagaaaaaaatagagatggtttccaaataggaggtaggacaccatgagtggcatcgggcaataactgcaacagtctggctaaagatagctgccacttatgacatctgagcatgaaactagctaattttaaaatggccatttaatacatgcatgtaagaaatcttgtatcccctaaatctata

SEQ ID NO: 333996 - DNA, 136 bp, Homo Sapiens
gtgtccactttccaagtctctgggtagctgtgcagtgacctgtttcaaaacccgatccagagcagcagtgatgaaatcaccctctcctttaagacctggcattacaatggcctcatcctgcatgtgggcaagtcag

SEQ ID NO: 333997 - DNA, 688 bp, Homo Sapiens
attttgcttaaagttttccaagctaccctatcctaaaatagtttgtgtggatatcagggctaaaagttctccccatctattttaggggctgtctgcttttctagtctgtccacacagggattacctgtcatcttgcatgcaatcaggagaatctcataggggcaggaccttcccctactctgcctcttcctccatactaggttggaaaaatctggtttagcccactttttgcaacactcctgccaagtggtcttctacccattgcttgaaaatctctcttgacagggagctcactacctcacaaggcaggtcatttcattgtgggatctatagaaggttaagtaccacattctcctctaaaccttgcctacgacatgtttaatacttcatctacatagcagcccttcagataatcacaaccactttgcccccaagttttcaggttaagtagcatgaatttggtcattccttaaagacagggtttcaatttccacacatgatctctgcaaacaggcactgggttttcagtgtcctttttgaagggtcatataaaaataaggtaacaccacagtgccactacaccttctggggctggacttgtttcagcagctttggttgcactgaatttgggggagctgcatggtaccaggggtttattgggttgcagatatataaatgccctaaactt

SEQ ID NO: 333998 - DNA, 511 bp, Homo Sapiens
aaagatattgtagacctttattttctttaaatctcctaataaaaacattaaactttcaagaagattccaaactgacattgcatagaccaactcctttccaaaaatatctctgatatactctccaactctctcaatatatagaatttgaagtccaggagctgtgggcacctggtgggaattcactgagctcaaggggacaagagggctgaggacagggctcccacatggggacaaggccaggctttctggcctctggttccagccagcatcaatttggttgtggccaaattctcagtccaatcaccctggcccagggctggcgtgggaggatgtggcaggctctgtctccttctggggttcctggtctggaggagtctccccaacagcgccaaagctggctgttttccgcccaaagccccagaactttgaatgagaggcaaatctaccctgaatgcacctccctcctaggctgggtgaggtcacgcagacacagaagggcaggacagaactc

SEQ ID NO: 333999 - DNA, 382 bp, Homo Sapiens
  misc_feature (210)..(220): n is a, c, g, or t
  misc_feature (263)..(263): n is a, c, g, or t
aagaagcatgactcaaatagtaactaccaattatttaaacagcaatcagaaatagcctgagaatttaagacaggggaaacagaatctctaaagggaagttacatcaaaagatacaaagtattcttttttattaaaactgtttatgcctccagctcttggtataagaacaagtcagcagtgttctattcctagtctctttctagactacannnnnnnnnnnaagtatctcttctcttacttcaaaggggacaaaaatgtttgantgtaaagaactggtcagtcatgaatcaaagtaaaagataaagcatacaacaaagagtttctcgaagccagggagaatccatttagcgtcctcgatttaaagggaaatccccttggctat

SEQ ID NO: 334000 - DNA, 543 bp, Homo Sapiens
  misc_feature (14)..(14): n is a, c, g, or t
  misc_feature (21)..(21): n is a, c, g, or t
catgtctgacggtncgcgtcncagtctgtgaataggtccatgtatcataagtgctacctgaagcaatacttgtcggatacaaagtgcaatcccataggttacactaatgatggctgcaggggcatagacaaaaggcattggaactccgagtgtcgaactacccagtcgtacgtgcgggccctaaccatggatagcaaaagtagaattggctggcgattcataaggatagacacttcttgtgtatgtacattgaccattaaaaggggaagatagtggatttatgttgttatagattagattatatttgagacaaaaattatcttatttgtatatatacataacaggggtaaattattcagttaagaaaaaaataattttatgaactgcatgtataaatgaagtttatacagtacagtggttctacaatctatttattggacatgtccatgaccagaagggaaacagtcatttgcgcacaacttaaaaagtctgcattacattccttgataatgttgtggtttgttgccgttgccaagaactgaa

SEQ ID NO: 334001 - DNA, 530 bp, Homo Sapiens
gatatcagtattttattacttgcgttattgagtgctcacctgcggaaattctaaagatacagaggacttggaggaagcggagcagctgaatttaatttaaaagaaggaaaacattggaatcgtggcactcctgatactttcccaaatcaacactctcaatgccccaccctcgtcctcaccatagtggggagactaaagtggccagggatttgccttaggtgtgcagtgcgttctgagttcactgccgattacatctgaccagtctcctttttccgaagttccttccgttcaatcttgccagtgatggtttttggcagctctgagacaaactccaccttccttgggtacttgtatggggctgtcactgacttgacatgctgctgcagttccttggtcagctgatccttgtcatgggacaggaactgtggggtcaggacaataaaggccttcacaacctcccctcgaatcgggtctgggctgcccaccacggctgactccgccaccgctgggtgctccaccaaagcgctttc

SEQ ID NO: 334002 - DNA, 796 bp, Homo Sapiens
tgatatataaacagtaatggaattgctgagtcaaatggtagttctgtttttaaatgcttgctaaaataagataatggtgaggtaccttaagaacaaatattttcaatattcttttaagtaccttgagatagaaacattctcttgatagatatgcttcagaatctgtctccaaattttaagaagattttgtaactgtgttttgctgtgttacacactaaagtatactactctctttgccaatctccccttcaggcccactctgtttgtcctttttctaaatgtccaatgacttcctcattttatggtccaccatgattggttcctgtttctctggcctaccttagttttatacatcttgatttcctcctgcctagtaggcaccaggatgctggcctcaggtccagattgatcaacgcaacagtgcaaaagcatgctttctacttggtcatcctcattcttcttttcccgttcccaatccttatgctcgaatacttccaaatagagtgacacgcacacatctgaaccagtcctcagagctgcagagtatcaaactgaaatctgctagaattctgagtaactgtgatgtgtgtttagggagaaaatactgcaaagtcttacatggcaggtgctaaagttagtatgcataaaatttttgtttgtcatttttgttctgcagttcaagtcctggcaaataatttattactctgtgatgtatgcaataaatatgaaaacattggaggaaggattttcaaataattagaacaaaaattcatgtatttctttcaacggatattct

SEQ ID NO: 334003 - DNA, 505 bp, Homo Sapiens
aacaacaaacagccattgttttgagtccaagtgcttcaaaaggctcctgcttaaggactgtgctgtggtagacatggcggttccttctagcccacatgtggcctagaactctgtcagctctgtcaggcactagtccccggggagatggcccagcgtccatggggtgcgctccagctgctcggttcccaggaacgttgttatttttggccctggtgttattaagattgtgcccagattccctgcaaatcggccactaagcagcatggggccctagtgaaagcacgcggagaacagagggggcagcgcgcttcgggagactccccggccttggagagctccagcctccccgggggcggaggggccggccagaaggactcctgcgccccacacccgcagcgccgacagggcgtgcgcctggtctacagcgctccccgactgctcccaacccaggggcacccagaggccgaagcttcctctacagagcctccccctccttaggagacaa

SEQ ID NO: 334004 - DNA, 265 bp, Homo Sapiens
ttgtgagccactgtgctcagccttcacttttgttttcagtcctgtgcctcaaacctattttctgttgtgcttgatacctgtcagtaccaagtctccatattcactggtccccagagaatatgtctttgatgtctttggagctaggatagttgccatcctggatggggtttgggccgcaattttggggtcttattacctttatttatttttcttgacaataactgagaaaacttgcaggtatggtacaaatagcttattttctaca

SEQ ID NO: 334005 - DNA, 366 bp, Homo Sapiens
ggctatgcagtgtctgcctcatcctcccatcagccctggaggaaagccaggatcctgctctctgaatcagagatctcttagttggaaaatcaggccttctcacttaagactagtgtattctggctgcgcattcctcacaagatgtagtcaggttaggttagaccttagagtcacaccttgttcaggttcaacctgagtgaaataaggaattgaggtgctgctccctggtgattcagctcattttagcaagtgtttattaaatgctttccccaagcaccacaccaggcccagacaattctgcctgtacacatcctgtggtatttgttggttggaggaaagaggctcttgtagtttatgaattaaaga

SEQ ID NO: 334006 - DNA, 970 bp, Homo Sapiens
  misc_feature (382)..(382): n is a, c, g, or t
agaggaagtaactcaagagggtcaccacttctctgtatttcaccctcaggcctggctctcgccttctagtaaacttggtggctggttcccaagtcccttggaacattctgtgttttgtttgtttgtttacttgttagtttgtttcaagtcccttgcagtttaactacccagagaaggtctgtggtacatagatacactaaccttgtaagagtacaagaagagtaacctaatagcctgggcccaggaggtaggtgtggagggaaccaggaaactacagatataggccacacttagcttagggactggcgtgtctgattaggccttggtgtcacaattgtatggcccactatcagtattgatattcttaaatttgactttgagncatttagaaagggataggggagcagtaaatgtaaggtccattttatagagatttttatcaaaaacaatgaaaaataaaagttttagagctttcaaaaacaaaccccagttatctggaaagcacagctgtcagaaatggtttactgactgtgaatatgcatgcttttcttcggattaacaatgattcaatacctttgattgaaaagtatcttattcctttaaatttggatgtacaagtcaggcaactcactcaagtcaagggcttgcctcaacatgatcaccttatgtttgcacagtttattctctttgagttagttaaatttcagaataatatgacaatttaaaaacagtattttaggcagcaatcatacctttatctcaaatgaaatttctaatcagaattgctatcaaagaggaacattaatttccattcccctgctgcctgtcccacccatgctcatagaagaagtaatgaccaaggagctagtcagaaaacagtagcaagaaaacaaaacaaaaagctggacaattcacaggccaaagaggtaatcctaaatatacaaagattgattatattgtgggtctttaa

SEQ ID NO: 334007 - DNA, 573 bp, Homo Sapiens
ttaagacggagccgtggggagtctggggcggaggtgactctggccagggcctgtcgcctccccccgtagccccttgagaacgtgcacaggcccagggctcccaggttccaggaactaaagtttcgaaagttgcccggctcctggggagtctgaggccgcgctcttggtgtgtgagggagggagggagaggctgcatctggcggccaggggtgcaggaggaggcagggagtgtagcggggaggtggagttgcccctgctgtttcctataggcttgggctgggccgtgcagctcccgcaccacagaagtggggccacagcccaagtctcgggtgtcagcagaaatacggggggtctgactggccgcccctcactccccctctcctccaagtgccaggacctcagcctcctgccttcttgcttctgcacttctccctcaggggctgagggtgagcgctgggccagggcaacccttgctgccaggttgtgaggggctcagcacagcagggcgcgcccacccgaggcaggacccactcttcggcccttccaggagcactgcacctgagcaagaggcca

SEQ ID NO: 334008 - DNA, 324 bp, Homo Sapiens
cccaccaccctggaagattttaacactctgtccttagtgttctcttggcattttgcatttacctttattatagaacttggctgtttaaattttaattttttgcaggacgaaccggagagtgaggtcatttatacgcagaacattgcgtctcctctctttaatttagcattttattctctgaggtcctagctatatggtactttatggtgatgaagtacagccacaccattctgcctttgtgtggccattgcatgacctctccaaatgaaatcatttcttctatagagaaaaaaaagtgaggatcagagacattattaactaagt

SEQ ID NO: 334009 - DNA, 445 bp, Homo Sapiens
  misc_feature (185)..(303): n is a, c, g, or t
ttccagtagccttagttgataaatatggttttgaataagattgcagtcatttaccttaatgaacatagtaatagttattattttgttgaatgttatgaaaagctcttaaatacctgagttaaaaccaatttgccattatttttatttttaaagaaaaattgttggccgtgtgggtggctcattcnnnnnnnnnnnnnnnnnnnnnnnnnnnnnnnnnnnnnnnnnnnnnnnnnnnnnnnnnnnnnnnnnnnnnnnnnnnnnnnnnnnnnnnnnnnnnnnnnnnnnnnnnnnnnnnnnnnnnnnttagtcaggggtagtggcacacatctgtagtcctagttgcctgggaggtttaggtgggaggattgcttgagcccagcagtttgaggctgcagtgagttatgatcgtgctgctgtgacagaatgagtccctgtctctgaaatt

SEQ ID NO: 334010 - DNA, 466 bp, Homo Sapiens
tgtagggccaaaggagaaggggcttccatgctctctccatgcatgccatgctccaggaacctccacgtgttcagctatctggaagctctcctgagccctgttttttgtgtttttatggaggcttcattacttgcccatgattgattaaataattggccactgaaggttgaccagttcccatcctgaagctttataggagcctccagccaccagtcatctcattagcatacaagatactcttagcactctggtgattccaacaagggttttaggagctgtgtgtaaagaaaaaggaagaccaaatacttatatcacaatatcatacctatatttttaaaaagagagggctggacgtggtggcttacccctgtaatcctagcactttgggatttgggatgccaaggtgggcagatcacttgaggccaaagttcagtaccagccttggcaacatagaccacatctgtac

SEQ ID NO: 334011 - DNA, 1052 bp, Homo Sapiens
aaaaaagtaatgctacatgatatgctaacaatgaagtactaagtatctatataaaatagtttgaaaactttgaaaaattaatatcaattttacagccatttatgctgatagcacctgatattttataagatttaattagacagattatgttttattttaaaggtatgtacttcttacacaggaatatgaatagaaataaagatttctatgtacaaaggcacttaatacatatatttaatatctattttaaattttaattgaaatggttttttaagagggaaaagtctaggtttcattagctttttattgttctatatttaatcagccctaaaatataattacagccctagaatataattactgtcaaatgaaagctttattataatctaactggccccactaaaaattttagtcatgaagtctcagagaaatttcacttttgtttgtaaaacttttcctatggcccctctgttcacaatccaaaggcaacatttctctagctgctcagctattctgttttctgctttctaacatgccaacatcaaaagctgtaactctgcccttttctcttcgtatccatgtcagacgcagggtaactgggagagctttcaatatcaacagcagctcatcttactgataaacaggcgcaaagacagaagcagatggtttctaggcacagaaagcagtgggtgaaagtggtacactcccgtttctatcttcagagagtgtaaaatattttatcctgaatgacatgctcctaagttaaaataatatttatttgggtaggcctgctatacaggagatgttaagataccgaaaacggtacactggaaacaatatgaatcgtgcaacaaaagcgagtgaactctgaagatgagggaagtgagtcgcaccacagacagcagtgggggatagcaactctaacaaagtcctccgctcctgcgaagagctcattcaagcacctcccttttaaagggtattcctaataccctttggaagtttcttcttcccttcactcacaatttcccttcatctggggttccaaggatgtg

SEQ ID NO: 334012 - DNA, 767 bp, Homo Sapiens
acggaattaaaaaacaatttttatttttagttatggttacatttgcaattgtaagtggtaatcatttttactttagatattctggaaaatacatacaattaaagaagaaacatgaatcactcatgtaccttccattcttagaataatcagtgttaagactgtctgcagaaagtatccagtacaaagtagtggctgagcccactggtgatacagaatgtatcaggcactgtgattcttggatctctggccaaatgtagaatcatttactgagctaaaggccaatttgcttggaagagtgcatctaattaaagtgagattagaaaggacgaaaggtgtcctttaggaaataaccacacatggcaagccactggtatgatgatgatcaccaaccctgcaggccttttgaggcgctcattccaattaaacttgtcatccttagtgcagggggcagctgggagctctggtttgtggcgttcactgtccttgtttgtaccggcatgacccagtcctctccgtgggctcctgtggcgccctgggtgttgttgggtctcaggcctgatcatttgtcataggacagtgggctcaggcccagcagtgtctgggccagtctcccttctttgtcccagtgccccacatgctgtgggctccgtggatgcctgttgaaggagcggagggacttccattaggccgtgaaggtggaataagggatttttagctggggttatggctctgagacagttttactaaaattggtctagcagtttctc

SEQ ID NO: 334013 - DNA, 900 bp, Homo Sapiens
  misc_feature (690)..(831): n is a, c, g, or t
acattttggccacaaatacgctttttattcagttaatcagcatttatgtcagataaacaagtaatcatgtttacttaacattttctgctgccacagtgaaatcctgataaagctactactacagtttccagtgctaccctataagaaaaagaaatgaaactttccggccatcacatttccttttgcctatgtttggcctcaggggcgtgtctctctttttgaaagactcaaatccattttctactgcattttatgatgtggtctgttgattgggcctggtattgcctgatggacaagctctgaaatccacccttgcatagttttgcaatgtcctttgtacctcattgtgctaacattagatagatgaagctgctcttctttgaaaatggcagaattttaccactgtaaagtaacttagaagataggattctaaatacaagaagcagtggataaggttctattttggacattttgggtgtgattcatttttctcaatgaacttcaagtcactttccctattcatttcttcttttatatagtgaaaaactctgaggtccctttcaactctgtctcagtgattctaatgagtctgtgtttttttgctgaacactaccctagaattgattattatataattaattttttaattcatccttttttgccagacaggcaagaaggtagcattgttannnnnnnnnnnnnnnnnnnnnnnnnnnnnnnnnnnnnnnnnnnnnnnnnnnnnnnnnnnnnnnnnnnnnnnnnnnnnnnnnnnnnnnnnnnnnnnnnnnnnnnnnnnnnnnnnnnnnnnnnnnnnnnnnnnnnnnnnnnnnntacctgtgtgctggctgcttcactgctgtaggctacttgtgctggatgactatgatgtacacagaatgt

SEQ ID NO: 334014 - DNA, 823 bp, Homo Sapiens
gcatgtgctcgaaagaggattcaactttggcagcactactgatgagaattgctacaaccaagagagagaaaaaagaggcaacctggatgagaattttaaaagcaacttggtcacaatctgaagattgtatggctgcttttgcagaagacctgtaggtacctagaaagggtgtgtattatgtaaggtctatttcaactgctgtagtatagagactgaaggagagtgactaaaaaacacacaaaagcttatttcttccacacatataagtctttaaatatggattggtgagtggactcattttttccccaaaagtttatccccttgggcattatcctcatctgcatgattggaaggtgggtcatagtcattcctgtgaccacacatgggacggggaaagacaaagggattccatggcaaagagcttttattttatgtggaaaatgcccccaaattacatatatcactcccacttatgttccgttggctctagtttggccacgtagcttcactaagttgcaacagaggataggaaatgtggccaggtgcagagctgacacactgcctgctgactctttgttgacatttaaagagcatttctaaactgataatttacttttcaaaggtttttccaggttcccttaaccccttatacctcttttgtgttctttctgttctgggccttcctttctggcaaggtggtatgaaaagtagcatattccttctcagacagagaggctttaaaagaagcctcacaaaactctacctcatacccaaaccagggctctttgaaagtgctctcaagtgtttgataaacagacatgtt

SEQ ID NO: 334015 - DNA, 773 bp, Homo Sapiens
tgtttccttgatcgtgtaagtatttatttacaaaactcagtcataaaattataaatacaaggtgaggggaagctgttaaccctatttttgttttgttttgcttttaattgtagactccctttacactaaacctcagaatatgggatatctacatctttgaaggagaacgagttcttactgctatgtcttacaccatcttaaaattacacaaaagtaagaaaatgcttaaactcttaaaatttcattaaaaattgaggcttatttgaccttgatttctcattccccacccacttcaacttcattgtcttttaatagtggtttcaatctttttttgaaaatcagtggagaaattatcatcaattggtaatgtacttttgtaagttctttctcatgactagaagcttacttcactgcaaaggtctttggttcttttctgtttatattagtgtcattttcacacttttatagaatgcagttagttggtttcactagtaatatttttcgttaagtatttgtttccactgggatcccttgtccttttcatcagtctgaatctcaagtttgcagtaagagaaggaagaccaaagaaaccaggccccttagttcaaaaggctggagagaacgttttctattactgtttccttcatccagggagaatagcacccagctgaactgtggttgggagcacacagacccacttctctacctcagtgcattatggcctctggggcaagttcagccagtgtctataggcagataaatggagcaagatt

SEQ ID NO: 334016 - DNA, 719 bp, Homo Sapiens
  misc_feature (123)..(123): n is a, c, g, or t
cctaagagagagagattaagtaacttgctgagggtggcacacggccagtgtgttcacagagctagaattggagccgtgtcccctggctcctgagtctgctcctaaccactggcccatgttggntacatcactctgtgcctcttccagcctagggctgtgtctgttcccagttttcccgtcataaataacaccgatgtgccccctctagatttatgtgcttgagataaatttctagaaatggaactgcttgcttaaggaaaaacaataaacagagcaatagatgctgacgcagccatcggaatgggttgaatttaataacgccaagatgctgctccagatcattatgctgctgcttacacttcggggctgattcagagccttggtttctcgttatgaatttataccaggctcttggccttttactgcctcatgcatgggtcggcaaactgtagcccacagatcaaatctcgccactgactgcttctgtaaatgaggcctcactggcacaacctggcccatgcatttacacactggctggtggtgctttcacacagcacagagctgagcggctgtgagaggctgtgtggcccgcagagctgggaacctttactctctggctctttaaaggaaacctttgctgatcactggcctaagaaagtacaggaaggtaacaacaagacagtaaagctgagtccacgacgtggtttaagttcacttag

SEQ ID NO: 334017 - DNA, 828 bp, Homo Sapiens
aagcaagtaaaatatttatccgtttatttcagcgcaggatcgggtcatgagtggccagagcctatcctgcttagggtacaaagcaggaaacagccctggacaggacgccacccccatcgcagggcttactcatacacacgctcacactcagactgggactgtttacacatgccaactaacctaacatgcacagttttgtgatgtgggagtacctggagaaaacccatgccaacatgaggagaacatgcaaacagacagtggccccagccaggaagtcagatttttttcccatcaacgttataaccaaaatgacattggacaaaatattattcaagaacctgctataaataggaaagtttgcttctgtcctagggcttcatctatgaaactggaagagattgcagtgaaaccctttccatttcagcatcaatatgccttcaaagatgctgggactgacttatgaagccagcctgataacagaggacttcaccatgagcgcaggcccagagcattggtgatgggaaagcagagacttgtgttgtttcctaagggagctcagcactctctgtctgagtggttttctaaaattaatgttacacatctctgatggtctgttgaagtcagaggcatctgtcctaaaccaaagtaggtagaaaaattaaagtaatatttaactatgtttccatatctaaacataactgtcacttaagatgcttttagtggcagttgttttagaagcaattcaaactggctcaaacaagaagtgttattatatcacttaacgagaactgttcttatcacaatgtaagttgaagttaatataatctg

SEQ ID NO: 334018 - DNA, 836 bp, Homo Sapiens
  misc_feature (495)..(495): n is a, c, g, or t
gtgtgtccattggattacaaactttattaaaaaatataaaacacaccaagtgtgagtgtgattgtcacttgggtgggaagacgaaccatgggtccttggcttatgggaacagtcagccctcatcccgcttttgctccccatgccaagtctgtacatgggaactgtttcccttctgcctcctagtcagtcagtcctcctccccaaggataattttatcttgtacaaaggagatttttgtcacggacactgaacttaaccatttctcactcttgtggtgtcttcagagtcctaactggttcttaggtaatgtggaaggaaggcacttccaattttgatacagaatataaccacaccccatgccatctcaggaattttagcaagctttggtttcttgtctctctcttgccccctcttcccttctcccagtgtgaagcaggctgactcctgcagaggcagtggcctgctggggcccctgggggctcatttgatcccgtntctgcctccagacaggagaatgggagttggggacaggcttcccctgcagctggattctctagaagctgtggagttgggacagggacatggggactataaagttggtggtctcacttggaataccaatgggctcctacaaatgggcctgtcctggtgtgagaagatagcatccccctctgaacggtgggccactggggggggacgagatggtacctcctgactccttgctgacaggagtgagaaagctgttccaccagctccctacctccccatcaaagcccctggctgctccttcctgtccctctgggcccccagcctggtggcagagatgccatcttttg

SEQ ID NO: 334019 - DNA, 827 bp, Homo Sapiens
  misc_feature (28)..(28): n is a, c, g, or t
  misc_feature (331)..(339): n is a, c, g, or t
  misc_feature (569)..(584): n is a, c, g, or t
  misc_feature (602)..(611): n is a, c, g, or t
  misc_feature (688)..(688): n is a, c, g, or t
gagggccccatttaaggcagtaggcatnggtgagggaagagttgggtgtgagagacagtaaggagtgtgctcatagagtgcggtgattcgtgggggagtgatggatgatggggagagaggggaactgaatgagcagtggtaccattcacagaggtaaggtggaatagatactaaattcagttttggccatcttgaattgtcttaattctgactcttcatatatatgagttaaactgcttccctgggagggagttttgagcttttgtttttctggttcatctccatggaaaaggtcaaaggttatgagttaggttcttgaattttctggagnnnnnnnnntcatctttattatctacactttgaatatctgttctcagccagcagcactagtactgacttgagtgctcactaatagcctcaatgttgaattaggggctgggtctccgctcctttacagagtacttgaaataattgaggtttcagtttgatagtgtaagggacttgttcaccacttggtatctgcatctgtgcctgtattcttttgggggtgtttattttttcttctctcnnnnnnnnnnnnnnnngaaaaacgctctaactannnnnnnnnntttaaccttgtaacaatacataaccaagaagataaaagtccttcattaccattattaacaagttactaacaagttgngtgcacatgctgtgcagtcaagtcacgtatgacacacacagcgtggcatggggcttgagcagaatcagggtctccttatactattctcaaaggtttttttgatcacaatatcattttggtcagcacgtaaatcaagctc

SEQ ID NO: 334020 - DNA, 207 bp, Homo Sapiens
tctgtaagcactggagaattggaatatggtgatacttgtgacacattcatgcatgtaaacaaggcattttccagcttctgccgtgtgcagagcgggcagcacgcttttaccctttgagtctgtgtcctgaggcggccattacattcccacatgggcgtcacatcacgttgctgttgatgcaaacagggtattgaagctcatggtgct

SEQ ID NO: 334021 - DNA, 878 bp, Homo Sapiens
gtctgtcatcaacaggtgttgccatggtaactatcctttagttaagaagtagtacaggcaagaaaatctatacaaaaccacaatagagggacaaaataagaaagatatattatagccaaactaacctcagacctaccagaatgagcagccagaggtgtgactggccatttaccagatcttcatgttatttgaaagagatgctggaaggagagaagatgtcagcccagattatggtcccaggaggaaccaacaccagggaagtattgcgggggctgctgtggctctccatttatcttcagttccactttatatccctattcccatttgtacattttagctctttgatgactttgcggaggaaagctgcagttgtgcagtgttatgtctggaaacttttaaaaagtaaacatatcactgaatgacttcttggttatacttctacctcttttaggtagtacatttagtaataatttctccattttctccccttcagatggagaacctcaggattgcatgctacgaattagtgaaataattaatagctaattcttcttatgaacaactattgccaatatttgtaggccaggtaccaggaaatacctcagagtctggctgggatcaaaatctcatttctttggctctttctccattgctcacggctcaccataatatccacaagtagtaccatgaatgaggaagtaacactatctctgaaattaaattctgcatttttactttgtaagctattgttggtggtcccccaaagggtgcaatcttatcccctttatctaccaaacttcttgttgttcaaatgaccactctgctttataaataaatgacatagattagtatactttgctaacttctgtgattcttca

SEQ ID NO: 334022 - DNA, 322 bp, Homo Sapiens
  misc_feature (47)..(79): n is a, c, g, or t
gtagagacaggtcttgctatctcctggtctcaaactcctgggcttgnnnnnnnnnnnnnnnnnnnnnnnnnnnnnnnnngcacgaacaatcacacctggcctgtaagatttttttctgtaaaatttgtttagaaaaggtagcaaagcttttttaacaacacacaggagttagtttcatgtccatatgctccctaaacaataaagctatctctctcatgacatttatcgggtgtttcaactttggttataacagaccatctggtattacatcaattcataaactaccagaaaagattcactaagaccaggcacagtggctcat

SEQ ID NO: 334023 - DNA, 693 bp, Homo Sapiens
  misc_feature (648)..(648): n is a, c, g, or t
  misc_feature (674)..(674): n is a, c, g, or t
ttagtaagccccatgatgtcacattgccaaggaagttatgtcactccgccatggagtctctaaatatggggaaaccaactatcctattaacaattcaccaactgtccataaaaccccgttagacccaggctgcatgccttgcagtgggggcctcacctggcatcctgcagacagggagacagtgcaatcatgatggagcagtccttggcagtcatggccgacgcggtactgctgcacctgcaggggcgggaaagatcagctccacggtcacacaaggaagcctctgcccccccacacaaccttccttcccagtagccaagtgtgggaactgcttcctgcctcagaacctgagggtgggattaggagcgagggccacggtgagcacgggcgtcaggaggtcgccctgtgagagcacctgggccagccctcagtgccacggggctgctcagaggccagcaccgccccctgacctctcacggcaagcagtgtgggaccccgactccagaccctgagacggatgatctgtcttcagcaaggtcaccacagtcggcctttggaaggaaaagcagtaagccacctgagccccgcatgttggccacactcagagtatcaagtgagtatcactcgacacctgcaaggagagcgcanggggtgttcagcaaggcatcgcttanaacgacattccctctggaa

SEQ ID NO: 334024 - DNA, 759 bp, Homo Sapiens
  misc_feature (496)..(496): n is a, c, g, or t
aactctccaaattttaacctaatctgtggtaaataattctcaagggatgttgaggaaccaccacaagatatgtgaaacacttgctgtaaagggacagcacaggtgactttgccaaaagctatttccccagttgtctggaggctaaatgccaagattagtcactgcagtccttggacgctagcggctgcattccttgggcacctactaggaggctgtgtatgctgcgtgccctccgctcctccactgcctgcatcttcactgcagctccttgaggccgctgttttcgacgagaaaactgagcttccaagacatccactaactcacccaagctcatccacccaggaggtagtgaaggtgaatctgcagttatccagtgagcccctgtgcagctgtggctgggagaactaccccagaaaccctttcaaacacaggggtgaagacgactgagaaaaaccagcccaagcttgggcaagctgaatacctacatttggttccngtcactttgaagtttagcacaaaaagagcaaatggtaatgattggtcagaaatgtgtttaccaggcaaataaagcccatacaccatcctgatggtctgtactgagctttgttgggtggggtgaagtttgggatgagggctggatggtcagctgggaactgctggtggctggaggggaggtgttggagtgggggaggtgggagggatgtaagcaatgataagggcaagttcccagaaggctctctcaggcctgggcggtggacg

SEQ ID NO: 334025 - DNA, 492 bp, Homo Sapiens
  misc_feature (430)..(438): n is a, c, g, or t
gctaatgcttttgaacctgtttttttattttctaattgtttctttacttcttcccaggtgggtcttggtcgatttagataatcttggattgttgggcccacagattgagttgggcctctccatctggccattgctataggattcatataggctacccgattatcccgcttccccatggtgcctgatgtttccaagggcagactctcagttgccaaggagaacaaagatagatactcgccttaaattctttatctagtgaaatatcaagcaagctccattctcaattggcttgcaggataacacacactctaggttttcctctcaccttttccagctgcttctttccaggttccttttcaggttctccactttcaatgaaaagtaaatactcgtcttttttattgtaccaagggagttgttctgtagcagnnnnnnnnntcggcaacatgggttcgcaaaccttgtagatggatataaaccaggcttgccaaa

SEQ ID NO: 334026 - DNA, 836 bp, Homo Sapiens
ccagtgaaactcattttattttcagctgaaaaatatacacagataagcattaaaattgaattattataggttttctgaaaataaaattttacaatacttatgtttaacaaagattaaaaaattcaaacaaatcaggaaggcacaggtcttgtaaaatgtaataaagaatttagtccataccttgatgcatagtggtggcattaaatggcacaatttttggtatcatgcctgcctgccttagatctcaaacagacctactctcttttccttctttctcatcttaacaaacttttgataatcaagcatcatagtatgacaaagagagtaacaagagctgtgcaggccagcacatccagagagcagtactgaaaccaggtgagcttgtgggcaggtggcagcaggtacttggctccattgtggtgcatgacaaattcaatccagaagagtttttggttccagggcttcagagactgatcataataaatgcttgataactacataacattctctttacagctaaaggaaaatcaaatagacaccagcttgattaatgaaccagaaaagataaatatgtgaactttttgtgtagatgttaaaaatgagtgccacataaaagtggatgaaaaataaaatattttatttcatggtggttatagcaatataatgaataatacaaagaagattactgggactaagacttctggccacatttgctcatctgatgatgattcttcaagcttcagccatgcacagactagtcagctcccagtgtgactagagcagggcttgctgtttcctcaaccttcttccgtgcatagacgggtcagcttccggag

SEQ ID NO: 334027 - DNA, 1193 bp, Homo Sapiens
  misc_feature (649)..(649): n is a, c, g, or t
tcaagtctaagtcttctctaatctgccacatcctcataaatctgagacagacagccagctcatagccgtaaggaaagtgagggttgagcatatcaaaacaacagtatggtttatgtgaacacacctaagttttacaatgtccacaactaattcaacgtttcaaaaaatgctggctacccctgtgtgagccaaactaacgccatgtgcatgtttcagatggagtctgggggctaccagtttgcaacctctgcaaatagtcaacaggcgcctgcaaagggaactcaccctaccactaacttgcttcttatctgaaaagattttggagaagagctttgacaaatacagaaagagtgtgtttggagacaaattttcaagcgtccccacttggaaatctggttgggagggaggcaaatatatatgttcatattcctatctggatttatatttttacatatttgtgtaatggtggggtgtgttctgcttccttcgtatagtcaaagcttctggaggtggaatccaaaaggaaggtcaaaattctgactctgtagatagacacataatccagcagatcacagctaatgagtacctctttgcatagtgcgtgtagtacatgggtttctgcaggggggtggggttcttggtggggggntttttttatgttttaatttcctcatcagccatttaactttatgccatatggtgatggcagagctgtccccacttctgtgagaagaccctagtggttccatgaacatcttttgagaaagcagacccactgagcgtttgcttagaagagcagaagggaggctggggaggatgcagtagccatctccttttcatcttcatctcctagaccttaactcatctgctaccatttgactggcattgtcatctagctcctctggcgtgcacacacacatgcataggcagtgtcagtctgttggcagcacctcccaggacagacttgcgatcccacgggctctgcagtcccaaattgctagggctctcttttgagttaagtgtcaggctggccatggaaacctgggattgggccctggctgccttagtggctttgagtaagacggccgggcatttaatatttgttgaagtgactgagctctcagtgcgctcatttatctgtctgaatagtggatagtaatacttctcagctccatggagataatggtaatgat

SEQ ID NO: 334028 - DNA, 351 bp, Homo Sapiens
atggtgtgagccaccgtgcccagctgactcttcatttttttattaccaatgtcttgcagcagtgtctggcacaattaggtgctcggcaagtgtttgctgagtagctgagctatgttccaagctatgttttgatgtacagaattgttcacaggtatgcttatttgtgagtacttatgtatataactcacaaagaatccttgctttttaattcttttcaggagttcagacccatataaacttacagtagactattcttccaccctgctgtgcactgctcccttatattttctgtgtcactgtgcttcattgctttgagccttaccttgctgacccttccaggtggaatttgcc

SEQ ID NO: 334029 - DNA, 377 bp, Homo Sapiens
  misc_feature (183)..(255): n is a, c, g, or t
cttgtggtcagtgagatgggagggggtctggcctggcacaggattttagacatgcaggcacctgcacagacagacacctcatcctgggacagcaaaacccagccgcatgctactgcttcccctgctgtgccctcctcagacatccctggtccatgtacactcctacctgctgagcccctcctnnnnnnnnnnnnnnnnnnnnnnnnnnnnnnnnnnnnnnnnnnnnnnnnnnnnnnnnnnnnnnnnnnnnnnnnnccccttctgctaggtgtgctgttcacgcctgtaatctcagcgactcaggaggctgaggtgggaggatcgcttgaatccaggagttcgagatcgggctgggcaagatggcaagaccccaactc

SEQ ID NO: 334030 - DNA, 376 bp, Homo Sapiens
agacaagtcagtacattgcatgcatggtccactctttgtttctggcccaagggaagagccaaggtatgggaggttttctcctagttgaactatgctttgcaggggagggagagggatgttggcgcgcaaaatgccacaaactttcctagcacttttgatagattatgttcttggttaggcattggcctgggcactgaagcttcttaattcggctctagagttctcacagtgatattctggtctgtatatggttgttaattcggtgtctccatggggtaacaagggcctggagcttcctagtctaccattttgctgatgtctcccagattgttcctacttaaagccctctgttatttcactcctatctgggctcgtg

SEQ ID NO: 334031 - DNA, 657 bp, Homo Sapiens
ggagttagggggctttcctccatcccatttcaactgctgagcaagcaaagagtgatatgaataaactctacaggcacaagaagtctagggcttccttttaaatcagttcctagaaggtaaggaacccgtatatcatagtgagacaatcatttacaacggggccattattaggagccaagatataaaaatcatacatgaaacagccttataagcagattcagcgcgtggctgattaacctccctctcctacagggggctggaaggctctggggagtgctaatgagatgtggaagtcatttgccttgaggtcacaggtttaaagctggacatgttagaagtcgccctaattgctactcatgggtgacttggtagcacaccttatgagctgggagacacagagacaggggttcaagccccggcactgtccctgaactagccactggaaatttgcaacagttacagatcctccagaagcctcagtttcattactaataaaaccttgtcacggttgattttgttgttttcgttagccaaatatgactatgcttggcacatggtaaaaatttgatagatgataattattcacgttttctaggcatacgtgtccttttttgacttcttagacattaagagggcaagacatgctgcaaatattac

SEQ ID NO: 334032 - DNA, 513 bp, Homo Sapiens
tgcaaggcactgtccaagcaataatgtgttgtatcatgttttaattcaacattttttcttccttagtcatacataaagtaagaatttgtcttatattttaatccagcatttttcttccttagtcatacacaacataataacttggccacatggcaagaacatggtggcgggggtgggcctctaaggagctcaaagtggtccctggctgacagccagcaagcaaacagggacatcagatctacaagaacaaggaattgaactcttcccacaaccggtgagcctggaggagaacccagagcctcagaagagataggagccccggctgattccttaatttcagcctagtgagaacctgaggaaagacccagctaaaccatacccaaattcctgaccaatagaaactgtaagataagctgctaaatttgtgttaatttgctgtagagcaggggtccacaactggtactggtccgtggcctgttagaaacccggccgcacagcaggaggtgagctgca

SEQ ID NO: 334033 - DNA, 728 bp, Homo Sapiens
ggtattattcactagcattttatttctattttgcaatgagcatgtattttataaacagtagaaataaaactattttttaaaagatgccaatgtgagagggtcaggtagatattattggcctcaataggtagactttggagcctgacagatcaacagtgacatgcagcaaagcacataacacagggtggttcctgattgcagggcagagggcgctactttctgcctgacttttatctctcaccagacgtttgtggtcatgtctcctcctgcattatatggaagttaaaggaatgtcagaacctggtctgctaaatggaggattgctatgggctgaattgtatcctgccctttcaaattcatatggtgaagtcctaacctacagtacttcagaatgtggccctatttggagataggggctttatagaggtgcttaagttaagatgagtttatgagggtagcccctaatccaatctgactggtgtcctctaagggaaatttggatacacaaagagatgccagggattaacctacccagaggaaaggccacgtgaggacacagcaagaaggtggccgtctgcaagccgagagaggcctcagaagaagccaaacctgctgataccttggacttcccagcctccagatttgtgagaaataaactactgttgttttaagtcacccagtctatgatattttgttataacagccctagcaaactaatacaaggatat

SEQ ID NO: 334034 - DNA, 965 bp, Homo Sapiens
  misc_feature (221)..(241): n is a, c, g, or t
ctcagctttctcccccaattcctatacaatcttttgactttgaaagtgtgtctctcatcttctgactcctttgtgaaagtatctctcccctcctcctcattacccagaactaacgctattagtttggacttttggtgtctgttatctgacccctgggcctgcacagcccttctccatgactcttcagaccttttgtctcttttgtcgtcaagaaggattcnnnnnnnnnnnnnnnnnnnnnctactaagatttgaattttaagaccccccccaaaaaaatctatatgcttattatgttatttctcacatacttttcaagaaccttggaatatattttttcatttcttcaaaactgtcctttaaattgttccaggtttcatgaaaccttatgatttcagaattgtcaattctgtatttgtttcctcattgtgtctctttaaaaatttttgactgtattgttcagtttgccatgacagcgttatatactattctgataattgataggcctgaggacaagacctgtttggtccccaaacagcagataggtaccaattggaaaatgtgaatgggccaaattgagaagaggagctgaaactgaggagggattttgctcagtgcagtggcagatgaggctgatctaaaaggactgcagtggtctactccctgtggagtctgtagtgtgttgcaccaaggttttcttcaaacacaggactctacgtgagagtcttggagtggaatcagatggagcagggaaacagacaatagagaaaaggaaagaatgtcagataaaaataggagaggaaaacaataggaaatctcaaagcaaggtgccatattttttaacatcacaaaatcaacagaagaaggttgttgattctgaagttagaatagctatccaaagcaaactttcccctaaaatgaacaacagaaaagtatcaaggtcaagtcctgtgccgaattaaaaa

SEQ ID NO: 334035 - DNA, 658 bp, Homo Sapiens
  misc_feature (54)..(54): n is a, c, g, or t
  misc_feature (374)..(374): n is a, c, g, or t
acttattagtgctttatgttacatgaaattaagtgcaaaaatacttaaataatnctgtgtgccaggcaccactctcaatggtttgactcactgtactctgcacaatcacccattttccagtgaaggaaatggaggcaccaagggtaaagtagccagcacaagtcagacctcatggcggggccaaggcattctggctccaaaatcccgaatcaaaaagcagaaggtcaaaaaattaaaaacaaagaaacatcacacacggaaggaggagaggccaaagattactccggagggattaaattctgagtttttctccggtttaccttctacaactccttttactgaccacgcctgacacactgacacatgcattcccntgccacagtggctcctgtggccgcctggctgtactgcacagtgcaactcctcagggcggaagctgcgtggacccctggcccttcttggccaatgactcataattaccccatggttccctccagagggcagtgggcagtgcagtaggtcacccacacgtcccatttcttagaaaacctgcagccatggatgcctaacttctactgtggagttattcttctgtacgttattattagtagagtcacaatttttgtgctacatttaaacattttgtatctctaagctt

SEQ ID NO: 334036 - DNA, 596 bp, Homo Sapiens
catggattgtagcttcgtctttgtttccccagcctcttgtatagagcctacacatagcaggcacttacttatgcataatagtggatatgaaccgtatggaatacttcctcattcctcatcactcatcatttgcctggtgaaatgctttgtcccgaacctgccctatattactttatacatgttgtaccttcttcctgctatgttattcttcctcttgcccctgtttccaccccatccacctagcaaatttctgcttttattatctcagtgaagctttcacccatgctacagtcaggcattccctcagggtgctctatctctagtctgctatgaatctattaatagttgtaatataacttttctcacctgtgttttacacacatatacacaacacagatgtgcacatatatgagtatctgtaggctgggagtttaactactacgacagttttttttgggtttccccaggggtttggcacacatagccttattaaatgtgtaaatgaatgagtatagaaaaaatttgaacttgtaaacataaatagattttccccagtctcggcaacatagtgatacctcatctctacagaaaattaa

SEQ ID NO: 334037 - DNA, 896 bp, Homo Sapiens
cctgagtcctataaactttattttatttatccctgttttttgtttcctggcctctgtttttattttttgactatctgagttgaggtagtttctcatattctcaacgtatatttgggtatacttaatctgtttagaatgccaactgaacagttttcttctgcttctcgattattttttgctaatggtagggtctccttagtgtctatatgtgaagtttcatttcctaattttctgcaatcattttccatggactttattttcctctttatttttatgatattggggcatttaatattattcctagcttaatggtacacttttctgtcgggtctagcaaaatccaggtacctcagtgtggttatttatttgtcttggtggtaagggtggagctgagaatcttctgattttaaagttcttttctgtcttgtaaaaccttacatttctccccactgtttccttttcccattcaccatctaattgccaaggagcacttcttcatttctatctttgcctctttttttccttctccagaagctatgagtttggaagatctccctgtaaccatcctctccttttaaattgtacttatcccattaaatcacaccagatcctttaagttgtgtgcattttgaaatctcttccctgtattccagagctctaatctgcccagttactcttttagtatttttggatttagtgcatatgtgatgtatggtggtcattccaaattaccttcacagctgcccttcactggcacccacttctgtcttctccgtaagttttcttggtctgttttacctcaccacaaagccttgtggtggggcgaaggtggggtaggtgcaggatagatcatgctgagacttcttgatttttaaaaaatttacagttattttcca

SEQ ID NO: 334038 - DNA, 823 bp, Homo Sapiens
gtcagatgctttaggtactgattttctcctctctgcctggctggaacatccgtctgcatcggacgggcttccttctgcacctgtgacctcacaagggctctccttggggaggcaggaccagagcagccctgagtaaccgggcacagccgaggaacaggccccagggaggccaggacccgggtcctcacgcctgcggccacagaagcaccgtgtccctgcagctgtgagccaccaggcgtctgggtgggtggttactcagcaagtgccagtagagaaactgggtcccagagttggggttgctgtggactggatacttgtccctcacctccagttcacatgttaaagtcctcacccccagcaagacagtgttggaggtggggcctttgggaggggagcaggtttagagaagatcctgggggaccctcacgatgagatgagtgccctcatgggaagagacaccggagccttcctctccagggagcacacacggggacggtcacatgagcaagaggcttgcttgtccgtaagcttgggggtggtccctcaacaggaactgggtctgtggcacctggaggctggactcccagcctgcagagctgggagaaagaaatgtctgctgtgaagccagtcggtctgtggaattttgacacagcagcctcgtctaagacaggtgccggcagagccacctcgtctaagacaggtgttggcagagccacctcgtctaagacagctgttggcagaagcaacacctaagacgcagtgcatgactgcgagtgcagtctggggctggagaacagaaacacggggaggagactaattagca

SEQ ID NO: 334039 - DNA, 717 bp, Homo Sapiens
  misc_feature (655)..(665): n is a, c, g, or t
tcctgcttccttctgctcaacacttgagcctattatccttctttgactaagaatcattgagcactttgaaggaaaaacacgtgcatagtgtcttagttctctgtttctcttctgtcctagcttttccatcctcaagtcttgtttgccttgataggctcttgctacaacttttgtcttctcagctctgtaaaactgttgaaagctctccttagctgccacgtgctgcttgcctttctgtttatgtttctgccaggcttttcagcatctacccctatactgctcaagagctggcaaataacccaagggagaagaccagaatgctaagtgtcaggttacctccatgaagtcctttctccggatttttggcacttcaagttacttgtgccaaggcagctcttgaatgtcttagaacagatgaagtaacttaccagcttttctcctcctcttggcagggacattggtttcctaaaagttgctcagttttggccggaagtggaggtctaaagtttttggttttgttttcctgaattatctgtgttgattttggaatcagagtttgcaagccacaaaatagattgatagattcctatatttttctataatgtaaaatgagttgagcagcttttacattatcttttgaaagtttgaagtaacnnnnnnnnnnnaagatggaatcccactgccctccagcctgagcgacagtgtggactcagtcac

SEQ ID NO: 334040 - DNA, 767 bp, Homo Sapiens
tgtaatctcataaaaaagagcagtcttttaagtaaataaatgaaagcaaacctccaagtccctcatgttcccatacttatttttttgatttcatcactgacaggtgagaacttgtctggcctgggagcggctttggagaagtgcttttctaggttgcttctcctgctgataaggaccatgactcacaggaaggctgctctgaaaccccttacaggagaatggggaccatggttgtgttttcttggttacctctcactcggggcatcttcccattagcggttttgacttaattcactctgggcttgaggctcctccttggtaagttggatagttggaaatgatctctgagtcccatgctctggtttcatgggttcctttccttttaagggaaaacaaacttctctgcaatgttaagagaggttgtgatggtaaataaccgaaaattaataagcaatgactgaggagtagtcagcccacgatcgctttcctagaatatactctgactcccaaaataagcaggcacagacaacagtgtggagcccctctgatcatatcccgcatgcaaaattcagggagacttggagctcaaaacgcattgacttcttagttgtctccatttgttctgggttaggtgatggatccacagtgacttagcagctttgatgacagccggggcttctggaggcttggcggcatgttaaaaccacctgggtctattccagatggattaaatcaggctctctgggactgggggtccagacatcatt

SEQ ID NO: 334041 - DNA, 771 bp, Homo Sapiens
ccaggtgaagacagcatttattaggacagtttgtccaacacaatcagcgttagaagagactgttatttcctcttcctttaaaacaactaacaatcgcttactaggtgccaggtgcaggtctcaacatttaaagcaatttaacatggtccttgcaacagttgcaagaacactgcttggagattattcattctaaaaccagggaagtcccagaaaacagggcagagcttggttgctgtatgtacactatacagggggaaaaatgaggctattaactgtgcttggggcaggttgtgtggtttgtgtttttcaatggcccgatgactgctcctcagcctaccctgctcccattccctcctggcgattgaggactggggtgagtctgcaggaggagcaggacttggccacacaaaggactgaagtgggagagggtaacgcagagaatgccaaggtgttggctgtgcgaggggcagtcacccctcacttctgctgggactccagaggggtggggaagtacagtgtaaggctgctcaggaggggtcagatcactcaggaccttgagagtgagggggcagcagtctcatggggtgggggtgttttgagtttgggcatttactttgaagctgcagagcaagcctctgtcttttcttagaatgcaggtttatttggaggccttggggagggactgctgaagaatatggaaagtctgaaactgctcccaagtcccacctttatagaacaatttcctaaacttcctactgccttcaggggaag

SEQ ID NO: 334042 - DNA, 779 bp, Homo Sapiens
  misc_feature (304)..(318): n is a, c, g, or t
ctgaaatgtgaacatatttgtggaaattaagtgacagtaattataaagtaagagtacttaaatcaggtagagttcataataaagcttaaatagggccgaaatgaacaggctaattatttttccaccatttgtgatatatatggtaatcatttagaccgggggtctgcaaagtttttctgtaaaggaccagaaaatcaatgtttttttgttttgtggatcatactgtctttgtcttaaccactcaggtctgccattgtagtaggaaagcagccatacccaaatgaatgggcatggctgtgttccnnnnnnnnnnnnnnntttatttacaaatgtttgttttacttacgaaaacaggctgcaggccagatttgatttggggctgtactttgtcgacccctgatttagacataagatgacttgtcgacattggagaaactgaaaatttgatgctgaccctttcgttcttccatagtgggttataaattttagcagtcagtacaaactttttcctttaagttttgttttcttgatggactgtattcaaaataaatacctgaacaaataccaactatataacatgaagccataaaacttggtctttatatataaataaagtttatcttggggtcagatgtctgtgctgttttctatatttttttatatccaatagtttggtctttttcctttcagttttgtatgcttttcttgtaatcgagccttggaagagacagagccactgagcccaaaacctagctttgtggtcggctgtggtggctcat

SEQ ID NO: 334043 - DNA, 788 bp, Homo Sapiens
cctgcagagattcaaatcttccttgtttttatgttcattcatttgacatttgccggtctccaccactgctcataccctgtcctgagcttgccaataaacagatgaaccagtccagtcatctcattgtgtgggcacggctgctccaggccttacctttgaccgggtggggccttgcgggtgtttgtcgaagtaatgagactgtggacattcccatctttctctctctttcccctgtcgtgcattgtcagaccttatagtctttggtgagttcctgctctacgccaaggaattagtcctttatgcttggggcaagaggtttttgagtatttggatttcttctgatctgaaactccattcctagacaaaagaacaataaagggctctactccattgcagaggcaagccctggtaacctggccaggggcgagccctgaccccagccactgttgtctgggtcataaattcttgagagcagtagcacgcttgaaatcatttagatgctttgggatcagttattcattatattgcacgatatctaagggcctctttgctgctagagattacaacacattcctcctgggggcagaagatttattgtgcagtgatgtgcaaactcattcattcattccattgttaacttcttcattcagcaaatatttactgaacatcacatatgcttccagtgccggggacggagcccgataaggtctgtcctcctggagttcattgtttaggttgggggacacagtcaaggaagaagtaaacagattaataagataattccagtt

SEQ ID NO: 334044 - DNA, 405 bp, Homo Sapiens
  misc_feature (42)..(42): n is a, c, g, or t
tttcctgtttcctccacatgaagcaggctccatgaaggaagnaactgtcagtttagtgcccgccacgttctcagttgctcaattcatcaacaaaccagcagggcccaatttaaattagaggtcattgttaatgaaagaagtaatagcaaagaaggtctccagtgctgaaatgattttcacaggatggttctgtatcttcccagtagccagggagccctttgtctgcccactgttgcctggcacgcagagcctgtccgaacactcatggcaatgaagatggcccgatttggatcctgggtggcctttcagacagtgtgagttcagactggtcttagggcacccataccagagttgctgggaggggcaaaactactcttttttaaaggtaatagaaccttctggagc

SEQ ID NO: 334045 - DNA, 786 bp, Homo Sapiens
gatcatagtgaggatgaagcgatcctcctgccaggagtagctgggactacaggtgcatgccactgcactcagctaagatcatttttaaaatacaaggtatgacagtgaagtctgaggaaattcctttgaatagatggacatgcagagaaaacgcttctaaatctaggaaaagtttacgaagtcggctggggattcaccaattgccaaaccatgaggctgcatcgctgtttctggttatgtttccaaggtaagcatctctgtagggacactgagaggtgaccaggggatcatttcccccagggacaactgccccactgagccaccttgaccagaccccctcgagggaacaaggttgacacctcccaaagacagttctttaccttctctggacaactgactgaccacgttggcctgtatctcagaaccttctacaatttagatttacacttaaccactgaggatagcaaacagaacccaggattcagacagaccctctaatgactgtgggcctaaggctgaagtcttcaaacctgcactcaccactcatggatgctactcccaggaacttttccttaacatctttcctgttggcatcttgtttcatgtaaaatagaagtaaagtctgagatcaagggggtagtttgagtaaaaaaactgcagtattttaattttagttggataaccacagaatgtgctatgcaacctataatttgccattaaaaggagaatatggggctgaatcacattttctttaaatattacatccctcggtgcccaaaaagagtg

SEQ ID NO: 334046 - DNA, 133 bp, Homo Sapiens
gcctttaatttcctagaatatgtatatagctgaaatggtgaaagtttttcctcatacatgtttgtgtcactcaaactcatgtaacaagccactccacaccatccttatcaattccaacagattcagttcattt

SEQ ID NO: 334047 - DNA, 710 bp, Homo Sapiens
  misc_feature (100)..(100): n is a, c, g, or t
  misc_feature (647)..(647): n is a, c, g, or t
  misc_feature (650)..(650): n is a, c, g, or t
atgttatatattttatgagaaacaattaaaatgtgtaaatagcccagtgataaagttttataatcttttaaatcatcatacaatttttccttaagacttntatggttaaatattctcttcattagatgtggcttacccgtggattccagagaagaaagtagatgggagcaagtgtccaatacagcaacagctggaaagaaaaataaagaattttgttctttacctaaaacacttcagttaactaagtgtgagtttaaaaactaaagacttgagaactttatcagagttaataagaacgagaaatatgtatttacatttacaatacaaaattactatttaataatttacacatggcattaattctaattgtgtttaaatatcagagctttttcaggcttcattcatgtaatcaacagccacatgctaaggtactcgaaccagcagtggaattacaagatgaagatggcatggtccacttctcaacagtcataagctataatctaaaaaacagacaggcaggcaatgtctatatagagtcatatataccatgacagatatagagcagggcactactggaacacagagaagggacatctacccacttttatgtcaatatcatgggctttctggtggaggagataacatanggntgatacctgaaggacaagggaaaagcttcccagataggaggaaagaggcaaaggccaaag

SEQ ID NO: 334048 - DNA, 827 bp, Homo Sapiens
  misc_feature (459)..(473): n is a, c, g, or t
  misc_feature (548)..(548): n is a, c, g, or t
  misc_feature (701)..(701): n is a, c, g, or t
gcatttctattatattttttgcctctctatagtttgctttaaactccataagatctccgaaattttatcatctacttcaggtaccgaatcttgtgacagtcatgtgtctaatttctacagactctttgttttcattgcttcatttcctagaacatacttctttttttattattattatactttaagcctagaacatacttcttattaacagtttacagatgtactatcttcccaaaactcttgcaggacactatgagatttttagaaaattttcttccagttccctaatttatctgcttccttcagggactattctgtttgttcttcctgacctttcctcttatgtgctggtggttttcccatcatgatccttggttgttcatctttctgaatgaaggactgagttgtcgaaactaacctggtcagctccttctcagctccagcagtgtgtttgggggnnnnnnnnnnnnnnnaggactgggttgatcagtttggggatgtgtggcatgagtggtctttgctgttttaagcttgggtttattctaacntgcaggcttcacataagggcagctcccttccccaaaaggcaaagtcgagagagccctaccctgatgtacctagcctcgctcttgaagctgtagtctgcctagatacctactatatttcttcagaaaagctgtcctgcccagaacaaatgcctntgctgtctcatgtgtcttggtggtggtcgtggtgagaagggatggtgggaatgacccagaaaattgtgcagaagtagaatcaaccagcttcatctcctcccctcctcctattcctactttctgtag

SEQ ID NO: 334049 - DNA, 823 bp, Homo Sapiens
  misc_feature (322)..(322): n is a, c, g, or t
tgagaccctgtcttttaaaggaaatcggatgtctatctgatcttattctaaatgttgactctactatccgtaaccccttctggaaatatttaatagttgtctccttaggaggctgttgtttggtttgcacatggttaatgtagtactcgccgagtttatagccggtcctgagcttggacgtttcagcattcactgtggacctttagtgaagtctgaagctttgtatttggctggcttttgggaatgtattttggcttttggatgtaaatcaaatgttattaagttcagtgttggctgaaagattgtgccgataaattctttnggcagaagtgtaaaatgccccaaacatagattcatttatatttctcaattcaaccaaatgtgctcatcattggtgtaacccttttttggttaataatgaagcaaatcttctgtagtcttgcaacattaaaaccctaattatgattttctgcatgtctgtaccatgcctattgattttaaaaatttctgaattatcagaggatttcttcagacacagctctttatggaattatattaatccaattcaggcaattacataggtgtgagtttaacttctagtttgttttgagatgctgtgattccatatgagctctgataggaattcctatgccttcactatgcctgctttaggctctagagcaccccaggggctcaatcctacccccttctcctttccctctgcaggcctgcctggatggaatagtcctatgacttcacatcccatctgtgtgcagatgactctcagattgatttctccagcctggccattctcagaactcca

SEQ ID NO: 334050 - DNA, 373 bp, Homo Sapiens
  misc_feature (198)..(275): n is a, c, g, or t
actccaaaccattcttgctgtaatcttttcactgttagcataaaaataatttttttgtgatccttgtgccatcaagaagcctagaaaccactctaatcactgaagagcaggaataatctagacaggctggagtccatggaggatctaggcaacactttcttacattacaaagtctggccaggcacagtggctcagacnnnnnnnnnnnnnnnnnnnnnnnnnnnnnnnnnnnnnnnnnnnnnnnnnnnnnnnnnnnnnnnnnnnnnnnnnnnnnncagtattctttcttggtggttgtacataggcaagcacagtgacaaataaccctcctttcttgtagagccgtggttctaagtgtggtccctggactagc

SEQ ID NO: 334051 - DNA, 679 bp, Homo Sapiens
atcatcaccattatccagtttacattttgctgtttcttgagcaggtttccatcttgtaccctgttttgaggtacccattggggaaaacatccagaactttccatagtgaattacttttatataaaacgtttatcacctggcagtttagtcaggtgaacgtaattagaagtagtttagaggctgctgtaaagtgttcacctctgattccagatattcccctgcccctctcctagaaatcccaaaggttccactgaggaaagaacttcctgaagactctgcactctgtgaagatcatcaagaggagcgcatgtgctgtgcatggtgatggctgcatttggtgagaggtagatgatcagcagagataggatttgtctaaacgagagctgacttagaccttgggccactcaggaatacctgtgaagaaccatctcctggcttctaacctagtcagggcaaattactccaatacgatatatgtgcctttgcactggagtcactttaataacacagaacaccgatgcttccccatggctggaagtattgcttccaaatctaatcacattaactccactcactcactacagcttcctcatcctagcaacatcttttatcccaaggaggcttgttttcgagcagtctttttggcttaaaggcaagaataggaattggatgagtttca

SEQ ID NO: 334052 - DNA, 661 bp, Homo Sapiens
gacctgcttaaagaggcagtctggctgcttgttggtggagcaggtgtgctgtgttggggtggatcatttctcacccagactgtttggactctccagagctggctgggtggaacagctgagtcgaccaatctgcagagatggtggccaccctcccccggaagccctgtcccagggagagatcggagctctgtccttataaccctgactggagtggctaaagcttccacagggataagtgtattttttgcatctaaataagtatgtccttttcatatataatctatttattattcatttactgtctaagtatttgagtgactatgttttcccttctggggatatattagtttacaatattaagatcttttctcttgtgcaggttaaattttagcaggggtagcgtgcatagggagacagacaataagtgatagacatatgtaaattgagttacatgtcaagaagctgagaaatgctatggaaaaagaaaaagaactgggtaagggaaaatcaggagcagagagtcaggttgcagacagattacaattttaaataaagttggcaggatacgcctcattgagaagatgacatttcagcaatgacctgaaggaattgagggaattaacaattcaaatactgagggaaaatatattcccaccagagt

SEQ ID NO: 334053 - DNA, 452 bp, Homo Sapiens
  misc_feature (93)..(93): n is a, c, g, or t
  misc_feature (108)..(108): n is a, c, g, or t
  misc_feature (142)..(192): n is a, c, g, or t
  misc_feature (212)..(240): n is a, c, g, or t
aaaaaaagtttacttgagctgggcaacatagcaataccttgtctctacttaaaaatccaaaaattagcccagacgtgctgccaacgcacctgnaatcccagctactcnaggaggctgaggtgggaggatcacctgggcccannnnnnnnnnnnnnnnnnnnnnnnnnnnnnnnnnnnnnnnnnnnnnnnnnnaagacagagcaagaccctgnnnnnnnnnnnnnnnnnnnnnnnnnnnnnacagtatgctttaacaggttagacagcatgatgctgttccttgtcaaactcaagaaatttcctggtcctttgagctactcaaacgaactagaaaatggggtctttgtcttgatagcttatattcctatattgaaaaacaagtcagtcaaaaatcagtaaaaaattaatatggaagactgtgagataatcaaaataaccaactaaggtagtgc

SEQ ID NO: 334054 - DNA, 993 bp, Homo Sapiens
  misc_feature (905)..(914): n is a, c, g, or t
gagctatcagagaactcccacaagtggaccaaggttagggcttacatggggtccaagctatgatgttctttcacagcaatgattcctgggtgcaatggaaggaggctctggagagaaggcagccccaggcagaaaggcagggagtaggtttgggttgagcccttcttctgagctgaggctacaaacattaaaacatactcctagagagtaccccagctgcaagagtcaggatggagataccccaaaggaaacaagtatttgggggtggggcttgggggctctggagggcgaagggaaagagaggagctagggagatttccagtcttctacaactttacaagagtggaccccaggcaatcttggccttcttctccttttaacttacatactatctatagtctctggcttcctgcaatttctatcaagaatcctagatattcctgcaattatgttcaaatgacagttcccacacggacgatgtggcctttttgtaacatcctccaacctttcattcctctgagtcaggaaggaaaacaaactcttcagaagtccagatctgaaaaaaccctagttgggctaactcccacccctacagcattccttttattcccaggccctacaaagcctgaatttagtgttcttaaagctgacccctcgaagagctgcagtgagtaattacagcaaacatcaatcacatggaccccgggggaactaactcctagggggcccagcccacagagtgtgctcttgcctacagattacagaagtacgctacagagcagagtggtcatcctcatctccactttgtaggggctgcagttttatatgttctcatcccaccatacactgcagttttgtggtttacgaattcaataacaatgtttgttgctggtatttagacagannnnnnnnnnagtagctatcaactttgaaaattgacatcttttgggaatatcagaccagcccttaccaatctccactatggtacctcag

SEQ ID NO: 334055 - DNA, 828 bp, Homo Sapiens
aaaatacatcaaattttattagttaaaacattaaatctatgatgcattcttaaatagtagcaaaatgtgattccagcagttaatgtaaatcctagtaacaaacatgggattctggttactttgattaaacttcttatgctcggccggccgggcacggtgctcttctgtcagaagaagggcacctgcagtgcaataaggatgatgagtgacatcatagttcatcatcctctgccctttccaagtgctctctaattcagactatatttaattttaaaaggcagagtcttttttcttcaggagcttggagagaaataatcctcacctaatgaagtgagtgagcccttccatcctttgattctttcccgaacaacaccatgttaggcgtataatcatgtataaaatcagcacattgcaaagttctggttggaagttataaatagtagccttttcaataaatcttaaatacttcaacaaaacattttataagctgaaagtaattggccatttccaaacatcctacaacctttgatatgtatcatgtaatgagttttaacacatttggacttctgattatgctgaagtatataatatcagagggttatgaggaaactagagactgagttctactcttcctatgaatcctcacctacagttgtggtccaggagtaatagtctcagcatgcatgttacatttgtgtgacttcatcaaagatgtatcttttgatgcctattgagctctgagacctggataaagcttctgtcatacatagtatattcacaggatttgaactctgatgtctgttaatgcttaaactcatcaggagtttg

SEQ ID NO: 334056 - DNA, 884 bp, Homo Sapiens
ggtcatcatgtgtctcttattctcgaagatggccacgtgaagactcggaacagttaactgattcatcagtgctacagggaaagctagaaatcaggtccttctgaagttaaagcccacgatccaccaccctagggagaaatatcttcatccttggccaaggcaaacactctccatgccacgtctctgctgtagccgctcagtgggtggagtcacagagacttcccatggggcttcctcggggtgcccgagcagaacaaagaggggcagtcgctgaagaatggaccctttcgatgatgcactttatcccagaactggaatcccacagcttcacacgcccagacagaaagagttccccggttctgggccacacctaaatggctttttctttccttgccgacagaggaaattgccttgtgaaagccagtggccttttttattttctctcaatggttggaagggttttttgccttccagttgacaacgtggatgacaaagatggattttctgagcaaatatttgtgttgtttgtgaccgtgtttgtgcagcacagagcaggcagctgggtaatggagcccctctgggagaggagctgaggactgagtttttttgcacctttgctgcttttgggccatgccactaattggaacttactgtcccattaatgagttttctctccagagattcatatgaccacttcgactctaaagtccctgcctaatggactattgaacaacagagagcgcacacagcttcatctcaggactccctttcaacatacagcagtccccagttaatcccgggcttaaaaaccagagtggcaaagtgactcccaggccagcccctggaaaaaggcctaaattggtatgatgtaattgctctcccgc

SEQ ID NO: 334057 - DNA, 868 bp, Homo Sapiens
  misc_feature (394)..(394): n is a, c, g, or t
tcattttgcgatgcctggattggttttcaaagtagttttttgaaggctaaatgagttgagtgccaaagagaatgggtactgccatgatgaagtattcttaactttagtttaatttgttcttcgttattgtgtatatgaaaacctgtatttgtattaaaatcagaataacaaatagtgttcctcattgagcttacgatattattaacagtagtgtttaaccttttaaggcaggattcagcaaaccttttctgtaaggggtcagacaataaatattttacgctttcttggccacagctatctattgcaactcaacttctgccttggtagccttaaaagtagctatagacagtatgcaaacaaatgagtgtgggctatataccaatacaactttatnttatggaggactgaaatatgaattttgtatacttttcatatatcacaaagcatcaacttttgatctttttccaaccgctgaaaacgtaaaaaccattcttactttgcaggccatgccgaaaacaggtggcagggtggatttggcccgcagacccaatttgttgacccttgttccacgagttgaatgaaaaaaatagaactactaacggaactgatctcctatttgaaaactggcacaatctaattgcctgtaaagttcttccaagctaaaggagccaatatttaactgctattatgtatgtgtttaatgttcaggagaacatttaggggaaaaattggcttaattatgttagaacagtcatttgatctaaatgaacagtcatactttagaaagaaatgtgaatactacaattttataaatgcaaattctgcgattgcacctaagaattagttgtctttgggtactgccttctta

SEQ ID NO: 334058 - DNA, 859 bp, Homo Sapiens
  misc_feature (394)..(394): n is a, c, g, or t
gtgcttcttagaaggtctattcagttgataaatggcacttaactgatggttttttcatataacctttaacaagaactcataagttgcattgattatgccccaagagatgagggaccgatggtaattcagatgggcacctctgaaaagatttatcagttttctgtcccgttccagccagattttttggaaaaccttggggaaagactgaaattccccaccaatctgagactgtatgcgagtttttacaacattaattggaaaaaacaagaatcccaacatggcacccaatagacctccacagataaaatcattgaccagatgagcactgtgagtcgttgcggtaggcagatgctccttaatgggacctcgaaggccgaaaaacaagacattgctngagtccattccggaaaagaatgggcaccaagcctcgataatactctccaattccatgacatttcagtgccttgaaagcctggtaagtgttggtaaatttgtcatgatgcttgtggtcttgaagcaatgtctgaactctttccagtggagtgaaaattgcttctgttgtccctgcaagcactgccgccacgccactggttgcaaactctggagcactgacatgcttgtggagaaggcaggataaatcctcatacagaccaaacataagtgcaagcgtagttgtcttctgcatcaatgggggaaggattccacgatacaaatttcgaaatccatcccttctcaactgaagtattgcatcccgggttttgatgccatacagctgttgtcgaaagaggaccttctgaatgggaaatgtgattgcgacattgttgaaggctgcacagcagccacacaagtaatgcttcat

SEQ ID NO: 334059 - DNA, 527 bp, Homo Sapiens
gtgagccaggctacatgccaggctttatgctactgtgtttatttctctttgttacttgccagcacagtgatactagaacttgcagaaatttaagggtaaccggtattactttaaaataccttttcccaggctcccactgcagaccttcaaaatccatgtcccccaagattctgtatatttaaactggtgtccagagcagtttctatgacctcaaaaggttgggaaacattgccctcatgttcagaaaagtcctttaaacttttcagctttgacttagttgtggagagatgttgaaaaatgccttttgtcatcccattgcctgtacctcagatatgaaggaagaaatgacccaaggaggcttcgatggagccaaaatcatcagagggagagtctcgggagaaagatgaatctccagggcaggggccagggtttgttggtctctctgcttctggcccctgcagttactctttttcagtgtcaacctcagaggagctgagctttatttttattataaaagcagagattat

SEQ ID NO: 334060 - DNA, 507 bp, Homo Sapiens
tgccccccaggccagccatgcaggttggacacagtcatcaagaattgttgtaaaggacagtatgaatggtgccttctagagcacagtcatgatggactgccttgggaacagtggctgttgaaggagtaactggcccaacagtggttaagcacttagcccatcgcctggcacagagtcagagcttgttaaatggtagctgctattctacagacatgccctgaggttttgatgagtggccctcaggttcacggagtgttgagacctccactgttcattgttcactgttcagatttgttgaatgtcagcttaaggatgacctgctggggccatgtccagccaagaaatgtttttccctgtgtatatcctgctcaatgtgagcctttgatccttgcacttctcagtccctctaaatcgcccttgggcactcaaagactaagtgatgtgggtgggctcacggcaacatctgttcctcgatttatccctcctcccctcaccaccccaccccgg

SEQ ID NO: 334061 - DNA, 953 bp, Homo Sapiens
  misc_feature (489)..(489): n is a, c, g, or t
taatcggtttactgtagcctttatttaaaaatatgaatatgttcaatagttgaaaatatttaattttaaagatatgcttgcacaaatgggtcctccacatgagatattaacagtctcctgataatatatggcatttctatgagaggagatatatagagctcctaacaaagtcaaggattccttttcaaataaggatgaaacacatatagactcttgcagtctctccatgaaaatgttgccattaatagcacagatatacattttggcttctcaattgaccatcaggtaccatcaaagccattgttgtgggtgcttgcagggaaaggggagtgtgggtgaaggcctcagagaatctgggttcttccgtcctttattccagccacaatggtttgtgttcccagcatactcctgcttcagcctttgtatttgctcctttaatactccttcttggaatgccttttttctccaacatacatggggttagcactncatactttctttgggcctccactccaatatgtgccatcttacatgtgtgctcccctgggaagagactttatcttttgtttactgctcttatcagtaggacctaaaacaaagcctggccagtagcagatactatttgagtgcctgaatattagaaatgcagataaacacagacacaaattaatataaatgcacatttgatatgcattgtggaaatgtgtcaacatttaaaaatctttttcttttggaagaaaatccccacatttttggagcagttggataatcgctccaactccactctcattagttctttgggatggttaatcagtatttgtcttccttggctcacaaagcaaactgtaacagggatctgtcttaagaataaaatgaaccttgctgtgtttgctggagtcactagctaagattctgtaaacctggaaggggactgtggcataatccactatcgc

SEQ ID NO: 334062 - DNA, 572 bp, Homo Sapiens
taactttattattattatactttaaattttagggtacatgtgcacaacatgcaggagtgattttatttttatatggaatccaagtttcagtttcatcacattcaggtcagtgtggctcaggacaaagccagcatgttttgctggaggcagagattatggtactaagtgtaagccccctgggacttagccgacttctctgggagaaatgtgggctttctcacgcgatggtgcatgtcatgctgcgtctaaggaactccattcacatcgaagtctatgtgaatggccttctttagaggtatattaggtacaacctgagcaactgaatgtgacagccctggaactcaggcattagaggacatttcgcctcaatctgaaggaatggggagatctcccttcttcaccctcctagctaatattctggtgcacgttatatttatatatatttataaacctctatgtctaaggttctaaggtcctagggttctatgattctacagttctctgactccaagaacctaagagtataatcaggttctataattctatggcaacaagaaccacacagctaatgc

SEQ ID NO: 334063 - DNA, 789 bp, Homo Sapiens
  misc_feature (154)..(154): n is a, c, g, or t
gttgtggctgctgttctattgatggcaggtaatcatcactcttcactagctgagcattcggtccactaacctgagtcatatccggcactggtttctctagaaagggctccgacggggaatgctgatgcacaggcactttctgcggggtgttctnggggtgatgggtggagctgtgcccaaggctggtgatgagggtgtggaggtgaagactggtggtgcaagcccgggtgaggctgcagtggaggacaggttggcaactgctgaaaagatggctgttgacccaggatgttgttggccaggtatcagtcgttcctggattgcttgtgggtctccaaggccaacaccaggacaaccatttggcctcatgtgcccagtcaattcccttggtgccgaggacatgcctataaatggacgagactgctgcatgtttctggggcccatattcctctgtccgattcccatggcaccagggggctggtgagatggctgaggatggggcatatttggataactgccaacttccattggtatcccagcacttcccggcctgacttgtggaggaggagtgcctgctggattactcattgctttcatgggtgacatgggaggtggagaggcataagttccctgaggctgtgaaggatgcatagtttgtgtgttcatttggttaagtgagccactggggtggatgggctgctggtgcattagtccttgaccactgtttgatgggaatcgtacagcattggggtatcttggtacggactgattcattggagtattatttgtaag

SEQ ID NO: 334064 - DNA, 730 bp, Homo Sapiens
  misc_feature (396)..(396): n is a, c, g, or t
actcgttcacaagtcgaggtgcccaagggcctcagttttcctgcaggggcctgccgtggggcacggcgacccagtgccctctactctcatgggatgtggcgagcccagcccaatgctgggcggggtccagtctctgcagcccagtgttaggccaacgtcagtggggccaatcaccttcataccatggttcttcaagtcttttggaaatctgccagcctggctgccttccaggaggtggcatttcccaggcatggataagccctagtcctcatctgcagactcagcaacaagaggacatgcacctaagagaccctcatgtatgtgggtcccacggagacaaagttcacgattttgggggtctggcttgagctctgagcaatttgccaggggcaggantggaaaggatgactgaggatttacctcttctcttgagattgcccgagggtgccagggaggccggacacagactggcctccagtggaaccccacctggagaggggtctggggccctcaggggggttgtagggggcgaggacctgtctccacagcagcagccacagcaaggactggccaatgacaggggtctggccaccatcctcctggccatgacactgtttcaggtggccgcacaggtggcaggtaagggctgagtagacaatgccactgcccaggctgtccacaagggggtctgtggcctgctcctggggaagtgggggctttggcatgtcct

SEQ ID NO: 334065 - DNA, 839 bp, Homo Sapiens
  misc_feature (481)..(493): n is a, c, g, or t
ccgctacaaaaagattgtattttttctttattttcagttttataacatccaactttcaattcaaaataatattgcacacattgtataattcaattaatttgcacatccaactcctcaaatctgggtctttttaaaatggaccaactggcttaaacttcatctgtattgaaaaatacaacattagatccagccatattttaaagtcatcagaacatactctataaatcattatcagctgttagaaaccagttcaaacattttctaatgagtgagatccttacaatggggatctaaggttggttcattgttgacaaaccccagaagagaccactgggctcctcctgtcagttaatttgggacttggacttcgctgctgagtaagagagggcagctggagtaagagggcagcatcctgagggaggagtctaattactgcttccagccaccatggtaggaaatcttttcttggcagaaacaaccnnnnnnnnnnnnnaatagctttcatcagaattgaagaggaaataactgtccttccagagcttttctgaagagagatgactatttcatttttgctgtttttctcatgtggcttagtctcaacatcttaccttacaacataatactaaatttgcttgaaactacctatcagactaacctcttctcacaaagaccaaggctgaacaacactgttctttatgatagagctaaaaacggagcctaaagttagctgttaaagttatttgtaaatgaatatctaaatgtatatcattctcctattccttaaaagtaagtgttttgccacaaatttttggtaatcagcaatcatctttttaaatcct

SEQ ID NO: 334066 - DNA, 735 bp, Homo Sapiens
  misc_feature (438)..(438): n is a, c, g, or t
  misc_feature (508)..(508): n is a, c, g, or t
attaaaaaacaaaaactctacaaaattctatccttaaccttctttgggaaaataaaatattctggaataatcatataatcctatttctaataattctggagtaacaatcgaccatgctttgcacagtgccaggaaaattctacaatgcgtatttgagatgtttgtgttggtgtttaaagtgaggcaccaaatgctacctggcacatttacatcctcaattctgcttgcttgcctgtgccctgttgagtccaaagatgttattctatagctatctgaaacagacagaagtcagacctgtgacgtggcaaacagcttctgctcccgaatgtgtgtgcaaacattattttcctcacttcctcagcaattgctgtctttgcttcttttcctcatttctcaggtaaaacctgagactcggtgaaaaggaatagagggtatgantgaaggcgttgggctctgtttgaaacatctcggcttgttgtaaaatttttcattggtctgttaagaggangaacacttttgaagcactgatctcaggagctctacttggttgggaagcctgtctgctttacctgtagtccagtgaccttttctgcctgccctttctcttgcatagcctcttagttctggcttgctcgttttctagtactatcccctgccatccctttgtttccacctcttatttcatgttcctgacattatcctttttttcttttgctccttttcagaattttcgca

SEQ ID NO: 334067 - DNA, 671 bp, Homo Sapiens
  misc_feature (20)..(20): n is a, c, g, or t
ttgggccagacaacccttgnagccatgtccctctctttgattctatgaaatggcagcacagtcacctacagacatctgaccttaaacactggcccatctgcaatgccacggctgagtttcccaaccacaggtaaaggccccacccaaaagccaaattctttcagtcaaagctcaaaaatttcagcccagcaattggatccctgtgaaggctacgtaataagcatagacaaaaacgtaaaatcaaaagaaaggtttggaaatgaaagtttaaatatggcaactgaagtccaaccaatggtatcatctacccccacccttctttcctcataaatgtgattcaaaatgacattaactccaaaaatgaacacagctcaaacaaggtgacctcactggttgtgaggatggcaggaagggaattatttagccaagcttgtctaagaatgggtcaccagggttggagaaggtggtaaatgttgcagggattcccacaggttcttatgaagtgaatattggaggaggggttgtggtgagtagctgggatgctctagcaacatcaaatggatgtaaccggcccatccccagctgccttcctgctggaaaataaatatgcctcttggtagcctgacttcaatgggaaatgtctagtctccaaacaaggctgctctgttcct

SEQ ID NO: 334068 - DNA, 489 bp, Homo Sapiens
ttttcctctcaagcgtttcagggagttctctagggagacagggcattgcacaattcctatcaactgagacagaagagctacaagagaggtacagatacagtctagggcggctgaggcagccagggggtttcatggaggctttggcatctgggccatgtcattcttcagggacaggcaggttgagagcaggtggatatgggagagagaagggcaaagggccttttaggtagatggaactatctgactaaagacagataaaaggcttggagaatgcaagatgtctatagccaaccgcacctgcaagggaagagtggaaaatgaagaaggcaaggctagggccaggctgtgggaacgcctgaaacaacagggtaagaagtttggtgccgctacgtgattgcaaaaaagcaaacatgtgctggctggtctcagtaggcctccgggagcggtaatcattgtgtatgtgaatgaatcactaagtacatgtaccag

SEQ ID NO: 334069 - DNA, 608 bp, Homo Sapiens
attttagcacctcacaaatatcccactctaacagtgctttgttagttatttataaaatattccttaggagattggtcttgcataagacatgcttttaccgtggtccttttcccggtaatagtcactgtcagggacaaaaagtgcctgattgtgttctgtttgtcatgtaggtgggagggaaagagggagagaaagctgagttgaactgaagcagagctttttacagctctattgttttactgtcagagagcaattatactccaacttccatccacctcagacatcccaacctcctcctcctgccaatgcttccccacacacttaacatacagccacacaaccgagttctctggggagaatagggtgctctttaatacctccctctgcccttcagtgagttcagggctctgctttttaactgctaatgtattttagtaaagtttggcaattcaagcttttctagatgtttccttttcggctctggaaaattggaaaaaataatttttaactatatatatttaaaatattcagtggcattatgatattgtctgaaaggcattctgtgacttgatgcaagatcagaagttttttttctttcttggagaagt

SEQ ID NO: 334070 - DNA, 604 bp, Homo Sapiens
  misc_feature (63)..(63): n is a, c, g, or t
  misc_feature (65)..(66): n is a, c, g, or t
  misc_feature (70)..(71): n is a, c, g, or t
  misc_feature (269)..(269): n is a, c, g, or t
  misc_feature (372)..(372): n is a, c, g, or t
  misc_feature (383)..(383): n is a, c, g, or t
ggccctccttacactttggagactcttcccttatgtgaaattttataaagaatgaaatctgangnnggtnngagagggtatgtccgggcccccatctccttggtgttcccttcttatgccataattcctccttggcctcagaggcacctttactgcaggtgagggctctttcaagcccagatggagcctcaatggcctgggtgacacccaaggtctctctagactcttatgttctacctgtctttctgaaagccccatggagtgggganggacagccatgacatagtaagaaaaggagaattccctagcacctgactgaaaaaaataactgggaagagagacagtggacaatacacaatacacatggacctncacgtacatgngagcacggtgaccatgaactgtaacattaagtatcacctcagaagcattccaaacctgggtgactgagcgccccagtagatgaggaggagcaggaggctgtgtggatgttcacacaccgcccccacctcccccaagaagataagcactcatggaaaatcagagagactgcagactcaaatccctggtatccctgtaatgtgcacctcttgtttctgcccgc

SEQ ID NO: 334071 - DNA, 859 bp, Homo Sapiens
  misc_feature (174)..(174): n is a, c, g, or t
  misc_feature (199)..(199): n is a, c, g, or t
  misc_feature (204)..(204): n is a, c, g, or t
  misc_feature (216)..(216): n is a, c, g, or t
  misc_feature (260)..(260): n is a, c, g, or t
cagggttcaaagagccgtgtggagctttcagatccaaagcccccacgcgcagcggcctgctataccctattaagcgtgagtcgcactcccagattatggacccattggcagtaacgcagtcatctgtatccgtcacatcatcattaccggcatatgtttaacagtttatggtanaccaaacgcagcagtcagtgttgcnctgtngccagtactcanggctgagcagagacagtagcccagagttcagtccacctagcacnatagtaaccccaactcaaaccaaaaggagcaagaatgcaagcatgcaaacaaataatccttgtatatctgggtttggacctggaatacttttaaacacagtgaactaaaaagaactcacgttagtaaggcaaaggtcttactttgaggctttagaaggacctatcttttgttctagattctagaccagaagtctgcaaactatagcccacagtccgaatctggcccaccatttattctgataaggtctatgagttaagcatcatttttacattttgtaatggttaaaaaatatcaaaggaatatattttgtaatatatgaaaactacacaaaattcaaacatcagtatccacaatgttttaccggcacacaaccatgctcattcggttatgtattgcctatagttgctttcatgttacaagagttcagcagctgcaacctgagagaccataaggcctgcaaagcctacaaaatttacagaaaaaatttgtcaatccctactctagacagtttgtcattgttatttaggaatctgaatttacaacacaagatccagtaaactaaattaccaggttttaattcatctaaactagcatgact

SEQ ID NO: 334072 - DNA, 817 bp, Homo Sapiens
agaatgctgcgatgagcatcggaagtacagatacctttaggagttgatgtatttcctttgggtatatacccataaaagagattgctgggtatatttttaagttgattggcatttaataagataataaatagcatgctgctgctttgaatcttccatatttgtctgtagagcccctgttttctaatgcagtttatgtaaagtttttctactttttcttggacagtatctattttaattacttttaaatgacttggatgtattaatgttttctcttttaacaaaaatcacaattataccccaaattatttttgcataaaaagtatatgcttttaaaaataaatgatatgacaaaaatatcagctataaaactatcaccatgagaatactgcctgtcctagtcccttaaggatatttattagggaggaaaaaaataacagaggtcgtttgcttttcagtgaccaggttcttcatacacatggatgtctcacagatcagctaaggcctgtgtttgaacaccttggtcacccctgcaaggagccatgctccagcatttgccatccacagaacggtgctaatagagtctatttctggagaatggaggagagattaacttcttgttcatgataaatcaagggtatctgatttgcctgttacatgcccagttttctttggaagcaagccctagaagctattattctgatctaatcctaattctcacattagtgcttatgaaagaggaaaacaacatttactcacgataaagactgagttctagccgattataaatcttatcaattgccttgtgaaggttaggggg

SEQ ID NO: 334073 - DNA, 510 bp, Homo Sapiens
  misc_feature (57)..(57): n is a, c, g, or t
  misc_feature (72)..(133): n is a, c, g, or t
ccacctggctaatttttttgtatttttagtagagacgagggtttcgctatgttcganaccaggaggctgatnnnnnnnnnnnnnnnnnnnnnnnnnnnnnnnnnnnnnnnnnnnnnnnnnnnnnnnnnnnnnntgaaccggcgcctggccaggatgcccattttttaaaggctcaactgtcccagtaggccatgccatgtgggcatcgggcagggtcctggccctgcgtcaggaccgctcttcaaagctcgatggtatcactggaggcgctgcgggattccccaggcttggcgcgcggttggacctctccctggccgtccccctgccgagcggcggtagaatcaggggctggggtcggggcaggcagtagctgtaccgtgctgggcaactcatctaggggcagactgtccactgatgacagcccgtggcgccaggggttccaactgatcttgagtgaacccctggagaagctgtcgagggagctgccagaagccgcagcggctgctccgt

SEQ ID NO: 334074 - DNA, 941 bp, Homo Sapiens
tcaaaaggctgcttcatttaatattcataacaacttcaaaactgaaaaataatgtaatgcctgtcagatgatcttccatcctttgaaaaggttagaagaagctgctgtgagcagttcagcttgtgtatcccagggaatggtagctcgtattgtaacaccaagttgtctgttatttcaaactggtaatttgttccttccttcaatctaaatgtactgtggtttttgttagagagctaacatgtataatatgatgctttcctgcagtgagtaaattttttttcttctccttgactgattcttaaccgtagaataattttctagctagtccagctctatgatgtcatcctgactcctgacatcaaggacatgaccccattggaggatgtgaaggggaactgaaagagggcacccagattgagaagggacttcgcctggatggggcagtgtggtatagggacgggttacagactcatttagggtgggcactgtggtatacggagggttatagactcacttacgcaggaggagtaggtctgaatcctgactgccaaagtttttgccaagaacaagtcccttaaattttgagttttttaatcttaaaaataagagccttgaagttgatctttatttccatctctgactctgcagttgataaaattctgtagctatttcaattgcatgtggaaggattttgtaaaatttgaagtgagattatgcatctttttttcttgtaacactttttaagtactatattttcaggtggaacaatgggaaaagtaaatcatgtcaagcaacaaagctaaacctttcattttacagatgaggaaaccagtggcatatcctcttgggtcctcgtgcccttccactctgcctcttttgttaaacccagtggctttgcataagtcaccagaagtcttccaatgtcattttattagactgat

SEQ ID NO: 334075 - DNA, 986 bp, Homo Sapiens
  misc_feature (353)..(353): n is a, c, g, or t
agctagtatgcagtaagcacgtatttattatctattcaggaaataagcattattatttagaaaaatgaaattaacctaatatatgaccagtgtccaaataattgggagaatacagggatgtaggggggaaaaaaagagaaagcaaagccccggtaagcatttggggtattttcctcccgactctccttggagagagacgtttggaggaggtgaaacgctatctcgtgctggggtcctgcactgtggaggtccgtgattacaaagcgtcatgggacttgggctcacggggccagctaccctctgccttgggcaaggagctcgccccacccgtaggcctgcctgccgaccgctgnagccaaaagcgcgaggcaaaccagctgccgcgtctgcagcggcggtgcctgtccccgcgccccgcgcggcccgctctggaactgctcgcccttcccgcttaagccccgcctgggggagatcccgccacccagttactggaaccacagttctccaagtcccaaagcgagaactggcccaaacttcaggactggcggcgccttcctaaaggagggtctgaaatcttgctgaggcgggacaggcagagaaggagtagctttatcatcagacgaatctgatttccaatcccagctccggcgatttccctacaaagcacgccaccctaagtgtccccacacagttctcgatcgtctctcaaagctgcggagggggtctccctaatctgaaggccttgtgttccccctcacctcttagctatcaacccacgcagaatagcaaacacgtaggagtgtttccaggggctgcacgcctgcgggtaaggagccaggaagggagcggggcctcggaaaagggacggaggctgcactgacaagcacttaatatccctggctccttccctgcaccactctacaagtgttacccattgacggtgtccaggttcttggcgtcatgaacaaagaattggacaaaacgca

SEQ ID NO: 334076 - DNA, 1124 bp, Homo Sapiens
gaggacaggcatttagacctgaaaggcatttaagaggagattcagcaaaagatcctgtgggactaaggattttgcgagtcattcttacatgagtgtggcttgctgctgactgagtaggatgttttctgctgctcagtcctcgccccttacaggcttgagtagttggggaggcctcctgaaagaggaaggactttaatcagacttgtgatgagggcagggggtcccctggtatggatggggagcaagagcaaaggaggagataagaacccgcaaggtgttgtgagattgtgaggaaaaagcactagtagaaaggtgacttttagatgagggaaatatagatcagaaaggcagggtgtcgccaggcagaagaaagctagagttttggagttcttccatggggagcttctgagccactcttggcacccttaaccattggatgagtgaatgtgcaggcggtgccagttcaggaggaagaaggaaatgttttagggaacattaatcttactaaagggtcctggataactttgaaggaagtcagctcaggggtgaagaaatcagcttagaaagcaaggaccttagcccaagtaggaggtattaaggccctgggttcaggtctgtgatagaagtaagcaaaaggggtaatctgaagaacgtcaggaaagttacagactaattgaatatcaaagggtgagttggggaggacagaacaaaattgctgataactaagcctttgtgctggagtgagaagaagaatgatgccagtgttcacagagccaggggattcaggagaccctctgtctagggcctagcactttgtatcttaaccagatagaacacacatgtatcatcacactgtatcataacgtggcagtgctgctcattccactgtaaactaggcaaggacaacgtctctatgttatcggcctttctatgtttaagcatccaaagcccaacgcctaacacaaaaggggtggtcagtaaatacctgttgtacgaggcaggtttcattttggaggaagatgaggtagtcatctgtaaaatatggtgaatttacggtgataaagcatttccacaggcatgataaatgttgaaattttggagagtgaggtcatctttgatttctt

SEQ ID NO: 334077 - DNA, 555 bp, Homo Sapiens
ttactcaaatgtatgaattatttattatgtgaattacacattagtaaggcattttacttaattttcattctcttatcttaagtctgtgctatctgatctggtggaaaaaggacttggagacagcgttttaaatacggaacaaggtcttccaggaagacagtgcagaactggacaaagagctcttgctccccgctgctgaaggcagcctcttcagcgcgatggaaggccaggattattttagttaccttggcaagggcatcttccaaggccccagtcacatcctgcgccagggccacagggcagcagaggcgcagatcattgaaggcaaccagaatattgttgagaaagcaggcgaggggtgggaaatctaggagcaccatgggtggctgcagcgtccccggctgggtggctggcacagcagcaggcatgttactggtgcccaggatggctggagccgagatgagcatgtaggagttcatttcttcctggaatttctccactgtttcctgaattgctttctggaaagtgctgagggccacccgctgaaaacaggag

SEQ ID NO: 334078 - DNA, 877 bp, Homo Sapiens
cataaattggagtcttcaacccttaaattctcacttgcgggaaaacctttcacaaccaagcaaatgtggaaatgatttggccaaagattcaaaattatattaaacatctgggactatattcagcagccaactttctaatcaattctatgagtgtggtgattgcagttatgctcattttctgagggtgaagtttggatagaactaaaaagggcggttggcaggaatcaaaagagatgaaagcctcaggacaaagagttagaggcccaggtggttcatgactgagagtttggaaatgatttctggtgtctcacttcagagaaaataaatatagccaactctgttcatccgtggtgatggaacattcaactacagcactggcagtttgggatctaagaccacccttccagcacttcaaaattctgacttataaaggacacacacaaagaacagatagccagatagagaccaaaatacccactttattcttggcagggcaagcacccagtaagctctgatgcagggctctggtaaatttgcccatcctaccaacagagaagaatggtggcctcccctcatgaacggggtcggaggggggccttgccacaacagggggcctgatggaaataagggtgacaagagtgttcggttggttgagtgcctgctatgcctgtgcctaggcagtaaagggggaagttttaagtttggcccttactttcaagacatagtaattctaccttctagtaaaacatggccaaataaatgtctgcttttcatgagccagataacctccttcttctttattggaggagtgagtagaagggtgagactagccgggtgcgatgtctccaacctgggcgaaagagcaagactccatctc

SEQ ID NO: 334079 - DNA, 813 bp, Homo Sapiens
taaactctgtcgctgtttaatgaggagagtgttcacctggttaatttttcctggctagtagcaaatcaatgctctgacctatgcatgaaacagacccggttgggagggaagacaaagccttctgtagttttacaaagggcctctgcgccgagagcaaggctcctctacactttgggactggaaatctgctattatgcaaggcatggaaataaaagagggctgcttttgatatgcctccaaaaaggagtgcattgaagcgatatttttgtggagtgtctcctttgagatgcccaagaagctctcttgcaggcacagctctcacctagcccccagcgcccatcgctgtctccgatcctctctgtccgccctggatgagggctgtgctgcttgcgggggaggatcaaatacttgcctccacttcagagcttcagccagggcagctggagaagaccaggccctggtgtcacgtagcgtacagcatgctccttgcctgagccactcagcggggcacccagaggaaatgtggggatcctgaggcctgaagcatttgcagagataacaagctgtcactctagagggatattccttgcaagatgctgtacaggaaggacttccacgtcacgctgaggaagaggtttccacttgctgagagtccactcacacagggcaacaaggacctgtttcttcagggaaaggaagggaggctgggaggggccaggtattactcaggatatcccagtggtcctggcgactctgagacagaggctctattatgattgccgctctgtagacagggaaagggaagccccttgc

SEQ ID NO: 334080 - DNA, 466 bp, Homo Sapiens
ccaaatgacgttctttttgtatgttgatccaattataagtaactatcattttcttactggttttattcatattacatgtaatttgatgtcttagtcattacattatttggtcctcataagtatgacagtaatgaaaatttgaagtttaaaattatttgttttaaatcatagttagaccctttttgctgcaactcggaagtggcagggaggagtgtttctgctcagtgtgcctaatagatgaagcctgagattcagaacggggtccaaagcagggctgcccccttgcatccggggcagtggtgtcatctctggccagcctcatgaggtgtttgaaagtacctgggtgagaacacatttggtgaacacacttggggaaaggtgctactatttatcctaacctgtgttggcagggttggcagttggagccaggagggtggtataatctgcttggaagcagtagatgaga

SEQ ID NO: 334081 - DNA, 704 bp, Homo Sapiens
  misc_feature (64)..(113): n is a, c, g, or t
  misc_feature (190)..(275): n is a, c, g, or t
aatttgattaaaattatctagcattctttatatttttttagagacagcgtctcactctgtcatnnnnnnnnnnnnnnnnnnnnnnnnnnnnnnnnnnnnnnnnnnnnnnnnnngtaggctcaagtgatcctcctgagtagcacaagtgtgtgctaccatgcttggctagttctttaatacttttgtagannnnnnnnnnnnnnnnnnnnnnnnnnnnnnnnnnnnnnnnnnnnnnnnnnnnnnnnnnnnnnnnnnnnnnnnnnnnnnnnnnnnnnctgagccagtgcacctagccaaagttgtctagcattcaaccagctgctcttgaacctgcccccgcttccccatttcccctacttttcaaatatccaaccccacgttaattgctttatgctatttcagccttatgaccctgggtggcaggtgcaatcccattttacccatgagggagctgaagctcaaaactagagcagtttgctgaagttcacccagctaataagactggattaggacttaggcctgcctgattcaggttcagttctcagtacatgctcatgccaggcatggatgtcttcatgtccagcactctgaacatgagctagactgcaggtgacttagaaaggcctcagagtctagaacagagtgtctcaagggcagagccccattatggagattagtctggctggaccaaagtagtagtagaa

SEQ ID NO: 334082 - DNA, 701 bp, Homo Sapiens
aacagtgtttacttctctggattgtttaatagtgtcaaaatgaaagatctattgaagtttcactatacattgcattgattgaaccttggagagttttatgaaaaagaggggcatcccttgccatctgtttgccagtcttccttgccccttcctttgaaatgcctgcctcttttttgcccagattgtttcctgaccatccgaactcagatggggtcctctaagttcttcctggatattcacaaatcccttcacaaggcccacgtgcgaagtgaatgatctggaggtgcctgggcatctgtgttggaagggagtcaagactcaccagccagtcagtttgtgggctagagttgtcccacaaaaatcaggcatgttcacctcccctctgggcccctacagctgggactgatcatagcctcagattagaagagatactgacttctaactctataagccagcactcctgggtaaggagtgaagctctgttggccatgccgctttggactgctgggcagagctgagcctacagttttgtactggggtgcacggatgacagctgggaagatggaaaggcagcttgaggatttatagcagctaaagggtaaatgctgttatgcaaaaggtccccatatgaacttcctagcaggtgtagccgcagccaagtgtctgtacagctgctgagaatttgtcggtgatgtaaaaat

SEQ ID NO: 334083 - DNA, 628 bp, Homo Sapiens
  misc_feature (295)..(295): n is a, c, g, or t
  misc_feature (391)..(391): n is a, c, g, or t
gatttaggtgagttagtaaccacaggttcctagaatatggtgggctctcacgtatttagaaagaagaggcacatcttgataacatgctgagaactgaggcaactgatgtctttaggctcttatagtcccagcatgtttttaagagctactgaatttgaagagaccatatcagtttcatctgctcaaattagatgaatttgcagttcatatcccaaggtttgttgttcttgttttttataggacgtgcaatccctggtataaaataagttgaaatccagttgactcatcattctantgaaggtgttctgagcaccatgctggtcattccacagattggcaaattgtggcttctgtgaactcatctcccctggaacttagcagcacaagcgantatttcttttctgatttgtgcatgcaatctttcccctacttttcacggttgcacttctttgtttacagaagagattctgggtcatttccacccctgccactccactctcccagcctctctcattggttcacagagtatctagaaggcctcaaaataaaatcatctttagagtaaaacataaataccatcctaacctgttctgcaggaggtcaggggccttcttgttagagagcagtg

SEQ ID NO: 334084 - DNA, 407 bp, Homo Sapiens
gagggacctccatttccatgatcctcctccacccaacatcccaccatctccaccgtctccaccctatccccactcccgggggtcttacatttcagcaatagcgatcgctctggtgaggggctggttttcaacaaggtacctggcttggtgctggaagggtctgagagctggcagtttatgcctgtaaggaattgttgagaaatgagcgcccggagcttatgcaagcagacaaataagacgtgctaaaaataccacacaactggagattcgcataatctcgcccaagagctcatttaatcctcacagcagcccaggagaggcgactgcattatggtctccactttacagatgcagaaacagaggcatggaaaagggaggagccgtgtctaagatggcagggttcagca

SEQ ID NO: 334085 - DNA, 665 bp, Homo Sapiens
atggcagacttttctttgaaaatataaatttcacttcagccctagatttaataatcacccatttcattgtagtagagttactcattttttaagcaagtaactattgcacacttatgtgctaattgctgtgcaaatggttgtggatactgcagtgaataaacagaattcctaccctgtgaaacccaccgtggtccagcacacacaccctattaaaataaatgcatatttctttgtactctgtgataagaatcataaaagtcctgttcatatttccagtggaacacataaagaggccctagattaggtctgggtggccagacaaggcaatgtttgaagtgactattgatgtgaaaaatgaaggagctggccaatagaagctgggttgggtgggaagaatgctctaggtagaagaaacaattgcatgtgcaaagtccctatagaggaagaagcatggtgtctaccttcaagggacggaatgtaggtccatgtggcaagcagacacagagactcacacatggcgagactcagagagggtggcaggactgatggtgtagagccctgtagcctctctcaaggatattcgttttttcctgtgaagtagtcccagaatcattccacacacccagcaggtgggtgcagcaagacgtgacttgaattttataaat

SEQ ID NO: 334086 - DNA, 723 bp, Homo Sapiens
  misc_feature (226)..(234): n is a, c, g, or t
  misc_feature (532)..(532): n is a, c, g, or t
caggcacaaattggtggaggctggaggatggggaggggagcaaaaccctttatatttgtgaagaaaatatctgtagctgatagaaataattgcttaaattggtttatgaaattaatgagtctgaaaaggttaaaagcacttataaaaagaaccaagtcctacatttccagaactttctggcaaaaatttgcactcatattatttatcctatgaacattcccattgnnnnnnnnngctatttatatacagattatcataagaaagctctcagtttgaggacccaaaataaaaccaaagtcatgccatgacccatactcatttacaaaaacaagaacactttcctctatccctaaaattatgctttagtacttgaggcctttaaaagttagtgcttttgattgtgaaggaccattcagcaacttactttgtcataccatgcagttgcaccttacccacttctaaatagtgtcatatttcatattcaggggacttagataatttgcctgtggatggttcttttgcaggaaaaaanattctacattttgaccatactaccctttcatgttcttattataagcttttagaaaatgatttcattcagtcatgtccagttatataaaacgttactttctcatttttgagaagttcaacaaaacatactactaagaccaatcatcaaacccactattataaatgttaattttggctgggtaaggtggcttg

SEQ ID NO: 334087 - DNA, 656 bp, Homo Sapiens
ctttgggcttttctgtattttctgaacctcctgtgatctttgcaatcagaaggaaaagggaaacttcagcttaaagcaaaagcaattatctgaaggctcgtgtgctaatcgcccacagatgtaatcggtgtccagtgcagcctccaggaatttctgcttcctggacccctcctacctactggggctcggtaccctcccacccatccagcaggtgacagtttggggctcctagtgggataccaggcacacaacgtggagtcaggcagaccaggttggaatcctgatgttggcagtgactggctgtgagaagtacatttaacatgtctcaagttctcccgatctgttaacttgaaggttggactagaatgacctagaagactagattctagagggttgccagatttagcaaataaaaatgcaggatgtcctttgtattgcatggaacatacttaaatcatctgtttatctgaaattaaaatttaactgggtcatccccattctgtttaaccctttattctagagtctcatctctagcctgccacccttagagcaaatacagtttcatcctgtgacaagtgagtccaatcagttcacccatatttaactgcaggagaaaaagctagaacagcctctttgggaaaatgtttgcttaaagc

SEQ ID NO: 334088 - DNA, 819 bp, Homo Sapiens
  misc_feature (454)..(454): n is a, c, g, or t
catttaattcttaactcgacacaggcttgattgtcttatctcttgaagctgtagtgctaaggcagctgaaatataaactctaggttagtgagaatctataggctgccaaattacttgaattcacagcctccccacatactttatgcgaaagtcagggcattgcctgcaggggtcaaaactgggccctgagaacaggaatgagaatttttggatgcagcactaggtcactcccctgaaaaggacaacgcttacttcctcataggcctgccattcccccgccagagggagtttcctgtaagagggagagagctcagcccattccacaccaccacgttccctccccttctcagtgtccccaagtctgtaactggccactttcctgcatgttccagagaaaaaatattaccaaagtcaaacccagaaggtttacaacacccagaagatttacagcccnattgaatttagaaggcaaagatctggggtaagtatccacggcatacagattctgcaggtgactgccaaagagagagaaatgtaattatagactatattgagtttattaacatgggtgagcttaccagggagtctggactccacgtgccaacctgggcgactgaatgcagttctaggagcttgctcatctgtcaaatcaaaacctggactcagtggtggcctaaccagagttgagacgctgtgtatgtcttggttaaagataactaaggtgtagcaagtaggcctgtttcatgccctgcagtggctactatattggctggttagtgacacagaaacaatctggagaagagtcatataaatgaactt

SEQ ID NO: 334089 - DNA, 427 bp, Homo Sapiens
gaagttcaaagatttgtttttacttctagcctttttagttcatctatttacctactagtatcaaccaagttcaacagaatgtttatttaaattttctgagacttctataggaattattattttattattaatcaggcctttgcatctcttgtaccactggttttaaatattttctacctccaatcaggctctgcatttcctgacaactaggaccattctctgtagctccactgctgcagccaacaaatgctgacaatcgagcctgcaaaatgcggcagtgcgagactttcccatgttactgatacattcggaagagagtaagaaaaccagcaaatacagttggtactagatagcagccattattccaagcaacttacacgtgacatcatttgatctttaggacaacccaggcagcaaggaggattgg

SEQ ID NO: 334090 - DNA, 974 bp, Homo Sapiens
  misc_feature (202)..(202): n is a, c, g, or t
gtgtgagccactgcacccggcctctattgccatttctattgttactagccctggctttcccctggggtatcctctcatccccttccttctaggttacagagtttagatgaagttgacctcaccccttgaaacgtaggaggaagagaagccccttttctgtctggtcagctgagaggtcagggtggcagcccagagctgcggngggcaccttgcttccatgcgggaaggatggcctgactgaaaaagtggaggctgggggtggggtggggtatgagaatgatggtaacttcaggccacagatccagctgtgcctggatttcagtttcatgagccaacagatgccatttcatttgcttgtatgtttaagccactgtgggttcagtttcactcacttgacacagaagcgaaagtcttgagtaatactgtgtacttaataaaatcaattacgcttataaaaaattcacttatcagtgtgacacagtacaaataactaaatggaagtcaggagtaggttctaacgtagagtctagtttcccaccaattctgctagtgatttgatcaaatcactctctttcacaagcggcctcttctgtaaaacaaggattctctgaaaagaggaagatgaatgttggaggaactttaagacagaacaaaggcaccagaattagcatgctcggaagaggctagagagccatgtaccctgtgtatatatagctgctccccaacctttaaggtacagcatgccactggaggaatattccagaaggccagtacctgactgcagcaaaaacaatgctaacgggaatagaggagacaaggaggatttgtaacagggcttaattcctagtagcacatgcagcgacaagagcaaatttaatctgaaaatgtgatttccccccctttgtccttgtatcagttaaagttcaaaaggagcaagaactatagttagaaatattccttttatgtcatctgac

SEQ ID NO: 334091 - DNA, 334 bp, Homo Sapiens
tagatttaaagttttattattaggagttccaagcaatttgatcattaggcacatcatctggcaataacaggggatttggtgtggggtgctgaggagatagaagcatcccatcacctaaacagaaagcacaaagtggcccccctggtttggccacagcagcactcctcggagaccccctggggaggcgggatggctttcccagccctcgtccacagctctgtgccctccctgggttctcctgccctgccctgcttccaacatctcaaggggcttcccacagccctaggaagagaatcctcttttctcatgcccctctgagaacaggtgcagcagg

SEQ ID NO: 334092 - DNA, 757 bp, Homo Sapiens
  misc_feature (60)..(163): n is a, c, g, or t
  misc_feature (684)..(684): n is a, c, g, or t
ctcaaaaattaagatacacatacacgtaagccaagacctccttgggtaaggatcgcaagnnnnnnnnnnnnnnnnnnnnnnnnnnnnnnnnnnnnnnnnnnnnnnnnnnnnnnnnnnnnnnnnnnnnnnnnnnnnnnnnnnnnnnnnnnnnnnnnnnnnnnnntattctgctcttatctcaacacagcaagcatgctgcctgctaaagccatcagcatgctctcacaattagtgctttggagggaagtactggtcttatttatttttgtattctcataacaacaaggcaaaggcttaaaggaaacactaaacgaatgagtgaaagaagcggagtgtggtccctgaatcccctactccaacactctctgcccaggctggcctgggaactctcacgagctcctaaacccctgcccaaggctagagtatctgagcacttcaccctaactgtatcagaatgacttctctgctgactcaccaaatataggaaggcaagggtgtgataattcttttgtgttggcacataaaaggcacttactaaatatttattcaatgagtgagtaaatgaacagacactgtcagacatctagttcccccacctcactttacagagggggcggctgcaacccagaggcttaacaacgtgataaaaatcaagattggaacacagcctcccatcttataccncaacttatttctcctgatgaaaaaggttcccacataggtatttgtcatttttaggccatttggtatctgaaca

SEQ ID NO: 334093 - DNA, 781 bp, Homo Sapiens
  misc_feature (546)..(546): n is a, c, g, or t
  misc_feature (628)..(628): n is a, c, g, or t
  misc_feature (681)..(706): n is a, c, g, or t
  misc_feature (756)..(756): n is a, c, g, or t
cttgcttaactaaatggacatctctaaattataaatgtccaaaacagaactattgactgttgtttttttctctgcttgttctttccctgtcctatcagtaaaaagtggtactactatttaccctgttgcctaagtcagaaaccagtgagtcattttccttctctttcaatatcttatttctaaataaacctatcatttgtatccacaagaatatcccttagccgactcttgatccattgctgcctagattaccattctttctagcctaggctattgcacgtagcttcctgactggtttccccactttcctcttttaccatctttctcctgatacatttccacccagcagctgtgatcttcttttcaaaatgtaaatcaattaatatcaacctcccagcttcctggttatatccaaagaaaacccaaactcctcaaccaggccagcaaggccacctggcatgataatggcctcttacccgtgtatcacactacctctgttatagccacactagctggcttttgttgttaaataggctagtttcttcntgcttcaaggggttttcagctcattctcactctctgggtatatgcatcccaagggcgggtccttatcctctgggttcggtgntgcctcctcagaatagcagcctttcctgtcccctaattaggttttaattagcnnnnnnnnnnnnnnnnnnnnnnnnnnaaccactgtcccctattcaatgctttctttagtggtaggacacaatttgnaattggttggttaatttattggctg

SEQ ID NO: 334094 - DNA, 579 bp, Homo Sapiens
  misc_feature (480)..(488): n is a, c, g, or t
atcaattgagctttttgctcactttactacagtgacttttgtgatgtccaactttcagcgtctgccgtgatataaatccagtaagagccttcctgctcttgaccatgctggatcttattccccaggtgcctagacctggggtatttttctgctaatgtgtgtgttctgccttctttccctcacttttctctcttctgccagcctagaatgtggacatgatatctgagggtacagcaaccattttgtgtgcatgagagcaaatctataagtcaaataaggctttgtggaaaggcaggactctgggcttcacaggagtccctgcctgggactgcctactcctaggcatctttttcatgagaaaatttaactctctaaagtgtttctgataacatgcagttgaatgcagttccaattgttttatctcctcatcaattccagcgatggtctctaaaacttttttgatcatgacgtctatcagtnnnnnnnnnttgaacacatcatatttatatacattcatttgtattttatttatttataaactatccacatgttctaataatatcttggaaatagagaaaa

SEQ ID NO: 334095 - DNA, 348 bp, Homo Sapiens
  misc_feature (13)..(13): n is a, c, g, or t
  misc_feature (188)..(188): n is a, c, g, or t
tccccgccttgantccttggggttggggcggggacgtctcccaggaagaacggcgcttttcttatcgcgggcccgaacattaggcaggggcatagactctcttcgcacaacagcggggccgcctggagggggtcccagggcgcagctgcggagcccaccctcgcgcacacacccttgcggccccgccntcccaccccagaggccggccccaagtctcaccgtgagccccgggagcggcctgggggcgctgggcgagaaaggggagctgactctgggctcaggccggccgaagggcaccgcacacggacttaggccctcccgacgcctcgacacagacacaatgagtca

SEQ ID NO: 334096 - DNA, 701 bp, Homo Sapiens
  misc_feature (521)..(521): n is a, c, g, or t
tcgccattaaccaaaagaatctatttcggcatttacagaatattccacacagtaacagcagaatacacatattttttttgagtgctgatgaaacacatggcaagatagagctgtcctaggccctaaaactcgccacaacaaatttaaaagagatagtaatcatccagagcagatgaaaaccagaaatcattgtagggaatccaattggaaatcagcataagaaagatatgaaaatccctaaacatttggaaatttaaaaacacacttcacaataatctatcagtcaaagaagtctcaaggaaaaatttaaaaatacattgaactggataaacatgaaactgtgacatatcaaagtactgatagaagtttttccttgtcaggtgacttcctcagtcaaaaaggagcccagtagagaaatgggctggtgagagcatctgatgggctctagcaagggagacagagctgcgggggacagttcctcagccctggactctgtctgagtcccgggaatctgagtcacngagatatgaggcacctggaaacaggtcacagtgaggagagtcctcaggggctatcagagcgggcattgaaggcccatgatgctcattctcctcttccctgctcctcgctcttcccactgcccccagcctgcccccatcccaactctctggctctttcgcctcctgcccgctgactggcac

SEQ ID NO: 334097 - DNA, 662 bp, Homo Sapiens
gaacacatacacactgttggtgggagtgccaactcttccaatgtttaaactgtttggcagtgtcattgggctgaatagtgactctgagaaaggtatgtctatgccctaaccccagaacttgtgaatgcaatcttatttatcaagagggtctttgctgtaaggatcttgagatgaaatcatcttagattatgtgggtgggccttaaatctcacccacacttgtaggacaagtccttagaagacacagaagaggagaaggtggatacagaggagaaggccatgtgaagacagagtcagagataggagttgtgcagccacaaggaatgccaacagtcaccagaagctggaagagaaaaagaagagattctcccctagagccttcggaggaattttagccctgccaacaccttgatttcagacttctaacctccagaaccggggagaataagtttctgttgtaacccacagtgtttctggtgctttgtttcaagagtcctaggaagctaatacaggcagtatctaccacagttgaacatatgtattccctgtgaaccatcagagggagctgctgataatatctatttattgtggcagatggtgactacatggatgtgttcactttgtgacaattcatcaagctgaatacttataatctgtatactt

SEQ ID NO: 334098 - DNA, 651 bp, Homo Sapiens
gcctgttatgagctttaattttgttattaatgtttatatccatggtgactgttaggatttcctcaagggtgaacgcggagatgggagggggttacagcgtttttaaaatatggcattaaatgggcatgttccaatttcactagagggtcgttccaaaacaaagctttaaatgacttacgggttaagaaaacacaagcaaaaggacgctgcccgtgcagcactcagtcgttacagcctgcctaatgcccgagtagaggctcgctgtgtgcccttggctagattcgcaagaccatccgttcacggcagcgggaaacgcaggcccggggtgcaggacttgccccacgcacagccgggtggcgtggagacccaccccacccggtgggtccgcgtcagagtccagacgagcctttgctcagggaagcgggcactgaagccgccttcccagggtccctagggccaaagcctcggaggagggacctggtggcagctgacctttgtgttctttgaagccagagtttactaagcaaaattagcatgtaaataagcttgggaaaggactgctgaaacctctgacagtgaacttttaatcttcattgagagtttttaaaaccatatattcacataaatttagtgagttgctaattttattac

SEQ ID NO: 334099 - DNA, 941 bp, Homo Sapiens
ggtggaaaagtgaatatggaaatactgtgctgcagttacaagcaatgggttagatctagcgaaatggttcggtctttagaagagtgctaaatgagaaaggataaaaaaaatgaaacattgcccagtgcttcccaaacatcagtgtatacacaatcaccaggggtcttgttaaaatgcaggtgctgacccagcaggtctgggatgaggcctaagatctgcatttctaacaagctttctggtgatgcccgtgctgttggtccacagaacatactgagcagcaaggagctagatgaggaatcacacaattacaacccagtagccaaatctggccacagtgtttttgtatggtccacaagctacaaggggttttaaacagttggaaaaaatcaaaagaatattttgtgacatataaaaattacatgacattcaaatttcagtgtccataaatacagttttattagaacacagccatgctcactcatttgcatatgtcgttggctgcttttgtgctacaatgacacagtggagtagttgcaacagagtccatatggtccataaagtctaaaatatttactattctggccctttacagtttgccaactgctgttctagactgctaccatctatgtacattaaaaacacacacattccaaaccttcttgttttataagaatacatacaaacagcatatacatcaaacacatattaataatggtagcccatgggagaaggggagaggataacagtaagaaatgaggataaaaggcaacaaaccaaacaaggggggccttttgaggaccaatgagggtacagtgccatgaactgggtggggaaggtaactcttttcccaagtccaacagagtttgagaatcactgaccaaggctgtctcactaagcatctctctcctcttacaggaggcccccagaggccccatcgagta

SEQ ID NO: 334100 - DNA, 513 bp, Homo Sapiens
aagatgatcactctggtgattatgctgaggacagacttggaaggaaaagaggaagaaaagaaacagaacagtcagaagtttgtggcaagacaccaggtgagagataacagggacccgaaaaaacaaaaggcagtggagaaagagaggggaaaccagattcagaggcaaaaaccatttctgtggtagactaagatttggtgaccaactaagtttgagccccaataaaggaagggatccagtgatgagcaccatagagcagaggagctcccagggtggtactggcagggcaagggctccgttacccaggaataaactgcactgaggccacagctacaggaagtctagtttctttcaagtctcttttctttctaccattcttaacccacagtgtgccttccaaataatcaagagtcaaactacagtgtaaatcaccactattattctagttaccgctgtggcttcctagtctagtaattttttttccttcccttaaaggtgactacctacttcagt

SEQ ID NO: 334101 - DNA, 609 bp, Homo Sapiens
  misc_feature (489)..(489): n is a, c, g, or t
gcttctctgctactttccttttgtatttatttctgcacaatgtcattattttcatactcctgcttcctaattttactttatttcttagaggcccagtcatcatttgcttttttatttcttactagcacgagaacttagagtgatacaaatcttctgaatattttggctgcattctgcagacaatgacagcttccatttccatggatattatttataaaacatttttgtcacctgctatgaattgtcaccctgcccacatgctttaaaaggacagtttttgaaatcaacatgagtttgggcactgggaaactgcaaacttaataaaattaaacattaaaaaagcggctctttctgcttccctatcaactgaggcagcagggttatagatgtagggggtaaggaacggaccctggtattggtcaggggttctctagaggggacagaactaacagggatagatatatagaaaggggcatttattcgggtatntactcacacgatcacaagggtccacaatagactgtctggcaggctgaggggcaaggaagccagcccagtccccaagcttgaagaacttggagtccagtttccagggcaggaagtatccaa

SEQ ID NO: 334102 - DNA, 1004 bp, Homo Sapiens
tttgcagaacatggctttttagttataggattctccaaggtggtctcacaagtttctaatgaattgggttgggaagctactgctttagaaggcagaagcagtttcaagagtgtgctctgggtataaaagtcatgggtgcagaaggatatcagccccttcctaggtaattccatctctgctcactagtcctgagtctgagaaattgtcatcataaattaggcagacaggactgccagaagccaatccagaacatgaatttataacccagggctattgtatagcttcctgtgacctcttacacggagcctccctctgtcttcaggatcaggccaaccttagaatctctgactactagaggcttgacttgcagtgaaacccgtcctaattgatgaagatcctgtatcgagttagagaaatggaagaaacgacgcgggggtctggtttgccagccaacagctgtggcttaaatctgagtcctttggaaagaaaggaaggcattccttttatttctaatatggctaaggtggtgagtgaataactggattgaataattgatgctatataaaagctggactgcaatcgttttagccctacctgggctgggctgatctgtctttcatgcgatgctgcttacaacttaatagcccagacctggggaatgttctgtctgacaattatgtaattactattgggactgtgggctaataccacaccctgtggatggttccataaggaatagatatggtcactgccctgggaagcgggaggttctagtatgagaaacggggggtctggaagtggagcttagagatgggattatgtgcttcctcctccccggagcctcagggtcatttctgcccagagtttgcagtgcagcaatgctcagagcacttcccacagcaggaagagagcgctcctggtgaggactcctagaaggggctggactatgcatttcctgtgaattctcctctgtgccgtatttccatcctgcgcttctcaaactt

SEQ ID NO: 334103 - DNA, 475 bp, Homo Sapiens
tgccctcctttaaaaacttagaattctttatagaggaaccattcgtggagtcagtcatcagacatgatttcccccaaaatgttaaccactaaaataattctgtgctttctgtctttaagagtaggaaaataggatggggaagggtagagtttctctcttagagcttctttgttgatgcatttcatagattgtgtcttgtgactggtatcagatggttttaggattaggctggaactataagtttcctgtttccgatgccccctcgccatcgactctgccccacttctctaagctcccagctacctgcatgcccctcagcctggtcactaaggctgcctccctggcagtcgttctcccgtggatattggatgggtcagatgagcaggatgcatgagaggcacagtcagccctccatctgtggcctccacatctacgggttcaaccacaccatcaatatattttaaaagaaatagta

SEQ ID NO: 334104 - DNA, 772 bp, Homo Sapiens
aaggataaaataacattagcattgtacaatgatgcaaatgcctcattaccattattccttaagttgttttccagctctaatgttgtttccaacattacatttaagaccttaggattctgtttcttgcttttgtcatatctcttcccaagtgtcatcactatatggatgttgagggcccccgatgacagtccctttggtaaggtcctcttttgaggaggggagggtacagggtggactcatctcagtgtgaacttggcaagtcactgtccctctctgatcttgtttcctcatctggagaaggagtgagagaggagaaaggaagaaaccagtcaggcaggcagttagggtgggttctcggtagaattcttttaaacaaaagaacagcctgaaaaatcaagctgcaggcacagatatgggaacttgcacaggggggcttgcctaagacatgcccacagcctcatagataagacagactacacaggtgacttgcccaaacatgcctgcaatggaaaatttcatcccctgacatgtgcagtaaggggaacaaagcaatatggagtaagtaactcaagccaagggcccacatgtacattagaaggacagcagggagctaccagaaattcatgccttatgcagatgagctgcccagtcctcatcggtttcttataaaagcctttacattcaactgtaaaaaatggcaaccctctttcaggcctcctctccacagcagagagctttcttctctcactcattaaactttcactccaacctc

SEQ ID NO: 334105 - DNA, 675 bp, Homo Sapiens
  misc_feature (322)..(322): n is a, c, g, or t
  misc_feature (507)..(507): n is a, c, g, or t
  misc_feature (589)..(590): n is a, c, g, or t
  misc_feature (621)..(621): n is a, c, g, or t
caggaatttcttactaaattagctttctgcccacaatagcatgaatttattatctcatttgttatgaagccaattgatgattctgtactgaattattaaaaagtagaatatctgctgatcataagatttatttggagtttaatgggcagttagatgagaacactcatggaaagtggttattatttcaagcatcgttgccacagtcctacacttgaacctcagaggccacagaatatagaatgtttttgttctctaagttttgatatatggagaaatgggatagggtttactgaaaatgctaaatacatactgaaaacaatangaatagtaatagtataccattaaaacagctggaacctccacagttatggatgaaggaggaacaaattgttagctctttcaaaactctacattagtttcttatatccaaagttccctggagttgcctgtcagctttgccttcctgtctctgaggcaagctccattatacctgtgtctggtcccagngccactcctgaatgagcctgtttacacatcattcaaaaggtgaatttcagtcttgttgtcctggaattagactctaaatcanngtgccctggaaccatgtgtggctgtagaagnggaggtaaaccacagaccctacgctaatgtcaaaaattgtatgagtaagatttc

SEQ ID NO: 334106 - DNA, 845 bp, Homo Sapiens
ggtagatagttccttagagtgtctgttgagaatggtgcattggctctggttctggctggactcagtattgtggtctttgtagattcattatctgtaattttcatctgcaatacctgcaattgtctcagtggcctaggctgtgggagtttgtgacagtggtagtgcagttttgatggtgcaggggtgctgggtttgttgtcaggctgagtgcaagttgggtgccagcaggctgtgtggcaggctgtctgggaggccagggctaccaatgagctggctgtcaggctaagcatgggtgcatgtggaccaggcagctagatgcacagggctctctctgatggggcaaaggtgtctctgggacagctgtacggctggggacaggggcatgtggactgggcagctgcacaggaatcactctaggagggcagggtcaactctgggttggttgttgggtggggagtgggccaacggctgcacaggatcctctctagtggggcaaagctgccttctggctgcctatgatgacgggggtgggtacacatgtgcttgacagttgcatgaggctttcacactgtgtaggtcatgttgtttccctggaggatagagtgactcctgggttttaacatcagggtcttagtaattttttcaagtctagattctaggcagtcagggcatgtgtggtgcaggcacttgtgtagacatagtgaaatgacagtgggcccacagggatgggggatttggtacctactgtctcccagggcaggacacgttccagcaatggttccagttttcaggatggcactgtgccatggcagcttaggccacaggggtgggggctatcccagagg

SEQ ID NO: 334107 - DNA, 758 bp, Homo Sapiens
gaaaggtgaaccttagcagcagcaaggcagccatcacctttgctctctgaagcctgcggtagggatggatatgaattagctgtggcgggaggggctgagtaagctctgggaccacgtgactctgctggacacagcaggtggaaggcagtggtccaggcttcccaaaaaccagccttgaggaataaagataacgctcccaattttcagaactgctctgctcactctgagtcagagtggaaaatactgactgctgcatctagcaaaggagatgtttcagcactgttttgggaagaagggcctgtagggcctatctgatgagggccttactgtcatctccccatcatgccaagcagcctttcctttgacccagggctcccacccccactttcagattagctgccagcctctaacactctgctgttttcccttcctgagaagcagccgctgtgaaagctgtttttctgagcatcaggcctgagcataatctgctttagcagctgaagtggtctgctcttcttttactgacaacactttaatacagaaattctgatggccttttagatttatatatgcttctccctcccctctgggcttttcctggaagtaggttggcaaggaacagtatggctcctacctccacaccagccaggaccttgagaagggagaaggtgctgagccactcaagcacatggccaggggagcttagaaaaacagggacttccaacctgcctgggcaatatagcgagaccccgttctcc

SEQ ID NO: 334108 - DNA, 413 bp, Homo Sapiens
ctggaagctaagtagactcagacaagcagcagaaaatgtccaaggttcttttctcagctccactaggagccatttgcccctggctttccagtctgtatcttgatgtctccacataccctcctcccctctcccaaggtgaaggcaaacaaagcgaatcacaggggtttgctctgacattctggtgatcccccaacccccacactagtaagtggcaccctgggggaatgaacagtgcctggagagcacagctgctgcaccttaggccttctcatttgctgccttagactcggtctctactcgaggccctgaatgactgcgggactttttaaatagggaagaaaaagaaaacccagatgtggcagtaataggaacatggctaaaagtctagtaaagttttctgagtgaacatgtgc

SEQ ID NO: 334109 - DNA, 503 bp, Homo Sapiens
  misc_feature (186)..(198): n is a, c, g, or t
aagatcggaggaaccaggagaacttggctattaaggtgacagagtggtcccgagggctctggaatccctgcagctgaagtttatactggtgaatctacaggggccctgccttccctctttggctgatttcttaggaaaatcaccctcgtcctcaagttgaagaccactgagcccaatttctaggtnnnnnnnnnnnnngagaagcctgaacattggtgtagctacgatactaatactgatgtgaatcccaaatagaagcctggtggtgggggtgaggtcctgtcgcaggctcatgcaacagggaacttcagggacacaagcacgaacacttcctccttttgaaactctaggatggctaaagggcacagtcagaaattccaaccagcgtcacgatctttgagtctcaggaagggattagctactggatttaaactcatcaccaagtttaaagtgatgtctggtgaatcacaaaaaaatgttctttcctcttacatcatcatggg

SEQ ID NO: 334110 - DNA, 455 bp, Homo Sapiens
  misc_feature (115)..(156): n is a, c, g, or t
aatgtattataagctagagtataatgtaggttatcatgataatcccagaagctacttgatgttgaagataaagaatatgaagcagtggctgggtgtggtggctcatgcctgtaannnnnnnnnnnnnnnnnnnnnnnnnnnnnnnnnnnnnnnnnngaaaaacaattcttaaagctgaaaaaagtgtatcagcattgactattatacaaattacttttaaaggaggacattgaggggagggaatagggagttactggtcaaaagatacaaagtttcagacagacaggagaaataagttttgagacctatagcacagcaggatgactacagtcaataataacgtatatttgaaaaaactaggagaataaacttcaaatgtttcaccacaaaaaaaagataagtaattgaggtagagggatatgcattagattgcattaatcattccacattgttta

SEQ ID NO: 334111 - DNA, 354 bp, Homo Sapiens
  misc_feature (63)..(63): n is a, c, g, or t
  misc_feature (75)..(75): n is a, c, g, or t
  misc_feature (94)..(151): n is a, c, g, or t
tttaaaagtaatttgtataatagtcaatgctgatacacttttttcagctttaagaattgtttnttcggccgggcngcgggtgcgacgctgtaannnnnnnnnnnnnnnnnnnnnnnnnnnnnnnnnnnnnnnnnnnnnnnnnnnnnnnnnntatcttcaacatcaagtagcttctgggattatcatgataacctacattatactctagcttataatacattgtcgagtttttaaggtcacttaatttaaattaaccatttcatgaaacaagagtaaattaatgttaaattatttcaggaggaaggatttaaattttggtatgttttacctatattaaaccactcacagttgtgt

SEQ ID NO: 334112 - DNA, 468 bp, Homo Sapiens
aacctttcttaaattgggggagcccgggaaagatgaaaggagaaacacgcacacacacggcaatgtaagttaaagaaaaaaacatttaccaagtctctaaatgttgtcctcgccccgcatcctattctgctgaataaagaaaacagaggtgacttcgggctttttaaaatcaagattttattaaaaagaaaccgtttcaatcaagcaaacaattcacaaagacattttctagaatagtgagaataataaaaaccatcatttttggagaggccgattccttgccagaacctggggtcatgggcttggcacccatcattcttgcggcaccccatgaactgtaagagagatcttatccctttctggaaatgagcgaacgggttcagagaagtctagtgacctgtccaaggacacagagcccctgaaaggtagctctgttgtctgcaccaagtctgtgtgactctggcaccg

SEQ ID NO: 334113 - DNA, 464 bp, Homo Sapiens
tatttgagcaataagtgaagaaatgggtaagagaatgttaggagaatgttaagagaaagttaagagaaaaaggcaggagaaaagaggtgattgccacagactcgcacagtgcctttgagacctgagtatttcataggccagactgtgtggttggccttgcaggagtcttatagttacttgaagtctggaatcttcctgagaagaaaccagatgggctgcattctgtgactgtgtttgcctcgctatttggattccttaaactctgcatgatgatcccgtttttctagatcagtatatttttcatgccgtcatatctcagcatcccactagaagttgtctggaagttgttaaggttctgctgccggctttgcttgttatccttggaacttggtttccttatctctaagacagatggttgagacttactggtttccagactgtggtgtttgagccctacttcatca

SEQ ID NO: 334114 - DNA, 583 bp, Homo Sapiens
gagacggatcttgttctgtcgtccaggctggagtgcagtggtgcaactactcaagccaaggtgatcatcccaggataaactattttatgcaaaatatcctacacgcaaaaattcctgtgccaggccgatgaggtcctcaaattaatactccaaatatctgtaagactccgaaaggaccccaagccaccggtgtgataaaggaaaaaagaaaattactaatactcaaaaatattttaccttctattctcggcgggaggtgacaaggggaggtggcgaggggtaccatctcccttcctaaccgcagaactcaacctcctaaaaatgcattgtctccgctggaaaaaaggtgcctgaccatagacctaatgcagctttcaaaaaaggaacaccttacaattctgcggtctctggcgttggaagcgtctaccagccggcgagaagtgtctcaacacaccttccagacctcatatgagttcgagtccctggcttagccaccccgcgtgtggccgcaagcatcaccgttcaccagcaccacccaggccttgctgacgtccaacgtccgcagacctttttgcccgtccgg

SEQ ID NO: 334115 - DNA, 554 bp, Homo Sapiens
  misc_feature (44)..(44): n is a, c, g, or t
  misc_feature (63)..(63): n is a, c, g, or t
  misc_feature (72)..(72): n is a, c, g, or t
  misc_feature (89)..(89): n is a, c, g, or t
  misc_feature (134)..(329): n is a, c, g, or t
agtagagacaggtttcacttcttaccaaggatgatctcgatctncggacctcgtgatccgccncacctccgnctccgaaaatgctgggnattacaggccttgagccactaccgcctggccatttttttcttgannnnnnnnnnnnnnnnnnnnnnnnnnnnnnnnnnnnnnnnnnnnnnnnnnnnnnnnnnnnnnnnnnnnnnnnnnnnnnnnnnnnnnnnnnnnnnnnnnnnnnnnnnnnnnnnnnnnnnnnnnnnnnnnnnnnnnnnnnnnnnnnnnnnnnnnnnnnnnnnnnnnnnnnnnnnnnnnnnnnnnnnnnnnnnnnnnnncaactgcatttttttctcccagctcaaggagggaggagcagccgagcccagcaggtacaacgtgggtttgctctgtgctgggagagctacagggctgtgcagagccggcagggacaggacctggggctccaggaggcccccacatgctgcctctcagccacctgccagccctgttttatgaatatgtttaccgtggctgtcactttgtcccggtctgtctcgtgc

SEQ ID NO: 334116 - DNA, 838 bp, Homo Sapiens
gtatcacctaattcagtatcccgcacatagtgggtatgcaatatttgttgaatgaatttaactatttgcctttttacttaaacgtattataattcatcagaataaaatctaaaatacataacaattatcaagtcaaacatatggatcaatgattcataaagacacatctgaaaaatcaaattatttgcgaattattggctgtttttgcaatccactctcttttgagccacaggtaatttttattcctttgccacatggtctgtaaacattattttcagagaggtaagacaaccaaacatcatgccatttcctaatcagcattagacaataggtttctccttagacaagcagtgatcataagtcagcaaaataagcagcaagggcagggaaaaaggtagagtagccaactatgtctttcactgaaattagtattagaatatcttatattttggagagcagaaaataaggatttttttaaacttaaaggtggggggttaaaggtatgacgtgagttacaatcaagactggaagaaccagactcaaggaggcaagaactcatagtcaaagatactaaagttcaagcaaaggcggtggcagacccagaccagagagcaatcccagagagagagatggttattcaggttggagcacttagaatatgaggaatgaggaaagccctaagtttcttctctaaaaaagaacagaagctaagccaagactctagcaaggtggggtagagtctaaaagaagtcttgtagcagaaacacagaagacagtggaatctagccaaagaaagatagtacaggaagttcagcatctactattatctgaatgttct

SEQ ID NO: 334117 - DNA, 498 bp, Homo Sapiens
aacactgttggggtcaaacaaatcacatctgtgggccagattcagctcacaggcctccaatgcatgccctctgtagctgtgctttctgttacagcatgtttgccatgggtctgaaagaaggcttattggtttccatagtggattggtgtgcagagtgggaggtgtcagaagagcaggatgagaaaagcaaccacagttcacctcattgtccttatcatgtttgatcatttgcagcagctactctaacctgaccttattgcttcctatcttgtcactgattccttagaaaagagtgcctgagagtgccagaggcttggtggaagggcagacgagagaagaggaggcattgtattggccactgggacaactgcagactcactcttacctgtaaagaagcagttaatgttggggaatgtagtcaggattggaaaaccacggggatttctgcacattataattgagaatgtaaatattcttaaagtggcaccctgaaagaga

SEQ ID NO: 334118 - DNA, 930 bp, Homo Sapiens
  misc_feature (156)..(157): n is a, c, g, or t
  misc_feature (318)..(318): n is a, c, g, or t
  misc_feature (325)..(325): n is a, c, g, or t
  misc_feature (472)..(511): n is a, c, g, or t
tttgtgttttaaggagttagctcattttattaaattgcatacatcaataagtaatatccaggaaagaagagaactagaaacctctccctggcgtggtgtactattaagcatgcaagtttctgctgactttgcatcctctctgccttcacatcatgnnaattcgtgaccagaagccttcagcctgcacccctccacccatcccagggtttcaccataattactcgggactctcaaacatctgtgcatcaatcagctgcccatcatacttgctcaccccttccagtctctgggaaagcaacttattatccaatgtggaangtcttgntcttgataaggttcactttttgaatcctatgagggagggagggaaacgtggctggaagttcaaagcagccagagccatttccaaaacacattctccttcattttccgctgactcactgtgggatcttgacaaactcctaactagagnnnnnnnnnnnnnnnnnnnnnnnnnnnnnnnnnnnnnnnncgcattcttcttagagttacctctcagattgtgcttctgatgcatgtcaagcccagtgggggcacaccgttagtaatgagacatcttagcaccaatatgtgcttttcacattgggcaggtgtcaggagaggcctggggtcataggaccagactgcaaacaacacaatcccagaataaatcctattaatttggcataattgatgaaaatgaagattagatatttgaccagagatgagaaattcatgggcatgaatgctgcagctctgattactttgcatgtgaatgtgtggtaagaggcaacatttcttttgtttaaaaccctgtgcacctaattcacattcagagaaaggttgtagaatcattcaggctcattgaaaacaaggaaccaggatgccagccgagccctatgcagtctcaaa

SEQ ID NO: 334119 - DNA, 1029 bp, Homo Sapiens
  misc_feature (138)..(175): n is a, c, g, or t
  misc_feature (617)..(617): n is a, c, g, or t
  misc_feature (847)..(847): n is a, c, g, or t
gtgtgaacacgataccagcacctccaacaccacatagaagctgaaagaggggttgagcctctcaacccttgtcctgggagcttcaagtatggtgaggcacaacttttattaaaagagtttacaaacagaactattaannnnnnnnnnnnnnnnnnnnnnnnnnnnnnnnnnnnnncccaaaaaaagatacactctccacgcccacccacagataggaatgttggctaagggataatccctcaataacagggactgatggcattgatccccacaagcctagagctgagacaggctctgtcttcatcactgtcctggggccagcacgtctaaggcaaaaacctgctgggaagattaaaggagctccagaaaggaagagatctttcaggttgaggtttttccctaaggtccgtgaggcagggtccctagagttaaagggacattattggagaaaaggcccctggatgtagagaagaaaggactcttctctggcaccaacagcaataaaatttactggttgaaaacatcctgcatctgggagaaggaagaagctttatatataaatctcttctagtttcttgttctcagttgagttggcagcttatctcttttctagtctnctttagctctcagttgagttggcggcttgtgtagtagaataagaaagagctggcaaccaaagttggaggctggaccgcaggaatctggaatcacatgctatgggctggcctcaggaggtgaatgagtttcctgcagtgtttggcagaggcaggcctaggactgctgtgtggcagtgactgattccccagagagagcaaggatagtttctcactggcacccagggacaccnagtacctgatggatgccaggctcctgttgcaggctccggagggcaatgagggcagcctccttcacatttggctgggggtctccacatgccatttctaggagccgctggggtacttcgcactgtaacagctcctctcccaaaccttcaggtcccaagttgcccagagctgatgcaacattgcg

SEQ ID NO: 334120 - DNA, 580 bp, Homo Sapiens
  misc_feature (97)..(97): n is a, c, g, or t
  misc_feature (101)..(101): n is a, c, g, or t
taatagttgtgtcctgaaggcagataaaattcggtattaaactgaagaaagattattttatctcagaccttataatatctgatgaagataatgctgntagnattagtcccagaagatttatgttaggaaagtgagttatatgagccagtgacttgtctggattagaggtggtaaaccatcagcctataaaaaagaaaatacggtttgtgggcacgttttgtttagtctgcagggtattgatccactaagggatttttttcaaaaacataagctgatttctacaaagataaacaatgaaccagcattagggtgatggagacatttgtgtgttccacttttctgcatgacataatcggctgcagcaaaggagcagctgccttttatgggtttgtggtcaagcgagtttaaacacctggtgctttttacccctctgcactgggctcctacagacatttctatgtatttatgatcctagtcgtgatgtttacttagatttccttttggttctgtgattctttgtatttatcgtatgtttctcttgccctcactcactttttaatgcgtatgtatgtgtgtggcc

SEQ ID NO: 334121 - DNA, 966 bp, Homo Sapiens
  misc_feature (479)..(876): n is a, c, g, or t
ccgggtccctccagccccaacagcctgtcctggtgcagtccttccctctgacctggcttgaaatttctcccaggccaaggcagtgagccatgatcccaattccatgtcaggggcaagagtgaattctgggttccgaggcctaactatctcgtctttccactagcccaggaaagtgaactgcaaaacttctttaaaagggtccaactaagcaagcccttcctatcttcagaggcagcctgtgaatgtgaatgtacgaaaggagatttgcttctgcggcatcccaggaggccataggggccatatcggttctcctctagataggccagtggttcccttatagacgctgaaggagaagctaatgtggggagaagaaaaggtgagcttctaacagctgagggtgggagttttcttaggggagagaaaaaattgtttgaaaaaaacctaagtcattcctccttttacacaattaaaaaattgtnnnnnnnnnnnnnnnnnnnnnnnnnnnnnnnnnnnnnnnnnnnnnnnnnnnnnnnnnnnnnnnnnnnnnnnnnnnnnnnnnnnnnnnnnnnnnnnnnnnnnnnnnnnnnnnnnnnnnnnnnnnnnnnnnnnnnnnnnnnnnnnnnnnnnnnnnnnnnnnnnnnnnnnnnnnnnnnnnnnnnnnnnnnnnnnnnnnnnnnnnnnnnnnnnnnnnnnnnnnnnnnnnnnnnnnnnnnnnnnnnnnnnnnnnnnnnnnnnnnnnnnnnnnnnnnnnnnnnnnnnnnnnnnnnnnnnnnnnnnnnnnnnnnnnnnnnnnnnnnnnnnnnnnnnnnnnnnnnnnnnnnnnnnnnnnnnnnnnnnnnnnnnnnnnnnnnnnnnnnnnnnnnnnnnnnnnnnnnngtttctagtttctgatgattataagtagagctgctttaaatatctgcgtacaggtctttgtgcaaacctaagtttttatttctccaggga

SEQ ID NO: 334122 - DNA, 853 bp, Homo Sapiens
  misc_feature (783)..(791): n is a, c, g, or t
gggtttcctgtttttatttatggttattagtgcccatttgcggggattaaaataaaagcgtccatctcagttacagcttatccttccttcaattaacgtacccaaggagacaagttccttccatctactcccctgatgactctctggatcacaaagcctattcaagcttctccccagggccccaaaacaacatgcgcaacaacttcctagggaaactcaaagcctacctcacccttcccactgggggaaatacacagactcagccctttctggtgtgattacataagaatacaagggcttgcttgaccgtgctcaaagctgaggcctatcttttaaacatcaactcgtgccatttctcctctaaagcaatggtgtatgctgggcaaagaggaaatgagtaggatttatcttctaacaatggcaacattttccaaggaatcctctgcatcaaaagttctgatgccctaggaaaagtctataatgtttggaaagtaactggtcttacgtgtctaggtggtagcacccctattttgactgggggcagggggtggggaacacttttataaattggattttttcctaaggcaagttatctgtctcagagaatttctaactcctctcttgaatttctacttatcagctgtagtattactgaaatttagggaaacaattttttgctgtgcagaatgaccaaagatgttgccaatcattacttaacaacagggccatgctgtccctgatgtgagaaccactttgaggctaaagatggacaatacggattannnnnnnnnatttctttgaatatacaaagatattttcttttttaaaattctttttcttaagacttaatttg

SEQ ID NO: 334123 - DNA, 945 bp, Homo Sapiens
acatttcttaagaaaggtcagtggggaggttttactgtaacatctattctaagctggaacctgggaagtcctcacaggtcccacaacaagaaaatttcatttaaatggactaggagaaaaagggcagaaagaagaatgaagagggcctaatactgaactgtagttctcctacatccagaggttaataaagttcctaagtttgctatgtacaaagaaaattgcctccaaaataactagtaatactagcattctctgaccgtttgaaggtcaatatagtaaaatacttttctgaatctgctgtctacctcgaaaaaggtatgtacaaagattgcaccagattttctgaatattctggacaaattctgatctggttgtacagtttaaccaattgtcagtatgccaataccctatgcgtgaagctgagtcaccagaatgatttgctgtctactcaacatctcccttattccacactataagtaggtcccagaagttctttgatgggactaaaagaattaatgccaaagttgaatgagttacagccgctaccacctaattaaaatgattttgtgccagttgcttttgttgggcaagatccacacataatataattttaatcctgtttatatgcactcttgggatagatttgagatcagcattgccatttaagtgaggttaatcaagcatactgtatgcagcttttgtttctccactgtatgtgaaaggtgaccattgctgacaggttacccaactggccgcttactctattaacaagaaggaggtggttttcagtgtctggtcattaacctagcctcagccccagtgactcttttcgcctagtccttggaatagtgcagctgttgtcagtcgcagaggagaactctagttatgaaccgctttgctttggctgcagcgacatgcctctacactaaggagggggggagggag

SEQ ID NO: 334124 - DNA, 1191 bp, Homo Sapiens
  misc_feature (301)..(321): n is a, c, g, or t
  misc_feature (653)..(653): n is a, c, g, or t
ataaacagaccagcagaaatgaacagggctgagctgattaattggttatgaattaaaatgtagattgtgattcattcactatagaactcagaattctagaaaatgcccatttctctcatagccaaaaagtcatatgaaaaacattacggtcatgtgatatgacttcattggcacagcaatttactattcagcaaagtaaataacacaattaacaagtgtttctgctgggccttttgcacttacactgagattttggcctctcccccacacagctggttttgatttggttcctgtggaatannnnnnnnnnnnnnnnnnnnncatttaacaacagtcagatatttatgtacagcttcatcaagagcctctgatgacaaatatgcctttggaggccagcagaagctgtgggaaacccccgtgtcagcactcagacctgtttccaatggagagaaatcgctctggggactgaactagcctgctcatgaatccagttcccttttcccagagccttctgctaagctcacttccaacccatgctggccatcctgggactgtgccctgccttgatttttccttatgaagcaatccctcaagacacagccttgggcctctctcctgagtgagggaggaaaggcagaaacaggcagaaagcnatttacttcttagattggaaactagagcctggtttttgaaataaagcttggcagtatctcacttataacttactttataaaatgtgtaccttttatttgctgtcagagttatctacatgaatttgagatgtttggataaatcgttattggggaaagttgcaattggaaaatagacaatgaagtctgggcagagttcccctaccttcggaaaagagtctcggatggtataatccgcttggagaagtctaagggagaaagaaggggggaaatcataaatgctgaaagcaaagcaaagacagctaatattaggaaacagaacatgggaatccagtccttcttacattgtactcctggttccgccagtgttctcatgagtgaccttggatgaatccttcagtgtcctgtgcatgcttccccacttaaaatgagaggattgaatcatgtgaaattctttttttaagcctcctttctagaaaaaaatgaaatgcttttcaactctaatttagtgattttgattcaaatataccatgtataacca

SEQ ID NO: 334125 - DNA, 161 bp, Homo Sapiens
ggtgaggcacacccacatcatgaagggtagttcccttgactcgaaatctactcatttaaatggtaattgcatctaaaaaattcctttacagcaacatctagactagtatttgaccaaacaccaggacactgtagcctgttgacacataaaattaaccatga

SEQ ID NO: 334126 - DNA, 518 bp, Homo Sapiens
ttttgagactgcatagggctcggcgtgggaatacagtggtaagatggccagagccctgctctcagggagctacaacagtctagcactaattaggttgattcatttgtgggggactgaatggttttaggtgcagacataaaatccagcctggccctaactctggcttccagtaggaaataaacagtatactctagttccagaactccacagtctagcatgacttggagcctccttcatccagagaacaagtgacatgctgtggatgagtgagaagatgctacaaaaactccagataaaccaaccaaagaggcagctcagagactaataaaacaagagaagtcctgagaggtagtcctgtttggtagctttccaaatgtactgcctggagcttcctcaagggagtaggtgggtgtgggaggaggcccactatctacttccacggagttcatgtttgacaacttctacacatcccacttcctttcagagagaacgccgaggctcaaaggggaacagacttg

SEQ ID NO: 334127 - DNA, 894 bp, Homo Sapiens
  misc_feature (529)..(529): n is a, c, g, or t
gcatttcttaaataagttactatttattccgctccgccccctccctctcccttgagaaactgagtcttctgcatcagattattgcaacatttaacctgaatttaaaagcacacgaaacaaaggtgtcaatgggaatctcgcggccaacgcccccagatgtaggggaggcctgattcgcatcggggccgggcgcgttactccatggggtcggccccttagtgaggtgtcacctctcccagagtcacaggacgcttctgggaaggcccgagcggaacggaaagggtggtggctggaaggggagggtggtgagggcgtgacaggcggacaagaactcagactgtgagtgaaggtgacattgggccgcggtggctgcaacctgccgccggaagggcacagggcccccagcgagtgtcctgtaacaatgcggggcctgaaaggacgcaacctggtaccttcccctctctggcgggtgcccggtcttcgtcccacagacgcggcttctctcctgacgggaggctgacccagttgnccgcacagcctcggctggtagcaaaactcggagaaacccgaaccagaacggacggaggctcgtggggcccggcagctactcctgcttcgctgggcagagaaccagggcctgggccgtcatcctccccgggcctttctgctcacgacgggacccaagtcagggtccatgcagggttctgcctgggcctccaccccagcggggcccccagaccccagggccaaagccgtgggcggcaccaagccccgagctacacggggtcatctgcaccaccccctggggcaggggtggctgagggggaccctggtttctccagaggacactgggggactgtgaggtacagcccccgcctcttctctggggggtca

SEQ ID NO: 334128 - DNA, 323 bp, Homo Sapiens
tcccggggtttacggttcgtttaatgtcctggttatcttctccctaccgcttttatctgaacctttcctttcgtctctactaacttgtctctctgcagctcaatctggattatatttccaacagtttgtcctcagtgacgggctttgttctggaagggtatagtggccagctagcatgaacaacgatagaaccctgtgctggttaccgcttcttagtcacaaagtcatcccttctgcctgttgagcaaaaatgtgcctggacactttaaaacttttcctttgacagctggcatgttaacttctgccagcggagaacaatggaa

SEQ ID NO: 334129 - DNA, 495 bp, Homo Sapiens
taggaacaataatttagaattttgtgtaacttcaaagcttactgcagaagaatttatgctacagtatgaaagaaagcagcttaatcactagaaaaatttacagcacttaggttaacagcagcttaaagacaggtctcacaagttggcattatgtttaagaagctattctcatctatcggctaagataaggcaacatgttttttctcttacattgaatacagaaaatgttaattctttaaaaactttaaacagacacaatggtatctaattaaatggtatcctgaggaaaaattcagtatgggaggggttgttggtagcgcttcttcaccctcccatccccccaactcaggcaggctgaaggaatcagatgtgagactctgattttaatcatgttttttgctttgacgaaaaggatcctctaaaaaccatttaaaaatgttctacagagagacagctagtaactgctgaagatagggtgagtaaattcatacatca

SEQ ID NO: 334130 - DNA, 342 bp, Homo Sapiens
  misc_feature (259)..(259): n is a, c, g, or t
cagttatacatttattagactctacatgcattttagaatcagcttgtcgattttgatagagaagtcagttatgattctggtagggattacattgaatctgtagattacatatgttacaattaagtaatctacattgatgtattatcacccaaaataaatagtgtacattaggattcactcttggtgttggcttttcatagcttttagacaaattcacaatgatacataaccactaatacactatcatacagaggttttnttttactgccttaaatcccctgtgctcttcctgttgatctctccctctccctaatcctggcaaccactactccttttacattt

SEQ ID NO: 334131 - DNA, 772 bp, Homo Sapiens
aaagttaacgtatctggcaaagatgggattctgaagcagcccctgaattccttttcctgtgtcacccaggacaccaggtacagccaaggtccctttgaaaaagtccagttgttcctgactatgctgggaaaggatctgggtaagtgctatcaaaatccaagatctcccacttttaggttgcagacttgatttcttcttttaggcctcctccatctgtggaactccggaggagcccctcctgctggccttgggtttgggagggcattcctaagttcttctcagtcctttctgttctcctccctggaccccggagggaccatctctcctagccttgggtttgggaggaggccttcgtgattccctccatccaagggccctggagaaaatgccatttgtgggctccggggcttatggagaggcattcaggttggattcaactggttcataaggtttgtggggatgctcacacttaagggcactggaagagatatcttcataaagtcagtgcaataggtaacttacccactaggggcaggaactcctgtagaagttcaaaggcatgccaggttttccagcacttcagctagctgcatattgtggcctgttcttgtgcacattttaaaactgaacgggcaaattacagcaaggaaaattcagagcttcaattgcccaacctgcaactatacaattaaaatgtagagttttctaaagctatctcttttttgttttcggcctgctttgaatttgctgttattaagctactgctgttaag

SEQ ID NO: 334132 - DNA, 537 bp, Homo Sapiens
  misc_feature (209)..(209): n is a, c, g, or t
ggagaaagagcaagactctttctcaaaaacaaaaacaaaacagcaagaaggaaatacggggatctaggcctttgtttccagaatagagggaacctggggctggcacagaattcttcagagcatttaggaaacaaggctgaagaccccctaatccactggacccattggcagagcaaaaagccaaatgcttttggctgcaggtcacctcntaagcctgtgttccccagccgtaccactcagcgtctcctctgagctggcaaggtgagtcacagcacctggacagacctgatcaactggagggtaacaggtatgagactggacaactctctaacagcacgccaaggctgctctgtctcagtccctctccccatacccatctccaacaggatcaggctctattcgtgccctgctcctctggcttggcaggaaggagtcccccaggtgagttagagatggaagaaatgccaaatcacagccagaggaggttgtctcccagccctgtgtacctccatgccctgccccccaccaggctccctg

SEQ ID NO: 334133 - DNA, 776 bp, Homo Sapiens
  misc_feature (238)..(249): n is a, c, g, or t
tgtaaaatcccccaaatatttcaagaataaatgcattccagagatccaaatcaggccaaaagaaccaaaaatcaatgaaattggcattacacttgtaaaaggccaaatggacacaagccctcgagggtctattgtgaagtgcttgggggcaagttggctcaaagaaacttgggagtgagaggtttgcactgagcttgggaagggagccttgggaaaacaccacacttgtgaaatcagnnnnnnnnnnnngcaagtgatggtgcttacagcccaggacgacttcctgctggtttaggtcagaacaaacctgagagagattcctaaaacaatgagggctgtaaggggactggtggaaaaaatccagtggaaatattttctcaggaaaggaaggagcaaagtcatggtaagttaaaatgtggtacccctaatgtagtagtaaatttaaggcctgtcgaggaaattttaacacttccaacaggtgactatatcaggaaggagaaaaccaagtgcttcctgcttcaccttctgctgcttttgggacttttctagagctagtagctaaggacaagaccctgaacccattttttcactgggagaggaaaaccaccaggcttctcagctatggcttggcaactctggagttcctatggcttccatcagggctccaggccctgataagtggcctcaggcaggaggagatcgggagcggatgggagagctagtcaggaaggtggaatagggaccatccccaaacacgttggcgtatgatgatttga

SEQ ID NO: 334134 - DNA, 766 bp, Homo Sapiens
cttcttcttcttctttccttctgggattccagctaaatgggttattttagcggttaccctaggaatcgcaataaacatacttcatacactcagaagcgaatgtgcatcttgatcctcttccagggcagcatggcgggggggcctttgagcagtttccctcccttcattcctcttcgtactgtgcagccacattctaaaatgttgtaccccacgttattcttgtttattcagctttaatttaggtgcacagtatccgttattctcagatcttccctctggggtcagtttcctcctgcctgaggtatatccttttgtgcaggtctgctggtgccaaagtaagctttttgtttgcctgaaaatgccttgatttcaccttcattctttaaagatggtctccctgggtgtataattctaggctggcagtgcatctttcaactcacggaagatatcatttgactgtcttcaagctcccatttctgttgataaggggacagctcctcggaaagtgatgtctttttaaaatctggctgcttaatagtttctctctgatttagtttcactgcatagatttaggtgcaggaatttctttgttatttttatcttcaggtacagtccctctttccttttgggactctcgctagaaatgccaaaccctgctctcaatcttgctgagcaagcttacagaaatgcagattccattgcaggaggtctgacgggagactgcactcaaactcgctcccaggagaggccagggacctgctccagg

SEQ ID NO: 334135 - DNA, 727 bp, Homo Sapiens
  misc_feature (13)..(13): n is a, c, g, or t
  misc_feature (167)..(167): n is a, c, g, or t
tatttcggcacgngaggaaggaagaggccaacatggtcagttttatatgaagagaagattttgttccaaaggaaatgatggggaaaagcccagcttggggaggggtcagggaacagtgggcaagtgggaaatgagtccaccttctgccaggaagcccaagggggcantgtctttgagctgcaaaagaacaggtccacaaatcatagctgagattggcccagcggtaggaaaagcaacacagaatcaatttagtgtggttgaagcttgtgcgatgactcgggctatcacgctcctcagggcctgaatcatgggacacaatggatccgccagcttattccggcatcctttaactcttgaggagcaaatgccctggcaaggaatccgtccagaatctccttcccctcctgctgctgcgtgcgagtgggccgtgccctggtgaggttcctgtgtcctctgtagaaggtaacagattagaaaagcagaagtcccttctctgtctagcatccttccaccttcttctcctcatctgcaaaatggggatgaaacacataaccccagggttgggagaaaggtctgacacagaggcaagtgtcagtgaacgtttgagaactctgaagcggtgatggaaatggggtattcctggtaaccagcaccctctctgacccacgtggtagttatccttttgccaaaatgtgtgactctcttaatacattttgagtctctaggg

SEQ ID NO: 334136 - DNA, 534 bp, Homo Sapiens
aagcaatccatttggtaaatgagcaaagaatgtgaagagacatttcaccataaaggacatgtagatgacaaataagcacatggcaagatgttctacatcattagctatcagggaaatgcagcctcccctgggccttagtcatttcttgctcttcttgggaaaaggcaaagacagagacctatgagtcagagctgggggcaggaagttggatggaaaggagagaagattcaaatgcagacataagagacacagtccatctcacatcttggagctggaaacaagctgactgtgtctctcatatctcccagaagcaccagcctgaaaatgtgcacccataagccaggttaagaggtcgccagtggaagccagggagacccacctggttagagccccaacctctgtattggtgacaggcattgtacagagcaggggttggcaaaccttttctgtaaaaggccagatagtaaatactttaggatgtccataccatgtggtctctttggcaactactcaactctgccattatagcgtgaa

SEQ ID NO: 334137 - DNA, 421 bp, Homo Sapiens
gagttttgttttgaaactatgcaggtatttttcagcatccatttgtacattagtatggttctataggaccccagctgtggaagtaacaaatttcttctccctccagactcttggatgactacctagatccccagcttaccggttagtttcctccacaggcttccatgagctcagtgtcccaagacagcaaaaatctggtataccctgtagaagcaggggggtagcaaatttaggctctcttcgaaattacttgtacaatacgagtgccttcgcagcttagccccaaagtgctacttatgtttcccaaggtcttttctattcaaatcatatttggtttcaggcccctttatgggcatacggtaacagaaacctccatcattcatatgagacccttttgtcagtggtaacatcttgtacttgg

SEQ ID NO: 334138 - DNA, 450 bp, Homo Sapiens
aaaaaaaagttaatgagttctattttggaaatgtctgtagaatatccagttataggtaggcttttgtatctataggtctggatttagacatacaaatctgtactagggctgtagttttgagaattaacagtactgaattaaagtggtagaagccttggacattgacagagttcatatagaatgagaacaagatgaaagataccctgggagataaagaacaggtagattagcttttgaaagatatcgagaagtgatttaaaaaaattagagaatcaggaaagtataataagaaaagccaaggtgatagaacattttaaaaagaaggtggtgatcttcagtgccagatgttgcaaattggtcaagaagaatgaggactgaaccaggtgtggtggcttatgcctgtaattccagctactcagcaggctgaggtagaaggattgcttgaactca

SEQ ID NO: 334139 - DNA, 506 bp, Homo Sapiens
  misc_feature (149)..(157): n is a, c, g, or t
aaaattacatgttttattttatactgtattataataggtgtccttttactttcaaaaattgtagcatttttaaactaattttcttaagaatgtgatacagaaagaaaactgaaaaaaacatatttatattttatctgattttataagannnnnnnnncagtcaactggtgaaattggtaaatcctgccaataagtctttataccaaattacgttttaaaattagtttcataaaaggaacaaaagcatttccatgctagacaagatttcacttatcgtcaatttaactccgaggcatttgaaataaaacaactgtatttttacattgaaaattatttgtttacaggaacttgatagcataatccacaatgtgatgtgaggtacttggtcaaaaatttttaaaggtttataacacctaagtaaacatttgagaggataccagtttgatttgtaaatactctaaaaaataaaatttagcaaacttttttgtttctttttaagagatatg

SEQ ID NO: 334140 - DNA, 766 bp, Homo Sapiens
  misc_feature (615)..(615): n is a, c, g, or t
  misc_feature (618)..(618): n is a, c, g, or t
  misc_feature (627)..(627): n is a, c, g, or t
cattcaatttattgacagatgtttgcttggatctctttaaaattacttcataaatcttcccggataaaaggcctcaagtttggttattaagacaaggccttgttgacagtttcatatttaactgtttagaactcagctgtcagggctgtaatggggtgtatggccaaggggcacagggcctgggtgctgtttgccacctttcctgcacctatccgggccctccctggtggagtgtgtctactgtttcctgcaatcccctcagttaacttctggggtgacctcgctgtgccttgcacttattcatttagcatatcagcttgtcagtgtgatgaagtgttcctgctgataggcgctaagggctgagtaagccacagtgcctccatcaccggggagaagtgttgatgggagcccaacgctgaggtcgcccttcccacaacagccaccaggcaccagctggaaacctgtgggcttcacctccatctgtgggcaggaagcaagtggatgtcagggacggtggtggggggctctgcttggaagttttaagaccacactcatcttttctggccatggacttttcaataccatcctaagtcaagattttttgttgtttgttgntgnttttgttgntgcccatgacagaaaactcacctcaaaatgacttaaggaaagagataaaggagaagaaagatagttaactggctcatgtgattgaagagtacagggggaaacgaccttcaggccaggtgcaagggttaaggtaattttg

SEQ ID NO: 334141 - DNA, 658 bp, Homo Sapiens
  misc_feature (151)..(151): n is a, c, g, or t
ttttaacaatccatgaacttagattttattggtttcactcaaaatgctgcagtcatttgacctgaacttgtggcaagagacttgtgctttctaaattcaaagactagaaggaaaatggataaaaatcacaagtgccgtttctcttgcaatngtagcgctattctactgaaatttctttcttctcttttctttacaaaatcataaagaaaaaattaattcattacttatatagtaggtacaactcagcctacaaactctaatctgcaagaagcataactttatttttctaacacagaatgtaatttctattaggaaccccgtttcagcaggtggtagaaattaatctcagtcaattcaaagtctccccctggaccttttcctggggttaagctcggtcgggtgggggtgtggcttttaagtcatggtaagacttctggttcctcggctatcatcatccgtccatgctcgcacctgcctggacatcccctccccatctggtcatcagttggtcatgcaaggtctgccaggggctccttcacttccacaaagcctatttggggacctgtggcttggagcatgtggaagattctagctcctggccctgcacaccctctggcttcaggaagctcagtaattctgttccaggccaactgctaag

SEQ ID NO: 334142 - DNA, 711 bp, Homo Sapiens
  misc_feature (409)..(409): n is a, c, g, or t
ctcttttgtgacagaaggtataaggccaaagggcaggttgtcagcgagaccgcctcccctgcaggccagttgggcttggagctttgggaaggcaagtttgcaagagcctaggcctgttgcagaaatactctgtcctcagcttttccttcagggccaggtccctggattcttggataagacatttacaatatgcgggcaccacactgaatcaggactgtgtgcagagaagcaaaccaggcctttccacatagataggaaaaaataatcataacagttcatggttatgcagcttccagtggactccattgttacctggtaagtcatcatgtcaattgccatcacccttaaccttaaaggtgtcactttccgtacttcaggtattctttccaaagtccctctaccccttctntctccctggtcttatctgtccctgatctctgccaccctcagttgcttacattggccaaccagcctgaaatgggagaggttgaatccttcatgctatgtgcatagcccaacattccacaagatttatgtcactaaagcctgtgaaaatgacaaatggtgagaaagagggccaaaaagggaagcaaaaataaatccaactacgatttaacaaagggcggcccagtatctgtacctagtgggtactgtgatatcttgagggacatgaatttaacaagagaaataaactgctgtatgaggatcttt

SEQ ID NO: 334143 - DNA, 434 bp, Homo Sapiens
  misc_feature (167)..(167): n is a, c, g, or t
  misc_feature (372)..(372): n is a, c, g, or t
  misc_feature (377)..(377): n is a, c, g, or t
  misc_feature (422)..(422): n is a, c, g, or t
ttttatttcaaatgaaagtgttcagagatatctgaggatgctattaacatgaataattgtgtctcttcagaaagaactgtgtgactaaagaaataggcactggagaggccactgagggactttctagaactttcatatttaaagatgtttaaagggaagaatggatnggtttttaataactgcaattaacagtttaaccatgttcttataggctggactaaacagtggtatcttgagatctttttaagttttgagcaatcagagagaaatgagttttaagagcaatataaattgaggtttataatccgagctacaatgaaaaagtctcttgatttctaagctcagaatggttgagtaaatatatacataccntgttngattccttctttctccccaaaactcattgaaatgaccaaaagacnttaaaatttcca

SEQ ID NO: 334144 - DNA, 1026 bp, Homo Sapiens
aagtgggggtgcagggagtgtacgtatttatggggtatctgagatgttttgatacaggcatgcaatggttaataatcatgtcatggagaatggggtatccatccccttaagtatttattctttgtgtcacaaacaattgattatacttttagttattttaaaatgcacgattattagactatagtcgccctgttgtgctaacacaaagcaggtcttattcattttttctaactactttttgtacccgttagttgctggacatttgaatatccttcctatgacatagggtgcctgtgaagtggcatctgtgggactcctcatttggctcatgacctgtttctcctcttttcccttccagtacaatcatcagcaacccagaagccaaactaataacatcaggggctctgtttgccaagctgagccaagctccagctctgtctctgggaaactcacgatatgataatgagagcagactggtgcgagagtctaaacaccacagaaagtggaagtgactccaaaaatggtcccagtttctattagcccatttatgcctagtgttccattattggaatgctaagcaagtgggagttatttatattctactgctcaaggacagcaccaaggtctgattgcaaaaattcaaaaaattgcaacctcgggcatacatgggttaagagagagagaagttaccaaaacacaacaaaacaacctggaaaggtcaagaaagcagggcagatgggaaggtggactcttctctggacacatttgtcagtggccctattagaaagagatatccagatgtaatctgaccactgcaggacgcagggggaccattgcctacctatgctattggcaactcactttcattaatgtcccccaagattggactaatcactttggcagtcatataaagaacttgctgtcaactaaaacccttaggtctgtttcccacgaactgctgttaaatcaggtttccacaatcttgaacttgtgcactgattttttttccatctaaattcaagactt

SEQ ID NO: 334145 - DNA, 634 bp, Homo Sapiens
ttaaatggaagcagtttaggtctttaatgcagtctagggatgacagacaatgttcccattcagtacacctagaaagaatacctgaaagaaatgtgaccttacaggtccctgactgctcagcacccctcccctaaaacctctctcctcctccctccgctccagcacccttcccggcctgtccaggaagagcaactcccaacccagctgcgccaggttgtgcagatcacatctgcttctcttgtcacctgtcctggattctggacaacagaggcgggccaagaagcaagtggaaatcctgccttttcttgcagcggggatctcagtagactgcaaacactgacaagttatctttcacgcatgcctcagtttccttccagctttttgtgctgttccttctacagcaagaattgctttgctgaatgctctcctgatttggctctccattattggccatgggtttttggtgttgctctctagggtgctcagtttttcactgtgtgtgttggaggagcatcctgagcagagcagatcccgacttggacagaaaccttcttggtttctcggaggagtctcctctgtgagtcttccagagcccgccctgaaccacatgactgggagctcatcgggcacctct

SEQ ID NO: 334146 - DNA, 889 bp, Homo Sapiens
  misc_feature (190)..(190): n is a, c, g, or t
  misc_feature (369)..(369): n is a, c, g, or t
  misc_feature (494)..(494): n is a, c, g, or t
ctagagcctcatttggatgtgaggctcaaggaatatgagcctcataccagttaacgtgaggctcaagggttatgagcctcataccagttaatgtggaaagatccaaggcatctcctttgagggacagaagaattatagagcttgaattatagagcttgaagcaccatgagggatatccccttgggggatnatgccttggatctttccatattaactggtacctacctcattttaaccctaggtttctatggcttaagtagatggtttccagtgcgtgcattctctgggggtggattccgttaaaggagaagtggtcattttaggatgtcttaagcatttggatgtgagtcaagctgaagctccctcctnagtgccctgttcccgcagcatagatgcatagatgcactcctttcccagcactgtccgcaggaactgggattgtcatgcttgttaatgtttgaccatctgatgggtaaaaaatgagatcttgttgntaaggttttaattctcatttctctaatttcaaatatcttttcatatgttcatgtccatttgtatatcctattccctgaaaagaaaaactattgtttttttatatttttcttcagattttgtttttatgtaataagcatttgtttgttaggtgtactgccaatatattcctccatcatgttgcttgtctttcatctttgcatgtgatgcttttgttatatagaagttttatatttttgatgtagccaggtttattgaccttttatctttatgacttttttgcctttaattttgctttacattgaggtgtttgtgtatccactgtttttcttttgaatggtatgagaaagggatttaacttaaaaaaagtaatacagctaggcatagtggctcacac

SEQ ID NO: 334147 - DNA, 1023 bp, Homo Sapiens
  misc_feature (72)..(198): n is a, c, g, or t
  misc_feature (258)..(326): n is a, c, g, or t
  misc_feature (331)..(410): n is a, c, g, or t
  misc_feature (428)..(476): n is a, c, g, or t
caggtggccactgcaacaaggcctttgggtttagacaggaactacaccagctctcccacatctccaggttannnnnnnnnnnnnnnnnnnnnnnnnnnnnnnnnnnnnnnnnnnnnnnnnnnnnnnnnnnnnnnnnnnnnnnnnnnnnnnnnnnnnnnnnnnnnnnnnnnnnnnnnnnnnnnnnnnnnnnnnnnnnnnagtgaaaaagccaacatgaaaaagagataaaatactaaggattgataatgataaagaagnnnnnnnnnnnnnnnnnnnnnnnnnnnnnnnnnnnnnnnnnnnnnnnnnnnnnnnnnnnnnnnnnnnnnctgannnnnnnnnnnnnnnnnnnnnnnnnnnnnnnnnnnnnnnnnnnnnnnnnnnnnnnnnnnnnnnnnnnnnnnnnnnnnnnnaattgcctttgttaactnnnnnnnnnnnnnnnnnnnnnnnnnnnnnnnnnnnnnnnnnnnnnnnnnctcagggaccgaaactgccttcgtaaaatgaatgcagggccacaagattaggattttgggagaggtctgaattctactaacatgtaggcttaaatgataaccagccactgttctctggcttgcttttctataattccttgcctcttaggagatgtggccagaggtcacaggattggtgacttttccaattgttcctatagataacactacttttatattgcctaagattgttattctgagatgtttttcagaattctgcattctggcaaatgaatgactgcacctgacccgtgactcatgactcaactagtcctgtggaccccgccatgaggtggactcagtgcaccaggaccattttccacacccctacaatttcatccccaaccaatcagcagcactcattccctagcctgctgttcaccaaattagccatgaaatccctacctagactagcctctgagttctgagagaggctgatttgagtaataaagtaataaactcctgttctgcttggctagccctgtttattaaacttgttctctactgc

SEQ ID NO: 334148 - DNA, 419 bp, Homo Sapiens
  misc_feature (49)..(49): n is a, c, g, or t
  misc_feature (275)..(275): n is a, c, g, or t
tattccacctgcacacaggtaacttcattatccaacttctccaagtagngatcagatcttagtaatcaagcaagagggcggttagctgggcagccgcggacatgaggcttcgtggtgaaagtgggcatgcagtttattctcccagatattacgaagaagaagaatagatgttgtaacctcctttagatcagggatggcttccctgggacacattggaagaagaattgtcttgggtcacaaataaaatacactaatgatagctgataacttttttnttaattgcaaaaaaaatctcataatgttttaagcaagttgatgaatttgtgttgggctgcaggttggacaagcttttgctttacatatttcacatgtccactggggtttcttttggttttgcttgtggttttagggcatttcat

SEQ ID NO: 334149 - DNA, 343 bp, Homo Sapiens
tgggctcaagccatcctcccaaacttaggtcagtttttaaaaataagagcaaagaggaaaggccgaccctgccagatattaagataggctgcaaagccacaacagtgagaacggtatcagttcgggcacagaaacaaaaatacctgagaaacacaacagagcgatcagaaacagaccactgtgtatatgagaattggtatttttaaaaagacaccacaaatgtgcgaggggaattacggagtatgaattcgttatctatcactgtgtaacaaactgcccccaatttaggagcttaaattaacaatatttattacttctgtttctgagggtcaggatctcagca

SEQ ID NO: 334150 - DNA, 1003 bp, Homo Sapiens
gatgagtaattatatcttgtagtagcaatttcatatctctacttatagttgggtcatttgacttttgaggacctcaggaaaatgagggagcttaaaaaattctatggttcctaatgaaatacttagggatgaaattacagttctgggatttgcttgaagacacaatcagccatggtttgtcactgttgatgctgagtaatggatatttggtgttctattgtgagtctttggtacatgtttggaattttccatgaaaaaaccttctgcttctaaaatgcacaccttgattcttcccatcgccctcctactggctggtcctgtgcagctcactcatttctcaggaacagcagcagactcactactctgaaggaaagaaagccctttgctttgggtctgttcctaatgtacatattattagagacttttccgacaccctccccattttttattttcttaacagctaatacgatagctgtgctttcataataaattcaaaagctgctctctatttctcaccagtttgaattgtagaaaagagtacaaaagattagagtactttaaaataaatctcagctaattatacatacaactgcattcactaaatgtgaatattttcaggctttctttgctaccaagtgccacctgctcatgatttaaatgggcacaaatttatttccattaaacaaaatgcagcaactcttctcctatagcgcaaactcctttaggtcctattttgaaactgagaagctaattccagtgttctcttgttagctctcggtccatgtcaaccaccccacaaggttgtttacttgaatagtttgcagccttgctttaaaagttctagtaggcaaataggtttgttgatgatgaagtggtttgtgttttataagagtccttatggtctagatggcatttgaacttgtggttccagtgattaccaggaccctgaattgaagaatacatgctgtggccttttcagctcaggagactttttactttctat

SEQ ID NO: 334151 - DNA, 862 bp, Homo Sapiens
  misc_feature (334)..(397): n is a, c, g, or t
catgggatgacagattttttaaattactatgttagatattatagagaaatcttaaatgtatgagtaaccttttctgaaaaacaaaagtgggatgaaatatattggtaaaagtatccacttatcttgattattttcattttacaacatacctctgtgtacctttgtgttttattttgcaatctataaagaacttgtccataatcacacagttatcttttcaatattgagatactgtgttttttaaaaatcagtagaggtattttacttaagcattggccaagaagaatgtttaccacatatacagtttatattctttcatgctacaatatttatnnnnnnnnnnnnnnnnnnnnnnnnnnnnnnnnnnnnnnnnnnnnnnnnnnnnnnnnnnnnnnnnttcaagtgtatacatatatgtatgcaggtgtggtggcacacaagcgtgtagtcccaagtagctggaactataggcgtgcgccaccacgcccagctaattttgtatttaaccctttcttaaactgtgaatacatgtgcactcaacatcctattttgtatacatagaaagcatggtaaaaatattgaatatttcttttacacaagtgatttgctgtatgttgagcagctctctgggaggtcagattatttacccacaggaagtggattgagtaggaataagtttacttcacagatatactaactactctttttcaccctataacatgttttgttttcttctcaacctatcaagcagatcttttcatgcttttccatggaagagccagtaatggtagtgaagaatcacaaatttccctggatctcttgcctgaagcagttcttcataaagactcttgtttcgtaccga

SEQ ID NO: 334152 - DNA, 725 bp, Homo Sapiens
taaaggtcctgtttggtccttctccagagctgaggagaaagggttttcagattataaataacagaggtgcccttgtatggcacagaattgcgataagactttacttcttaggggcttaaataatgaagtcagtaaaagaggactgaaaacgaacataaagaagagctttagctttgacgcaaagaattacatcagtgcttgacaaaaccgaggattcttaatttctaaaaacgctttctttaagcacttcctaacctttcattatctgagacaacatatcaagtgagcagcagtacaaaggatgcatgtgatttcgaaatgccacaattgagccaactgcagttgcacgcgtacgtagtatagagaggtgtgatcaaaaaaagaatatagggagcatagggcttcgtctgcatcaaaagatactctccccatcttctatagccttaagttttgcgaaggtaagtttctccccgcttgaaagcgcccccagggacaagaattcatcttgaccaagcctaaggccgtggcatgcaaggtgttgagtcaccgggtacagcggtcttgcgacataaatattatttgatgacgaaggtactcggggcccaggtgccaaggtaaaccactggcaaagatgaccgtggttaaggcagtagaaagcaggctcgacactgagacgcggttccagccctagaaggattgcattttacgattcaggcaaacttcga

SEQ ID NO: 334153 - DNA, 661 bp, Homo Sapiens
gctagtgaccacagtttgcaatattattcttgtcattcttgcaattgtagaattgtaacatacatttaaagtatataactgcttcaccctgtgtttaactaaaagacagaccctcacactttcaccagggctgattctcagctccctcagggtcttcgctgagcccctgcttttctctcacctaggtgtggggctaacagtcaacaatctgaagaccagcttccttccctgtcagacgacaatatccaaacacaggacgagaataaagctggcatatgaatctagtcatacaaaccttctgagacacatggtaattattacttctagtcatttttcaaatacggttttgtgtatttggaatggggatttttttaggtgtggatgtgtgtgtgagtgcaggtgtgcagagaataagattaattcgggtttgagactcagatcagtccacagctctctaagctctctaatacagagcatacaagaagtacttgctttaaagtcgaaatcactcccccatgatttacactgacagattaatataagaaattcagtgaatttcccacaggtctcctaacccacttggtaaatgcatccttataaagtgcaaacaaataatggcataattggctttgtgagccacgtggattagacgacctcttct

SEQ ID NO: 334154 - DNA, 1003 bp, Homo Sapiens
  misc_feature (372)..(372): n is a, c, g, or t
  misc_feature (678)..(678): n is a, c, g, or t
ttttaggtgcaaactgaagttttatttagaatgaaaaaatagacaacaaattacagattttaaagagctaaaaaattccacagatgtcacggagtccaggggaataacagcctggttggaggggcgctctccgcctcttctgtatttttggctctctctgagggtagtggttttaccagcatgctttatcaaaaactaaactatcagggagagtctacaaaaactcctgctagagtaaggtcagattccagaccctgtcgcacctctgaagaccttggtccagttccttccagggtggcttcacgccttgccatccctgcctccctgcggctgcccctgtgcccaggccccgccaacgccgtcaaggccccntcggccacgccgcgtctccgcccagcatctcggatgccattccttcccggtggcacctgcccagggtttgccgaaatcgaaggcaacaagagggggaggtgggcttaagagtgcctgcccggccgccacctgtcttggaggtggagggaatggccgaggggtggctcccccagctccccacctttgagcatctctcaggctgggaaagggcaaagggccacatgaagccagcaggcacttcagtgccacgtccccagagggacagtcctcccacccaggaacccctggctgcccagaaagcacgcnagcggcaaggccgcctccaccgcacccgtgagaggactcggcagctgtgaaggaacctgggagattctgcagatgggccgaggtcagggcttccaggctaggaagaagtcttccagatgcctagcttcaccagtcccaggagaaggaaggaaggggcatgggcagaggcctggcaggggaggaggaagaggccaaccctgtacacaggaccacaggacagggtggaggactgtcccaggagtccctccacaacaggaggcctggtcccagtggcccctctctctaggggttccctgctgccaccatgtccacagaggagtcacag

SEQ ID NO: 334155 - DNA, 729 bp, Homo Sapiens
gccttgacaactcagttcatttaggaacgtctcgaacatggtttgcgctcaataaacagcttgctgaatttcacagaatataattacttttatcttttaagtgtccctgtaatccactcctttaatcttcattttaaattgggcttcctttatctaagaagccatgtggttcccccaagccctggactccttctatgtgttcacactgatatagatgctacaaagctccttggaggcacacatgacctgtgtccttcccaatggaccaccccattagaagtatgagagatggcagctcttagaaagtggcctttggggcccaactttggctaccgttagactcttacgggtacaggcattctaaagccaagtctacactggccactaaggaaagctggtctaggaaaggcagggaagtaataaaaggagtccacaggaggtatgtctgggctaattcttagccacccagaatattcaggcaagactttgtttcatgaaagtagctctttcgagggagagggatagctaattttcatacttgaatctttcaacacttctgtgaacctatggaaaacaaaaataattgcgggggatgtgctaactggagtaggaagtgataagatggcagtcccaagcttgggcatgctaaaagagacaggtgacagggctagggacaggggacctggtagaacactgtatacaaagtccttctgtctgaaagcccatgcc

SEQ ID NO: 334156 - DNA, 696 bp, Homo Sapiens
  misc_feature (391)..(391): n is a, c, g, or t
  misc_feature (652)..(652): n is a, c, g, or t
  misc_feature (662)..(662): n is a, c, g, or t
aaggagatagggactcactgaattttctggagagcagcactgacaacgcctaagtagagggctttcaaaaggaaagagcggttagtgatagcaaacgctcaggaggataaagaaaatgaggccgctgagtttacctagggggaagtcagtttcagtagactcaagggggccaaagtgaccctggtggagattcagaagggactgtgtgtctggataccccctcccaacacccccaccgcaggagagctacatttccccctctcccctcagcccactggtccctcccattgtctaccttcctgccttcactcccagttcctcagtgctgaccaccaagttggtggtctccttggtggcatggctgaatcactcttccccggtggggaaggtnggggtagtctctcagcagggtgcagctcctcagcggaggccaggcccacccaggctggccagcccactgtgagagcagcctgcactgacaatgcgtctgcctggcaggtgcaggagaacccaaggtgctgctctggcaatgacagcctcacagggccctaaggttgcagctgaactagggaaatatattttacttgacatctgaatgccatggttccagggggcagaaggcgagctggaagaagcttcacccctccttctncctggccagnccttttcctacagggaaaccccaacaccctggtg

SEQ ID NO: 334157 - DNA, 548 bp, Homo Sapiens
  misc_feature (144)..(152): n is a, c, g, or t
ctgtggactgtttattcatgtcttttgcagtattctctcttggatttgtgagaattgtttatttattataaacattaaaccttgattggtaatacatgttgcaaatatttttccctaagttttcattgatttgccaaacttagnnnnnnnnnccaagttgtcttttctatgcaaaagttttcgcttttttgtaggtgaaactatgagaaattttcctttaccatttccgagtttaatgtcatgctaagtccttcctgtcttgggaagatgtgttcacagcccactgactgaaggcccttcccggccagttctgagcttgagctgagtcaaatgtaaacagctcctggggctgtgggtatagaaactccctttctctttgggtctggaataccatgatgccttttccctgtcctcatttttcttaaatgttttcatttaatccaggcattatgtactgggggatcaactattcgcaaaactcagtaaaaggcggattcccaaggctccactttggatgcagtaggtctggggccaaagcatgtgagaaa

SEQ ID NO: 334158 - DNA, 903 bp, Homo Sapiens
  misc_feature (588)..(620): n is a, c, g, or t
ccggagcttttatttatttttttcacataaattacacaagcactttataaaatggttacacagaaaacaccttataagtgcataaattaacacccccccacccctcaaatgggttctggagaaatgggctgcatttatgtgaaaacctgtctgtgcgtacctggattgggctgggatgtgtggtgggggcctggcagaccaagtgaggctgttgtagctgttggctgctgtgtgtggtgtagtgtgtcacagtgtggccatgaccttgtgtttgtgctggagggagtgccatgctgttcaggatgagtctgtgtcacccctgacctgtgcctgatcgtaaggtccaaagtgtaaacactgtgaccctctgtctggttgacactctcccatagatgcccatgtgtggctctggggtgacaccaggagggacagtgacaccacctgtgtgtgggcctatgggtttccatgtgtgtgatgagaaatgggtcacagagaaggggtttcccagggcaaattcagatgacagccctggggaccccagaagctcctcctcccttacctcccttgcctttctctgaatcccacgtnnnnnnnnnnnnnnnnnnnnnnnnnnnnnnnnnagatttcttaacagttcagacaggtgcgggacgcctctgggaggggggcgcgtgtccttgtcccttgagctcttccaccgaagggagaacagtgtcggcacaaatgtggtggcccttcggggccgtgcgagggcagtgttcccctcctgggtgcagtctgaggccaggagggtggggaggagtcctgggtctcaggcctcagtgacccctgagtgggcctggggtcccacagggcagaatgggcaggctcactcgcaggccgacgccaccgacgtgacgctag

SEQ ID NO: 334159 - DNA, 524 bp, Homo Sapiens
tgtatacaaagacttcaccctactccatgtatccctacagtggccaagtgccagaaaatgaagatatcagtctaagttagccttctgtcctcgctcacctggcctttctccttttcagaactcagctcttaaagtacccaaaattcaatccaataagtgcaattcacaaggtgcgcgtagatggtatccatgtatgaacagaaacaccacactgttagaaagaagagcactggctttggagtcagaagccttgctttcgccgctttccaagttacgtgatacagggcaaatttcttaacttagcaaaacctcaacttttacacctggaaaatgcaaggatgaattacagataaagtgtgtccagcccctaagatgaagttattttattttattagctcatgctcacagtaggtgctcaaaaaatggtttgtgttagccacattgtaaaaaacacctgtcggaatagcagcagaatttcaggatgccctccctcacctccggtgaaggagatgttcttcccttgg

SEQ ID NO: 334160 - DNA, 812 bp, Homo Sapiens
  misc_feature (466)..(466): n is a, c, g, or t
  misc_feature (527)..(527): n is a, c, g, or t
  misc_feature (573)..(613): n is a, c, g, or t
agtattatgtggaagtcatgtggtttatgtgaaatgacctcactcccaactccagagggtcctttttttcaccacaatgattgcatcatataatccaggcctacatcagtcagtagacggaattcctgggccacagggattgagtcagggatagttcaacgggaacaaaattcaggccctttgaaaaatgattgtggaaagtgaccatatccctatttgtggcaggcagccatcttgtgaccatgaagaagtatcctggagacaaagctaacacacacaaaatatgggcagcactgagatcaggaccacagctctgatcaaactgtgcctaaaacttacatacctctaggacttatcagttacatgaggcaatgtcctatgcttgactcgcattttctgttacctgcaactgaaacatctttatgtctaccacacttaacagtcaacatccttccaacgttacctncagggaacttttcatggctggcaaatgctcttctctcttttcctttgagctcctccagtcncaagagtctgagtcactcaccttatcatttctctctatcagacaannnnnnnnnnnnnnnnnnnnnnnnnnnnnnnnnnnnnnnnncaaacctctgtggcacttttgtggtgttttccctaactttccacccttcccttggttatagccctgaccctggtacgatataacattcaacattacactgaattgtgactgtcagtgcttgtctcctcctcccctgaagactgttagctcctgagggcctgacagtcccttgactcaactcctttctgcttcactgttt

SEQ ID NO: 334161 - DNA, 559 bp, Homo Sapiens
  misc_feature (268)..(296): n is a, c, g, or t
ttgggtgtgttgttatgatagaaagcagtgagctccatggtaatacttgttccctgtgacagaagaaagggacaaagatgtgacatggtcataacccctgcaacctccgaagatgctgctgtgtcctgtcccaggagggctccactctttttagggaatggctatatttacccagtttacagcttacgagaaacacgttgagggcaagactcaaatgaaactaatggggggccgtgaaaggctattttaagaatgcagaaagcagggnnnnnnnnnnnnnnnnnnnnnnnnnnnnngaacagcaacaacaacaacaacaatgaacagtagagaacacaggttagcacactttttctgttaagagccacacagtctctgtcataccacccaactctgaatgtgaaaacagccacagataactgtaagtgaatgtgtgcggctatgttccacatttacaaaaacaggtgggcgggcctgatttggcccatagtttacaatccttggtatagaggattaaaaaatgcccacccctccatccataacacatttcaacggaaag

SEQ ID NO: 334162 - DNA, 719 bp, Homo Sapiens
  misc_feature (701)..(701): n is a, c, g, or t
aatctccgccacctccctactctcggctgtctcctcgcgacgagtacaagccactggatctgtccgattccacattgtcttacactgaaacggaggctaccaactccctcatcactgctccgggtgaattctcagacgccagcatgtctcccggacgccaccaagccgagccactggtgcagcgtggcgtactgggagcaccggacgcgcgtgggccgcctctatgcggtgtacgaccaggccgtcagcatcttctacgacctacctcagggcagcggcttctgcctgggccagctcaacctggagcagcgcagcgagtcggtgcggcgaacgcgcagcaagatcggcttcggcatcctgctcagcaaggagcccgacggcgtgtgggcctacaaccgcggcgagcaccccatcttcgtcaactccccgacgctggacgcgcccggcggccgcgccctggtcgtgcgcaaggtgccccccggctactccatcaaggtgttcgacttcgagcgctcgggcctgcagcacgcgcccgagcccgacgccgccgacggcccctacgaccccaacagcgtccgcatcagcttcgccaagggctgggggccctgctactcccggcagttcatcacctcctgcccctgctggctggagatcctcctcaacaaccccagatagtggcggccccggcggaagggcgggtngggaaggcccgcggccac

SEQ ID NO: 334163 - DNA, 482 bp, Homo Sapiens
ataagccactctgcccaggctgtttcttgtttctttagcagctaaagtttaactgccaaatgagtaaaacaccaccggccatatctacttagtttccatgaaaataatatatagaactgtatcaaatgtaagatattattaatccacacatacaaaggttctaaatgttgcaaatgtgatattactctttgtacaggaacactaactttcaatactttgtttttcatagacacaaaatcacactagtgattagggtaaagcccattaaactggaatacaaatcacagctaagttcatgatataaatcttcatttttattttagaagatgaataaagtcttagaatggaattatcactgttaacctgcaatgcagtatccagggtagaaatagaaatacagaatgtgtccttactcagcttgcttactagttaaatgcaaactatacagtgccccaattaaatcttttcttttctgccaattc

SEQ ID NO: 334164 - DNA, 305 bp, Homo Sapiens
tgcttctaggtcagaatgctaattgaatttctatagatttccttttgtatcttctatttcttttatctatcttgtggcttttcttctcttgggaactcttttggaaaggaagatttgttgagggcctgtggttttttgcagcctacatgtttttaatggaatggaaggagcacagatgtcggggttgcatagatgtaggttagaattctgatttcctaccatgtgcccctacttaacccttaacctctgtaagccctagtttcttcatttgtaagttattgagagagttgaaagagatagtatag

SEQ ID NO: 334165 - DNA, 1037 bp, Homo Sapiens
  misc_feature (842)..(842): n is a, c, g, or t
gccatagggactgtgttttttcaaaatagtagttttaaaataaatgcatttcgttgtttttggtgttgtttacgatggacttcagtcatttgttgagcattgtgacatctggctatagcataaactccatttcacaaaggaagggcctagctacagcacatctcatcacttctcctgactcccaggagggcctttcttatttttaaccctctttagggaagtatgtaccaatgccagtggaaaatttgatcaagtaaataacatttccatcagcaaattcccatctaccttaagttcctccccaaggccctttcctccagtctagcctgcacagacaatggacaagcatcgttgcccctcgtcttggtgaataattggaggctatcattaagtaagacctcatcaagtgagattaattattcaacactgtttacagccaaggcacaaagacattgtccatataaatatatcttccttggctgagccgattatagctagagacaggaatgactgatatgaaacaatgaggtagccaagtgtatcatattaactctaagggttttagcttaaggaatagtcagcatgggatgggaatgtccaagaaggcttggcagaaggcttggggaattgaacaggaactaaaggaagggtcggtagtatcaacacagcagagcggtggagcgtggcccttctaaaaggaggcaacagcataaacaaaagcatggagataggaatggtttggtgtaaggtggcctaaggcaacaaaataacatgagctgtacaggagggctaggcaggcattgctaaatgcagctttttggtgttacctcctggatctctcnaagttccacaaacctcctttggttagggcctgacatataggtatccttaacattacccacatggacgtgcttccttggggtattgatacgcttggtcctcctcagcctggtatattatatggtccatcatataattttaataaacaaatattgactgtatcggattttaaaaacttatgtaaaatataaatatag

SEQ ID NO: 334166 - DNA, 886 bp, Homo Sapiens
  misc_feature (149)..(149): n is a, c, g, or t
aaaccaccctggattatttatctttaattgttcctttagcagatgttgaagtaattctgggagtagtgtaaacaactccctgaaagaaaaggatcgcaggccctcacatacaccatgaaccaaggacagggcttgtcggggctttgatngatcggcaattttgtcccagggaaaaattttcctgcctttgtgtatgtgcaaatttcaattaagaatttcaagaagcatttaatctttatctattgaaacccccagcatgcagcgcgcacagggtgagcctagaaagaaaaccacagccccctgtggtgagaggaaaaaagatacagcaatttaagtgctggaaagttgaaagggaatgaacctctctagtgtttgtggtcgggggcaaagcagttgttctgagctttggaatggaggcacaacatatgtgcctcagttggacaaaacgcttctcgagtcaaatcaactgctaggcctgcatgttggtgcaaggtggaggcctagataatgagggacagactcctcgagaagcagcgagtggataatgctacataagtatggaattatataccgcattttcaccattctgtttaatgagagccgccaccacagcgaatcacttgccacacagccgaaatgggccattagctatcgagggaaaattgtctttgccgctttcagcagatggagcaaatattttacaaagcaattttacataccaaaaacatttgtgtgccttggtaatgttggctgttttacattatgttaccttctacagcagcataattttccatctcatcgaaggcaaagttggcatttttgatttttaaattctcaattaacaattaaacatggagtattaaagcagtccttaaactttaagtag

SEQ ID NO: 334167 - DNA, 315 bp, Homo Sapiens
  misc_feature (77)..(77): n is a, c, g, or t
atagccttagcataacaaagttaaatttgatttacctttgggggctcagctatcaaagcctactccttcttctactnctcgaggccatcggccctggggctgataaggaaacacagaagcagtggttagaggcgtaagtagaagactcagtagagctcactgttagaaaagccaagtgcagaaagggttccaaacaggggcacagcagcagtgctgagtgaagaggcagcctcagtaggaatggggtgtctcaagacttgggctcagctgactggcctctccatcctggctctgttcactgatatactaggcaag

SEQ ID NO: 334168 - DNA, 807 bp, Homo Sapiens
  misc_feature (654)..(654): n is a, c, g, or t
gatccacaagtaattttagcttcacatcataggataataaaatttctgttccccagtgattttaaaaaaggatagttttactcaggtatccttgtcatatgaataaatattctaccagttttgaagtggtcctgctccattggctgctgggagtgtgcttatgctagtgagcacaacttgctcagaaagttttgatatgttatcaaagttgctgatttgagtggtcaaggacttccgggctctctgtgctagttcgtcccctggtgagccgatcctcctggcgatggtgaactccaaggcaacagcaagaaaacgcagctttaaattcctctccgaaattttccactgagaaaattataaataattggattcgcagcactattggcatatacaagccagtgtgaaaaggtaaaccaggcatacacagtctctctgtcttcagtatgggcaaacatccccaaatactctctttagcacattgagaatgctaattggtagatagcaaattgcaaataccaaaagcacaaccatcaacatccgggcttgttttccttctggctcggatctgctttatttcagccgccacagcgctcatccgggacttcgttggctgtcctggccctcgaggctgtgaaacaggctgcaggggcttcncattttctctgaactacagatgatgttccagggatctgaaaggagaagagacagacccttattgcaatttgacttaggaaagttccactttggggaagtaattagaaaacacagtaaggaaaggcttccagacgcctgaggtgtgggaggttt

SEQ ID NO: 334169 - DNA, 780 bp, Homo Sapiens
  misc_feature (728)..(739): n is a, c, g, or t
tcaaaacagaggatgtttattgtgaaaaatgtcaaagtatccacagaaacccctgcagacccctgccagcaatgtcgggccttggttagctgacctaaggcctgggacgctcctggtttgaggcccagggcaggaatagtggggctgctacagacgcagccagtcagctgggagcccacacagccctgcataccaccaccccagccacacttatctgcagaggggcctggccaaggcaagctgagtagtctctgagtatcccctcacccgaggccaccttcctttcccctctgcccacagccccttgcctcccttcacactctccttcctcctgtcctcttctctcgccaccaccaaccccacaaacctctccctcccgaatcctccaaactcctccccaggctgaaagccagttctcagcctccctgcctggagcttgcaagcctgagactgctcaggtccgacatggatatttgcagccccccacccccgccagcccacgcagtcagtgagcacagcaggacacttcctgtgccttgctgtctgccggacctggacctctgtcaggaaatgcccagcctgggactgacgagtagacctgccacccaagcaggcctgtcagggtagggatgtcacttgtgtgagtgcttgtccctggcttaaattctctccaatgtgttaaagattagggagttagggaaagagaggtagtggagagactgtgcttnnnnnnnnnnnngtcatctaaaaagaatgaaagatatctgtgccactatagca

SEQ ID NO: 334170 - DNA, 680 bp, Homo Sapiens
caagctattttaaattattaagttcctaaataataggatttggacagcagccataagagaggtgaatgggatgggaatttaagatactattttaatatcacaaagaggttacacaactaaggatgaaagttagaagctatgaattggtccacatactctgcatgtgctgtctgctagaggctgcaaggcgagctgcttcactgtttcatgttccaatctccaccacccagactcctgctccaataacatctctagatctattcacttgtaacaaatggagcccagttctcctccctccccaaggaggccagacactcgatacaatgaaaagaacacaggattcagacccaaacaaatttgtgtccacattctgattctgccatttactctccatgccatgtgcccctgggtgcgtttcttaaccactctgaacttcggttcttaatgcttaaaaatggggagcagtatttgttttatagaatctttgggagtattacacaaaattctaaagacagtgtctggagcctagaaaacgctcactaaattctgattatgactgtttcaaggtgtgactaatcaggatgccaggaaccctacgatggaggcacttcagtttctgggccttgctgaaacattcttgaaaagaggaaacaataaccgtagcctgagatattcgttcc

SEQ ID NO: 334171 - DNA, 714 bp, Homo Sapiens
  misc_feature (87)..(87): n is a, c, g, or t
  misc_feature (270)..(270): n is a, c, g, or t
  misc_feature (400)..(400): n is a, c, g, or t
ccactgagccttcctccccacatgcattagtatagtgctttttactcaggtgacatttcctgaacctgggccgagtgaacagtgctntaggccaggcctctaaaacagcaaactcagaaggtgccctatagatttagggctctctaaatgtgatttgaacgaaatcccaaaattttcttaaaatctgggattttattagaacttctatttttatcatataacatcatgtctctgtgtgcttttgaagaaaacaactcaggaataacaagnctggccaccataactggcctttatggagctcttaatgtgcacacacagtggtgctggtgagagagctgccgtgactgaggggtttgggtctcagtctccccacatgggagcctgggacagagcaggatcntgtgtgagggaggcagggtgaccgaccatgcacacgtgagcgtggttagtggctgagcctgggttttcctagcagcctgcctctctagaagagctgcatattagaatgtcctgagcaattgacttgtgagggcagatctcaaaacccctccattgttgccttgtcacccataagaagttgtatgggaaaaggtcacaggttaagaaggaaggaaagatggcagatggtaggaggtaggaccagaagtggtgcgaggcctggatgcgtgccaaggcgggcctgccaccaggagtgtggggtgggggactccacta

SEQ ID NO: 334172 - DNA, 599 bp, Homo Sapiens
  misc_feature (149)..(159): n is a, c, g, or t
  misc_feature (385)..(385): n is a, c, g, or t
agcatacaaatgaaagtaaattaccgagtcttagctgttcctatcctagcaggatttatatttgacagcagaacacgagctacagacttgcaaaacctgaagagcctcatcaaacatctaaattgggatggctttactgtgcctatttnnnnnnnnnnntgagagacttgggcaatatgataactactttgaattgtattaagagagtctccaaaacagaagcactgtagatttattctacttcttcattctcttttcctttcccttactttttaggttactcagagagggcaatgctttactatgaactggaagacgggctgtacaccactggtccatatttctttgccaaggtgactgggcagggttgagagcaagtgccccnccccaccaccagggtgggggtaagtgtggagaaaacgttgctacaaggaaggcttttctgaaccatggggccgtgggtcatgtgaagtcaccgatgccaccagatgccacattttctaggggagtttcagagacttgaacttttattttaaacatttaccaaaacaccaggactgtggaccaggaatgatagttttctggccagaaggaatcta

SEQ ID NO: 334173 - DNA, 866 bp, Homo Sapiens
  misc_feature (16)..(16): n is a, c, g, or t
  misc_feature (741)..(763): n is a, c, g, or t
tacccaacaggatttnttcccctaatctggccatgtgagcacaacctggctgttctgcaactgagcgctattaacatctatttatagccactattttcatagatgaatcacatttaccataagtcagttaatattaaaggggccaaccagctctgctgagaaccccataatcttaatacatctctttccattctttcagggaactaaatcttagcttaaaggttctgtgtaaagatagggggaaatgcaagtgcaaattgtaaagatagcagacagtctgccctctaaactcagcaaagtatggggtgttaaatatattcaaatttaaagccttggatcactcccagctttgttccttggccatgagtgtcgtacagttagcacagactcactccgtgttatgcagtcttcttgccatcaaaacaaacaatttatgtctaaaatttcccactacaccaagtttaaatgactgccttaataaaatgttacatgcttaaaaacagaactaatgatggttaatggtgctgtcaaattaaaaaatagtgtagtgcatactcagttcatttcatgcatgtgagggtgtctgtgagagggctgggggtgagggatagcagatcagggtatttatgatcgaaagtttacaaaattcagtgaaattaaatggagatttccagtaagttacgtggatctaacatttcttccccacccagcacgagtgtgcatgcacgcgcgcgcgcgcgnnnnnnnnnnnnnnnnnnnnnnnttcctgagccttttgcaggcaccagtgctgccctgaaattgatattaatttatttgtctttgctatctcttatgagagtctccaccttaattcacctttacca

SEQ ID NO: 334174 - DNA, 755 bp, Homo Sapiens
ttagagtttgacacaatattattctgcccatatgaaattctggtagccagggtgccaggtgtattcataatccagatgctgtcaattttaagcctgaagccccaagaggcgagcagtgtttaatacatcatctcttgttaaatagcagccacacagttggcggtacagtggaagcattccctgccatgtaggacacgccagttgtctataaataggaccctgccaggctttagtttgacccaaaactcattctcaggtctcctcaactctatcgttagagtccggtgtgctgtataccagcgatggacgacatcataaggaacggtattgatgacagcccggtcatagttgttgtacctgatcaaatacagctctttattccatgggtagatatttaagactggcccaatcccaatcatgtggttgtgacattctccaacatcttcaatatattcatgcttcaatggcactttactgaggagttcaaattcctcaggtgccttttgaagtacctgttctgctgcatagaatccatctactagcagtgtcctgccaccagttccttcatgtttaagacaatgaaacacttgaatgccacagggctcttgaaaataggtagtgtcagtgtgccgatccagagctagcttggtgtacgcagtgtcacctctggagaagtctgaagtgaaataccacatcctcccataaatggtttctctgattaagctgatcctttctgccaacttctctgtgtgctc

SEQ ID NO: 334175 - DNA, 664 bp, Homo Sapiens
  misc_feature (196)..(373): n is a, c, g, or t
atcactattgattttccattaaagtttttattaattttatgtattgtaactgactggtcttttctatttctttaagcatgtttacacttaaatgtagcttccctccctttgatagcttaatactttttctgtattcgtttacatttaactcttataattcacataagaaaaagtgcatgggccgggctcagtcatnnnnnnnnnnnnnnnnnnnnnnnnnnnnnnnnnnnnnnnnnnnnnnnnnnnnnnnnnnnnnnnnnnnnnnnnnnnnnnnnnnnnnnnnnnnnnnnnnnnnnnnnnnnnnnnnnnnnnnnnnnnnnnnnnnnnnnnnnnnnnnnnnnnnnnnnnnnnnnnnnnnnnnnnnnnnnnnnnntgacacaatgagactctgcctcccccaccaaaaaaagaaagaaaatgtgcatggatagaaatgagaagaatgtgcagacacactaggaaaaaaccaagagggagagaatgagggaaaaaaaccctttcttggccacatatattactgagcaaacatgctgtatgaaccattacattatcttaccacaagcggaaatgactacagtagttttgcaaaactgttagcttacgttaaccacaggagggcagtgtttatcaaacaaacctcattccactgaactgctcatggaaa

SEQ ID NO: 334176 - DNA, 722 bp, Homo Sapiens
  misc_feature (179)..(179): n is a, c, g, or t
acgacaaattaatacatttcatatccttttaaaactctcctttgatgttcttcctggttctttccattttgccagcagttccaaccacagtggcttgtaatgtgaggtcacatcacaggaggcaatggagacaccaagcatctacccttcaataatctcccagtgaaagcttctgtgtnccatccaatgtgtctgggtatttgcaaaactgtacttggtttattgttttccttatttcctctcctacttccctatcggcaagcagcacttcccacacaaatgtagcagcaaatcatccttcttttttgtttaaattgcaggtgggtgtcattccaagcactctgaactgtcctgtggaattcagaaagttcagctctgctctgtgtttgacaagctccatttttcatgcgatggcagaagacatggagacctgaggatatgttcatggtggcttgctcccagtgcatcacaatctggatgaggcctccggcagaacatcttctctttgctgcttcagtcacagtagagcatttcattggccggaaatttcattgactggaggacgtgggcaactataatgagcagagcccccagttcccgctgctcagtgataacatgaataagaagctcttcccgcttttcacttcatgtccttaacatattggcttttcatcctcatgtttcttgccccatggacaatggatgtatgcttcactcatgtg

SEQ ID NO: 334177 - DNA, 204 bp, Homo Sapiens
aagttcagagtctgttaatctgtattaatctagtttacactccctacaggccaggtagacacaagtttctcagcacagcaaagatcatgtctgtggttaaactcagaaaggtctgagggagtaaagctctgagtgaggttttgccaaacaacagaaggctaaatctggcttctttgtacttagggctactgatcgctgttggag

SEQ ID NO: 334178 - DNA, 431 bp, Homo Sapiens
gagctgagccctccctcagaaacagacccagagtgtccttttctaggcacatgtcccggatggccctggctgtttttccagtctccttccgggagtggacaaacaccagcacctgattttttccagcatgttccatgattttttcatagacgatttcattcatgatctggaaacgcttgatagcttttttctctgtgatacccacatatgtctgttccagaggcactggacggaagctgttgtcaaagtaaaatgaggaccttggcagggtcaacacgtagaaaggtggctacatcttcatagttgggtagggtggcactgagaccaatgagtcggacatcctcttgggtcatctcaatgtttcggatgccctggccactaaagcttctaagacaggacctctggaacagacatatgtgggtatcacagag

SEQ ID NO: 334179 - DNA, 761 bp, Homo Sapiens
tcacaagctagcttcttcctcctctgcgtattacttacagcaaccatttgcaaatgtaaaacaacctgtcataaatcaatgagattagataatctatataactacaatgtgcaaagctaggcattcatatttatggtcaggaaagaacaagaataaaaatgcttctatgaagaaatttgcccatgttatagtagtaaaaaagatttttttgttaatcactgaaccaaattatgagttatctgatataagctatctgaacagtagtggagacccctctcaaggcagaaaaagagaggaggaaataccccggctcttcccctctttccgccctcctgtcttccacgtgtgcttccccatttgccaaaccgagccaaaagcctgctggcaaaggagcctgagaaatgttatttgccaggatcggcctcctacagtagagaacagagcaggccagaaggtaggatgtcccaactccagatctatgacattaattactgaacagtacagacataattacatatacagtacaggttcatttataaaaacgctctcatactttgacaaggcaccgtagtcaaataacatacatatgtatatttatatacatgagatcaactgaataaacaaggtttcaatactaaatttgtactgtcatgaaaggcaaactactaatcaaaatgagtagttaataattaagaacaataaaacatctgaaattgccatggaaaatcagaaataatatcacccaatacacattcataaag

SEQ ID NO: 334180 - DNA, 391 bp, Homo Sapiens
taagtgacatagtttgacgtcattatcctccctggttggtctcttctgaatattgttttccagtcaacatccttgttaaatgtggcattacaaaactgagccgcagataacatgtggttttctgaaggcacacaacctcacgatgcagtgctgggagcagtcatctgatgcctgtccccgtgcgccatccattgaactttcataatgattggcactttttaggaactatgaaaaacaaacatctttgcttaatatccaattcctgacttctgtgaggcttaaatgacaagtgcctcgtccagtgactggttgtatatctaagagtgttgctactgatattgcaacacaatgctttggcatgggagatgctctgtgaatcacttcagagtcg

SEQ ID NO: 334181 - DNA, 500 bp, Homo Sapiens
  misc_feature (218)..(218): n is a, c, g, or t
ggcatgttatttatctctctaaatctcagtcccttcatctataaaaagggggaaatacatgacttgcagagttgtaaggataaaataatataacacaatgtatgtaaaacacctgctacatggtaagcactttgtaaatgatggcaattatgatccttataagtaagaaaagtacggtcatgacaaaatgcaaaatgcagtttgtggtaagttgacanttgttttgtgacaaagcaatcctgtgacaccaaattctcagaaagaatggcaggatacagacagcagaacatttgatttgaagcttcggcacacgggtgcagttcattctgggaaatggtttatggtttagatcaaatctctgccccaggtaatgtgctcaccattgccccgggaagactaggtcttggggataatgcggggcaggtgggacctcctcagccagaggaagagcagtgatgagcctcctgtggacaggagccccaggtgttatgaatgggtca

SEQ ID NO: 334182 - DNA, 742 bp, Homo Sapiens
tgaggagccaaaaaatatattttaaaaaattaatgttaaaagatggtgtaaaaaggctcatactttgaaataaactaaaatgttccctgcaagagtaactatgtcaggataaaaacaaacacatttttttcttttatagaaactcttttttcactggttgcaatacttttgctgaagggacctttgacttctcaatggaaagaagcaatgtgaaatggaagctgggtggggagctcagccatgtggctcaggaaaagacttgctgtttacccctttcaaaccaggatagaggaagtttcttcatcactttcagaaaaggatactgatttcgttatctctctgtttcagaatatctcgtagctttctatattcttcttcttttaatggttcttgacaatcttggtctttgctttcagaggagactgtattgttttcaaggatcttcttgtcattcaatagtttctttaaatgatgaaaacagtgatgaactttacgcatatccgcgccaacctctaatctactgtctgaatcctggtcttccaaaaaggatgttattagtttttccagctgaaggagctctgcttctgtgagtgcctctgtcctctgctccccagtgaccatggccagttcatccttcagttcctggatttccttttgtaggcgtttaatcactaatctggggttaatttcttcattaagaacagcttcattctttatgagtgccactcgctgtgcaaatctg

SEQ ID NO: 334183 - DNA, 581 bp, Homo Sapiens
taccaggaaggatgatctttattaaacatgatgtgctttcaaggaacagtccagtattcatgtgcagaaaggaggcatagcggacacacaggattgctggacagctagagagagggctcagtggtacttgtgggacagcgcagtggccaccccagccaccagcttctgccaggcatcctgcatctcagctgtgaattcattgccgaagtgactagccaaaaccatcaccagcacattacccaagagtttgaagttctcaggatccacatgtagcttgtcacagtgcagttcactgagcttggccaaggcagacttgaggttgtctagattcttaatggactctccaaaagcagtcagcaccttcttgccatgggttttgacgcttgggttgcccattatggcagaagcagaggacaagttcccaaagctgtcaaaaaatctatgggtccatgggtacacaacaagaagccttcccaaggcttcaccaccaacctcttcaacattgaccttactccacaggccattgatgagggtcttttcctcagcagtaaagttcaccatgatggcaagtctgggaggtt

SEQ ID NO: 334184 - DNA, 834 bp, Homo Sapiens
tttttttgaatggttgtatcagaacaaagaaagctgattatatgtcttcctgtagggaaaagagatcaaactactcaatgtgatggtttatgtatataaatatacttgtgtatataaataccagtttcttcttattgtttagctggatctatgtgtgtcacacttttacacttttgcataaaccagcaagtttgctacagctaacaaagccaaaagcattgctacagatgttctttttgttaattggaaaataaacttaatgaaaaaaattaagttattctactcagcttatctatgctgggcagctggtttaactcagtccttcatcatgcatctcaaatgctccatccaggacagcagaacagcctaggcacgtcctcaagataatgcgagggacacacacttgcaaatagaaacctacccataaatcacctccaaaagcctaggcttagaacgggtatattatttacttctacttcagtccttgaccaagcgcacatagagctaaggggtaaagctggtcactctgcacatggtgaaaagacattgtccaaaaatgtggacatagacaataaaaagaaggaagggattggatctatgggtgcattgactggtgcttttgtaactccttctagcaatgttaacttattttaaaatacaggttaggaaagagaaaacatttctgagaactttggtctttaaactgtcaaatgtatgggtctagatacctacattagggcaataactacaatggaagtctaatagtttatggtagagacattagtttttcccttttaattgctgtaagcctttctggttataattcttattttt

SEQ ID NO: 334185 - DNA, 445 bp, Homo Sapiens
  misc_feature (349)..(350): n is a, c, g, or t
  misc_feature (432)..(432): n is a, c, g, or t
attatggagagcagaggcccactggctaccctcgcgcctgctgctgttgctgctgttgctactactgcgtcacacccgccagggatgggccctgagacctgttctccccacccagagtgcccacgaccctccggctgtccacctcagcaatggcccaggacaagagcctatcgctgtcatgacctttgacctcaccaagatcacaaaaacctcctcctcctttgaggttcgaacctggggacccagagggagttgattttttatgggggataccaacccttaaggatgactggtttatgctggggacttcgagacggcaggccttgagatccaattgcacaatcactgnncccagcttacggtgggtgctggaccacggctggatgatgggagatggcaccaggtggaagtcaagatggagggggactctgngctgctggaggtg

SEQ ID NO: 334186 - DNA, 454 bp, Homo Sapiens
gtttatagatgcacatatgcttgagactggaaccaccacgtgcatcaaattgtcattaacgattatctgggaagtgggctcaatgggaatggtctcctgacacactttccattttctgcgcttgtctattgcttgggccttttatagtgagcatacttgcatctttgtgtttgacagaaaataactgagtcctgtccatttggaagaagcacgtgatctctgtgtgcttggacaatgtgccgtctctcccgggctctccaaagcctcagaggacgccaggcttggggagacagggcctttcacagggaaaccccgaagtcttccttggctccaggaagcacggacctgctgttcacagggcaggaagcaggcacgacaggctgccgcgccagaggcaaggagcagggtgcacaggggcttgccaccaagaagcagcagtagcccgagaataccg

SEQ ID NO: 334187 - DNA, 644 bp, Homo Sapiens
  misc_feature (63)..(73): n is a, c, g, or t
ccaagtctgagtttatttgcagctggggcacctcccaatattcttgttgtgcttgggttgcannnnnnnnnnnttctagaattcagatattcaaggagtacaaggaaattgaagacaatttaggaaatggaagaaaatgaaaatcaattgggttctgtcattcaggattaactactgtcaacattttggaatacttcctcagttttacagttgcacttacatagtaaatgtgtaactgtaatatacaccacataatatttgcaagtttagtgttaaatttttttcctgatttttaaatctaacatgagcttttttcctctaatgatcagtgaagaaagtgctggggcaattgactagtgtctggggcaaggagttggctccctggaaaatacagtgtctccagccttagggctcttttatagattctatcagattttctgagagtgaaaaggaagaggtacaactgcttttattctcagaaaacaaggaaatggtttgatccttttgagtcttgctttgaagatgtgctgtgtgggaccagagcagctcttaactgtaggcttgtttccctctatggaggcaacaaacaccattctgggcaccctggccagtgctgcctaggtgaacatgagcttctctatcct

SEQ ID NO: 334188 - DNA, 494 bp, Homo Sapiens
  misc_feature (82)..(82): n is a, c, g, or t
  misc_feature (91)..(91): n is a, c, g, or t
  misc_feature (143)..(143): n is a, c, g, or t
tcagtcccttgcaaaaatctgggagaaccacaccagggctttttcatccctgaggaaggctctaggggtgggttctgaaatngacaaggantcattaatgttccctgtccccagaattttcccaaggtgtaatgcactccccnacttccctagggtactagcattgttgctctccttccaccaggacaaaattgtatgtttcctatttcgggagctattttcacctgtttaccaatgataccctactcatacccagcccttctgtaagcaagggccagatgcaagagggacaaggcaattttaggtcgcttacaccagattgattatgtcctccattttgaccaatgcgggccccacagtcatggtaacatctcatgggttatcacgtggctttaatggaagggccaggggagaatttcccagagcagtggagtggacggcaagaatgtacgtcaacttgtttgggttaaatttctcactctccagtgggtcaa

SEQ ID NO: 334189 - DNA, 926 bp, Homo Sapiens
gcagctggccaataacccgcccaaggtgtttgcgccatagggtccacccgccgcgggacgaggacgttccaacaatctagaacccccaatcccacaaggagcgacagcgattctataaagagggtcgcctaggccaaacttgccgctatcactcgcgcactaatgccagcagcgcctagatgtgctattcgccccaagaagccgtagactagcgattaaagacacgggaggagcagcttatatcttgtcctaacaaatctgtttgtaactatccgcagtatcgtgccatgttgctaaagcctcaaacagtgctaagctgaactgtaagaaaacagaaactctgccgctgtattgtctatacccgggccagggtcctccccgaaggtctgtgccggaataggaaaggttttcttctgtggaaatcgaatcgtctcttcattgatattaatagcacactagagatgttggccatgatgctcagagaggcggtcgggagggaaggaaatctgatcttgctgggggaaaaatgacagcctcttggccccacggtggaggagacatcatcccaggctcagtgtgtataatggcatcctggcttaacctgtttgctctaggaattttaatcttgagctgtttgttttactatctggggtcttgctattttttgttcccgtactgtctttagaaagcaccatattcaggggctaatccagtctttttttaaagtgaatttttaaaaacagactcagagaaattcatgtagtgtacacttagatcattctggggtatgatgggggtattctgctttctttttgagggtagagtgttatttcaaaaataagttgccacaattaacaagggtgaaccatccaaggaagatatgtcctgtgtgaagatatttcagggtattgaagctcatggtgctt

SEQ ID NO: 334190 - DNA, 722 bp, Homo Sapiens
aaaatcagacacttaattttattttaaaagacattaaaagtatgtatttggagggaaaccccaccccatccacattttactcccactctaaaatatagagaaggaagactttttcgaacatccagctcttgagtgagcaagcaaagaaccaaatataaacacgaacacaccggcgaagtctacaacaggctgccgctttggtggcgtggaatgggctttgcgccagggtttgtatgtcaagtgtcaaacatgccactgacgtgaagcccaaaatatgggctcaagtcatggctggtttcagagtgacatgaagagaagtgcagtgcattttacaaagcaggtgacagacccaggcttcacccagccacaggctttagctctgcagccctttcagcagccgcagcctcaaggctcccaccccatcgaatgtacttggggtgtgaccacacagtgacggatcagcagaagcacatgcagggctgggggcacactccaggaccaggctgcaaagccagcggccatgattccccaggcccgcccagcccagcccagcccgtgggtgccactgtccagtgggatccacccagcagtggccacccaaggccgtggcgccctctcgtgtcctcctgcccagctgcagggagctgggagcttgccctccccgggccaatgcgtggaaccgcttccctgttatggacatggaaactggagttgtatttatt

SEQ ID NO: 334191 - DNA, 935 bp, Homo Sapiens
gtaacgagatctgttaacgagacaagtggatttcttattttttgggagaataacatttcaagtcattgggattcaaagagtgttccataccatcaaattgactgcaacgtttatatgtacaaataattcttagctcatgactgtacaaaaattgggagctcagttatagtttggtgattgctgtggtactcctgtgattggggtggagcccaggaatctgcattttacatgcctctcacgtgattctggtaatgggccatggacccaatggactatccaatcctcggaatctctgtccaccaaaggggcctgtggttttgcagtgcgagaacccggctgtgccacctaccagttgctcaacctctccaaaaatcagatgattcatcctcacaacaggggtggcattgcactgcttggcctacccttaaagagttgctgggatgattaagtgagatgatccatgaggtgctatgagcatactatgtcccagatactaaagacatgccagttatgttgagtttttttggctgcagatgcagactgcctgagcagctcctgcttgtcttctccttactcaaaatgtgtcccccagcaccttaaaggccagatccacttcagacctaacccactgtgatgtgctaaagcaaactcagtgcaaggcttcataaaatgataatccacagcccctggtcctgaacctcctggccctctaatatctccaaccaggatgctatccactcttcatttcagcgtcttcaataatagaaaactcattctctttctacggtggcaccactccaaagctggagaagaaaaagctcttccttacagtatcttaagaaaaaaagggtgtttcaaaggaggcagtagagtgtagaggttgagtatgcagactggctgagtttgaatcctggttctgccactcactggtcaca

SEQ ID NO: 334192 - DNA, 770 bp, Homo Sapiens
agcacaatgttagttttgtccacccagatattcacagatgtaccgttatgcctgccaccacagtagtgctcaacacattaaagattaataaataaagcaagggaaagacaggaaagggcagaagacaaggaaagatcacttcttactcagtcatggctgccgcccaggtctaagccaccctcacttctcacctaaaggatcacagcgaccttccaggcagtctcccaggcaccaagtgcctggctccctacatgcaacgcagcccgatgatcatctcaagtgtgactctgctggaaagcctgctctccctttcccacagagtaaaggtaaagtcctcacgccagcctgcagggccccatgtgaccttggttgctcatttcctctctaacctcatctcacatttgtccccacagctcactctgctccagccatccagccctccttgctgtcctttgagcaggctgaagacgcccagcctcaggagctctgccctggccagtccctctgactgctaggctcctccgccgggcatcctcacagccaactctcaccaactccagatcttcgcacaatagccatttcctctgttaggcctgtcctgtccaccataaggaaacttgcaactccctcagcccacagagcacctctcaccggctaacatactctgtggtcacgtgtttgctatctgcctccctaatgtctttgagaacattagctccctgagggcagaaatctccttcactgacatatcccgagccctatgcagtctc

SEQ ID NO: 334193 - DNA, 576 bp, Homo Sapiens
ggtgtgttcagtgatatatggtctttttattttcagcagagagcagtatgctttgggtcttcaaaatattgtttcattgctttacagaaaccaatcaataacacgcaggtaaagtttttggtaaggcacataaatcctagcatggggagaccagctgttgtgagattctggctgagtgccaatttccaactggggagtctcaaggaaatgatcctgaatctggggctttgtttggatttcaatggaacataatcgggcgacatctggtcccccaccttgtgctggcttggccacacttcatccaccatggctctgtgcacctcctgtggggcttcctgcaagcgccaggcacccgtgcgctgcccatcaccagatgccaatcagtttttcacagtgggggacaaaaagagaatttggggccttgaagatgcctgctgagaacatctcataaaaaagatcttaaaatgcaatttggttcccactgccccacaagttactggacaccagacaaaagaaaatgcaaaaataactttgagggaggaaaagtgagcaggagcgaataaggataagcactgg

SEQ ID NO: 334194 - DNA, 596 bp, Homo Sapiens
  misc_feature (451)..(451): n is a, c, g, or t
gcatttcaaaggttttttatttacaaggacatagaagcagatctgaacaccacccacagatttttggcccaaagcaaagtcagctcccacataagcgtagagcatcccagaaaattcccttagcccttttaaagctgcttgggcactacagtctcctgtgaaaacacccaccagtgtctccctacagattctacacacccctgctctggaaccagaggaagtgtgtgaggttctagcttcctgcaagggcctctcagccatgatccccatttactgagcacacctcagcatctggctagtctccggccaagtgcaaagaataagacctggtactgtcttcaggggaccagtcatttgtcaggatgcttattgttctgaagagccaggctcagcacctatagtacctattccaaagagttcatgcgaggattaaaagggacaatgcacttangcactgccaagcctggcagatggtagctgctccaaaatgttagccattatcattactgaggctaagaattctggaagctctcccataaaaattacttctgaaataaccttcatttcagaagcttttttcctaatctcccagaatt

SEQ ID NO: 334195 - DNA, 929 bp, Homo Sapiens
  misc_feature (558)..(558): n is a, c, g, or t
  misc_feature (630)..(630): n is a, c, g, or t
  misc_feature (738)..(738): n is a, c, g, or t
  misc_feature (780)..(780): n is a, c, g, or t
  misc_feature (874)..(874): n is a, c, g, or t
  misc_feature (879)..(879): n is a, c, g, or t
  misc_feature (910)..(910): n is a, c, g, or t
aacacatctactaaaatgtgcagaaagaagaataagtccttctgggtcgggggaggtagagagcacaagcatgaataagacatagatgctgccttcagtgaaatttgtggtctccgagggaagacagtggataatgcaggtaggagataaatgtccattatatgatgaaaatgaaaattgtccaactggatcttcagaaaaccgctgttaatattccattgtttttgagttagaagcacatgaaataattacccttcactatttaccagttacacaggcatacactgatttgttgaatttgcttgaaaagtagagccgaagatcctttgaaaatggaagaggttttcatgggggaagagatgagtgggggcgaatgagaaacatctccctttatatggcagatgcggcagtttcttgatgatggggagaagcagcttaacgtattaggcactagaccccagcgtccagtgaccaggggataatgctgacagggaacggagggcaggagtgaatatcgtgaacacaaactttgtctatttcaagagctttgccccttcntggactgacattaaatgcttatctgagcaggcaaatacagtgcacatgtttacattggggaggtagcggagnctagtagtttaggaccagggttcaagactcagctatttgtgtgactttggaggaagtaatttaatcgctttgtgccccccctcagttttctcataagtaaaaaatggnttaataggatttaattaggtgctatacagaaagagtttaggncaatgcctgacacatggcattcacccaataagtgtcaataattatgattcgttttggcagttattatgtcagtaataactattagctatgattntcctntaatttgttcctaaagtttcatgagactcgnattatattaaggaatcctg

SEQ ID NO: 334196 - DNA, 476 bp, Homo Sapiens
  misc_feature (365)..(365): n is a, c, g, or t
ccacgttatgtcagcaatgaagactttgaagtgaacccttgctataattttttagagatttaaaatttatggtagacatttaggacaacataagcaagtagagttctgcagttttttgaagtttacaaattgccccattctgaagaattattatttcccagttactcaggttatgaatgaattaggttttcaacatgggaagcatgaaatccacttctggatttggagcatccacttgaggagcagaggtggcagcagaggattctgagccaccaactgcagtagtggctcctttggctttgggcagcctggctgtggagtttccacggcgacacacagcctcagtggttcaagatttaaaattnaccttcctttttggctggaagacttagaagccgcctgatcatactttctcattttagagatgaggaaataaagcctacaagtgtgaaattaatttccttacagttttccta

SEQ ID NO: 334197 - DNA, 693 bp, Homo Sapiens
ccacatgttctaacatgctttctaattaccatacttcttattttttccccccttcatttttgccttccattaattttccttttgcaggtgtggcagtttgctagtcgcctcctgctagctattttcccctccttccttagtttgagaaccccagtttttagctggacatgatgcagtcctgctatacagtacatcccagccttcctgaaagccaggtattgtcatatgattaggccaatgagatacaaaggaggtttgatgtatgatatctgagaaatgtcctaaaaaggaaggggtaggtcagctgggtttaatattgccatggagctgctacgtcagcaatggattgactgcctacgtcagaaattcttttcagaaagatgtaagcctccatcttgcttaatacgctaatttgcagatttttcttacctgccagcaagcctttcctaactgacgtagtatgtttcaaagttatacattcaattttccgtttctgttagttgttccattaacttattaggatctctatttttatttttccccataaattacataaacttacaattgttcacctttctcatcctcaagaatagtagttctggacattctcatctctctctgctctatactaattcctcacctatgttggaattaccccagaatttatctctggaatattatagatactagttg

SEQ ID NO: 334198 - DNA, 795 bp, Homo Sapiens
aatatatacaaatttatttttattctgaaaactatttcattttaagtttaacatcaggacacagagaagtgtattgcacatattctagttgagttacttataccctggggttacggccctcacagagctcatactgggaggcacacaggcaggagactttcagcaaactcctgtgtgagagctgtgctggggcgagtacggtgctcctcagaagtccattcttcaagaggcatctgactcagatttgtgatcagagctatgagtatttctctgtgttacacagcaatagtttactaagaggaaaaaaagtgctaagaggatggatcctgtacagcgagaggctgaagatgagaaggcagggcgattccatataccatggtcctgaatcagagggatggaatcccctggtgaataagaggaagactgcctattataactgaacaggaatgagaaaatgagaggacacaactttaaagcagtgtctgaaatgtgcaattgtattttgagacccagttaattcactggtactactcctcgtgaatatgatccatttgggaacattacttgggagttctaaaatctgagtagggaccaaattagaagtcaccattgtgtaaaaggcccaaagggctgtgctgagggggagaatagtgcatactttagaactagggtatgttgaagatgattttggcctcgattgtcatcaactccgtcatcccagagttttttgtgtcaccaaggcacaccaatttttgtcccctcctgctgttttcccagtcattcctgttggctttt

SEQ ID NO: 334199 - DNA, 489 bp, Homo Sapiens
actctcagtgtgctaaactcctcacaccagggaaggtccaaaggtcatccacaccttcctgatttagagagcatttctgaacactgtgattcagaagggtgtccggaggcatctcagaggcagtaagtattttaattattagtagaaatgtgcagagtgcggaacaccagaaccaacagtctttctatgagaaagaccagttctagtctccacatgctcatgtctcacaaaggaagctgggactcccaccacctgaggagaccactcttcacactgttcttccagtaatctcggtacacacacccaagtgtgcacacccttttgcatatatgagcaaatgcttctcactgattgttttccactgaacagtatagagtgaatttccttctgtaatttctttaaccaagtccctattgttggcactggttaatgtcagtccaagttttcagtattataataagcaacttaaagtggaccacgcatttcact

SEQ ID NO: 334200 - DNA, 733 bp, Homo Sapiens
gcagagagctccggtggtattttttccaccaggacctcagctacacatgcagagcagcagccagggcactccaacacatctgacacacatgagcgaggccaggacagtatctgctacagcttcataagatgccgttgctcctttccagattcaaccggagcaagtgaaattttatatatctggaaggaatctggcccagttgccaggtgctcagagggtcctcgataattaaatttctcatattatcttgtatgttgttcaaacagagggttgagtccacagggttctttggaagggttctggatcactcacctaatcatatggaaaagctgagcatctgaaacccatcccaataaactttattcatcagggaagaagggagggagagaaatgagactaaaatgagcttgcagcacacgcagcatggatcatgaggtcggcctgttctctgacgcgcttccattgttgttgtttgtctgttgtcttagaatcagatagaccctgttacaagattatagatccccttatctgctctagagataacaactagaaccttatgaaatgttgttttcctttgagatattctttcacgtcctacatgccactaaaaccacccacatcaggccggtctgaaggaccccacaagaaggctgactcaccaaagcacacaggctccacatcctgataatttcatcctcctcaccctgaccaatcaatgaccccaattttccag

SEQ ID NO: 334201 - DNA, 747 bp, Homo Sapiens
aggctaaggtggggtggatcacctgcctggcctgtattgtccattttcttagtaagagtttccctacttcctatgttctaactcttaggtcaccactgggcctgtcttcatcaagatgtttttgaacaaaatgcaagtatgtctcagtctaggaagaatcaccacttaaatacacactatgaattattaatttcttcattctccatctgtcctgggagatgtgaaagagaattgccctggtgacagggagggggaccactccctgcgaagcgcccagctgtctctgagagaatatgcaatgaaccattcctcccgaggccgagatatgagatgcactgcagctcccagcacaagctttgattagggcagacatgcagaaaaataaaaccacagtgagataagaaatacatgtctatctacacttgactgggcctcagcctggttcagaagattgctgtcactgtttactaggggaccaacaggtaacactaccaagatataaacagcagaatcaaaaagtcagacaatgtcggctttgtgaaaggcaattacaattgtgaaagagattacaagtactatgtagaatacttttttgtttgaatctcaaagaaaatactatcctaagactctaataactgaaaacatgctaaagtggttggcgccaggagtaaaagataatctgataaagaatgtaaacatcttaagaaagcaatgtctggaagaccattaaagatatgtgggtgttgg

SEQ ID NO: 334202 - DNA, 545 bp, Homo Sapiens
taacgcttgccaacttttatttaacaagagtagcaacttaaaaataacattatttttactttgtgcaacatagtttaatatctgaaataactctgttccaataaaaatctattgaaatactctcaggcctaactctgccctgaaggtaaaagtgattaattgaaagattttggcagatctctgctcaccaccagggcagtttaatttagaacacattcaaccatttctcagtgtctctgtgttggtggagcataacttttgatctttggggaggtgcctccaattcagaccctttggcttgcacttcctggaaggttttgatggcttgcctctgctaagcattcaggtgagagagagctcttccctggccgctgcctctcaagtgagttcgtaaaagcaaattccaggcaccaagacaaaatattctacaaacccatttgagtatactaaccatcagcaaagtcctatttagatcacagacaaaatggttcttttcagcttattgctgactttcgaaacttctgagaaattatagtgtcactagc

SEQ ID NO: 334203 - DNA, 606 bp, Homo Sapiens
catgcacaaagctttcttctctctgtaaggagaaggttgttgtttgtttttattttctcctgccccatgcactgtcactgtttctccggtgtgccttttttcctctttaatctggtctctgacactgtctgtcctggaagccattcccaaaccttgaggatccttgtctgtctgctcatatttaaaagtgaggcataaaaagcagattggatgctctggtgcataggtgggtctatcaaatggtgaaggtccacacagtgaacctggagggggaccacctcacaggtcctttccccttgggctgaccatcctgggtggtgtgagtggctgtgggtagagaaagggcactggacttctaccactcaggatggagtctcttcctcagcctccctgttctaagaactgtgccctcaccctgggctctgcctggcagctctggttcagcatctccagagccatgctctgtcacgggagggatggcagctgcctggcctcgcagagttagggaggatacagagggggaaaggaagggacatcccgtggagactctcagccagttctcctgacttcagccttatctgtactcccacattcagaggtatctgt

SEQ ID NO: 334204 - DNA, 606 bp, Homo Sapiens
  misc_feature (501)..(501): n is a, c, g, or t
  misc_feature (553)..(553): n is a, c, g, or t
  misc_feature (591)..(591): n is a, c, g, or t
aagattagtaactatgacttacatatgtgatccatgtaagtcacttagcacagtgctggcatgcatgctggctcaaaaatggcagctctcatcactatcaatacaaaaacataaagcaagacattctctgccctttcttcttgtttctggatgtataaatgaatatttctctatggaggaaaagtcatgaacatgaggttaactccacgacacaaagtccatggctgacttcccactccttagccagatgaaaggtcacagcttagaggaacgggtctttatgtgcttatgacttggtgttggaaggagttccctgaccatgggagagctcagctctgtgatgatttagcaaagcaattcagaatgaaatttgtcctggttatacactaaattaatgtacaaaataccacctacctttctagctaatgtgaattatgaggttgccttgaagaacagatatttcccaatagaattcacgggtccaacaaaacaatcaagatntggagtttctgtgtgttgctgattatacagaataggaacctagctcagcttnattgtggctctaaagtcataaatttattttatttttgnaatatcttaactaat

SEQ ID NO: 334205 - DNA, 587 bp, Homo Sapiens
tgcacatgtctgggttataaaaagggagaatggtgcatctcttaggggagacacttgccatctccccctcttcggcctttctatttctgcaaagaagagttgcctacctctccccaaagccagaaagttaaagagcaggaatgcgggttccctcacttttactactgcttcctgattagtgagaactgtcactgattgggccacagttctatcgggtggggctagggcttggccttctacatttgtgtctcgtggcctctggatctttggttcttgctggcaacagtgagtgcgtatcttctaccaggcttcttggtcccagttacaattgagcaaataagcgaaccttccatccggtgcaggaagcccactgctttctacaccccctgaaaaggtttgggagtgtgagacatgcctgctgctggcggcggaacgttcctcagggtctcctagacaggatccccccaagcattgggtcccaagtcttcatgagggtgggagtaaatccccatctaaattgcattcccccatgcacatgaccaggcatttaggagatattttgcaattgcccagagagtatcccaagt

SEQ ID NO: 334206 - DNA, 631 bp, Homo Sapiens
  misc_feature (166)..(178): n is a, c, g, or t
cttttagatttaagacagggtcttgctatgttggtcttgaatcctcccacctcagcctcccaaagtgctaggatttcaggtgtgagccactgtgcctggcctctcccacttttaactacagtcttacaatcagttctcaaataactgcactcataattcattatcnnnnnnnnnnnnncattaataaacaggcaatcaaaaattagaactagatctgtaatattcatgcccatgaatcatttcattactaatagactatttatattgttttttatgctttttagcatacttttattatgtcattgattcctcacgaggaccaagtatagccattttcatccaaatcagtcttgaagaaaaattcaagaggaattctttaagattgagttgattcaaatggcaccatctctgcaaagttttccctggtgccccctccacagacagaaaagctctgccctgtgttcttataacagctatcgtctctgttatacacccattgcccattctaattacaggttcaaaagtctgtctcccagcagtgcgaggctagtaagcaaggactgggtatcttaaccgacttcgtatccctgctgcttagcaatgtgcctggcatattgaggcgctccatata

SEQ ID NO: 334207 - DNA, 579 bp, Homo Sapiens
aagagagagagaagtttttactcatgcatttgtctgaattctttcagttgcaagtaagaaaagaccacttcaagccagcttgagcacagagggaactgattggcacacatccatgaaatgtctagaggtgatccaccagcttcagacatagctggatccagggatggatctgatgcccttgtggctcagtctctctccgtctcagcaatggtctcctgtcttggctgtccattctgtggcatgatggatgctggagagccagacttcctttccctcttcccatcaggctcttcccccgactccccacccacaacctgccccagtgcagatcagggtctcaggatcttaaaggttcagctgggtcacacatgtccatccctgcacctgtcactgtgcccagggggatggaatgtgtggattggccaggcctgggtcacacggcccagggactggggtgaaggagtgagctcctagggtaagtgcagatgctgatcctggaacagagacagggctgcttgttgggggtgggggcagagtggggtggttcacaagcctcagtgcctccatttctggttcctg

SEQ ID NO: 334208 - DNA, 734 bp, Homo Sapiens
agcctcagcacctggaaccaggtggtgctgctacagggtcctccaggaactggaaaaacattcctatgtaaagcattagcccacaaattgactattaaactttcaagcaggtattggtatggccaattaattgaaataaatagccctaacctcttttctaaacggttttccgaaattgacaagctgataactaagacgttccagaagattcaggatttgattgattataaagatgctctggcattttcactgattgatgagatagaaagtctcacagccacccataatgaaagccatcgggtgccattggcatggtcaacgctgtcttgacccaaattaatcagattaaaaggcattttaatgtagtgattccagctacttccaacatcaccgtgaagattgacatggcctttgtggacaggtctgatatcaagcagtatatcagtctgcgctctgcagcagccatcttcaaaatttacgttttctgtttggaagaactggtcaagtgccaggtcatataccctcctcagcagctattaaccctccaaaagctggagatgattggcttcattgaaaacaatgtgtcaaaattgagcttccttttgagtgacatttcaaagaagatcgaggcctccatggccagttcctgaggaaactcctttttctggtgcatacactgtgtgtccaggctacaccaggctttctctctggtcgtggacaagcaggttgaagag

SEQ ID NO: 334209 - DNA, 465 bp, Homo Sapiens
  misc_feature (395)..(421): n is a, c, g, or t
gtatgagccaccgcacccagactctaagataaatttctaaagcacaattgcttggcccacattcagtctgaggaatggcaatccaacattctcaatccaagagagtctgaccagccattgggcacaagttcaaatcctccaggagtactggatgttttagattaggacatcagaaaggacaaagaaatgatctgttctcagaaggaatcaagatacccctgtaggacaccccaacatccccacccacaaaagctggtgattatacgaagccctgagacagtccagatttcatttctattgcccaggccagtagactcctgatccagtctatcattaccactctccaggatcagaagttaatcatgttgttaaactttccatgataatgttctggnnnnnnnnnnnnnnnnnnnnnnnnnnnaggtggagtctcgctctgtcacccaaggcgggagagggtctcaa

SEQ ID NO: 334210 - DNA, 490 bp, Homo Sapiens
tcccaaattcaattccataccaaaaatgcagagatttgccttcgctaagaacagccaaaataacatgtggttggttctagcagcaatctgaaaggcaaaggtcatcgatgacagcagcatttggtcaagtgacttaacctcttaaagtggctgactcataatggaacaactttgacttagaggtttacattctgaatttaaaaagaaaagaaaaggccactcactttatagacatacctgtactcattacacacaaaggaccaaactactatggataacgtaaaagaaacaaactatagtttgaggttttcagcagcaataacataaataaagcggggtagtaaaacagattatgacagtaaattgcagacaaggcggagaagcctatagctggtggtctagctctcctaactcacggtgagccacatcgatggagcattcaaggggccaaaacagtccctattccttgtgtacgagttcttcatgtcgg

SEQ ID NO: 334211 - DNA, 1143 bp, Homo Sapiens
  misc_feature (798)..(798): n is a, c, g, or t
  misc_feature (806)..(806): n is a, c, g, or t
  misc_feature (835)..(835): n is a, c, g, or t
  misc_feature (856)..(892): n is a, c, g, or t
  misc_feature (921)..(921): n is a, c, g, or t
  misc_feature (1114)..(1114): n is a, c, g, or t
actggccagggcaccctgtgctgcagggagaaagggctgatgtctgcattctgggattgtaggagctaagtgggaaacgtgaacaagaacacaaagacaggcatctgtggttcaaagcagacattaaagggctggaagagcagctgccgagcatcacctggagaaggctgaggacgctccctagtgatggagaagggacagcactgaaagtgtggctcagggtcacattctgacgtcatcctggtgcctcctgaaagcattagaaaaaggcttcattttaataaaagcaatattgagttttaaaacttccttccgaagtgtttctcttgtttcagaagacatggattttagtagagtttggggctttcttcagacctttgtgcacttttaattcagttagtctacttcatattacttttttcctcgttgagtttttatttatatttgaaagatttttaaaatgaccgctgcttttaaaaatacacctttgaaagccatgaattaagaatttatcgcgcttttgaagtattaaagaaaatggcaagaattactttttttagtttaacatataatggaatagtgttgttgacacatcaaagggatagatacctataaataaaatatgggcatgtttccttactgccaaaaacatatataacatttcaaagagattagaaattaaggaaattttatttttctccaaagaaaaagtggctaatttttatatcaccacttttcagggcatgctgaggctttgaacaagtcagatttgtttttcttctctgtcaagcactttcntcaatacnattactccaattgatccctttcacagccntaccagggagacacaggggannnnnnnnnnnnnnnnnnnnnnnnnnnnnnnnnnnnnccttgattcagcgacttaccaaggatatnagctagtaagctgcaaatcaagattagaaacccaggtgccctttttctgaattccattctgctgcttactgctctgaactactttatttcatgatgtctaaagaccttcacacgacatagactatacttgcacagactcttagttgcataaacccctgggtacttggtatattttaaaatgacttactattcnaagtatacagttctataatgctgtactct

SEQ ID NO: 334212 - DNA, 946 bp, Homo Sapiens
attctgaattcacgattctctttaacaaataattctgtcaagctcttcaatctttctgtgacaaatgactagaattctggagcctgcaccttcattttaggcagctattgcttcagaagtcacagtctgttccaccagcctttgccaaggatgcaggtgccacagcatctcaagagaagtcaccaatcacacagctccatgctgaggccctcttgcctgctactgaggagctcttgccacccccgattcctgcctttccccagtgatgcaggacaggtaagcccccaaattgggacttagcctgggaaggttcttggctttgcccgggaaataattcaagggtgagctggtggtggtaaacagcaactttgattgaagcagcagtgtatagcagcagcagaggtgctgctccttgcagagcagggctgccctataggcagtgtgcccagaatagcagctcagagacaggtctgcactcatatttatacccacttttaactatatgcgaattaaggggcagtttatgcagaaatttctaggaaaagggtggcaactcttaagtcatcaggttgttgctgtggaaaggggcggtaacttctgggtgttgccatggcaatggtaaactgacatgacatattggtgggtatgtcttatcgaaaatggcttccacccctgacctacctgttttagttagtcctcaatttggtcaggtgtctgagccctgcctcctacctttccaggacatgggcagtagcctggctgggcactttaaaaaggacagttgtatccaagcctttgatttttttctgtcaattttaacattttctgtctcagaaatatctatttcatctagattttcacatttttttcataaaattgttcatattttaatattttatctaggttgtctaaaacctgtttctcccttttaattctattctttctt

SEQ ID NO: 334213 - DNA, 652 bp, Homo Sapiens
aagtctgcactaaataacttacagtagcatggcatagtaagaaagaacgttgtttcaggaactgaagatataggttataatctaagctatgtcattaacgaagtgttattaagtaaataatttaagcatcttggtcatcatttattttcttataaaattaggagtttgtatcagatcatctgtaatttacttcccagttttaaaaacaaatctggtcttctgtcactcttgcaattcaaaaaccgtgtctctgaagcagatcatgtgcgtagcccagcctgtggtaggaaagtcagccctccctcaggatgaaaggtgcttgcagaacctccacccacacaccttccacacaggggtttctgatgcttttgcagaactgaaagaattggaatagagatacactgatttccacagaaattctaagggaatcactgtaaattgtctaaaaccactttaagtactgtgatctaacaaccacattttcaaagtcacgtttttttggactgctttggctgctatctgctatggctgacagaattctgaaacacacactagtgcttttaaagtgtgcacgggaatcaccagctcattactgcttaattctgttgcatcatttcttaaggagttgttactgagataggaaactggaaat

SEQ ID NO: 334214 - DNA, 668 bp, Homo Sapiens
  misc_feature (190)..(190): n is a, c, g, or t
  misc_feature (487)..(487): n is a, c, g, or t
tttaaatcaggaaatgaattttattgaaagcacattgagtaagttacagaatcacttgaaggctgtagaaacaaggcttgggaaaaaagcagaaacagagaccaggtacctagaattacaccaaattccatcacagagccagataggtgaggacagcctcagtgctgctgctgctgaacgcccagtgctngctgcgtttgtcacagccacagctggcgtttggatgctggatgccatgctgaccccagtggcaaggcgtctggacactggatactgctgccactgctgcaaccactgtaaagaattttttccatcctcacctccagcctcagaaatcctaagcaaatgcagctgattggtcaagctgccctagctgcctagggacatgcaaaagtgaatattgggcatggttaatgtctgtagtgggatccgtttcctgctgcccaccaggagaagataaattccccaagaaaactgacaaatgacngactacgtacatgttgtcaaagaatccactggaagtctttgacatttgcagattcaacacttgcaattttggtaatttattagttactcccaaaggcccattataaatgaatatgagttgaatgatttgctttgcctgttagtgagccaggcctactgtctgcctggatatctcacatgac

SEQ ID NO: 334215 - DNA, 669 bp, Homo Sapiens
ttttccctctctgttactccagtttatctcttttatgttggaggccctcctcagatgccttacccaaggctatctgtctatatctgagtgaggccctaaaaggctagccaagaagttctgtgtttggggtggggtggatggtagctaaatggcaagccaggctttttggagggactcccaaatgtctggatctggatggctgttccctagactgttcagtttttctggaaaggacttgtgccatctgctttctggggagctgctggtattctcagggtagggttgggagtggtttggcgctgagtcccttccactgtgcctgaccatggccctgcatctggatcctctcaggactcctgttcaggggcccagggggactggttttgcatagaggttgcctgcagtggtgggtgccgccaatagggtcaggctctgaacttcacctttggctcctggtgtctgcagcgcctgggtatacagggcttttgcaggctcagtcaacctgactccttacacacccacatctgcagcctttaggtatggcatcctctgcttccctaacccagggattggtcacacctatttgctgctttctagaaatgtatcagaatccctcatctgctgctggcttgccttccctctttctattattatgggcttatatttttg

SEQ ID NO: 334216 - DNA, 621 bp, Homo Sapiens
gggggtaaatcaacaactcaacaaaacattatcacactgagaggctcaataaatattttgagatcaattaaaagccatttggctgatcattgtattctgaaaataatcactcaggccgtaatattacattataaaggctttccgtttatgtttcatcagacagaattggaagactggtctcatccaagttttgttttaattggcaatgctgggtagtcattcaataattactcagattttcccacaaacataaattctggccattttgcagtgattctcacagtgtagtcccactggatcctgctggtggtctgcaaggatgaacttttattacaaaatgtgaatctataattactgcccttgtcttaccaacaattctcatcctcactccagtctccaaggctcagctcagacccactgcttggttaagcctttcctgacctcttcagcttaaaagatgtccccattctactcccaccagtatctgtactccttcggcagatcagggaccgtgtcttcctcctttacatgtttgcccagatttataactgtactatggaggacagtcaagacacactgttgttcctaaatgtacttttatttttttgtatgatcaattat

SEQ ID NO: 334217 - DNA, 815 bp, Homo Sapiens
taaggcatgaaccactgtgcctggccagctttaacttttgacattgaaaatcttcctaaaaaattagtttacttatacacgaagagtagtatacacattttcatgtatctttgttaactaggaattctaccatgccttacttattgcaatggcttacattcttactgttcgacagatttaagaaggtttagaagacaacaagaatgcactatagtttccaataaatacagtcacaaaaggatattactttgtggcaatatctgacaggcagagagtggctgacaaatctttatagaatgaatgatggtgggaccatacagaactacggaaaagaaaatgatgaggacagtgaatgagataaaggctatacttgtgcttttgctacagtgctgttgactaaagcagcgggagctcagagctgaggcacacagttcttgtccaataaaaggaaggaaaagctcttcaagagcagtcctttccttacaagggtggtaatgaataaaataggcgacatggccttcggtctgcagaagatgcagaaagacttcaatggtaagaccaagggcccgctattaagtcccgattcaaaaggcatccccccaggaagctcaggaaacgtcatccaggctaatgctctttggtgagaatcctgacataggaatggatgaggacatgtgccttagaatctttttcagaaaaaagcaatgatttctaacacatttttggttagctttcgatgaaaagatatttctaacatctaattgtatttgaatggaactatattaaaaacacttttcattagccttagaaagact

SEQ ID NO: 334218 - DNA, 736 bp, Homo Sapiens
  misc_feature (471)..(483): n is a, c, g, or t
ccattaaaattatattccactaaattattaaagttcaatttgatatacagttaggtcttttttctgttgatgttgacgtttaagatatctttccatccttgctgattaactttattttccatgtgcattctgtagagttccccctctgaacttccttgcactcaacttcccttcatctcactccctcctcaacccctctttctttttctgccagactgagtcctttaaacttctgagcttccttctacctctccctttctttgttcgctgtccttattgcatttccccataggagcctagttctgttctagggactagatctgtatcatggagtgagccatgcctccagctctcatttcatttggaagagatgcagggccacagccatcacagcagactggggggcactctgtaacagggaagcacaggactgctgggagaacagaggggacacttctcaccccatggttnnnnnnnnnnnnncttgcactccttagctggctctcacgctataggaagaagagatatttccttgagtttttcctttcatgaagcaccattaataatactgtcgccatagagtcgctgagaggattaaatgagatagtacacgttaattgcttagcacagtgcctggcacaggaaaggagtgttgcacaggttgggtattactatgttattagttcttcgaataagctttctaccccttgctcttgctcagctcccactgttttgg

SEQ ID NO: 334219 - DNA, 839 bp, Homo Sapiens
ctggaagattaatcaactaactatttgttaaaagttagttttgctttgttttccttttggggaatcacaggagagtaatgaacacttctgcatttctgttcttgtctggcctgttactcgtctattccaaagaactaatcattggactttaagccatcactgacaactctatgttttctcacgatctgattttcatggttcatatattaattacccttttcttaaaaaatatccaaggtggattttaaaacattctcataaagatatgttttcactgtacaaggcttaaggtttatagttgtgtttatttattatatctcagtaatacgtaataagagagttcttatgagtggaatgtctacattggctcgattgctttaacattgacttaaataatttgatctctgatggacgaaggtatcagaactacatgtgtgattaaataataactttttagattttttaaaaagcttaaatgggtaattttgattctatgccatcactctcaacaaatagttttgagcccactgctataggtgactgctatgatggcggaaagtacaggatacacaggagtttaagggaagaaatgcccgaggagagcaggaaaatgcctcctccaaactggaagtaacacataggggcaatgccaggtgagtgggggatgcatgggcaggcaaagatggaagaatagtacactggataatgtgtttggttccagcatatgtacaggtgggagatgtgaggcccaaaagctgtagttagaatccaattgtgaaaggctttttatgtaatattcaaaggtttagatcatacattgtagatcagtgattctcttt

SEQ ID NO: 334220 - DNA, 885 bp, Homo Sapiens
  misc_feature (261)..(261): n is a, c, g, or t
  misc_feature (527)..(527): n is a, c, g, or t
  misc_feature (570)..(570): n is a, c, g, or t
  misc_feature (623)..(623): n is a, c, g, or t
gaagaattttctctttattgagtgctcagtgtggtctgatgtctctgttcttatttctctggaattctttgtgaatactgtggtgatttgtagtgaagaaggaatattgcttcccccattcaggacttgataacaaggtaagcaagccaggccaaggccagcgaggacccaggtgatagtggtggagtggagcaggtgccttgcaggaggcccagtgaggaggtgcaaggagctgacagagggcgcactgactgctgctantgtggctggggccttggctaagtgtccccctttccacaggctcgctccagagccagggcgtggcttgagagagcagagtggtcaggtagccctgcctgggtgctggagacaggcacagaacaacaagccaggtatttcacagctggtgcgtacccagaaagacttctgcttttgccccaaacccctcccatctccatcccagtcttgcatcagttatttgcactcaacttgctaagtcctatttttttcgtaacaatgggtatacnatttcatcccaattgacctttaaaggatttgcaggcaggcccntgtctcctgagaactacgccgttgcccgtcatcatctctccgacagcagggcnagggggtccagagatgtgccggggaccagagggagggagcagacacccacccggcctgggcaggtcctcctcattgcttgcatccccctggttagcagtggcagtcagtcttgccgagtcattcatgaggcgctcacccaactccaggcagatgaaaaggtgacctgaattccagaatatgtcctgtgctctctgccctttcccacgcctttggtgaagaccggtgttctgaggaaacagacactgtgtagaaaggctcagg

SEQ ID NO: 334221 - DNA, 693 bp, Homo Sapiens
  misc_feature (466)..(578): n is a, c, g, or t
gccaaatattagaaggaaaaaatctatctactatctagaatcacaacttcataagaaaaagggcattttaacacagaaaaaggatggatataatttaaaggtgaataaattgtataaacattgataacatttctatttcatcatgaacttcatggtaaaaattctaactcaaagagcaacatttgggaagctactgacttagtgttttaaagaaaataaaaatatagaatgtcaaagaataacaaagctattagagatatttaaaatagagactttaatgggtggttttatcattcactttatgttaactatacactaaaatctccacaactttattaatctttagtaatagctcataactttttctagtctagaagcttttttcaaaataaaaaattctgagtactacctctccccatgattggatttaagcattactaaatgaaatgataacaccatcatgacnnnnnnnnnnnnnnnnnnnnnnnnnnnnnnnnnnnnnnnnnnnnnnnnnnnnnnnnnnnnnnnnnnnnnnnnnnnnnnnnnnnnnnnnnnnnnnnnnnnnnnnnnnnnnnnnngtaagtgtaaatcgtttagaggtatacacaatattttcaaataaattattttcatgtctgactacttcaggacactgattaaatgatttgtatttgttaaccttaactataagag

SEQ ID NO: 334222 - DNA, 587 bp, Homo Sapiens
gaatgtctgggtggccgttcagagtccaggactgctcctccacatcctgttgggagggacaattgagcgtggtccttagcgtcaaagacggcgctggactaagtgtcaggaagcttctgttcaggtctggactttgccccgaaactttgtcggcctggattcaggaatcctgttcaaggtaaaagggaaattggttgccttgctgagcggaagagaaaaggcacaatgcttgctgaagcagcacagccagcccagggttctctgtgcagaaacaggcactactggcccgacggtcatgtgcttcccccacagtctccaggctccttgcggctttgcgaggttgtgtgagcagaagtggcaactttagaaagtgggcacatacccctttccttttctcttcctctcctccagcagcctgaaagccagttgtttcaaatgaagtggctacaaaattttagcagcgtggatccccaagtcacagcttggaggaaagctgccttacagagctgtagtccttcagtggacttcatgaaaggaagaaataaactctgccttatgaagccactgggatattggggtttacctgt

SEQ ID NO: 334223 - DNA, 585 bp, Homo Sapiens
  misc_feature (457)..(457): n is a, c, g, or t
cacctttaaacagtttacttttaaatgtacacacagtgacaaccccccaccaggtttctattttttagaacatcttgtaccctgcgcctgcacctggggaggacttgggggcagagcttcctgaaccctccacgcaaattcatgcacaacaatgcaaatgatgagcagacttgaggggtccgtgcctcccgtccccgctatcacctggtcttcaacagaaggggtgtctgtgaggaaaaggctgcttgccttccctggagctcaggtccctgggagggggtggaagccatgtctgtccattggccttggctacgggccccatctggccagaccctagtgggcaggtggacaaagacatcagagaccactgaaagcgctgcagacccaggcccacgagctgcgggcaggagagcgagccctggactggctgggaagtgcctcgggcttctgaggcaangaggccgctgccttctttgcctgcactcaccagggctgctgggcaaagctgaaaaaaacgcagctagttcaagtagagttggaaatgggctgggaatggtagctcgcgcctgtcatcctaatgttcgg

SEQ ID NO: 334224 - DNA, 823 bp, Homo Sapiens
aaaaaagttctgtacattttgtgtgttaggtgttacgtgatccaccttgaggtaacttttgagtacatatgaagtcagggtcattcctattttcatagactgcgttgtttccttttcttaggttgtctttgaagcttggtgatgctggaaaccccagaagtcttgctataagattcatccttaccaattacaacaagttgtccatccagagttggtttagtttgcgccgagtcgagatcatttccaacaattcaatccaagcagtctttaacccaactggcgtatatgctccctctggttactcctaccgctgccaacgcgtgggcagcctgcagcaggaccaggccctcttgctgcccagcgacacggatgatgggtcgagcctgtgggaggtcacttttattgatttccagatccaaggttttgccatcaaggggggacgatttaccaaagcccaagactgcgcctcctccttctcgccagcttttctgatcggcctggcaatgtccctgatcctgctgctggtgttggcctatgccctgcacatgctcactctacctgcggtatctggaccaacaatatgatctcatcgcctctcctgcccacttctcgcagctgaaagctcgagacacagccgaagagaaggagctgctgaggagccagggggctgaatgctataaactgagaagccaacagatcagcaaaatctatgtttagcagcacaggctggcccccaccatgtccacagtgggctccgaaagttgtctctgttctgtgctatttgacttgtgaattacagattttcaccaaatggcttgattac

SEQ ID NO: 334225 - DNA, 270 bp, Homo Sapiens
caagactctgtcacaaaaataaataaataagtaaaaatattttatacttagaactctaaattgaacattatagtaagcgtgggactacctggcaaagcaagaactaagcgtagccagttggagaactctagtgttcttctgagtatatggctaaaaaaacaagtcttattcataatttatggcaagactattatttttaaagaaaccatcaagttagcacaataagaaggtttcagtcctgaacatacaccaaagtatcatcactgatta

SEQ ID NO: 334226 - DNA, 774 bp, Homo Sapiens
ttttagagtataatgatctgctttatttgacaaagatgttaaatactgccttatgtttggcaaatttaatgaccataaaaaaacggaccacaactttcttcaaacttcttcaaagtttgcatgtctgggagaccaataaagggcagggcatacgaagtaagtctgtttaggtcagttgtttatgggtaggtgcgacttcattcctgttcgccctacttgcagacatggtaacttagaacagttcttcagaagctgttcgatggcaacgtggcggacatggagctgtgaggccaaagaatctttttcttgcacttggtgagttaactcttcaaaaacttattcctctctgctgtaatgtggatgctgggtctggacattagcctctggactagagattgtctcttcttttttctgtgcctggttgtgactatgaggccacaatacactgttacgacataaagtggcacctgaatcttgtaacatagaaagtccaaagtctgtattttccctctgctccaaaattctttgtgtacagttagagatgccacctgcacttccatctatccattttgcagaatattttggtacttgggactcaaactgtgggagtaatttttcttctggcttatgcctgaaattaaacagatgatgctgggggtttttagaacattcagaatctgaatccagatccttaattttttgcatactgcacaatccagtttatcttcttactcaaaatggttttaacttcttcataagtactttttgaaagct

SEQ ID NO: 334227 - DNA, 856 bp, Homo Sapiens
attccagacattcctttattaccacttgttctatgtgtaggtgtttctgtctttgcacttaaggaagcagaatagcttctggagcaattaaatgaaattctgaatatagtcaaatctctggcttattcctggtaaatctaggacccaaattgtcctgttttatggtctcatggtcttgacccactcccaagggttgaaatcacagtagcatggtttttggtctacaccacaagttcttgggaatgagcgactaaaacccttgttgaaaaaagcagtggtctgtcagttctcagaggagaaaaatgaaggatccgggctctgaagatgattctgctcctcttccctctccttcccaacccaggtgatcatggtaacaggagatcatcccattacagctaaggccattgccaagggtgtgggcatcatctcagaaggcactgagacggcagaggaagtcgctgcccggcttaagatccctatcagcaaggtcgatgccaggtgagagcactaaagaactcaagatctgccatgttccctccatccccagcctgccccacccagatgccactttactaaagttcttggagtctccttcaataggtaggatgtgtggggtttacactacaaagtaaaacataataggaaaataaagtgaatatgtcagtgggttttcaaaggaagcaagatgaagaaagaggtaaagagaggagtggttggcaaaagtgtggggagggaataggatgtgtcaatttggggacaatatagggctagggacaagtgaggagactaggttgaaagaagaagcaatgaagctatagtcaagatgggcaccaagacccctggtgaattctcaaca

SEQ ID NO: 334228 - DNA, 622 bp, Homo Sapiens
ccttttcgcagctaaaatcctagctgggatatccaacacttgcttactccctttggctgttaattctagccagtggttctactgatcagcctgtttaagagttcaactgtttctgtttataattaaaagagcatacagacagaccaatactaatttgcagagaggtactagaaaggtgtgccagaaagagagagcacttttgttaagagcaggtatttctccacaattaccagcctcaagccattccaggccactagcacaattttcttagctcagagaaggacagaaacaggcttgctgcccctcagagctgacgaagccattcactactttaagcactgctgtgattctaggcaacttacctttaggttgtccagttgtgattcttcctcatgttgcttaactgctctttgctccacacagaacccttacattacagtcaaaggatctcaaaaacgtaggtactgttaaaacttaactgtatttagaggtcaaatccaaattaaatggtaaggtaacatggctcttggaggatgagataactcattttttgagggaaaattagtatatttcatagtaaggcaagatagagctaaggagttgtgtgatcacactaatgtaa

SEQ ID NO: 334229 - DNA, 557 bp, Homo Sapiens
aacttgtaaacaatttgccatttattccaaaatgccatatagacataattactattaaacatgtcatactaatttattgccacattattcttacctagtctacccactatgtggttcatacagcctagtcagttacctgcaacttaagcaagaactctggtactctgagcacaatgttcaggtcactgacgtttcccttttgagagagatgggagaataactgcacataacgcatataagaccatggagggtctaacacaggagtcagccaacgacagccagtgggtcaaatccagctagcctcctagttttattgggaacatagccacactggtttggctgggccatgccattgggctgggcatattgttttgggctgcttttgcactacaaaggcgagagctgctacagagaccacagggcctccagtgtgtactagctggctctttgtaagaaaagtctgccccacccctgcgctactaggaagaatagatgaggagttgtggctaactgttaactgcctaagtacaaatgcacatttcaaaagcaagtgacaa

SEQ ID NO: 334230 - DNA, 1044 bp, Homo Sapiens
  misc_feature (577)..(577): n is a, c, g, or t
cctggcattatctttttttcctcctacagtttcttttacagagtcttccgtggctataggtcggaacagttttcctgttgctatgagaacggcataaataagtcaagtttaaaattcactttgggggtatggagccgccacagttccggctacctaagccctcctgggtgtgtgttgcgtactcttccctataggcagtggatcacagccatttaacatggccttcctccaccatggcccatcttctggccagaaaaatcccacaagcctcgcagagcccctctaactgcttgggcttctacacacagacctagtaatggtcttctgtgctgcaaggagagaaatataagctcaacattaacatttctccaagtgcagaaattcatgggcctcccaaactccaccaagcaccctcctacttcctctacaacaatgccactgagcaatgatcaaaatgaggagcccttggaatacatttggaagggcagaataatgggccaggaagcgggtctaggaaggggctctttacatcccctgctgtagcacttccagatctgcctcaccgaaggtccagggngctcccacaagggaccagagctacatctgcaggagggtggttcttcctgtattttcagggcattctctattcacaattaatctgtccactcttccagtgctcctggacctcagagacagaaggtatgcttgtctcactttactgaactgcactccaaggtttgaagatcaaaaaccctactcctaagacaagccagtcagtgaggacaacagtatttagggaagctcaaggctgtcaaaggaaaggtcaagagcgctctccacccttaaaaatatctaggctttcttcatggctgctgcttctttctcacgaagagcattgtgggtttaattgtgggctgaactggatatcataagatccaaaagatattaggataagtcctaactcccaatacctgtgaatgtgactttatttggaaatagtctttgcagttgtaatcaggttaagatgagctcattagggtagat

SEQ ID NO: 334231 - DNA, 794 bp, Homo Sapiens
  misc_feature (638)..(648): n is a, c, g, or t
atttttaaaaaaaactattgtcctaattttggctttaacttttcctgaatgccatttgctgtaattgcttaacttgtttccctgtctttaaaatggttaattctattcagacatataaatgcagatctatgttgaccatcttggtcctggtctgaagtatttcatgtcatgaaggtcactattctgttttccagacaggtagtttcctaaggcaagatgagtggttggggctgtgtgagcaggctttgcctgggcagaacaagtgggcagaacatgccaactagtagatatctttaaagagaacagacaagtaagctagcgtgtgcataaccaaatcaatactagagtatcggatttacagcttgacttgttttgactgaaaacaaaagcacacagaacagttacatcatcctaaaaattccttgtgtggcccctttgtggttactttagtcaatttctctttcttcccttaaccctgggcaatcactgatttatctgcctttcctatttgccttttccaaagtatcacataaatgaaatcatacaatatggtagtttttgcatcagacctctgtcaccttaacaaaatgcatttttaagattcatctatattattgcctggattggtggttctttcnnnnnnnnnnncctgagtagtaactcattgtatggatgtaacactgtacatgcatctgtcaaggacatcttagatgtttccaagttgcaacaattatgaataaatctgctataaacatttgtatacaggtttttggttggatgtaggttttcagtac

SEQ ID NO: 334232 - DNA, 489 bp, Homo Sapiens
  misc_feature (20)..(20): n is a, c, g, or t
  misc_feature (471)..(479): n is a, c, g, or t
  misc_feature (489)..(489): n is a, c, g, or t
aaaccaacttttaaaacttnttgatatacctacaaagtgactttaattttgtaaaatgtactaagtattgtttgcttacattcccccctccccacattttcttttccctatgaaattcctcccaaacctttctccccatagcttcaaaattttaggaaatattacatcgtgactgaaacatgccttttcacttgtcttactaacatggaaaagccaacttactccttgacttttcatcatggcagcagtttacttattttaggttttctgcagtcagaccacacatacaatggcaatttcttcctcacacttaggatttcattcttaagaagccagtttgacctgtgcaacagcgccagacgacacacagatgtttgctcaataaatatttgttgaattaatgaaggaaggaaatagaaattcttcctaattctattgatattgactgaacattcttattactattaaaannnnnnnnnaaatgaaaan

SEQ ID NO: 334233 - DNA, 490 bp, Homo Sapiens
  misc_feature (234)..(252): n is a, c, g, or t
agatcttacctaataaacaaatgagttacacaattcagcaagtgacacacaaactcaccattgactagaaaatattctgagcattttaggctagtattactttgttgagtattgaagttccataaatgattttaactagtgtttcctgcatttaaaatataagccggattgaagaagtcttggaaatggtagtagtagcatgatttgtgaatctcctttccgtacccggctaannnnnnnnnnnnnnnnnnnatgtagagcaattagcctattagactcattaacaaagaaatgcataatttacaccacttgtcaaatatgagtagatgagatatgatagctacaccattgataaccataagaagggaaaccaaaaagaaatatactagcttctttctggtttatccttttatagttatcaatggatctgggttatagttaatgaagtagggtttctcctactcaagaaccatcagaagccatatggttt

SEQ ID NO: 334234 - DNA, 697 bp, Homo Sapiens
  misc_feature (427)..(427): n is a, c, g, or t
  misc_feature (442)..(534): n is a, c, g, or t
  misc_feature (625)..(638): n is a, c, g, or t
ccggaatgagacgagacgatgaaaaccttaagtgtggaactgcgtctcaggccagtgttctggttgaaagagtcacccctagtcacccctcgtgccctaggtcggccccgctgtccccaggggcaggggctgccgtatgctgggtcagcttaaagcgatgctccacaaacttggacaactttctagtcgttctcacatcagtactttgggaaaatacaataagggtgaaatactagaaaaatgttcacgtgcttcgatgccatgtaatggtaaactgctataaaagttttcaaaatcttggcaatttctgctgcagacagcacgcgtttcccagaactgatgggccacactgttaatattaccttagtgcagcgcttctcagagtgcccccacctgccgcagcagcagcagcatcaccacctgggtngggcgttcccccatnnnnnnnnnnnnnnnnnnnnnnnnnnnnnnnnnnnnnnnnnnnnnnnnnnnnnnnnnnnnnnnnnnnnnnnnnnnnnnnnnnnnnnnnnnnnnccttagagctgttggaggattaagtgatgtttaatctacacatggctcaatgccagagaaattcagcatttaaaaaatttcctttagaagnnnnnnnnnnnnnnccttcaagaattgttgaggatagggaggaggtcatattgagagtttgtcatctcgtaga

SEQ ID NO: 334235 - DNA, 345 bp, Homo Sapiens
tttatttaattaatttcaagacagccaacaacaggatgctacaatgtcacttaaaatgaggaagaaaaactgtatttagtggcatagaaagatggctttaaaacacttttgagtggaaaggcaggtacagaagaaaatgtatgggtacaaaatcatacgtgtacaattctatgtttatctaacgttgcatagaaaattgtctaaaaggatgttcaccaaaacataaacactagctaaccactagcacatagtttcagattgctaacacttcttaatatttttctttccatgggaatttttgcattatgcatttatcagaacagtaaaatgacattttcattttgt

SEQ ID NO: 334236 - DNA, 831 bp, Homo Sapiens
ttgctttattgctttatttcaaccccacctaggcccacaggatgcttgtgctaactgagggcacttcatagtcctgaggaccttgggctacttcctgcctccttgatgtcctctccatcccccctcccctaagccaggctattggagatgatggtgtcaccagctgctgggactacccacagggctgggtgtgagggaggagaggtcaccagatcctcaggtgtctcaggaggctgcagcctgggccacagccctgggaatgggctcctttcagactcggcacccatggcctgccctccttctcaggaagacacagaatgggggtaggcacacaaggcctgctgcatgtgcaagggaagtggaagaatcagatccaggtgtggtccctgcagcccctcctgtgcactgtactagtcttggaggggctggtttgtcttaaaaagcacaaggcattgaggacaatcccattttcctcatgataggtctaaacggtaccacctctaggaactgtgcctgtggacagttcctcatcaggatgtctgggaacaccagcaggtgcacctgagtcactgctggtggggagtgacgctcggagagtgtggctggcctgacaccgagtcactctcggctccctttccgagctgccggacccagcacacagcagcacacggcatttcaaagaagggggccctacataactggagcttggataaacaggtctggggactcgctgcaatgggaagagatgatgggcttgggaataggggtgcatgtttccaaaaagtgagtagagatttacacagggcagtcagaatggcatttctcaaagtg

SEQ ID NO: 334237 - DNA, 399 bp, Homo Sapiens
atgcagcataccagggagtgcagagggcctcgagaagcttgaaaggttaaggaagagaattctccccggagcctccagactaggagcgcagctctgccatcgcctggatttcagcccaataacaccagtgttagacttttgatctgtagaactataagacatttgtgttattttaagccactacatttgtggtaatttctttacagcagcaaaagaaaactaatacaccagtggaaattaaaaactacataaaataataatgttacatatcaaagcttttgagattctgttaaggcagtaattatagaaagtagacagccttaaaatgcccatactgaaaaaaatttcagataataaagtatacaacccaagaagttagattaatagcagagtaaatgc

SEQ ID NO: 334238 - DNA, 523 bp, Homo Sapiens
ttgagatggagtctcgttctgtcgcccaggctgtttatatttttgttgggaatgtgaaggtagacagccttggaaacaggtaggtagacctggactcaaatcctggctgtgtggccttgggcaagtcacttcaccagcctctgtgacattggggtgagtgacctaacacaaggaggtcctgaggaagcacgcttccttgctggtgtttcttaggtttcctagtgccagcctggctcaggaaatcttgacatgtttccttggcaccagcccgtagggaatgaggatcctacacaaatccctacagtatggagaggggctttggacctactttatattaggaagttttcctaactctggagctctggtaatcttctgaaatttaaactatgcttgggggccccccgacataaggaagagcccactttaacatttagggcaatactatgcaggggccttctggctgggtttgtataggcggagtgggatgtacaatacacatggctgaatgcttgagattagcacg

SEQ ID NO: 334239 - DNA, 465 bp, Homo Sapiens
  misc_feature (22)..(22): n is a, c, g, or t
  misc_feature (31)..(31): n is a, c, g, or t
  misc_feature (57)..(57): n is a, c, g, or t
  misc_feature (72)..(72): n is a, c, g, or t
  misc_feature (83)..(83): n is a, c, g, or t
  misc_feature (159)..(159): n is a, c, g, or t
agtccccaaggtggtgggattnccaaacatnagcccatcgtgcctggcctcccagcnaggtctttatgatcnatatcttggantcgacctcctatctcattctgtaaccttagaattgccttaactgtcttgggaatgcagcccagtaggtttcagccntcattgtccccagcccctattcaagatgcagttgctcctagttcaaatgcctcttgaccagttgtgcttcaccaaacctagagaatgaacaaagcgaaggacctggagttcaagaatggagggatccaactccaaggcaggaagcaggtccagaaagcaggcagggcagcagcaacagggaagaacagcttatctgatgactggctgggtgggaagcacaactgagaggacttgaaggactttggaagactaagttagctacaaagaaaactaagtattatacccacgccgaccctatgcagtctc

SEQ ID NO: 334240 - DNA, 655 bp, Homo Sapiens
  misc_feature (108)..(108): n is a, c, g, or t
tcttcaggttgcacagttaaatggattttgaaatatggaaatttcctttgtgtttgcagagatccgtaaaacaccactaaaactgtagtttgagcttgaaaaatatanccgctgcaaacttgtgtgaggatagagagcttgctttttgttttaacttgtgactcaaataatgttagttgtcaaaatgacttcatcacagtaagttttgcatgtcagtactgttttgctttgtaatttatgttgactttattaggatgcatcatcaaatgatcaaaattagcaaactagcaaaaatgaatttcaaagtcattcagtcagtgatgtaaaataaataaaatcctgagccctctgccaactgcatgaacgtaccctcatggccaaggtgaccccagaaaaacctttaaaacagagttcctgatcataacaggacaggagggcagacatgcctcattaaactccctcccttttgaagtttagacacaacaaccgaccagcattgatgttaaagaagagatatcaagactgacagaaaggactttttgtggcaaaaaggtatcaaaagataaacaagacccaaggccatgccaggtaagggttaagtcatatacccctacacttaaagaataaactgtgttctaactgccccagggtgcta

SEQ ID NO: 334241 - DNA, 601 bp, Homo Sapiens
gtctgtgtcacactgatttatttttattttatttgtggatttcttaatggacccaacggtggttcctctttgcatccctcgggttgacaggcaattccatcctagcccagttctcagctctggtttagttttcataacttttgggggtccagggagccatgagactggagatagaaagcagaagtgcactggggcggtgggtctgccttggtttacccccaaatttctggaatccaggtgccttgctccagtccctgccccatcctagactcaggatgctctcccacgctactaaccactggtccggtcaaagcccaagctgctgccagccaccatgttatctcctagcctggctagggtgcctgctagccagcagtggctatggtggtgtgcagagtgagggtgagtttttgtattgactgccattccgtttacctcaagaagtatgtttgggcaaccattcggtgccaggcagcagacagagtccctgcactgcaggaattcctagtcctgtgggcaggggtgtgtggaggatggcacatggtggttagcctggtccaagggtctccactcccttcctagcatcctagagatcctggag

SEQ ID NO: 334242 - DNA, 459 bp, Homo Sapiens
gcacgcaaacaaaattgttttaataatcagcaaatccccattcactcttattttggacgtacattccaatctgaccccaggaagtcccggtcctcccagaagggccaggtgggtgagaggcaggttgctggccgctgctcgatgcacactgagtgagtgcccccttctgtgggctgatgggccaccagggcttaccagcgagctgtagagtaaggaggctccactctgaacagagtccctgggactgggctcccacaacagcagccctgcctggccccaggctgccagccaacatatcttggggcttggctctgcccccaaaattcatcagtgggtggaggcccaagtgagtagccgtcagcaaggctggacctgggcccaactgcagttgtccacacaaaaacacactcctgctaccgaggccaggtcggtgagggcagcgcctgctttccatctata

SEQ ID NO: 334243 - DNA, 866 bp, Homo Sapiens
tgtcatgcaatgtgtgtagtcaatccaaagctaatttttctttttaagcacacaaattaaacacccactgtgaatattcctgttggtgacacgtctccaacgggagagagccgctgcttccttgggccacactttctgcccgacacctgttaggaatacgtttccgactgagagtgccgctgcttccttgggccacactttctgccttgacagagccccggaagagcccagctcagcccaggacgtggagtctgaacacatgcagtcctggcctcacgcctgccaggagacatcaccccaaggagccgcaccacagtcgccccggaagcacggctggccacacgcaggcggcaggagaccagggtttcctggccacttccatgactggccccctgcggaggctttttaaaccttctcaccgttcccaccccatgacgctgcgaggctgtggaggtgctgtttgtgtctgtgtgccacgcatgcacctgcacttggcatgtaaacactgcaagcaaggctcaacgagtctcagcgctaacgccaggttagcataactaagtcgaacgaagttcaattaaaaactaaaatgcttctagcacttcatgactatgcgctgagcagcgctgagtgtaatttatttacataaattgtaatgtatcaaatcacacgtagaaataaacaacttatataaacacaataaaaaatatccttagtgaactgaagcttttgcttgatgtgagaaagtaccttttaactggctggctggtattcttccagcaaactgacatcattagcgatgggctaaatacgttctgtggaattaaatcacaaaatgtcgacgattctcattcaattctccaagccag

SEQ ID NO: 334244 - DNA, 881 bp, Homo Sapiens
ggtacacctccccttggagaaagatggtacttccagttcttattaaacctcttgtaaggggatcaaagaattatttgttttgcactgtattgcatgtttggggtttcatttgggaagaaagagagttgagtaatagctactttttaaccttctgaattcagatccaattaaggaaggagccagaagtcagacaattgatggcctgaatatcagctttattactgatatagctgatcagagcacatgtcttagatttgtgaccagatgggctttagacactcacctttccagtcacaggcaggcttggcatcccagatttcccacacaagtaggaagagaaaatctgcctctccaaaaaaggccccccatgcagctgagtcttcatccaagccctactgatgagataggtctgtctcttccaagggaaggcccttgtaggtgagggatagaagccaagggccagatggtggcctgttcccccatgtgtctcccctggaagtagaagtagaagctcttatgggaagcagaggcacgtgggattcacttcctaaggaaagctcatgaccgctagcaccccaaccatgccacagttcactgtgtttcaaaccttttggcagagcgcaattggtattagtgatttaattcagtgctccatcaacacagaatgattttaaaaatcctacttctcagaagacaatggtggcctaccagctgagacttactttttaaaatttggattatgtgctctctatgtatgtatgttttgcagtttttatatctgtattcattcttagcaggttctgaaaatctacttgatgggttgccaggcaattgttttgctattttaatgtgtgttaatgtattgtaacattgtgttccag

SEQ ID NO: 334245 - DNA, 781 bp, Homo Sapiens
  misc_feature (73)..(141): n is a, c, g, or t
ccatatttcttggctaagcgactcatctgtgaggtttttcacaaaattgttgccatcgccaaaaatattccannnnnnnnnnnnnnnnnnnnnnnnnnnnnnnnnnnnnnnnnnnnnnnnnnnnnnnnnnnnnnnnnnnnntataaaaggtattaatatgtctggaaagagatatgtttccaatttaacagacactaccaatgagaagagttgggctaggcaggaaacttcaaattttccttttttacttttatatattctatttggtatctcaacttataacctgtggaccacgtttattagaagaaaatgcagattcctgaaacttcctgcagaccccatgagtgacaatctcagggagatggagttccagaatctgctttttttcatagatgtttctttgccattcctgtgtatatctgagtttcagtagcactgctaatcaattgtttggggttctctctccttcaccagcatgttcttgcaaaactaaccaaacacatataaagcgcaaacagtacaaatagtgcactgcaccttcatgacccttacctgttccagcctcttcctacctcttccacatgtgatatgtgtgtacatacccacagacagaaacacagagacatgtttggaagccagtgtggatgccctgtgatctgtgtgtacacatgacaagtgcatacacacgcacataaaggaacccagagacgtgtttggaagccagtgtggacaccctgtgatctgtgcgtacacatttgacacctgcgtacacactcacaga

SEQ ID NO: 334246 - DNA, 825 bp, Homo Sapiens
  misc_feature (298)..(318): n is a, c, g, or t
gtgtctgaagagataagtttatttaaacaattagcacaaaatggccaaacagaagttgctttgatttaacctaattttatgatttaactagaaaagaaagtctagaagtatttgaacatctaggttggaaagccaactaaagttaaacaggatttttagcagcatctcacccatttttaaaaagccctcaaagtgaagtaagtctcaaagttttaccacctctgttagccttcctgaccccaagtgaaccacccgcacggagaccatatctggagaacataatgatctttacctaccnnnnnnnnnnnnnnnnnnnnncttaacttggcatctgtgggaggtactgttttcctcaggtttctgtaccactttctaacaacacatcctctccagtaggcttggattctaaaacacagatatttgaaaatgactaatttatgatgactctatgtcaaccaatacttcagtagttgttataagccctgtgctgtacaaggccctggggaaattatggtggccaagaagagagataaaatcccactattcaaaaaacaagttagttgtcatagcctgatctgtgtctgcttagcgccaaacgggcctggcgtcctcacctggtcacacacttgattctgaacaggcgggccccatcgtgtatcactcgggtttgatactggttctttctacagagaggacaggttttcttatttgtgaacttttcaaaagcctgaagacatgcctgaagaaaaacatttcacttaaaattttacaagtaattacttataaacaacgtttttacttccaatgttagtgttctaattataa

SEQ ID NO: 334247 - DNA, 488 bp, Homo Sapiens
  misc_feature (116)..(116): n is a, c, g, or t
cggagagtcgtactgggctatgaagagagatcctgcagcctcaatgatgtggcctgacctgggggttctgcagaagccttggaacagcaatgagtacatggtcacttcattcaacnattcactccacaaattatttcctgagggcactgaggtgaagtcactgtgtcagacattggagtagacaaagttcagaaagcccaactctagttattagtcagggttaaaaataaagactgagtctggactaaatggtgaattcattgcagctttgccacattttcactgtgagaatatgaaaatattactttagttgtagtttccaaaatgaaaatgcaggtatttatcacaggtgttgggaaacttaaccaagatgaagcttgtcaagtcctcggtgcctgcctggcacgtgataaatatgaattaaaaaaagaaagttgtcaatttaattgtcagctaaatatcatgggcattatcatacccattttgag

SEQ ID NO: 334248 - DNA, 1054 bp, Homo Sapiens
tgagctttacaggtattgtattgtattaatcttaaaatgctaatttttttccacaaataggatgcattttaccaacaatgcataccaaagtttaattggcagtatcctttcttcgtggtatagaaaataacaggtattttacagttgatggcatcttagattaatatacactaatctgcaatttacaggagctacatttcatgtacataagcaggtatagatctgaaaagctagctgtaaaaaatagccaatgattatagaatattcacaatgtactagatctggtttgcagaattaaggaggggattctccatgaatagcgcccccccagccaacacttgaatatctatacaactttgttgatctccatccatgctgtgattcaaaatcgaattcacagggctatgtgtaggaggcacacaagtttatcatacaaatgagacaatttttgtgcgtgtgtgaaagggggagctattattgttttgggaaaacagatgtaacccataactattcagggcaaaccagaggtatgcttacactagctatatgcccttcatttcagaagttcaatgttaagcacctcactaaacagaccgtgaaatgctgaataaatcaaaatctttataataacatcactgaaagggaggtaaggaatatgaagaacccaaaagaacctgacacaaaggccctaggaggtgaggaaggcccaaaacttaggctggcttctgaaatctcctgcccaggagatcttaaactctcactttgttgataatgtaggaggtcaaggcaagagataaagccaaggtctgccacagtgcagactaaaaccctctgatgaacctgtgtcatgaaagggttatacctgcaatgtacaggtaaagaggcctaggtcctgccatgcagaatgcaggagtcaacaagaacaacaacaaaaccccatgcctatctccaacctgtcactttccctggagaatttgtaaatcacaagctggctcttgtacaggattgtggtctgaagttgcactgtggtttgaaaccccttagtgaagaattt

SEQ ID NO: 334249 - DNA, 533 bp, Homo Sapiens
catatgcaaaaatcctttattgttgaggaatagagagagacattatatttttaatgtaggacactacaggaactctagggtattctacagtcaatgcccattggggttggggatattcactatgcagtttccacaccagggtcaggtagaaaagatggagaaggagtcaaagcacaagaatgttacaagaacagggaagagaaagggtaacaggagcgtgcgcacctggggattgggacagggaaagaggtcttcctaatgcagtccaggagtccggaagtggagtacctattctgctctcgggggatacttgaggatgccaaagctggggacgttctcttgattcacatccgtaggagagtctggctggacgctcctcttgcccataagtcccacaaagaagtcatgcatgtcacgtttctcgggagatgttgattccttaggatctgtgctagcctggctcagggctttgagcaatccctccagagatgagtggcttttgaagagtctctggagcagctggtagagatctg

SEQ ID NO: 334250 - DNA, 831 bp, Homo Sapiens
  misc_feature (636)..(670): n is a, c, g, or t
  misc_feature (679)..(679): n is a, c, g, or t
  misc_feature (785)..(785): n is a, c, g, or t
  misc_feature (790)..(790): n is a, c, g, or t
  misc_feature (793)..(793): n is a, c, g, or t
cattgtttcgtgtttatttgttacccagcattacagtgacaaagatgatggacagagccctcaactcaccaggtagcgctacctgctctgagatgtgccagcacaacccctcatgcaacggaggctgagggaggcgaaggcttggttcaaggtcacactggaagttggtccaaatccagaggcctcttgggacctgcccccacggtgagctggcctggcagacacaggtgagtccaactctgccctgtcatcctggaaccacagtctggtgaggaggattgagttggggaggggtaggtatatttgggaatgtgaggaggaaggggcagttgtgccaagccctgagggatgagatcagtttctgcagctggacaacgaggagcaggaaggcccaggcttcttggtggaaggaccatcctagtccactctgaccttcatagctacaagtgctactgcattcacagcccctgacgctgaggccaggtgcatttcgcctgccacctttccatcaggcccataggacacctgcaaaggaaaagcaggtaactaagagctgcagcttgagccctgtgtgctgccccaccctccatatccgaagctctccataaacccataaggagaggctaccatgactcnnnnnnnnnnnnnnnnnnnnnnnnnnnnnnnnnnnccagacacnccaaggccacatagcctctaggaagcagagtcggaatgtgaacccctgtctgtgagattccaagcatccctcagaaaggcgtggtcctcgactggcgttggtgccnctgcnacnagcaagggccttggaaatgccattctcaaggtgtttgc

SEQ ID NO: 334251 - DNA, 757 bp, Homo Sapiens
ttgatgattataaaaatttttttctattttacaacataggttcagctacactgaaaaaattacactgcttattgaaatacatttcattttagaaacagactaccaaagaagtctatacaaaaactctaaaataatttctgtagtaaaataaagagtgcgttaggagagctacacaaagaagaaaatttctgtctttctctataatgcttgatatactgtgaaacatggccagctcaactctgtagctggcaccaaaagctgaaaagaattccttaccatacacagtgatacaattaatgctctggattaatctcacagccttcccgattagtacaaaggaaaccaggcctatcccctctttgaggagaagtctgggatataaaagcaagcatacctcatcagctgatatgaaattataaaattccacaagtctgagtatttgaaacttataaaagtcatcagaaaatgcaagcaaattgggctttagttcagtggttcccctggtttagatgacagtccctctgtgagctcaaggtagtcttcttgttcattcccttggatctgttgattcagtgacactggcgaagctcttggtagaggcggaggagagtctgagaactaaggaaatgctcaccgactccctctgtgcacgctcacacatggggacgtgtctcctggagaacacactaaggagacggatgttaatgatgctgtgctgaactgttcttctctgccaggtgccgcagaaagttgtcct

SEQ ID NO: 334252 - DNA, 572 bp, Homo Sapiens
cttctctctcttttgaaatatagtctgtatcggatgctgtaatcctaaacccagacctcagttgtgacaggtgaaggttggatgaaataggagttagggagaagtaacatttagtttctaaaaaatgcagtttggtcgttttggggtttgctgtcccagccttctcccttcaccctctccatttccagcatcactacttttatgtgtacaaggatgtttgcattcagtaacccctgtgtgtttactttgatgtcccagcactaagaaaagggggtggggtaggtgttggtgctgtttgtttgtgcaggcctgaactttagtcactctagtgtgagctactggactaaatcagctgctccattggattataaattatccttgactctggaagacttatgtctgtggagacagtgtgttggagaaaccaggtggtacagattgctggtaaggccctgctgatgcttagtggctacatatgtcctgtgtgttgtaagagctagtttttgttgttggtgttttgttttaagacagagtcactccagcctgggcaacagggcgagactccatctcaa

SEQ ID NO: 334253 - DNA, 489 bp, Homo Sapiens
  misc_feature (206)..(206): n is a, c, g, or t
ttctgctggttcctgattctttcactctctgctactactgttgatccaaattacactccataataaacttcaactgcaaatctctgcctcgtagcctgtttcccaggaaacttgaccttaaaacagtatttataactaaatctgcctaaaaccttaaaaagttgaaaataatcatatataggaaaaatgtttctgacatacacctntagtaacttgggaataaaagcaatatgctttcatgttttctaagaacttatgggcaagacacagaaagagccaagcaattcacagatatgaacgtacttaatgctcaaaactgcctatgaggctgatactattcactatcaggcctattcgcaggttgcaaactgagattagagtagtaagttaacctacccagggttatatagctagtggcagaacaaggttttgaactaactcagggtcatacagcttcattgaacttctaccatttactatctctagata

SEQ ID NO: 334254 - DNA, 801 bp, Homo Sapiens
gtgcactgtctatctgcatagatatcccaccaactgttcacaacaatctgctctttcttctccctcacaattccttaaatttacttttctctcattttatttaatcaagcatgactttattaaaacagaacaaaacaaaacaaaatgaaaacccccttcccacctcctccggtgtgaaaacccggctatgggcctggcgccagtcttctgatacccggagatccaagtggctgtgggtcaccctggagctgggtttcctccgcccttgggaagaagcatggggaaggacgccacctccagggacagacgtgtcatttccaggggtcacaaccctgttctcctgatctgtgcctgtgctttttggcttcatttctaatgaggctgtcaggaacccagagcttcacagagtggtctccctgtgctcccacccaggggagagagagcgagacatgaggcacaggcagtgttgagcaagtagcactaaggaagagaaagctcgggatagacgctgtgtttcagcagctcctcgggtgctgtctgcttatccattgaccacgtggcaacatctagaagggggcgccgggaaggcagaaccctgtgacctcaatgtatgttccagacatcgagggacacagcccacctgtgggcctcggtgggacatcacacatcaagagatagtgcaggggaactgtgacctcatcatggcgtgagaggctcacactacttctgcaggtgcatggcactctccccaggctgccacagcccgtccgtgcgtctctttctaaccccacactgcatgct

SEQ ID NO: 334255 - DNA, 502 bp, Homo Sapiens
  misc_feature (18)..(18): n is a, c, g, or t
ctaaccgttttacacagnatgtttgcagattacgaagcatttgtcattcagactgcccaggacatggaatcctggctgaccaaccgggaacagatgcagaactttgacaaagcttcctttctgtctgaccagcctgagccttacctgccatttctttcacgcttcattgaaacacagatgtttgccacctttattgataataaaattatgtctcagtgggaagagaaagatcctttgcttcgggtctttgacactcggattgataagataaggctgtataatgtaagggcacccacccttgcggacatctatatatcagaaatgcagcactttaaaagaagcagcccaatcaattgagcagagactgatgaaaatggatcacactgcaatcacccacatctacttgatatgaaaattggtcaaggcaaatatgagcaggggttctttccaaagttacagtccgatgtcttggcaacaggaccaaccagtaacaatcgctggg

SEQ ID NO: 334256 - DNA, 636 bp, Homo Sapiens
ctcggcatatctctgtactttattgtccctgctgtaacaatgctcatccttcctgagagcgtctcctgagggggcctcggcaaggctgactggagaaggggctggtgacccctagcaggctctgcacctgaggcctgggtcttcccccgggatccttgaatctggagatggcagagaggaggcaggccggctctttccccaatcctcctaggagagctgcttctgcccattctcccactggtgaaacggaggcagaagcagcagctcaagcagggtgaagctgggtttatccttccttgaattggggtccagggacactccacatctgccacatagcctcttgggctgggacatttttcctgggcaccagccagcagcttgagcagcgagttgccgtatttccttgtacctgattccacaggcgtttgcagagaaggggtcccatcttcaagcgtctctccagagcggggtcctcttgggtccgacaggaaagcacagcgccggggctctgaagggtcagaggtcaaagggcaggggtcagaggccaagcatgtgagctcgggatgcctgtgcggagtcgggcattttgtgggggtctcagtaaaggccccacctagctctggatcagccctggga

SEQ ID NO: 334257 - DNA, 803 bp, Homo Sapiens
tgatttttaccattccttcaaccagtttgcacagagagagaggctagaaggctgactggtaagaaattctcacctttcaccagcatgctaggtttctgggttccttctccctgagtggccctagcgaccctgcttcttgcaccatagcccgggggggccaaaccatatcacaaaggaaaatcatcttttttcagtttcatgggaccataggcaaaaaatcctctcagttttgcaagatgcggcccaacaggctgcacggaggaagtggattaacattttcttttccagccagagcaaaatatgcatgacaaaacatagacattagccactccacttagcacccaatatcaaactggcaaggttaaaacttgccctggttgatgcctgtcatccttaatccattcaaagtgggatggaatgacctcagactagaagtttcaacttgtggtctctgtacaagatggaagagcagacagtgtccacatagtctcctttgagcaggcagtaagtacgtaggtccataaagagtaagaacctggtacctgagtccctgaagcagcctgaggcaaaaagcttgtctcctggaagtttccctgactagatgaagaaagactcagtttcctccctagctctcaggctgacttttccattgcctgtgtccacctcatcctgcctgaagtatcaaagctaaaaccctttgctgttttctgaatctagagaggaaagagggtgaggagacccgaattcaaatgttttacttgtaccttgtgaatctgtttcctctataaagagccattcatttc

SEQ ID NO: 334258 - DNA, 495 bp, Homo Sapiens
  misc_feature (11)..(11): n is a, c, g, or t
ccacacgcaangtatgggaatgttttttcagtagtctctttggcaatagtgggtcttatttttttctgttatggtttgctaagggaaaaatgcttccagctctatttgcctttctttaattactaatgaagcatactttttttcatggttttatccattcagatttcttttatgaatttcctgtgtgtgtcctttcgcagatggttcttggtccttgaggctgcttatataaacattacaggctgggcggaggtggaagtagggcggtgaagccacagggcaccgcactatggtgccacatctcggaggcagaaagcctggagagaaatggtgatcaaagtaggagagggctggaggctcgccgtcaatggaggctggctgccctccctcctcttggggtgctcctggcctttaggggctcctctgctggatgcccaggtaggaccctgtgctctccaggcctggtccttcactggtctccatattcccaggctg

SEQ ID NO: 334259 - DNA, 827 bp, Homo Sapiens
  misc_feature (394)..(394): n is a, c, g, or t
ccaatcaggaaatatatccaggccgcggcagcttctccaaactcccgggcttcccacagaatgcgctcgaatgacactggaaagatttcaaaaatccaggcctccccctgttttaattcctttcttcccccaacagatgttgcaggcctggtgaggaagcccatcgtgtgtgactctcacgccactgacggggtttcgtggtgcggccaaattcctctatggccatccccagcatcagtccttccggattgaggaagccccttccaggaatgagctccatatttaaaggagtggaggagatgaacacctctccaccttggagccaagaggttaagctttcaggagggccccagggctgtttctctggactttaattgaaggtccgtgatcctcnaaaccttcattttaatgactagttgcaacctcttctcttcttcagaccttgacccagcttctcaaccagccagagccactggtttggatttcatcttctatataatttagggatgcctagaccaagggaccttggcaagtggtaacacttctctggcctttggcttcctgatctataagctgatgggaacacgagcaacgactgccaagggctcctccagttttaatgtcctgggggagcagtcacataacctctttgggcaaatgcaccaaaaacctgtgtgtagagtcaggctgtggggaaaagctgtcgtgactatgatccacagctttctcatttacagacttccccgttctgagggtcaccgtccacattcgtgaaaggggtagaggactgaacctacctctggagttgttctgagaattacacgagg

SEQ ID NO: 334260 - DNA, 356 bp, Homo Sapiens
ctgtgtggttatcaattttataaacaggttcatttgtctgtttgtattcagttttagggttcctccatccttgccgatgcaattttgttgagtatgtaaaatacttaatgtggttcaaaggataaaactagaaattaactaggacctatcttctccctgccctctctctccctctatatctaatttgaaatactgtcctttactcccagttaataactataatcagcaagcataatattcctttaatatgttctcaccacatctccctgttatttcctagatacactgtaccttgttagaacatttagtcacacatactacagtctctcttataaccctcattcagtcttagtctt

SEQ ID NO: 334261 - DNA, 834 bp, Homo Sapiens
  misc_feature (701)..(788): n is a, c, g, or t
ccaaagagagccttctaatagcttttaagaagactctacttatccacaaagatcaatatttccctttcctaaaaaccaactggttgctttggagggcaaagctttccgtaacccacagaggtgccaacatataacaaaagtgaaccataccagggttgacatcttataaaaataacatttcaaaagacaaactggtagtgtgtggaaatttgaggtaacagcaatacgctaagattctcaactgtggaaacctgcccagggtaggtccagaaacagaaacaagctcacaagtcaaaagcacacacaaatgttttcattttgggacgaccaccatacttcagtatgcagaagtgctttaggcatacctcccattttgtcacacaagcaattaagatgtgtccttaaggaataaagacttagaaaactagtaatttttacttcttcatttaggattaagtgaaacgtatttttttactctgagtgtgtgatagtgaagaacacaatgactactagcatactttggtgccactgataccttctgtactaaggtgccagtggttttacctcctcattgccctgcaacatcagcacaaatgccagaacattttaagaggcaaatagtgtctttctgttattattaaatagttttgttcttatggaccatatttgagaagtactgtattaaactgattcaactgtcnnnnnnnnnnnnnnnnnnnnnnnnnnnnnnnnnnnnnnnnnnnnnnnnnnnnnnnnnnnnnnnnnnnnnnnnnnnnnnnnnnnnnnnntgattgacctcctgagctcagcaatcctcttctcccacttcagcct

SEQ ID NO: 334262 - DNA, 662 bp, Homo Sapiens
gaatataacatttatttgaaaaacaagttacatttccaaatgtttgtgatctctgacgtggatgacggtgaccagggccagctcctacgcgggcgtgggcgagtgctgtggccagatgtgtgcgtttgaggcaggccaccctggctgctgttggaaagggaactggagccagccagcctccactctgggcagacaactggaaggtgctgggagtcaggctagagataaagatttggcatcacaagcctggtgggaggtggttgacgtcttgggtgctgaggctggagcccagggcgtgtgtgaagtaagaggagggggtcaagatgaaagcctgagaagccatcttcagccgctctttccacaggcatcagcatcaaccttttgactacgggacacccctggaggagtgagactttggaatcaacattcttgaacaccccatgagacctaaaaaaaacccctgcatatagcagctgttctgtaaatgtttctagactgacttatttcttccagacagcaagggattgtattataatgagaatctcatttaaacaaattcatcaaaattcctgtattatagccaaacttgtttaaatgtctctacctaggtggaattagcagctggcatctttttaaaaaaattatcacaatttttaaaaaat

SEQ ID NO: 334263 - DNA, 564 bp, Homo Sapiens
aaaccctgtgtccagcctgaaagagcccaccagggaggcaagcaggaagggtcacgatctctaaggggggagagaggaaaggagaggaagaagtaaacactccaacctgtgcctttcggggacaggcattaatctcctaacaactcttggccaaagcagaaagcttgttcagggaacaaggtctgactcttcccaactcccaagatttcttgctgatgtggggaaagacctgccaagaacccttaggctattaggaaatatttttgagtggctaaaggctaaaggttagttataaatgatatactttctgtcctctccccgcggcctctgcattctcctgctttctcctgccctgaacctctccagctaagcctccctccctagagactgggacacacaggaatctccggggcagatcagagaagggaaacagggaggcttccacaaaggattacacccagcatgagctggtccaaagctttctcttcctgcaaagagctctagaaagaaaaggcctgctgctggggattcaggaagtcaaacctgggctacctccatcctaag

SEQ ID NO: 334264 - DNA, 763 bp, Homo Sapiens
  misc_feature (50)..(50): n is a, c, g, or t
  misc_feature (118)..(118): n is a, c, g, or t
  misc_feature (413)..(435): n is a, c, g, or t
gaaaagaaaatatataaagttcccggaagaaagagactaaaataaaagcnctgggcacatggattacataaaacagaaaaggggttgtaagtatgtgattatgactagaaacacaaancaatcgacttcattttttatttaattttaatcacaaattattaaccttgcaaagttttaaacattaaagatctaatctgcctcgatcctactgtgtccctaggattgacactttggtgtgtagctttccaaaacttttctgtggacctacaaacatatttgtcagtagaaatatgcactatcaggaaggagatatttcttgaacgcctttccatgacagtacatagagatttctcccattcgttctaacattttaacagtcttcctaaagaagcgacttctgaaagtattatttnnnnnnnnnnnnnnnnnnnnnnncaactcctgttccccaaacctcaagtggtgagggggcgggggaaaaatgctcaagtcgaggaatacaggagcaaacttacgctttcaaggaggtgtatgggactgaggcctaaaggcttcgttagagaagtcatcgtggataaaacatccaccctcacacgccattacaggcaccgactccccttcctcacaaccccaaatcgaagacctccctcttttggagagccgattggacgactggtcccagcgctttccttaggctgtccgtctactggttccagattcgttccatccgtttaaccgcccgatcccgcattccccattggag

SEQ ID NO: 334265 - DNA, 405 bp, Homo Sapiens
ctggagcagcgaaccctgagcccctacattcctgccccaggaaagcctcatgtccctctggagactgactggccaggccagctgccatttttgatgccagactagactgggcagacgggtgaggcttggggactctgggctgtataaaagttaataaataataataataaaaccctcaagtcaaccttgaagagaaacaaggtcaggaggaaacagggccccagggactgggacagaggcagtccctaggttttcagacaagaccatggctagctccagaagcccctgtggtggtgggaggggcagggcagggaggggcaagaagagggggctgggcagcctcttcctgcttaggtccctgcccggccagctccagttctggctccagcccccttctcagagcca

SEQ ID NO: 334266 - DNA, 995 bp, Homo Sapiens
  misc_feature (441)..(441): n is a, c, g, or t
gcaagcaaagtaatagagcaggtggcagggaaagaagattctgagttaggaaagaggcacatgataaattcaattctatctttgaaagattagagacagactattagcaatctgtaacaatgccaaatttccagcagctatggttatgaaaggcctaactctggtagtgttggtagccagatattctcccctctggtaccctgagtctagaaattccagtgggggaaactcccagaaagatacaaagggacctaagacaggctgttgccatgcaacactagaacagagttcagaataattgtagctgtcatattatctcatccagagagaattagatttggaggcaggggaaatagactagatgacttccaaatgtcctttccagctccatcattcggtaaagtagtttcatgggaggaggaggtaagagaaaagtaagancaacaccctaaaacaagctactgttgcaggcagctagagaatggaaagttagaagattagtgatcaatactacttctatcactgactcacagagcaacctttccctctccaagcctaacacgagagagcatagattagttggtgtgggtcccacaaaggccttcctgccccaccagccccctccctacccagagggctgttaaaagaaaagcgtaaaggaaattcccaagatggttcctgctctgtctctatcatctacactttcacaaagggccaagtgaactgaagaacccaagtggagagatgcaggatcctctctcatatgacctctcttcctgatccttttccccccacttaagtctgtaggcagggctggttcaagggttaaaagactaagaatctggctcctatttaccaagtaccactttagtgccactcgagtggctcaagtaatgctaggaatggcaggagaataaacagtccacatagtccctgttaaagtttagctgaatgccgacccaaacaccttcaaatacttcaaggatctaggctct

SEQ ID NO: 334267 - DNA, 654 bp, Homo Sapiens
ctcatttaacttttttaatgggtctcaaaattctgtaagtagcagaatcttctgtctacagctcagtgccttttacctgatagctgatcctgaaaactcactgggctttcatttaggatagtgtttctctgcctggctggaaatgacaatcacctggaagcactaaggcaattctaacacctaggagtcatctcataacaacttggctcagaatcttgacttgggagcccctgtgggtcctagctccccaagctgtggattagggacacctttggagaccccaccgtgcaagatgccttctggcctgttctccctctacaaccccactccatgagcctggggatgacactgcttaggcagctgataaagaacggtgcctttctgtacatccctggtgtcctagatgagaacccttctcctggaattttaaacctaaagaggtgtactaaattctacaaaattaattactggtgggtatgctttcttcccttgccttttcttcttcactcaactatggaagagatgccacaacgcattcctgtggaggctcagccatgccaaatgaatactgatttcaactacaaatggaaagaacagtgtgctggtttctggacttttctaataggaacaaagaacaaagttctaccaatagtg

SEQ ID NO: 334268 - DNA, 980 bp, Homo Sapiens
  misc_feature (409)..(409): n is a, c, g, or t
caaaatgcaaagtgaaattgatcgagtcatgtaagattttgtgtccaaactccactgggctgtggataattttaccctcaaggtcctccacactgtagtatggacacccaggtgtgtcccatagaggacataacaaaaatgtatcttaactgggaaaaaaagattaacaaaaagaatcgaagatgtgcctcagctgcatgaatatagaaggagaaagatccctctatgtcattccctgggtgatagcaggagaacattatcctaagtaggaaaaaaagacagtggaaacctggttgaaggagcttttttgcacatcaccctggggagccacaaaagagagacaggaacaaaagaacagcttgcaaaggggagtgaaagaaacccaaagaggcatttggcacagggcctnactgggaatattgatatggcaaagagagaaaatgaggtctgttttctagttagagaagattgatctattcaaaggactttaaattttgttgattcactttgggtgcatccatgtgaaggtttgagttttgaatcatcatgatttttagccagtaaaagtgttctgggttttagcttcacccacatggacctcaactcgctatttagaagtctactgcccttcaggtgggttgccaacagactctgcctttgctgtacctgggagaatggcttcctcatcaccacattctgcatccttccaagatggcagtgaagatcttcccagggcatctggcattagcagaatgcggctgatgaggaaatatgaccccagtttaggccgttttaccagaatattacacaaattacaaaataacttgatagctagaagagaggattttgaatgtttttactacaaagaaatgattaatgtttgaggtggtggatttgttaattaccctgatttgatccttgtacaatgtatatcaaacatctcattgtacaccagaaatatgtataattttgtgtcaatt

SEQ ID NO: 334269 - DNA, 647 bp, Homo Sapiens
acagaaaaattagaatgaatcatttgctatttatacaagaactacttttaaaaattacactaagagtcccaacaatttgagaacaacaacaaaccacttaacttctatttctactcagtttctggggacttggctttgttactgttttgaaatttttcatactttcagaaaaactgcaaaaatagtttgagctttggtttttgacaaacattctttcaaagccggacctgcaaactgtgtcaacttaagcctctcctttactcatttctaaaagaacataaactagaaggcactacaaattcaaagtcctttcagaactaacagagttaggaaaaagaacttctgttacagcagccagctgcacaaacagctcactctcctgggaacaggtctctctcagcaattagatcagcagatgtgaggttttgtgcatcaatgctaatctgtgtttatacaaaggcagaatccaaaaccaatgactgcagaggggagggaaaatttccagtccaatttaaagaaatactaggaggaatatgacaattttatcataaagacatctggaaattacctaacctacgctgaagtcataaagaaaataatactaattgctgctttaaatcctttctggaagaaagccaaatataaat

SEQ ID NO: 334270 - DNA, 533 bp, Homo Sapiens
acaaacacatacagatataaatcttgcacgcacagatggaagaaatagagtccacagtgatgatcactccttctattcacatctctccctcagaacctctgtgagtcccatgcaatggaagattgggtgtttcacttgctgaaagatctgttttctttacaggatctgtgagtctggctctacgcttcaagaatagcatttttgggaaatctgactctggtgctgaaagtctgtgctcacagggttgggttgatttgaagtccatggaaacaactgtcaacactctagacgcactagagagagaaattaagaagttctccatcaattacaaaggcaaatactgacctgagataatcgtgagagggaactcacacagtccacttccctttgaaggtgagagccaagggcatgtccagcagctcctgtccacatccctttgggcgctatcccagtgactcaccacttcatctcttaggggccacatttagctctgccctacctcagcatttcccaaatttattgaattacaaaag

SEQ ID NO: 334271 - DNA, 736 bp, Homo Sapiens
ctgagtgttgattaaattaaaaatatagtggctggacaaggatttttaaaagaggcagataaaaaggggtatagacaatcttagacaaagaaataagagtcttctctcaaaagataagagctggccttatattttctgcaaacctggtatcagtgaagaggatcaggaaggagattagaaatattttgtttctcagattctgtttcaaattttaggtgtaaatggggatgcattccatatatgatatggggcatcactgcagtctctgcctcccaggttcaagcggctcttctgcctcagcctacggagtagccaattttctaaaaacaaattcttgcttttgtgttatctatactttaggaataagggaactaaaactgagcctgttggaaatttgttttaccattaagcaacagctatcctttgatctttcaataacaaacatctcaacaaccatggccagaagacctatctaaatctaccaaaataaatcatacagaaaaagatttacagggagaagtcagaaaaaaagagtgaagttacacgtaatacatgccttttcccaaattcaacattcatctccctagctaactcactgcagggtctggatgttacctataaagacgttcattttaggccaggtgcagtggctcaagcctgtaatcctaagaccagatccttttaaaagacatagaaaccattctgagcctgcaactgcttctcatttacacagctt

SEQ ID NO: 334272 - DNA, 387 bp, Homo Sapiens
  misc_feature (240)..(266): n is a, c, g, or t
tgctgtttctcttgccctccccccagcccggatctttacgcaactgtggtgaagatgccataaattccataaataactgggccaaaagcagagggagatttgctgaaggaagggtactttttcagagaaatagttaccttaaatacagagcagtgaaatcttacaaataaatgtcgagtccaagagaaatgctaagagatagaaaaggtccgagagcttcaatatctgtcaaataggagnnnnnnnnnnnnnnnnnnnnnnnnnnntaactcctattatatttcagctctgagacaaagtttagattgaaagtgttccagatattgagcagagtggatgaagaaagctcaaatgtagacaccaagtggtaaaatttcagagcagcaa

SEQ ID NO: 334273 - DNA, 716 bp, Homo Sapiens
cagagagtcttctaaattttatttagaataaaaccagcatggtagaaatacatcagtgatacaagtgaaaaagaacttgattccttaataaaatgacttacaagtgcaaaaatggaccccatatgtgctctgctttacttacacccaactctaacctgcgagcatattaggaaaaaagaagcaagtgcatccaataaaattatttgtaacttaatttgtatgaggcgggacaaggttgcttttgatccaagtctggtatttcttggttaacagggtgtagattccaggctttgtggcaacaccacattcatgacctccagagactatagcgtggaagacacctttacagatcaaggggccccctgagtcacccttacaggaatccttctggcctttggcatcctcctgcacagaccatgtctttggtgatagaagggtcgccgttgtagtaactttggctgttgcaaagttttcgacttaggacagtaccagtgacttctcgcagggtgtcagaaggtcttaatgaatctggatcggtggctccccagccaggtaaccttgcatttggttccagatctaagagaggttttggatcttatgtggagcatcttgacatgtttattgagttttgcggctgtttgaagcttaaccagcatgatatcatttgattgaggatctgatgtaactcttgagaatggtataaattttctcgtgcc

SEQ ID NO: 334274 - DNA, 961 bp, Homo Sapiens
  misc_feature (900)..(900): n is a, c, g, or t
tatcaataattttacaaccagttttatttaccaaagattcatgtgaatttgaaaagctatttgtacttaatttataagtactaatttacttaaaattcaatttggtagcatgttagacacatggtggggaaaggaatgatgtgatgtgtcagtcaggataggtcaactgctgtaacaaacagccctcaaatctcagtggctgaacaccatacagctctgcttctggctcacacaaaatccttgcagacggtcttggttaggcatctctcctccttgtggtaacacagggatcctggcttcctccttgtgatgctgttgtcttcatcctgcagcttcctaggtcaccaggaaagcagagagtgtgaggaaggcataccagctgtttcacctccttggccctaaaggggtgtgtattacttctgttcataccttagtccattcaggtggtgggcgcgtagacttccatgtggtgattcagggacccaggcttcttggaactagtaactctgccaggtttcttcccttagatcctttgccactagttagacttagagagggcagagagggcctcccaggagagagaagtgacctaattaaggagtcacatggtcccagacactgcaagggggtggggggctaggaaatgtagtcttctggtgtgcctaggaagaagaaatgcattcagagagtggaagtactgagtctctgccaggacgggtggcagcgttcacaaggggatggaatccacactagggatggggagaggtgcagactagaggcaagaaagtggcaaggtcagtgaatggaaggtcgagaggggttgggaaatcgtagccagggagggtcctggaggagaggcctaagctcaaaggctaggaactggtggacccaaagtgggangattaaaacacatttcagagccagggctatttctagtggggagaaagtacagggcatgggg

SEQ ID NO: 334275 - DNA, 1054 bp, Homo Sapiens
cttctgcagatctgaagtgtaactttttcgacgatctttccattttgcaaggtcctgacagaaaaatcacatcagcaggggcacacctgaatttctatacaccctttctagcagacagaatgtgccagagtatcttattacatcactgaaactattcactccaactggatgccaaggtgccctaattttgctttttatagccagcgtttctgtaccaagcctttatctcatgtgtctgtctcaaaaacctgacctaataagatagaccccatttttgttttcccagaaagtatctgcctcattgcacacttcataaagaatgctaaatgcttgtaattaggtgacagttagatagatcaggaactgtttccagttcgttttcatctcactccaaaaacctggctgttctgcgaaacatgtttcactggtaaggccaaaacagaaacacgattgtgatggttacgcgcagatgcatagtctctttcatttcacaaacagagttcaatccctactttgaggcaggcccaagtgtaggaactattaatacacacatgcatagggcactgttcccctcaagaaactctcagtctacaggggagagacagacatataaacaaaagttcagtaacaagtgtgacaggattgcatgagacagtggggtcctaagaagaccatgggtccggttccacctccggaagggaaggctttggaaaggctttaactgggaaggtgagacttgagtatgcaatttcagaagggttaagtccacctaggtcagcgcaataaggaacacgtggcaggaacaaaccaacacctgtcccccatatccccaggaacgttaagcctaaccttgctgggtgaccccagggacaatcaacctaattcagcttttcaatcccccccagaaacctaggctggttctgacacccagggggttaagacattttacaaggtataaagttttccatgtctccaaaatagagaactgctaagaactgttagtggcattccagtccaaacagaagcacattcaaggtctcagacaaaaccgaat

SEQ ID NO: 334276 - DNA, 714 bp, Homo Sapiens
  misc_feature (239)..(597): n is a, c, g, or t
atacaattattacttgtcaattaaaaattttaaaaaagaaatctgaaataacagttgccccctatgagcatctcacgataaatccctttaatctcctctacatatactgagtattaaaaaacagaatcgtctagaacattgttgctgttctgagacctgtctttctcatttaacacaagtgaacatttttctttgtcagcaagtagcggtaaacatcatccattctaatggctgtattnnnnnnnnnnnnnnnnnnnnnnnnnnnnnnnnnnnnnnnnnnnnnnnnnnnnnnnnnnnnnnnnnnnnnnnnnnnnnnnnnnnnnnnnnnnnnnnnnnnnnnnnnnnnnnnnnnnnnnnnnnnnnnnnnnnnnnnnnnnnnnnnnnnnnnnnnnnnnnnnnnnnnnnnnnnnnnnnnnnnnnnnnnnnnnnnnnnnnnnnnnnnnnnnnnnnnnnnnnnnnnnnnnnnnnnnnnnnnnnnnnnnnnnnnnnnnnnnnnnnnnnnnnnnnnnnnnnnnnnnnnnnnnnnnnnnnnnnnnnnnnnnnnnnnnnnnnnnnnnnnnnnnnnnnnnnnnnnnnnnnnnnnnnnnnnnnnnnnnncattccttgacattcctggccccatcactgagatttccacctccggggtcacattgctgcctcttcttcctctgtctgccagtctccttgtgtctacttttaaggttgcttgtcact

SEQ ID NO: 334277 - DNA, 372 bp, Homo Sapiens
  misc_feature (47)..(47): n is a, c, g, or t
  misc_feature (51)..(51): n is a, c, g, or t
  misc_feature (62)..(62): n is a, c, g, or t
gacaggaatcagcagtctcatcactatggtgggaaacaaacggcacnaccnttatggtgganatttgacaacatgtacaaaactacttacacatttcccttgtgacccagccattccactgttaggaatctgccctgaagatacaactccacctattaaaaaatacagccattagaatggatgatgtttaccgctacttgctgacaaagaaaaatgttcacttgtgttaaatgagaaagacaggtctcagaacagcaacaatgttctagacgattctgttttttaatactcagtatatgtagaggagattaaagggatttatcgtgagatgctcatagggggcaactgttatttcagatttcttttttaaaa

SEQ ID NO: 334278 - DNA, 823 bp, Homo Sapiens
tacaggtcattttttcttggccaagaagatatcattgtgtctaggtgggaggtatgaggtcagaccaatggttctgcagaaccctgtttcagacctgggatcccattaggcatgcaggtcagccacacagtcttggccgagtgcagtattgcgcaaacgtgccttgagtttccaatctggaaacatttcctgcttttccacttccagccagctctcatcctcaggcagaggttgccagccattccagactaagcgggggtgatgacgtcagtggagagaaccggaccagcagcctggatgctccgactcccgcctggggcctgtaatcctggcctctgaaggatgtttctgaggtggtagtgactcacctgggctccaggctggcaaagctgcctcgagagtcctcattcagctccctgcatcttgactatttctgaggtaaactgtggggacctaagcccacaccacattgaatcccttccccaaacccaacaggaaacatcagattccatcatttgtaatctatctggcttggatccatgacagcattccttacgcaagccctgactccaacagggctgaagcctgcaggccgaggctgtgctggggagtctgagttacaggcaccattctcctcccctcctgaattgagccctattaataatggctgaagaaaagcaggtaaatgcccctcctaccccagggaaaaacatccagccctgctgtagaagccacacacacttgactttctccagagatgtttagggcaggggaaatgggggaccatggcatgtcacatgcctcctctgaatacagggctctc

SEQ ID NO: 334279 - DNA, 558 bp, Homo Sapiens
  misc_feature (539)..(539): n is a, c, g, or t
cagcatacaaatattgttcatgtaatactaagagcagtcttgaaaactgagatgttttcaaaacaaaagataggtatttatttatccaagatgggttcctgatgtatctagaacccaattgtagacaatgtctcaggcccagatttctgtagaagtcaaagggaaaaagaagggttgcttggtcatgactctaatacccttccccttcccaaataccctggccttcaactggcatcagctaacatggtcccatgtgtgcacccctgaatggccaaaccctggggctacacacagtgcctggtaaacaactgtcactcaagtgcctgaggaatgaatagaaatgagtgattttaatcaccatttctaaggcaacatttccacactctgggagattctgtctagaagcaagtctagacagaggctggtctagaagcaaattatttatgtgtttccactgtataagtaaaatgatctacatgtccaagtgctcaataaattaaaagccacaaaatgcccatccttccttgtgcttgggaatnctgggagccactggtcaca

SEQ ID NO: 334280 - DNA, 717 bp, Homo Sapiens
  misc_feature (26)..(26): n is a, c, g, or t
taatgtaagtttagtagagtccttgnatggagaactaattatatcatacattgccgctttctcactctgctctttttcatccttgcctaatttcattttcttctgcttcttttgttttctttctggagaatctagcaagatatctggtggaacatctcgaggtgatgaacaaggtagagactgagattgtaggattaaaggtggtcttgagcctttaggagttccttcacttccagcaggggagcatactggctgtggagatctcaagggaaaagatgcagcattcctcattgttgaagaatctccatcgtcactacttagcctgtgcaccatgtgtaggtagtcctcacttgaaccatgtctaggattatcagcatgatgattagctgaattgccagacaacggaccagaaactttattatcatgtatgtttctcaaaccacctgcaacaatgggacttgataccgatgcttgttgcatctgtggatgtgttgtgtaacttgaaggatgggaatatggcatgtatcctgcagggctttgtggggcgtatggactaggcactgggctattttgctgtggcataaatctgttcccagagcttgtctgtggtggcacaaaccggctggaggggctatgtgagatagtggtttgttgataattggaagatgcaggactactgtgcatggaattctgagaaagtttatactgagacatcat

SEQ ID NO: 334281 - DNA, 937 bp, Homo Sapiens
gaagaggaaaatgtctgttttgctttttaaataagagctaatggcgaaaaatcaaattaacttaagagaaatgtgtagacaggaacctgtgcatttaagaagaatatctgcattattgttttttctgatttataactcttgagtcacttgctttagtttattttcctttcccctgcaaaatctgaacattaaaagccccttttctctagttactcgatatgacagacaggtctgcttttacagaaacctttagcagtgaggagaaaaatcaaacagggaaaataatttactctaaaacgcctgaaactgacaagaagcaggatgatgaagcagtccagaagaggccaaaaaggcccaggacgccataaggctggtggttgggtcagttaggtagggtttccgataccaccacatgccctttcacaaagcaatgctattttttgttctttctccttgtgtcctttccattacatatttgcaagaacaattcagatctagaaaacatgcttgttatttacttagaaaccaaggaaagatgaagctggggatgcccttcagtgctgatagccaagatgcagacagatcaaaagctaaatccaatttaacccacctcaggcagaaaaagtaatcgaattaaacttcctttaaatatgataagtttggggctcttaaagccaggcacaaagaaccaggttagagtgagctgttaagtgaatggatgcattgagctctagctgccccacccacagggtgtttgataagctgttgattgcctccatcactgaaaactgattaagctgcttatggggctccaggggctaatggcctggccaccaagaatacccctgccactgatttaagtaagctgcttggcatgtatggtttgattattaaaggaggaaaaaaagaaaagggggtggagagaaagacagcaggg

SEQ ID NO: 334282 - DNA, 428 bp, Homo Sapiens
cttttgattttaatgccattgtttatttcctgattggctttatctctctttagattatttttcttctctgtagcaatttctctttccttctctctcaggtcctcttcaagtgcctaaattagattagaaaaagattcactaagttgatgcgttccaaccaaaatgcaccataaatatatctttaagagcacactcaaatgcagttattctatcttattcctgtcaacctgtgattaatgtttccaagtggagctgaacatagtgccatcagctccaagttactgtgttaccgctcccggcaacagggctgggtgaaggggaaggggatcaaatcagttgagacgatgacagctattcctatgggaaggattccaatgccttatggaatttgaatacagtcagtcagagtctttgaaaccataccctcg

SEQ ID NO: 334283 - DNA, 889 bp, Homo Sapiens
ccaggctcgcgcccggcgggagaggaggacgcgggcggcccggagcgccggggacgtggtgaacgtggtgttcgtagaccgctcaggccagcggatcccagtgagtggcagagtcggggacaatgttcttcacctggcccagcgccacggggtggacctggaaggggcctgtgaagcctccctggcctgctccacctgccatgtgtatgtgagtgaagaccacctggatctcctgcctcctcccgaggagagggaagacgacatgctagacatggcccccctcctccaggagaactcgcggctgggctgccagattgtgctgacaccggagctggaaggagcggaattcacccttcccaagatcaccaggaacttctacgtggatggccatgtccccaagccccactgacatgaacacctggaccattccacattgccatggccccagggcccagattgagggaatagccaggggtgcgcggatgacctgaaaaaagccagaaagaggaaaggtgccgccgaggctggtcgctctcagctggggctcatcgcatcctctaccaagagcgctcccaccacacaggtcccgcccctcccagcaaagcttctggcgccgccctgtctgaacctggagcggctgggaggatccccctcccaggacaagccgaggaccccaggatgctgcagaatcagtgagaggtccctctggcctgcatgccaggagtcggtcaccgccctgtgcttcctccaagagacagtggagaggctgggtcagtcccctgcccaggacaccccggtcctggggccttgctgggacccgatggctctggggactcagggccgcctgctgctggacagggattccaaggacacgccgagccctatgcag

SEQ ID NO: 334284 - DNA, 811 bp, Homo Sapiens
tgtagatgaggaaattgattcattggcatcataagtagatgtatgatcttgaaaaatatacagagccaaatcgaacaaagggtttttagctcccaattcagggagtttacagcctcttccctgtggcttgcatggctccttctcacacacaatcccccgcctgcatggttagagtgggcagtccagggatccaggctattggagtgaagggataaaaactgtgggtaactcacagccaaattggctaatttgttctgagtagtgactgatagagtgttctgaggctacaaggaaagaagaggtcggccacattttattttaatgcatttccattaaagagttcataaattgttcttttgagaagactcttaagagattaagtttaggaaatattgaaaatggaggaaaacctccgttttaaatatgatctcctgtgttccatgatccatttaacatcaaaccattcttcacttgtcttaacacttttcttaacagtgagacacgcatcaaagtgaattcaaaacaatgttaagagttttaagatacctaatatagctgaaagctatttccttgttatttaataaacgtctgattttaggcaaatcccattcttccttatttttggacatcaaattgtagttttacatttatttgtttagggttatccacaacatgaaacacacacaactcattaaaagtaaattatattttcagaagtccatcagctaatgccaggtaaactgtaccagcaactaagggcagtggacataatggtttggagaataatgtcatgttggaggacaaggttgac

SEQ ID NO: 334285 - DNA, 805 bp, Homo Sapiens
caggcattctctctcaattatccttcctcattgactttggtaatgaaccttcataaagagaagataaattctcctgggatctttgggtccctgagaagcaggagagctgacattggaatagagaaaagctggcatcttaggctaaatgatgactgaaaagggtgtaggcaattttcaggtttcttcctagattgtccaactcaatcagggcaaaggagggagcaggaagtccagaaaatcatcatgttcatgaagaaagagtatgcatttgtagagagttattcatgagtttgagctctccagaggagccggtggagccggaaggcattggatgggctatcgtagcaggaaaaggggccatttcaagatcctaaggtctaggattcaggaaattcaatcaatcaacacctcattatttgtttctatctcaccttcttccataaagaatgatgatgtgtccctgtgtggtcatgtaaaatgggttacaatttggagacagaggctgagggtggaaaggctgaagaagccatgaagaaattgtgtctgggacctgcgggaggggcagacagaagacgcaattgtgcgcaaagactgcatattctcagtagccagtgatttaagtttggtgtgaaggatatagcatctttgggaagcaatttggtgattctcaggaggaacagggctttttgaccaaatcagtgttacacagaagcagcatgtggttgtgataccagttcagaaaactatacatacataacctgaaaagcgaaagttccttttcatgacagcatcccccctcaaacct

SEQ ID NO: 334286 - DNA, 730 bp, Homo Sapiens
atggcatgcgagatcttgaaagatcccttttgttttctcaaactttcatctacctggaagattttaacacagatgctaaagtacaggggccacaagctctggtgaagtcaaacgtgcaaatgaatgacccttcccaatatcggtaagttgccatgggaagtggagaaaacagtcccctgtctcactctctccacccaatcgattacaggccttctgaaatcctaggcagacagcatttttgttttccacccactaattatgtttctggaaggctgcactcttagcagtgtttataggcacataaactttcatttggaaaccatcttttaaaaatcaagtgactcggggaccaaataccctgaattccatccaaggtcttgagtgtggcctgtgcctctgcctgaaactggacttgccagtttctgaggggccgggacctccccaagacattcgcatgcctgcagcgtcacagaaggcttcgtgctgtccgaggggcagggtggagactccccccgcgacctcagaaccagttggcccaggacaccaacactagaaaccgagccaggctgttacaagtttggcattacatagggattctttccctctcctctcctattctgtgtgtttggtgatgagaagacggtggtagggaggacagaaatgaaaaaggaattctgaagttcggcctcatccctcttaaaaacagctcaaggagcacctctgaggctat

SEQ ID NO: 334287 - DNA, 711 bp, Homo Sapiens
aatggaatgcacaaaaagtgctattttaatagagagacacaaaatattacatattcatgggacttagggacaaaactatgccttggaaattttctggaaaatcacatatgctccaaagaagttgatacaaaggcagctaaagatcttggtttgatagtggcaattctaccaatacaaatacaaaggaatcaacaaatggacaactctttagattacagttatgacacaagcaatccacaggcattccagtgaaaactgcacagagctctctctgttgttacttgcaaaaggctagcatggaaatatcttgtgttcatgtgaagagttggcccatatttccttgcgtgttatcacaagcaggctaaggggcctccagtccttatgacataattagaggagagcttgggaggaatttccagacaacagccaccttcaccagccagcccttttgtctgatggtccacacaaaactcattgtatgagtcagcaggatctagaaggttcacttcctccacagtggccgacagattagatgaatccttctattatgtttctgaacccagacccagccaggacttgtctctattcattttctgggctgtgtctaacaggagataataggctagagagagatgctgggaaggctttattcgacctgttccacagggcagtgaggcaccttcagctctgaatcaccgaaagagaatctga

SEQ ID NO: 334288 - DNA, 525 bp, Homo Sapiens
tcaattctagataatgcttcttttccaaagccatgacttagaattcctgctgagtctcgggaacgcacaactgttccatgaaggctgtctccgctcatgactccagccagccttgtcgctggacaagtgaggaaagtgaaatgcacagaggccgaggttgctggctggatcagactcgggcccaggatggagtctgcgtccccttactctttgcccttgggttcccaccccattgatggcttttacatgcacctggagttaacactaccgtgtctccctgcagccctgcccaggtgcagagcaagtcaattctaacctggctctgtgggccatcggaagagcgtgcccttgtagccaggttgcttgactcctactcagagaaatctgcggtctacggtgggaagcagcagtttatcaaatgaggaaagccgaagcctgaagaacacacacagcctgtgccactcacccctcagtgggtgcaagttcaggcagggcacgccccataccacgtggctccttccagtt

SEQ ID NO: 334289 - DNA, 640 bp, Homo Sapiens
atgaaccactcttcccagcctctctcttacttttcataatagctattcatggggagcaacagtcactgggttccatttcccttatttgcccagctcttgccttttagactgacatgctccaagcagtgaaatggtttcgtgcaagtgggaatcaggactgtcaaagtaagatgtctattaatccctagactggattttcaaatccccaaaacttcaaattagctccacttctttcaggcatttgcctttctttttacattccttttctgcctcagaccccgtggctctcaaacggcagaggatggtcagtctgaatacttcccctaggaaaaccgagagtacagaagcatcctggagcagggctctgtcctctcagagggcaaagctggatggggaggtcatgccacttcagtccactgcttagttaaagcagagtctccgcaggtggcgagcaactggggtccgatgtgcaaacagcacatcagagctgaggagctgctggcattactgacttcatgctgtggagttccagaaacccaggctttctaatcctgagtctgctatttaccagggtgaccttgagcatgatctttaactcgttaaacctcactttcttcatctttaaattggggagaataat

SEQ ID NO: 334290 - DNA, 1003 bp, Homo Sapiens
  misc_feature (100)..(135): n is a, c, g, or t
cctttagacagagtcttgctctgttgcccaggcagaggttacagtgggctgagatcacgccacagcactccgctgggcaacacagcaagactccatctcnnnnnnnnnnnnnnnnnnnnnnnnnnnnnnnnnnnngcagaatcctgttagctggcttaaattaagcatgacattaccattatttaacattttttttaatagaggcattttattgtttcttaaattgctttttagttatttggcatttccctttgtcttcatagcgtactccaaatagcgtcctaccaagaaacctcacggtgagatgtaataccaaagcaaccatcttgcatttaaatgtataaagtatcccataaaatgagaataatcctacagggtacacacacaagttagttttatgatattatactttttgtttaattgcttgacatatctctgaaatagtctgagagaaggctataacacatttataatctgtccttgtcacttggataaacacttgggttcctgtctggggaattgttaatgcgtgtggtgtagtgattcagagcacgggctctgggttgcttgggtttgaatgcttgcatagtcactagctgtgtattcttgatctaattatttaacttaaactgtgcctcagttttctcactgtgaattaggttatgaggttaagaaaaattaaaagtacttagagcagcatatatagcagttaatctataattgtaactattgctactgctactgtgcaaagacctacaggctgcgaatgaattgtggcaagaacaggttacctggggcttagggtaggagtgaaatagtctcccctctaaaaggctgagtaggtgggtcatagtatggagtacacagaaccaaggataagacatttagacttaatttgatagattttgaggaattaaacatttctgatcaggaaagcgatataattaggaagattaacttagtaataatacaggattaatgtgtacagggtattgaagctcta

SEQ ID NO: 334291 - DNA, 1075 bp, Homo Sapiens
agggaagcttatagttatttttaatttaacacagtgcattcagggcttgctgatgtgtgtagactgtttccatcaaatgtgagaaaaggagctcgacacagtctgacaatctctggcaatgcatctggtcctgaaaactagacccattccccagagaaggactggggcaggcaggacttggcaggaggtgtagaaagagacccagacaggaagaaaaccatcctggagacctggaagacattgttttgcatccgcaaactccatcagcagacacataagatagtgatgtataaaacagtggttcccaactggggcaataaagacagctgcagagggagaaattcagtttgtccccccaacttcccacccacccaagaaaatatttcctggtgtttggaaatgtctgcgttttacccaccagttggaggtctggccagcctcagagctgagaaccgaggctgtgatgagatgggggtttgcaggctcgtggggctgccacagcagaagggagctgtgtgtgcttcagctgtggctgcctctcccaggaggttcatcacggtcagaggaacccaggatggctccgttgtcatcagggcccaatcttccaccatctagccttaataaatctacagcattaggaatcagattggcagcaacaagtcatcacagagaggacagcaaactccccaacctctcacccttaatggagcaggagtagggaagcagggagagaagtcagaccctgtgcctcttagccccaagttgctggagcagtcccacctaagtcagcttgtagtaaaggataggagctctgaaatgacttcgactgcaattttaatatactcattagaacacaaaaaagtggactgcaatggattcagcagaagagacgggttcactccctcctgtttccttcaatgagttgggcaggggaggggcaataaaactgttccaggccgttcttggcatgtatatctctgagctactcacgcttcatcaaaccagttagagcctagaaggatgtaggaacagggacaaaggtaagtcccttgtcactaagcttcagaactttgca

SEQ ID NO: 334292 - DNA, 985 bp, Homo Sapiens
  misc_feature (497)..(497): n is a, c, g, or t
aaatttgtatttccatgatgttgtatctaaacacatatattgttgctatttgacacatactgaacaattagatatgcattatggattgtatcttttattattataaagtatacatcctcatttctcaggggctttgcttttttctttttgtcactgccctatatttatcctctaggcccaccttcttcactctctgctgacacattagctcagctgaccccacatgtggctctagggtaggaaggtgacccaaaaacagccagtgagagtttcagtagatgcttcatagagcagacaggagattttaattgatgggaaataagatctttttgttgttaatgttgctaacctggcagattttaggcctacagctactgaggtactttgctcccacttggaggcagcctgcctgggaaagaaacccacagagactaaagtttcattgagaggtagaaaagattcctgataacatatgtcgaactagatcaagtcagacnttcagtttctgcacttgtgatcatgtgatccaataatttccccactcactttttaaagggatttaagtgaatgtgagtttctatcactgccccccacacacaaatccgacctattacaagaactaattgttttagcgcttttaaaaaaaagcttttcaacatgttatgtcaaagcataattttcaaaaagatgaagcataggccccgtaaaactaatatgtaatgagcagttgtgaaaattctgtttagttatgtaattaggaaacaagcaacacaataaaccttcttgaaataaaaaatgcaagagactagcattatacacagtgacagaaagaaagctggaatactatcttaatgttagtatttttaatgattaatatctttcagggatacttgggtttgttgtttccaaccagacaaaaataaattacagctctacaggacaaaaattatttgcaatggggctgggcacagtggctcacacctgt

SEQ ID NO: 334293 - DNA, 488 bp, Homo Sapiens
cctatcaaagatatttttgtgggccaaaggaactgggaaaaactggacaccagaggtttgtccccaatctggtctaggaggatgaataagaacacttcagcagagacccaggcaaggtgcagaagggcaggtctgcaaggctcaacctggagcatgtcaggaagcaaactggctcaatctcaaagtgtagtaaagagcagagtcaagaaatgaagaaaaaccaatataatgataatgaaacttgtctgcccccagggcacatcacagacagggagtaagcagaagcaagagaggcagtttttgagtcagtttagagagccacagcttggacagggtgtagccactactcagttggaccatcttcaagaccaagaaccaagtgtactcaggggatgcagagaagagggatcagtaccatggcagaacctctgtattagtgcctaggactgctgaaacaaagtgccacatactgggtagcttagaacaac

SEQ ID NO: 334294 - DNA, 714 bp, Homo Sapiens
ctcttgtttgaaaaagtcctaagtgtatgggaagtggctatggtgccctctcactctgcccctcccgtgtgcttgtgctctgcaggtatggatttaacagtcacgggctttcagtggtggaacacaggttacgggccagacagcagaagcaggccaagctcacagaaggtaaagtggggttgtgtcagtgggcctttcttatttattaggaggaaacgtgggagaaatgctgggaacatttctagtgaaataaacatgattgagcaatagcaaaaaccactgaggacctcaggacacctctcctagagcgattttcctggtcccacacagcttccaagagtttaactggattttgcaatttagcaaatactcactttgcctctgccttgttatgtaacctgttaccgtaactagggaggcctgaaagcaagcgaagcaaagcggctgggcaatgatcacacaggcaatgagggcaggagcaggacttgaatgtcatcctcccgtggcccactctgtcctcccgttttttgtcatccattgtgtaaataatgttcattaattatagaagacttagtaaatacagagaagcgtaaagaaagaatgttcaagaaacagatactcctccctactcaaggctaactaatattagcatttgggaaaatattcttcatgagttgttttggaaactcatttttggttcgggacagttcacac

SEQ ID NO: 334295 - DNA, 545 bp, Homo Sapiens
tttattactttcctgaattttgttttttataataagcatgaatattcaactaattgaattaattgaaaatacaatttattagtgaaaaaaacaacaaatctgacctatgcagagaggtgagaaaagcaagcaggaattaaggaaagaggaagagaaggcctgagaaaaacccaaatctctcaaaaaaggccatttaaggaaatatgtaggaaatcaaagttcaaggctgtcttgcttcattagattatggagccactttccatctgctccaaaaccaacacagtggttaagatggtgcagtggtttaccagggcgcaggcagcgagagtgtccgtccctgcaggtccctgcagggaagagtaatttatccctggcattgtttaggattgccagtgcaagtgattagaaaaaacaaacccacctggccaaagattagtttcctaaaacattttctacagacaatgcacccccttcctgcctgggcctgggagaaactcccctcaccccactgatctggagacagataaacccaggctcaaatttcc

SEQ ID NO: 334296 - DNA, 861 bp, Homo Sapiens
  misc_feature (347)..(359): n is a, c, g, or t
  misc_feature (557)..(578): n is a, c, g, or t
gctctttgaagtggcttttattaacctctttcagtctcactttacagatgtgaaaataagctcagaacaattaaagcaatttgccaaaactcacacagccactaagtggagggctggggttttgaatcctagtatgattctggcatgtgttttttgtggactgaaattcagaaatgctctactcagggcaaattctcagaataggacacatttaaccagttttctatatgtaaggaaaggaagagaaatctagtagcttggctgcaacaaatggcctggggtatgtagagaagagagtgacaggcaatctagacagcaggatgcaattaacaggagcagtcctcgcnnnnnnnnnnnnnccattgactactgctaaatccaaggaagtcaccctgtattgccatagcagcataaagctacttaggaagaacatttcttggaaatgtctgaggcctgatagcctaagagaaaggatatggactcagtctctccaggagagactttatcgagggttcctcagacatccctctttgccctaaatgtttccatgaggctannnnnnnnnnnnnnnnnnnnnnacacatgcgcaagcatgagcttgcactcctgcacttgggacagagggaggaagggagagtgagagtgagagagtgtgggatggggccataatagtctgggactgagaagccagcagaaccagggaaaggttctaggtagttgctgtcaccttcccctaagcaaacagctctatttagataagagtgagaatggtgcctagaaaaagccagaaggtctgatttatcccaatactagctgtgttaagaggtttacccatcaacactcagggctggggccgtggaa

SEQ ID NO: 334297 - DNA, 438 bp, Homo Sapiens
  misc_feature (139)..(149): n is a, c, g, or t
ttttgttttttcacatcagataacacattgtattaggctcacctctacaatatcttagctaattattgctatcaaatattaaaccaccgaagatcctcaaataaggtcttttcaatgtcctttacttataacatcgatnnnnnnnnnnncacacaaaacttgattccaggctggggccactgcctgtactgagtttgcatgttgtctcatgtctgcatgggttttgagtacaccagcttttctcccacatctcaaagctgtgcatgttaggtgaattggcatgtctacatggtcctagtctgaatgaatgaatgaatatgtatgtatgaatgcaccccgcgctgggatggcgtactggccagagctggttcacacctggcaccctgagctgccaaggtaggctctggcaaccagcaaccttgaactggaataactggg

SEQ ID NO: 334298 - DNA, 887 bp, Homo Sapiens
caaaatatgccttcttaatcagtggccctgaagagctctatgttctctcttaaggaccaatttgctattattgttgccaagtaaacaaaaaataccaacaagaactaagcacagatgagactttcctccaagaatcaggatcatcaagtattaaaatagatccctgaatagtttagagaataattggattatactctctcaaaatccctaaatcattctacttctgtaattgtatgagctactctatttttcccgtggctttttcctattgcccaagtttggcttttcttgacagcaggattctactttgttggatgctctttgaaaaagtctgtatttaatggtttttagaaaggttgtagctttcatccagcatttgcaggctctcagcttttgcttaaggatgaatgcgtctcaacacagtctcttctctttgtgatttccccaaacatcttaacatctgaagatccctggaagtgacgagcattgagaattcatcggcagtcatagctaagtcatggaaaaccaggattggcagaccctttacggagaacggctaactgcttctccaacatttcagttattgcagttccctctccttatatcaactcagagcccacccaggaacagacactaatactcaccaagctgcttgcattttgtccaaccgctagtttgagtattaaatcaagtcatgacatttatttccagtttgccagttttgtttctactttctttttaaagcagctaaactttatgtaggcacaccatttcccctggtaaataataacttcctctctgttcaggcactggttaggtattcacagaacgccccctcccctccctctccctgcttctggatttaagaatggggttaggtgaatttt

SEQ ID NO: 334299 - DNA, 342 bp, Homo Sapiens
  misc_feature (130)..(148): n is a, c, g, or t
gcgaaatttcgagaaatttcatttgcatgttgaaatttcattgcaacatggtcccacggagggattcgacgctgagaaagctactgtgcttggggcgggggggtcttgctgtggcagaagaaggaagagnnnnnnnnnnnnnnnnnnntggttgggaaaagtaaagctggtgataatgatcctaacaattctaaaatacctgcacagagacacagatgcacagacacacttctgctcccacaactgcttgcgacgcaggcaaggcgggagaggaaaccacgctcggagaagggacgggactcagcttctaggaatcagctgagaagtggagacgctgggacc

SEQ ID NO: 334300 - DNA, 430 bp, Homo Sapiens
gcaatttcccatggcaaatttttacttctatatccagaaatatattttctaaactttttttgtacattgttctacactgaaatgacaggatttcaattctgtaaagactttctgaaagtcatttcacagcaaaaaatcttggttccataaaccacgttaagtgatcctaacactactttacaaaggccctgtgtttaaactgtgtagaatgttttctttcctccaacgtcatgttctgccttctctgcatatgacttgacaaggtgattcgcttgacttgagcgaaatgctaataaagcccagaacaagattctgacctcccaaatcagcagtttagcgccactcagtttcttggcacaagactatggctctagctttgatcccattcatgaattcactctgcctttactaaggcccctactcgggcctc

SEQ ID NO: 334301 - DNA, 645 bp, Homo Sapiens
  misc_feature (22)..(22): n is a, c, g, or t
  misc_feature (43)..(43): n is a, c, g, or t
  misc_feature (129)..(129): n is a, c, g, or t
ggaaatctttgtactgtcttgnaagcctccacatccggctatngcctgcaagctgctttatccctgcgctagtctcccccgagggtttaggctggccagcacatcctgtcctcctgagctcgcgtgcancacccagagcgcaggggtcactgcacgctgcagggctcttgctgccatggtctcaagcctgaagaggtccgccacaagctggcccatgaagttagcaatgcctgtgcttcagtcaattgtcttgagactgtgaagaggctgaaagacaccttcccgggtggaagaaggagttcactgaaaacttatcttaaactgacccttccctttgagtgagtcttcattcctctcccatgtgggaacccagcctccgatgccccggggactaggggaaacagttggaggtccgtgccgtccccagcctgccacgggtgcgaggacagccaagtcctgagtgactcaagatgcttcacttacatggaagaaacttctaaaactctaccgagtggtttttgtatatactaaagttctatttagagcttttctgttttgggcaagttcgctgctccttctatttgggcactttggtttttgtactgtcttttgtgacggcattgattgaacattttttactagtaa

SEQ ID NO: 334302 - DNA, 432 bp, Homo Sapiens
acatccaatattgatgctttatttccataagtcaccaataagagaatgaatttaattttaatacatttatttttgtgtgattcttaataaaacactttcaaaacattctgtacatttcatgccactcagaaccgcattacatttctacaaatgtgatttgttgggatgaggtgccaagatgtctctgtacaaagatgtacaatatgtacaatcactgtaagtgcaagctgtgcaaagcagagtctagaacactaattcatgccaaggcttacaaaaacatttcaacacataagactaaagcttgaaacagcgttgtggttttttccctgggcaaatgattattttataaacaagtatatgtatatgtcatacagaaagaagagtttgactcctcagctcagtcagtaccatgcagctgactggatacattac

SEQ ID NO: 334303 - DNA, 511 bp, Homo Sapiens
  misc_feature (21)..(21): n is a, c, g, or t
cttggatggctcagtcagcantgccacccttatcttcactttggagtttactaattggaaggccacttgcacccagctgttgaaaggatgctctctgctcgtgcctcaaacgcttggattctacagcaacatattgccactgttccatccctgacccatctttgtcggtttggaaattcggtcccagtctaaaatcagaacgtctacggtctgacagttatattagtcagctgccacttcccagaagcctacataattatttgctctatgaagacgttctgaggatgtatgaagttccagaactggcagctattcaagatggataaatcagtgaaactacttaacacagctaatttttttctctgaaaaatcatcgagacaaaagagccacagagtacaagtttttatgattttatagtcaaaagatgattattgattgtcagataggttaggttttggggggccagtagttcagtgagaatgtttatgtttacaactagccttcccagta

SEQ ID NO: 334304 - DNA, 486 bp, Homo Sapiens
taaaacaacataaatttattcttacacagtgctggaggctagaagtctgagagcaaggtgtcactagggttggttcctactggaggctctgaggaatattattctatgcctcactcctagcttctgatatatgccatcataggtaaacagccctgaggaattagcagcagtttcctggctgaatggttcatcatattctgtgttttctcatagaatggacgattttagttgaaaacaagtttgtaggcagacgtttcagaagaagttggcagaagtttctgataccagtattgtccacaatctttggcagtctttgtcttaaagatgtgtcactccactctctgccttcttcatcacacagcattctccttgtgtgactgcgtgtccaaatttccctcttcttagaaggacaccagtcagtggattagggcctgctctaatccagtgtggcctcgcttgtctttatcataactgtaaagaccctaa

SEQ ID NO: 334305 - DNA, 468 bp, Homo Sapiens
gcatgatgcttgattaccgtagggaatgcagttcagacaaagttcctagctctgattggtatcatttaatcctttgttatatcactgaatctggcttttccagagctcctgaaggttttaagccttatttgttggactttgacttagaacatcgatttaaacaacttttgtgaactcccatgacatactttggttactttaaacatatttatgggacagagcatttaaaatgcctgcctgatatttacagggcctgtgaacagtcctccaaagcttgcattctgtggtgtatcaggtcagtcattaatgaggataaagctcatgtgatagccttcttacttaattcaaggcacacttctgtagggctgcactgagtcagtgtctgaggcaacagtataggccagcgttggcactctgaaaacacacccccactggctctcactgttatccgtgaaagcatccttaact

SEQ ID NO: 334306 - DNA, 487 bp, Homo Sapiens
  misc_feature (20)..(20): n is a, c, g, or t
  misc_feature (34)..(34): n is a, c, g, or t
ggtattttccaataatcttnccagtcgatttccnaattccactcttcaattcatgagagaaagtggcttttattggtgccaaatacatactatttgggcattagagaggacagagattattttattctttttgtattgaataattttgcaggaagctgctgctgattacaaggagagttatatgtattaagattgataaacagaaatatttttaaggcttttagatttccctataaggagataggatttacattccaactttgattttcttcaaagggatcctgtttgcttaaattctcagaaaatatgattggacttctcagtcaactgagctgtaagagtggtgaagaacctgccctcaggaagggacctgtcaacatttagagggtgtgggggtggtgatattggggatggagactggcatgatggaagggatgaggcctagaacacaagcatatcgaacccacgccgagccctatgcagtctc

SEQ ID NO: 334307 - DNA, 479 bp, Homo Sapiens
  misc_feature (424)..(424): n is a, c, g, or t
ttttagaatattagaaaaagaaacagatttagcaaacagaagtctaagttgttttagtggacatttaagttcagaacaattcacaaaatggtaaaatgtgtttcttcaattctttattttatgtcaacaatttctcagctagtctacagaaaaaacagttcattcaaaatacatcttatcattcccttttcactgtttgatattctgccccttcattctcttatgttccactttctgtaatggagctcattaccgaggtggtaggggactagtttcaaaggcaacacgagtcacagaaatatcaagccagtggtttccttcaggacattcatatacttctcgtgttagaaagaaaatctttccttgggtgcagtgatatcactcctgagaaaccaattactttccaaatatctgcaatactatntttgacagaactatttcacatagaaaaacatagtatatctatatgatacataatt

SEQ ID NO: 334308 - DNA, 482 bp, Homo Sapiens
  misc_feature (393)..(393): n is a, c, g, or t
tggggttttgccacgttgcctagactggtctcgaatttccaagcacaaaatccacccacctcagcctcccaaactgctggaaatgtaggcatgagcgacttgtgcctggcttagaaatacattttcttaaaaagctgtaagtagagttttaaatggagtggtagatatacaagcccagtgaaagtacccacagacctaagggaaaggttctcacccatttaacatatatttataagcacttactgtatgccagaatcaggtaggtgttaagaagagatatttgagttaattcttgtcaagcagatgtggggttgaagtcagacagaaggtactaagggcaatgagaaaaaagaatgtaaggtccaggagaaaaatgtgatttgcttgaagtcnaagagcttggataaagactagaacctacattccctagtgtcctttccacattgcttctggaattcctggcctcaagctatcctcccacc

SEQ ID NO: 334309 - DNA, 491 bp, Homo Sapiens
ggtttctactgggagctggacacttgggtaccctctgcctggcatatactaaaatcctagattcccagaagaaaagcaggtcagctgttgagcataaaccacattgtttgtataatcagtttaggaatactatcagttaggatagtgagaaccctccccaaatccaaattcccagatgccagccaagggacagttttgtaatcaggcctttcaaaggatggcagtcaggcctgctatgttaactctgcataccagtacatgtgcgtgaagaattctgtgaaagtacaggaaataaaatgaatggttaacattgcttctgagtttgaacgtttcagagtgatggggactcagcatggttctgccaagtttgaaagtgacaattgctcacattcgtaggaatttagttaatctcattttaaatgttccttttaggtattttcatgcatttcctcactaattgctttctctttccctcaaatcacatccagcta

SEQ ID NO: 334310 - DNA, 377 bp, Homo Sapiens
agagatcatctagagaaacctcccaaaaataaggcataccatccctctgatggttgaaacacacttagttctgggcagaataaatgaaaacaaattcatacctcgatatattgcagtgaattttctgaacttcaaaaacaatgagaaaatcttaaaagtcactgagataaatgacagattgaggaaaggaagcaggcgggcagctggtggtcttccaagcactatagctgatcagcaaccagagattccagagaaacatggaatgataccttaaagtgctgaggctaactaactgctgagcacaaaggatattttttcaggcacacacagggattctgaaagtgtaaagacgagtcccaggccctcatttgaatatt

SEQ ID NO: 334311 - DNA, 457 bp, Homo Sapiens
ttttcataaactttggatgctagtgtacttagggggtgtgccaggtgtctttcatggggccttccagacccactccccacccttctccccttcctttgcccggggacgccgaactctctcaatggtatcaacaggctccttcgccctctggctcctggtcatgttccattattggggagccccagcagaagaatggagaggaggaggaggctgagtttggggtattgaatcccccggctcccaccctgcagcatcaaggttgctatggactctcctgccgggcaactcttgcgtaatcatgactatctctaggattctggcaccacttccttccctggccccttaagcctagctgtgtatcggcacccccaccccactagagtactccctctcacttgcggtttccttatactccacccctttctcaacggtccttttttaaagcacatctcagatt

SEQ ID NO: 334312 - DNA, 535 bp, Homo Sapiens
  misc_feature (365)..(386): n is a, c, g, or t
cacaggtgctgagagatttttcctctaggcccccggctggccgtgtgggggccaggatggccaggagttctgccccatcacttctgtgtgcagttctgttccatcacttctgtgtacagaaagccattcctgtctaccccagagtcccattcacatatgttcactgcttgtcatgatacggagataggtgcactgaagtgaatacaaatattttcagacatctataagaacagaaaccttgcgaccctctgagtaattaaaggatgtatcccaatacgaaggcagatgaacccagggatccagggtgaaagcaacgtctgccagcaacatgacatgttttgctgaagttaaggtgtcactttttnnnnnnnnnnnnnnnnnnnnnnttcagatgtgtgtgaaggagaacagagagaaggggagatagactttaactttagtctttgtaataaaaccttaagttacgtactgagaattaaaatgcaaccaacggtagaatagagatagatgataagactttcaaaccagcagagag

SEQ ID NO: 334313 - DNA, 485 bp, Homo Sapiens
tcgagagcaaaactccatctgcgctcattcttacaccaaccagagagttagccattcagatagagagacaagctaaagaattgatgagtggcctgccacgcatgaaaactgtgcttcttgtagggggcttacccttacccccacagctttatcgtctgcaacaacatgttaaggttatcatagcaacccctgggcgacttctggatataataaagcagagctctgtagaactctgtggtgtaaagattgtggtagtagatgaagctgataccatgttaaagatgggttttcaacaacaagtgcttgacattttggaaaacattcctaatgattgtcagaccattttggtttcagccacaattccaactagcatagaacagctagcaagccagcttctgcataatcctgtgagaattatcactggagaaaagaacctaccttgtgccaatgtacgtcagattattttgtgggtagaagacccagcc

SEQ ID NO: 334314 - DNA, 483 bp, Homo Sapiens
  misc_feature (116)..(211): n is a, c, g, or t
gcttgattgaactgagggagacgttgttgtttttaatgtctccagcttggactgcagagacaaaaacatgattccagatttaagtctctcttcttccaagtattctactagaaatnnnnnnnnnnnnnnnnnnnnnnnnnnnnnnnnnnnnnnnnnnnnnnnnnnnnnnnnnnnnnnnnnnnnnnnnnnnnnnnnnnnnnnnnnnnnnnnntctgcatcttaatgtacaggcagtgctaaaatagacatcttaatatttgttccatgaatatttaccttgtagatatacagagtttccttaaaacagcaaaactgttcctgcttctgattcaccctgctgacaatgtgcatggttaagtgtaacagcgtttatagtgagggtgattaatggtagtcacagtgtaacagagcacagacagccaggttccagggttgggagggcaaggaagtcaacacagttttatatcatcctcctggctgggg

SEQ ID NO: 334315 - DNA, 386 bp, Homo Sapiens
ttctttgattcatctagggcaagtaacgttttgggagacattgcatttaaaccttattattccattggactgtgaaataacgtttccgtctaaacttaaaccagtgcctttccagactccaaagatgggcccttccctgctgcacacttacaaaggaagataaggctctttctcatcacagagaaattaaggaagtaagcaacgttatgaggacacagcactttacaaagtcaactggcagtcattactaaacgttataaaggactggtcccatacctgactgtcaccaggaatggagtcttccaaactcctacttgttaaacattccgatttaacacagagacacaaagaacctcagttcagggcagtctcaactcatgaatgac

SEQ ID NO: 334316 - DNA, 565 bp, Homo Sapiens
  misc_feature (51)..(51): n is a, c, g, or t
  misc_feature (64)..(64): n is a, c, g, or t
  misc_feature (102)..(102): n is a, c, g, or t
ttttttaatttattaaggatccggaaaaaaattactactcaaggctttaanggggtttttcttnacccctttaaaattcaggttatactacatgcggtaatnccataaccaattagcccaaactaattaaaacctcactctcattccattatcttcagaggtatttaggacagtggtcctaggtaagccctagcagtaaattcaaacaggagatcccatgacattatgcaggatgaaaagaagtagagttctagtctcagttcagtctagaactgaactgagatcaccatgtaattttgggcaaatcatttattctgagcttcaatttcctcatctgagctacatgacagacacagtcacatgtagctctaaaatcaaagttgtgacaaaggaacccatagtggattataaagaaaaggggattgtatagaaaataaaccctcattccttgatgctgttatcatttaagataagactgtcctgccaaaaaagttacatttgcttcaagctctggctgtagggatcattcaccatgctcttacattttctgttgctctgaatgctt

SEQ ID NO: 334317 - DNA, 470 bp, Homo Sapiens
  misc_feature (366)..(366): n is a, c, g, or t
  misc_feature (393)..(393): n is a, c, g, or t
gtgttacgtatagtttatttttatttcatagccttttaaaaaatataagccacctaatattttgaaaaacatacacagaataatcatttagctgccacaatattacaaaaataaaatgacacagaataaattgcacaagagaacaaaataatctctgctgagtcactctgactaggaacacataatagtcactaggaaggtgaagtggagcagtactgccatttcttcatgatcaattatcactaaaatcagtcacaggaactattcccaggaggtcatccattcactatacaggaatatgtgcaatatatagatgtcaagttaacatcttgaatttaattccaaattaccattctttcttttccnctgggagacaaattcaatgggcaagcnagaatagtgaagaccagggggataccaagccccatggctgacccacacctctcccagctggggtctacaacaccagg

SEQ ID NO: 334318 - DNA, 397 bp, Homo Sapiens
ccagctgggaggatggagggatattgtttgtctattgtttttagcacataaaactctcgagttatttatttaaccctatccctatggccagagtcctgctagtattagactaattcctcaagtaatttacacctacttgtcatactaaatcaccaagcggtatacattctagactgtccgttataggagggcactcacctcaagttaatttgctgcttcttggacccctgctgccactgtttctctgaaaaaaagatgaaccatatcccttggtccagctgccttgcctgacaaatctatttgttatagaaaactgctgcggagttctcttgtccttcactggctcactctggtgctggcatcagtcttcctctatcgctctttcttacagtgggtc

SEQ ID NO: 334319 - DNA, 365 bp, Homo Sapiens
aggacagaagtctacatctactttaattttccactggattccatccactgagagaagagttcagcagctttctggatgcaaggagcatggttcaggtcacaggccagcttcaagagagccgagcggagcatcctgtcccagactgagcccttgtcactccagctttgcctgtcaatcactggcttaaaatactgaagaaggtaacgcttgaggttttcagagatatctgaaatattccttctgtccatcatgtggtaaaacgattccaagtaactcagaccttcgagaagtgcggggctgcttgtttcatgttggaggtagtaagtcatgtcaagagctttgtctagggtcagtctccctacact

SEQ ID NO: 334320 - DNA, 318 bp, Homo Sapiens
caatcagtcatgcaatatacacttaatacaactctgagactccttgataacaaactagcaaaaatgaggataaaacactttacagactaaaaattccatttaaatctttgtttttgatccaagcacatacaggggtaggaatgctgaatgttcaaaagagttgtttctatacccaagagaagtggcctggaagggcgggagaggtcatcatcaatgaggtgtcattggcagtcacgctgacatggtctcagccatacttgctgattcccttggaagggtggctccactcggggcactgctcagggtctgggtcagctc

SEQ ID NO: 334321 - DNA, 351 bp, Homo Sapiens
tttttttaatttaataaactttattcttgttgggggaagagggagggaaaaaaagccacctactccactcaataaattaacacatggccaattcccaggccctaaacaaaccttgggcacttgagccagtcctgctgtttccttatggcccagtctgcttccccttcatagaagggggtttttcctactgctgctaggttatgtcatgaccagggaccacatcccctctgtggagagggtcccaggcccagagaggatattggctgcagcagcagtggccagggaaaggaggaaggggatgctcttcctcaaagcttggggtggagaggacagtgctggaagagagctgtg

SEQ ID NO: 334322 - DNA, 499 bp, Homo Sapiens
aggttacttccaaatcgcactgaaggaaaaggttaagaataatacatgatcacagaaatgcataccactgtctgtaaacccaacaaaattcactgttctcttttggatttatttagcctgatgtatttttaattcaatttttatggtgatgggcaaatcattcttggtaaatgtaaatcaaacatgattgatttaaaacttcatggaatttgtagaaaattatggacatttttggtgagaaagaacaatagtcaaaactcacatggatagagtgtgtttgttttttgccaaaaatgccccagactttttcccaaacctcaaaaacgtcttggaaaaattgtaaaagtttgataacagaaacatctttaggatatttttgtctgacgtattttgcttctagtatgtgcctactgtgatttttttcatgtggaaaatgcaaaatttgtaacaaaatggttatatggaacatgcctattaaatgaattttactatcttccct

SEQ ID NO: 334323 - DNA, 431 bp, Homo Sapiens
  misc_feature (16)..(16): n is a, c, g, or t
  misc_feature (240)..(240): n is a, c, g, or t
  misc_feature (285)..(285): n is a, c, g, or t
ccgataaagcctcccntgagtaggcattgacttgatacccaataatggctgctaaggagccgttatgtagtgccgtgtccagtgatcccgtgcgttgaggactccccgagtacgcattgacacgatagaccggaacggctcagaagaagctgttatggtctatcatgccagtgatgtgcggatagtttgtgcagatctggcccttctgtggaaatgatggagtctctgaaggagctgggngttcggccatgtgggcgccatcagttgagcctagcagcagctccnattttccctttgccttgggtttacttcagaagagtcagctcggaaaagttgtccaattacttcagtggtcccaatattacaccaccaaaacgtgagcaaaagtgaaagatattcttggccattcgtctttcgtttcttctcaagag

SEQ ID NO: 334324 - DNA, 454 bp, Homo Sapiens
atctgtgtaatggaattttagactggagactctgagtttatgtcaaagagcaacctctgtaactgcaggaattaaaggacaaggatagccttggtgtcagtcagcctttttgccacatccaaaataccacttcagggacggctgattatcactaagaaccccccctccagtccccccaccacctgtacacttcacacacacatcctcctgtctttgctaacactcagcaccagccacagccacaaagcttgcccagcaggtaaggcctggcctgctggtgtagtaagggactggtttgccacagtggatgggaaatggaccccaccccacccctaacctattccctgatggaaaccatagagtttccagtctccaacccagtgtctcccttctgactttgatcaatgaggtcatccattgggctccagcctgggcgagagtgagactccatctc

SEQ ID NO: 334325 - DNA, 436 bp, Homo Sapiens
  misc_feature (390)..(390): n is a, c, g, or t
attgtttaaacaacctttattacctgcctctgacattccccagggttacagagcagggggcatctgagcctcaagttccacggatgaagcagacactgcaataacaactgaatcaatagaggagaggcatttggaagtactcggggtgatacacccagtaatggtaatcctcagcagaagatggcatagctaccaaaaatcaggcgttaccactgggatgaaaactggggaggcaagaaaatcatacagttggagtcatagatcatttccctccccgttgagcactcctcccccttccgtcccccattaagttcattctatcccacagactggtcctagtgtcctgctagctccctgctgaaagagagagggagggaaaagatgtctgangtctcttcatttccattgtctctgtcccctaaggcaactgggaagc

SEQ ID NO: 334326 - DNA, 546 bp, Homo Sapiens
acatctgagagcagaggctttatttacaatgacattcaaacaggatttagcaaaggatgcctcttcctgctcgcatcttagcagcatgggttgtacttcataaacagaaaagagaaatatcctgggagcaggaagtgaactcttttctcagataatgttctctaaatcccaacacgttccatgctcccggctcttagcaggtagttggtggacacttggttatagcagctgggtgccagatgcctgcatctcactgaggaatgtgttcagggaaagatgtcaacactggccgggaaaaacatcaggctttcacctcactcatggcctccataaggcgagcgctgtttgtgacttgttgtcgtcaggaaaatgaacctgtagccttttctctctgcccaggaaccggagggctgagatctcagagaatgtacaaccacccaagaacaccaccaagatgaggcgcagggactcactggaagccttgtcttccttagtcatatctgtgaatgcaaagtcactgcagttgagcagccgtaccacctcatc

SEQ ID NO: 334327 - DNA, 419 bp, Homo Sapiens
  misc_feature (329)..(329): n is a, c, g, or t
tcatcttgatctcattattttattcattccaagatcttattatgttataggcgtgtgcttggtgatagtaagcaaaacctgagaaggcctctttcttcatggagctggtatcttagtgagggggtgagcagatattaatcagatcatcacgaagttttatatgacaaataataatagttaatatctattgagagtttaggatgtgtgagacactatcttaagagtgtttgtctctattaactcatttttttcctcaaaacaattttaggtgttagggggtattactctctttttatagataagaaaagtgaataaaggcaaagtaattngagctgctggcacacacctacaaagtggtggcatggagaatcccaacactttgagtcttgggttttctcagtttctaaaaagcaggatga

SEQ ID NO: 334328 - DNA, 466 bp, Homo Sapiens
tggtttttaacaaaaaaatatattctttgtattgtttctttaaacatcaatccacccttccatggctcggaagtcgcagttccatctaggaataaaaagaacctagatgcctggattttcagtacaaaaggtccaagaacatgaaagggaaaaggtgatgctctcacaatgctacaagccctccacaaacttctctagcgtgtcccccgtggtgtccccgaccagggacagttcgctggacagcgcactcctgctgggggtgttcagctgggggagcattgcactctgttcggggttccccaagtgtccctgatctatggagctggccatggtgactgcgagtccggggtggggggaaccagtctggggtgagacgtggtgtggcgaaggctggggctgtatccgtggtgacgggctggaatgtggaggctgggactgggggccttgagactggacaaggggcgga

SEQ ID NO: 334329 - DNA, 446 bp, Homo Sapiens
  misc_feature (18)..(18): n is a, c, g, or t
gccactgcaactccagcntgagtgacaagagtgagactccgtctcaacaaaaaaagaaaaagttataatgttttggggacttaaagattactgaagaggggataaaagtcaacactgcttacaaatacctgaacatggagagcacagtcaacacattcatgtggacagcacatgaacggatgtattaatacattacacagcttcttctatctgacctattcctcttgttctaaagagttacatggacttggatcctttaagatgattttaaaaataatattacattaagttttcctggtctaataaccaactttgagaagtacagtggaagggtatagaacttcctatatcttctatacttttaatgccaatttgatttttattgtgatgtgatatttaacagtatgctaaaaataaaattgactgaattgtatgattttgtccac

SEQ ID NO: 334330 - DNA, 527 bp, Homo Sapiens
  misc_feature (363)..(363): n is a, c, g, or t
ttttccttgatcaatcttggcagaggtttgtcaactctattcatcttttcaaagaacaaacttttggctttcttgatcctgtctaatgtaaaaaagttttttccacttaattccagttcttgtttcattatatccttccattttctgaggggtttttaggtggttattttttctaactgaggctggatgctgtaccagtcagggatgcagaaccattaccagtgacgtgacaggaggaatgcttacagcaattagactttgccagtgtgtgaggggctggggaagtgaaggcggtggtactgatcctggtggggacaccaatcactccttctgaagccctggagcagaaggaccagtcagagntttgtatgcaaggaactcagaagccaggctcatatacaccaaagtgaacctacaaagtgggggatgcacagagaggtctaaggaaagctcactttttatgagtccacagcacagaacctggggtggccagccagaggaagaagagctagatgcagagaggacga

SEQ ID NO: 334331 - DNA, 293 bp, Homo Sapiens
ctattttaaattataagtggggctgagccaagtagactatatttgtacttccccatcttgtgtgtatgttgacactatttgtgtgttgacagccgttcacaaggttgtattttcttcagtttatccaacataatgttctttgataatgtgtttcatgtctcaatttttgttgtcaggaagttattctctaatgaccaatctaaattctttcctttcttctttcacccactttctttttatatgtatatatttaaaatatattttagtgaaacactttctcatcatctttagat

SEQ ID NO: 334332 - DNA, 464 bp, Homo Sapiens
taaataacagctgatttattaattttagaaagcaaaagaaattaggtatgattctatttaggaacagtgtacacatccagtgatttatttcataataaaagggttgagtacttcctattgtttacaaagagctcattcgcatatgacaccttaaaactgacttatcaaacagagaaggtaagtaatagcccattacacaggtgaggaaaatgaggctcggagaggctgtgtaccttgcccgaggtcccacggccagtatgtgagcccggccctgtcacattcaaccgctctcctctagtatagtcgctgagtggctgtcttactctgggtgatgttcatgattctccactttggttttctgtctagatagcctaaggctcagacgagaacacacagaggttcataatctcgctagaaggtaaaaccaggcaacatatcccccttcctcccatcaacagaatctt

SEQ ID NO: 334333 - DNA, 441 bp, Homo Sapiens
  misc_feature (414)..(414): n is a, c, g, or t
ttttctttcactgctgcctttagatgaagtaaaggattctttggcacagatgcgctggctgactgctggtgagtgctgttctcgccctgcctttgtctttgatcatacgctgctttcagctccctctgaagttcagcgggaagggcagcaaatacctcagggtccacctagtggaaaagacgaggtcaaagtcaaacctgagctaattgtagatggtagctggtttctctttttcacgaaacagactttgttttcgaatctcacttttctgatctgtacgaattcttaacagttccccaatatcaaagctgattaaatcttcaaaatggttagagcaagaataaggaattaagagcaagaataaggaattaagagtactaacttaaagaaacccactacaacagcagaacctgngcaaatgcactagtagaaatgggaagc

SEQ ID NO: 334334 - DNA, 406 bp, Homo Sapiens
gtcaccttcccagctggatcagtctgttttagaagcacttccacctgatctccgggaacaagtagagcaagtctgtgctgtccagcaagcagagtcacatggcgacaaaaagaaagaaccagtaaatggctgtaatacaggaattttgccacaaccagttgggacagtcttgttgcaaataccagaacctcaagaatcgaacagtgacgcaggaataaatttaatagcccttccagcattttcacaggtggaccctgaggtatttgctgcccttcctgctgaacttcagagggagctgaaagcagcgtatgatcaaagacaaaggcagggcgagaacagcactcaccagcagtcagccagcgcatctgtgccaaagaatcctttacttcatctaaaggcagcagtg

SEQ ID NO: 334335 - DNA, 236 bp, Homo Sapiens
gcctcaaaagaaatttagaaaatgatctttctccagttaatattgctaacatccaaaccagataaattcaggataaagagaaatctactttgtcccctgaattgatggtacttggaacagaccatgtactcgccaactcttccctttcctttggactctgaacctgtcctaaggcaatatgtcttccccaaccttccttttttcctaaaccacgccgagccctatgcagtctcaaa

SEQ ID NO: 334336 - DNA, 452 bp, Homo Sapiens
  misc_feature (422)..(422): n is a, c, g, or t
  misc_feature (433)..(433): n is a, c, g, or t
ttaacaaaagaagcaacaaaagcatagctgtattgaaacaaaaatgcacttcacagagtgggagcaggcccaagcaaggctcaaaagcactggtcgcagaattttctggggtttaaataccctctagatgtttcccattggtcacttggtttacaccctatgaaatagtggcccatgaccagtctgattggttgtggaaggtgaccaagcagaggctgaagtgaagttacaaagttacgctctatgcagatgtctgactggttgcaggaggggaccaatccgaggcactttccatttttcatctgcaacacagaaagttggggggagttgcaaagggagtagcctctgatccttttgttacgtagggcatgggaatttagggttttccttttgattccgctcatggtctagctctcctcgtnccgaattcttnggcctccgaggggcaaatt

SEQ ID NO: 334337 - DNA, 381 bp, Homo Sapiens
tttttaaaataactgctttaatgagacataattgtgtaattcccataccatacaattcatccatttaaagtgtgcaattctgtgggtcttagcatattcagaggtatgcaaacatcaccaacggccaatatcaaaacacttcctcaccccagaaagaaaccccaaaccagcaaccgtcgctcccaacccccgtcccgggcaccggcagcgccatctcccttcttccctctggacgtgcccattcgggacacatcacgtgagcaggatcacgccgtccgctccgtgtgcctggcttttcacttagcatgatgtctccaagtctgtgtcgcccgtctgtgtcgcccagtgcatcagggtctcattccttttgaccgtgggcgc

SEQ ID NO: 334338 - DNA, 463 bp, Homo Sapiens
  misc_feature (70)..(353): n is a, c, g, or t
aatattatgcacatttctgggtttgtgtttaaacacatatccagaacgtggtaaataggttagttgttgnnnnnnnnnnnnnnnnnnnnnnnnnnnnnnnnnnnnnnnnnnnnnnnnnnnnnnnnnnnnnnnnnnnnnnnnnnnnnnnnnnnnnnnnnnnnnnnnnnnnnnnnnnnnnnnnnnnnnnnnnnnnnnnnnnnnnnnnnnnnnnnnnnnnnnnnnnnnnnnnnnnnnnnnnnnnnnnnnnnnnnnnnnnnnnnnnnnnnnnnnnnnnnnnnnnnnnnnnnnnnnnnnnnnnnnnnnnnnnnnnnnnnnnnnnnnnnnnnnnnnnnnnnnnnnnnnnnnnnnnnnnnaggttttggagagtgtctagtaactgttatttgaacagtggtccaaaaacaataggcgtcttcaccttagtgtaaaagctgagagactttcaatcagatgaggtccacag

SEQ ID NO: 334339 - DNA, 377 bp, Homo Sapiens
  misc_feature (355)..(355): n is a, c, g, or t
ttttactacttagtactaacatttaatttagttttaaaatgtctgcgatagagcagattcaggattatgcctgtaagatgacattccaactcacctgcatttaaatatgaataaagagtgagcagaagggaccaggtaaaaatggcacatgggagggcatcgcacatgtgaattttagcttcccacacgcaaaggcatggggggacaaggcaggaagcattgctctagatctgagaatcaccacacaccagagagggcatgggaggtgacacacaaacccagcagagaacgttgagaaagagttttaagagcctactcatcatcagagttcacttaaaagtccatccagaatcgnaacgtgggatgggggtgcccca

SEQ ID NO: 334340 - DNA, 340 bp, Homo Sapiens
ccaaaccttggttcagattctctctttttccaagcccttgagctttggcccacccacagcttgtgccaacccgcagccctcctgaggttccctcctgagaacaggctgtccgcagggtaagacctcctcgatcgtgacactcttgctcagcccactttcccataacagttctttctagccacgtttacgcctccctatacaagatcagccctttgcctaacctctgagacacttgcagatcatatgggaagcctgcgagtggccgcactgcaacgtttccctattgcaatggtcacccccacaacaatcctttggaataaattcgctccttatataatcc

SEQ ID NO: 334341 - DNA, 470 bp, Homo Sapiens
  misc_feature (399)..(399): n is a, c, g, or t
  misc_feature (454)..(454): n is a, c, g, or t
cttttggctaatttcccaagccaatgtcattgtgccctgcccctacaccgtcccctgcttgagtaggagatcagagtccagggtcctctggctcacccatctctgatgcacgtgctcaggtctaccatgggaagccaatgccatcaaaggacaggccacgatgtcccgtgttctggaggcacggggctctcggaggcttttcccatgtctgggacacattccctcaacttaacggagtcacactgccctcagggaacatattgcaggaaggttacagggtttgacattttcactggagcttaaacatgatgggcccaggccttagggtaaggatgggaaaaccggctggttccaaggagaccaaaatgaagccagcttcattggcagcagctagaaaanagcgcccaccagaggacttttccagggagggctgtaatgtgccgagggagaacangggtctttacagaaga

SEQ ID NO: 334342 - DNA, 456 bp, Homo Sapiens
tcacgtacacaacatgtgctgtgaatgtttgagccttgccctgctttctggctactcagatcctctactcaggagagagcctctacccatgccacttgggaggagagggatgtgcttaagcatgttcctatggtatgctgcttaggccccaaggaggaagcaggcagacactggggaagctacctggaggggtgcctggggagtagacctgcctgtcagcccatcacctccccagcctgtgcaggtcctgggcttgtcatggctctgtgggttccatttctactccttagccaggcagtcgaacccttctgcagctccaccactcctgccccacctgtactcatgcctttgcctgcacatcctccttcctttttcactcccctctccccttttctaacaccttggtgcagaggtgggagaattgcttgaggccaggagtttgagactccgtcttaa

SEQ ID NO: 334343 - DNA, 430 bp, Homo Sapiens
  misc_feature (385)..(385): n is a, c, g, or t
aagcttattagctatcattagtattagtgtattttgtgtgtggctcaagacaattcttcttcttccaatgtggcccagggaagtcaaaagatcagacacccctgttctaagtattctcctaatcagcaagtatttattgagtactaactcccacaatgcatattaggagtgctttgagggaatatttagaggaattaggcatggtctctgacatccggaagcttaaaaccatgcaagagagacagatacatacatgaataattaatattaagtggatggtgataagtgtgacaacagagacaggaatgaagagctatgttcagtcaacaaacatttcacatgcactgtctgggactttgttgggatacaaaaataaattagtctnttttgtctttcaaacaagaaactgattttttatacatatatcaca

SEQ ID NO: 334344 - DNA, 656 bp, Homo Sapiens
  misc_feature (489)..(575): n is a, c, g, or t
  misc_feature (583)..(583): n is a, c, g, or t
attagaaggcagattttattgattttatacccctagacttgttgcatatcaaacctatgtaaaaacatctataaatcaaatcattaattgcacctagtataataattctatatatggaggtaatgtttgattcttcaggagctttaataacttgaagcccgtttgattgctttaaaatgatttctcattgtatttgtttatattgtatcattaagcaaaagtacagagtaagcaattagtgtgattaattcctcttctataatacagtaaagcactgcctccatagaccaattctctgggatccctggaaaacatctggcatccagcaagtcttgacccctctttagaaagccatggagaaactggaagcaattctgttaattatttgctctctagaggcaattgggttaattaccctcccttccctatccatgacacaatttctccagttacatgtagaatgctgttatgtgtctcctgaccagaccnnnnnnnnnnnnnnnnnnnnnnnnnnnnnnnnnnnnnnnnnnnnnnnnnnnnnnnnnnnnnnnnnnnnnnnnnnnnnnnnnnnnnnncctggacntctctcttgttctggggccttgagttctctccctcttctttagtacatatggccacaggtaacgtaatctgcg

SEQ ID NO: 334345 - DNA, 887 bp, Homo Sapiens
atgttacactctcatataatcaagtcatgcctgatggatgtgatcagtcacctgtgggagtaaccacgagattatcggcaaatctgtgactaaagcatgtaagaacacccaccgctccaattttggtactctggtaacaatcccaaggaagcaggattagaatgcaattgtgatttccaaagtggaaggaagatcattaggacagaggaggatggtgaggccaaaggaagaaagggacacgttaagagctggaaattggccagtgttcatgaccatagcctccaaagagaggtgccttccacaccctcatctcttgctggccagggttttgaccctgaagcagagattcaaggcagaggcccagaccctcgaccttgggccctgatgaattatccaaggtaaaggccccttgatgagcccctgacagccccccagcacctcctgcccacccattccccatgcgcatttactgcctttcctctgtattaccttgggctgcactttcctttaaaactataactctacttgttttcatttggaaggtcctaattctttccctatgcaaaagaaatttattctggttaccaagttatgtgtgtgttactttttttaaatatggaaaaaatctgaagaccagtataatcttattcccctcagtgccatcccttgctctcttgcctgatatatagctactattaatagcctggcatatattctttcagatttttcatgtaaatatctctcattctttttaatacttgtacgtattctattgggaggatgtatgatcatttatttctctaatcccttatttgttgcagcagtggaattcttagatcaaagaatatgtactttcccttatgttatagagactgtgggaaaaatag

SEQ ID NO: 334346 - DNA, 442 bp, Homo Sapiens
catctatcactctataatcttatcttgttttgttttcctttactgcacttcttaatatttggaaattatgttttaaaaaatgatttcctatctgttttccttatgacaatggaagctccatgaagcggagatttgggttcatggagcccataaggcctcagcccataggagaaacagacaagttgtactggggattaaattccattaaattttccattaaattcatatctcgggtggatcataccttgcacatagtaggcacttgataaatatttgttgaataaattggtaatttgatattcacaggctttgtgagattggtggaaaggaaactgtattgtaaagatggccaggcatggtggctcatgcctgtaatcccagcactatagaaggttaagttggtgatccagcttaggctacgaaaagagccccctttttttaa

SEQ ID NO: 334347 - DNA, 470 bp, Homo Sapiens
  misc_feature (139)..(423): n is a, c, g, or t
ttttaatttttgtggctgtttattacacagtaaaggccaactgatacacatacccctttgcccacaagccaataaactgtggttcttcaggacccactgggaaatcctccagaaccaggcccactcgtgttagcagtannnnnnnnnnnnnnnnnnnnnnnnnnnnnnnnnnnnnnnnnnnnnnnnnnnnnnnnnnnnnnnnnnnnnnnnnnnnnnnnnnnnnnnnnnnnnnnnnnnnnnnnnnnnnnnnnnnnnnnnnnnnnnnnnnnnnnnnnnnnnnnnnnnnnnnnnnnnnnnnnnnnnnnnnnnnnnnnnnnnnnnnnnnnnnnnnnnnnnnnnnnnnnnnnnnnnnnnnnnnnnnnnnnnnnnnnnnnnnnnnnnnnnnnnnnnnnnnnnnnnnnnnnnnnnnnnnnnnnnnnnnnngagtgctgggtccatcctttttcagccattcagattgctgtttcatt

SEQ ID NO: 334348 - DNA, 404 bp, Homo Sapiens
tacgattacgcacataataaataggaatgtctcctgactctgttccaatgacaacccagatgaataagacaaaagacataacctttgtgttcacgcagttttagaattcagatacaaagacactggcatgaagatacgtgacaaatgccaactgagtatacacaagctgtacaggtcccaaaaagggaacaacctcttgaagccatgaataaaaagcctatggaacatttaaaaacccattctgtataaaacactcagttcacaaataagaaacagcatgtgaaagggctctgtaggtcataaatgttatacaaatgttacttgttaataaaagtaataacagctactacttacttagcatttgctatgggtcaggcaccatgctcaatatttcacatacattt

SEQ ID NO: 334349 - DNA, 864 bp, Homo Sapiens
  misc_feature (574)..(574): n is a, c, g, or t
tggagaaaatcgttttacttcgagtgacaagatttttgggtttaaataaatattgaatctttggaaaagttatattgcaaaaagggatcttgaaatgtttccactgctgcttggactttagaataaggaagtctcaagtcttaccgaaaaccaccgtggggaattgcagaacaaaaccgaacaatattttccttcccctggaacacaactgtataactacgtgaggaaccctttccttgaatcttctcagcctgagcacctggctttatttgtgagagaagctttggagaatgtgggggaagctgatgtcaaatataaagggcttaaagagagaagagggagaggagctttcagcacagtccagttcacagcccgtcggtgctcaaaacatacttgaatacctggtacaaaagataaaaatgatggtttggttttctataagacagcatagtttctttaaaattacacacacacatgcattgcttttcttcctttaattagttgagaccataggacaaaagaagaggcatagttgagcgcgtaatggtgcgaaaatcagagggttggaagaacnagaactcagataacgcttcagcggctgtgacagtctgagcgccagatctctgcatacgcgccagagctcgcccctgtcgcagtctgagtagcacatgttggctgtcggcatttcacaggacgatcggaaaaaagaaagtcttatacgcgacgttcctggggtattctgctcgggttaacggctgacatctggcgtttctttctcctgtggagggcccctcccgtctgcgtcgcgggggtctggatccccagtttttgggcaggggtccaaaggcggcttgtccctcgggc

SEQ ID NO: 334350 - DNA, 427 bp, Homo Sapiens
  misc_feature (246)..(258): n is a, c, g, or t
tttttaaagatggctttttatttatttgtaggaatcattatggctgctgctttctagagattctgggaaagagggtttctcagctatcaactgaaagtcttaaatttccaagaatgacagacatgtattttaataatcagcattttcttcacaactattttaaaatgaacagattcaaaaaagatatattagattacaaaatggtaacttccaaatcaatctattcataggcaacgtttcaccaannnnnnnnnnnnnaaagcacctatgagtaaagattctgaattgaaatggtaaactgaacacacttccaatttacttctttaaaactacaggggattaaaaagaaagaaattggcaagggcaaagaatgaaaacgtgaaatgcaattttggacactggaaatcagctgaacatgtggtattgg

SEQ ID NO: 334351 - DNA, 445 bp, Homo Sapiens
ttttaaacacaggtgggtgccaagtaccgggggaattttttggggcttggacaatgacctttcctgcattcacaggagccctttgagggagctggccactctgcctcctagtcaccgtgaggcttgttattaagctactgtgtatgtctgtaccttttgtaacatggacctgctgtccacaaggtaacaaactaaggctgtcatggatgcacactagggtttgcaagttaaaatttaatcctggtcttagacatagaagttatttttaaatttaagtgacacatgctgcacaacaaaccccaggttctagctttcactctacttttgcagttaactacatgcagtcaaaatttaaaagtgccaaacgctagcagatcaaatccataacattttcaaacagatgaattttatcacttacaatgtcaaatacaaaaagtgtatggaa

SEQ ID NO: 334352 - DNA, 393 bp, Homo Sapiens
gctctatgagaccctccccttccttatttttatctcttccccactttatgctgggccttccctatcctgccctgagttatagttagtcactaacttctcggctggctcccacccttatcacatctcagctacatatataaactctctgttatctaagtaattctattagccagaagcaattccagagtttatattagtactaggaaggtgtcatgtagcccctgtctaacatttgaattgaactaaaatgtgaatctcaataaaagcaacacagttttcacagcatatgctgataatggcaatccaacttcttttgccttttccccagagaatcctgggaatatcctgagcttggtgctttgatgattctatttcagctttggtgccttaaaa

SEQ ID NO: 334353 - DNA, 390 bp, Homo Sapiens
gacatgctccttatcttttaagggacatgtcccaaaacgttgctcagatcactagcccagatctgattgaatccaagtgaggctgggaaagtaatccttatattctgggtggccttgcacttatctgaaaatcagagttctaaaagggaggatgaatattgagagaccatagcctctgccagtgtgcttaatgagtatgccaagaataaaaagtagaacttaaatcccttcatcttccccttcattcaagtgtatattctgctagcaaagtgagacattcatctgtacttttcttgatacttgaagtattttgttagaaccagagtaacaaatccccatggacccaccatccagaatttaacaaatgcttacatcttccttcagatcttt

SEQ ID NO: 334354 - DNA, 409 bp, Homo Sapiens
  misc_feature (322)..(322): n is a, c, g, or t
  misc_feature (376)..(376): n is a, c, g, or t
ttttttttggcaaaaagaaacatttaataatgagggggaaagggcagaaaggtgcaatccaggcaggcaggttgagggcaggacatgccgccttctagggtctccagagaagctgtgtcaacggaggacgtgggccggggagggcccaaggctgcagcacatctacacgaggggtcagcagaacttccagcggtttccacactcgttgcagacaacaaaggtggtcatgggctcatcagagctgcgggtctgcacctgtgtgtaggtgcagttctttttcctgcacttgccgcaggtgaacagggtctgtcctgcgtgccgnccagtgcgggccattctggtgctctcggatggcctccttggtcatggcctaccngatctccttcagctcatcactggccatctctct

SEQ ID NO: 334355 - DNA, 237 bp, Homo Sapiens
tcagagaaagcactttttcttaagcacttttgccttgggtcacatggttagtgcctctactaaggggatgggttgtccagtatctgctgagcttctgctgtattccaggcagtgcttggaccgtaggtgctattatgtcctttaaatctcacagcagccccacattatcacctttcacagatgagaaacacaaggttcagagagatcaagcaacatgctcaagcttccacagtgaca

SEQ ID NO: 334356 - DNA, 190 bp, Homo Sapiens
atgaaccaatgcacctggcctaaattacttaatttcatcatctatattatgaaatgataaagttcaataaaaaggctatgagaagtaactaaaattataccttagcacagaccccagtgcatataaaatattcaaatttaccacccactttgtattctatctagagaaagtaaagagagaactctgagca

SEQ ID NO: 334357 - DNA, 472 bp, Homo Sapiens
cttggtgctggttaggttttattttaacaggatgttttctcttatttttcaaaatatcagttatatcaatattagaagtgtaaacaggtacaaaatatacagtacatagaaacaattttcttaactagtctatcgcctaataaaagtatgcatgagggggctgaatgaatgggcactgccaggtccctccgtctgcaggggaaacaagaggaccagtggctgcttcaacaaaacaggaatggatatttgtgtggtaggaacagcactgtggtcgaatcaagaaatctgggcccacctttatgatgttagatgctggaatgaacaagccacttggcccccaaacccagcctcgcgagctgtgccctctggagagtgcacacattaaaggaggctgggggcacaggggaaggcggctgctacaagcagaagttcctttgaggcctggtgactggactcttgtcgtgtgggacaa

SEQ ID NO: 334358 - DNA, 593 bp, Homo Sapiens
aacacacagcgccatgcatgggggacaggagtggcgacgctaatatttacatgcctgccaagttggataaacaggaatatcctgagccatagaatgcaggcctttccagatcaggcccttccttatttattggaccacttttgtttaaccagcaaaagagcagtggtctccattcggttcatcagttctcccaacggcttgttagtgtctgggcagtgcggtgagacagaaagcccaggggtgtctggaatcagataggtccaggtttgaattctgctcctgccccttactgatccagtgacttggaataagttacccaaggaagaaagaacattaacttgattgagtgccttctggagccaaaggctttatcgatgctatctcattaacatagcttcttgaggcccaattacttcacctgtcaagtggggatgataaaatcatccttgaagggttatagtgaagattaaataggatgaggcattgaaagtgtttggcacatcacgagagaccttctttcctcactctaaactcttcagagtttgtacctgtatatctgccaaatcaacattattttatctctcacgaaatta

SEQ ID NO: 334359 - DNA, 340 bp, Homo Sapiens
atataaacatctggctcaggtttttcttcactgtctctttctgttttaatttttttatttggatgtttcacagaactgatctcatcctggaaagtgcaagtatggccaatgtattactaaccaaattttaacaacgactaatttttcttcatatgactacagattgcatgtatgtggattctgaaagagcccagaatccccctaataatgatacatgcaatgtttaccttcctataaactaaagtaagccagtcccattcaagttcataatacaattaaaagagacagaagctcatcaaattggcaaatgtttgagaaggaaggacctttgctctatgcc

SEQ ID NO: 334360 - DNA, 439 bp, Homo Sapiens
ccttctggctctccaaggacccagggtcggggaggaccagccagtgtgcctagctcctccccaggcacgtcagtaaaaaagccggacccaaacatcaaaaataatgcatcaagtgaaggggtgttggccagcttcttcaacagtctgttgagtaaaaagacaggctctcctggaagtcctggtgctggtgggtgcagagcacagccaagaagtcaggacaaaagactgtgttgtcaaatgttcaggaagaactggatagaatgactcgaaagccagactctatggtaacaaactcttcaacagaaaatgaagcctgaacctccttaaaaagtgcatatgtcgaatgaccaaataactatgtatattgatctgctaagaccaggatttttctgatatggcacatgctatcagttttttggggcaggggagatgaacttta

SEQ ID NO: 334361 - DNA, 367 bp, Homo Sapiens
  misc_feature (30)..(30): n is a, c, g, or t
gcagaatggtttctttgcctcagctctgcncagtaccagtgaccatcctttagaataatcttagaatacaggagatgaaggggacaagcatcaaaagttcttccttcctcatccccattttccagatgggaaaaccaggctcagagatattaactgtcttggaaaatgagtaaaatatagagaaaacaaaactcttaccttgtgcaggttcaagttcaaatccagtaaataccatagtttaaagcatccctttacacaatggatttggttattttgcaaaacagatattagccccatgtgtcagtaatctacagtcatttgtaccttaacataaaatgccaaagcacagtaatatattcttagtgta

SEQ ID NO: 334362 - DNA, 787 bp, Homo Sapiens
ttttttttcaagtagccaaaggtttaatttggaaatgcaaatatccatcaattaggttttcaattatgtggacaataaaagagttgagcagagcagtagagacaaacaaaattaaaaagagaaaaggcagagaaggcagggaggggcttattttcacacattataccaatttacattacacatcatattaaatttaagtaaggcgcttttcttcatccaaataatttcacccattttaaaccataaaatactgtcggcgaaatctcatctgggccatttgatgtaatctttctggcgtccctttcaggaaggaaggtgcgacaacacaatgaagacagcctgttgctttccttggtatgtttacagcaggaatcgggcagcgacttaactagacataagtttccccttcttcccatgggtctatttgccaaagccccctgcacctattagaattttctgaggttgggctggtggagagcagaaacccggaggctagattcaggagacctggtttcccatgccacttagtagcctgtgacattgagcacaatacttacttttcggcgcttccgtttcattatttgggaaatgggaacaatatatctgttttataagattgttgtgaagatgaaacaggcctgtgtgtgaaaggccttttctaaattgtaaagcgctccccagatgttagttattatctcctttaaagggcacagaatctgtttcaatattataggaggttgcaaaaaggctccttgacactttttgctcagaacttgaccctgagctt

SEQ ID NO: 334363 - DNA, 417 bp, Homo Sapiens
ttttgtttgacaaagtcttttattacccttgctccaaaagagttgctgtaatggaaaggagacaagcattggtcgcccttgagaattgcagtctggtgatttacacggagtaacagtctgctgagccagcatgctaggaaatggtgctggaagtttgtaggttgttttaagacagtcactgagatggtaacagaccctatttaatatatttgggggctgggcatggtggctcctgcctgtacaagacttacccaaagcaagtaatgagaacatatgaagcaccaattagtcaaggatccctaactccatgaaatccttgactttccagacttcccaacaggatcaggactagggtgagatgagtgacgcacttcgctcaggtacaaaatttaacaggtgccaataactcagtagtat

SEQ ID NO: 334364 - DNA, 359 bp, Homo Sapiens
atatatttagatgagagagttctcttagacttctttctttgtaaggaagggttatttggggaagtgttggaaaaaagattagggcagggtacccttagtttatatagggtacaaaagaatgggaaacatctttccctttcttctttaatctctgaagtcatgtttggaattacatataatgtagcaggtactggagaggacctgaatttcaagcttctgatttagctgtttgtaaacttccaagttttgcttgactaaagaatgctgatcttttttgggagtctgatctccttctaatatcagaaagtgctttttatattccagattgcttgaattaaactgtttggattaaagaacaa

SEQ ID NO: 334365 - DNA, 532 bp, Homo Sapiens
gtcctttttaacttttaaatacaaagtctgagctgtcccatgccccaagtcttcctgtccactaaggtccggcagagtctgaatcttcaatcagaacctctgtggtagcaccgagtatatctgagttcataaccagcccttcagtgcctccactgctgccgcttcccacaaagatcttcccatcagccatcaggctcacccgttccgtcccactgcagtatgactttgacatcccttcagcttctaacagtaggcactctccagaggttgagtttcccaagggctcaggaggaagaggaagaccctgaccatctgaaggctgcgtcagggactctgggttagtgcccaagatatctgtgctggtgatgagggcgcctgcattggcagccagagcttctgcaatcagcacctcagggtggctttttgccttgtgtgccactacgctgtccttcttctcaaattttttgccacagatattgcaagaaaactggtagaaggagtctgcatcatgtttcttcatgtgccaattaag

SEQ ID NO: 334366 - DNA, 414 bp, Homo Sapiens
  misc_feature (28)..(28): n is a, c, g, or t
tctttatttccccagttaactaaaagtnaaaatgtctattctgattccatattgattttgtctaagatgtaaaaaatttgagttccatctttggcccaaaacctacctgaattaacatacaaaatatttgatttttaaaatttaattcaaatctcaaaatcaattaagtattctcagatcctatatcttggttaatatgctcccagatactttaaaccatggcaaccttttggcctaagagaatgtttgttcatggaaaaaagcttttgagatgagagggtgtcttactttcttgtggcaattgattttctgttttaacaccctttgggtaaaatcttgcaaagagcttttataatttgttttactgaattgtatggagattgtataccaagtaaagctcttttaaattacaaa

SEQ ID NO: 334367 - DNA, 341 bp, Homo Sapiens
ctcttttagtatacaaaaggatgtaacaagatccctaggacaaatctgatgttaactgaattaagtggattagtattaaattaactggcccgataattacaggaaggcattataagtccctagggagcccaaggagggtgaagcctcatgcccctttggttagtaatacagggactaactatactccttgctcccacaggacagaacattctctaggtttttcattcccgactcagtagcactcaaagcttttcttaaggtaaattaaagttatggagaaaggcatcactctgtagccactgttttcaaagagtaacattccagggcagtatctagggagc

SEQ ID NO: 334368 - DNA, 381 bp, Homo Sapiens
agcttgtctgtgatatttcccatttattttgtgtcttcgtactatagtctgtgtaatttcttcagataattctcagtacaccaatactctctgcctgcacctaatctgttgttcagtccatccattgaatgttgttttcatttgttttgtgtgagggcagtgggaggggtgagcgtacaattgtttcttttgaaatctacctagtcagttaacagtctcttcctggtatgtaattctgatttcctaatttcttcctcaaacttctcaatcatttatattctgcaaacactaacgttaacatctgaaatctttgtaaatgtgattcctctgcaggttttcttagctaactcctgcttattggactttgtttcctttttttac

SEQ ID NO: 334369 - DNA, 423 bp, Homo Sapiens
taatgtcaaagtgaatgtctgaagttttgtctttttttctttgtccttttccatctgcttcattctgtggggataaaatacttgtgtttaatcagaacaactggaacgcattgaggaagggatggaccaaatcaataaggacatgaaagaagcagaaaagaatttgacggacctaggaaaattctgcgggctttgtgtgtgtccctgtaacaagtaggtgctgcctgcctgcctgaagctttgatttcccaaggcccatctccaagccttgacaagctcattcctgccaagctcataggcaggattagcatgtggcatgcagaacagatcaataccgtctccaatgcattcatctcatagcatagatgatattagcaggagttactgttgatgcattaaaaatcaggcatactacagtgaaag

SEQ ID NO: 334370 - DNA, 236 bp, Homo Sapiens
tccagttactttgctttatttgcagactgaagtgggctacataaatccattacagagtcaacacatgtagacttggcaaaaaggacaatacaaaaatacaactcttgacagtaaatgagactgccctcagctcatcccagtctgtatcagtgggaagccagtgtttaaggtcaacataggaggaagtgctgtggaatgaggaggcatgaaggcttccaccaatgtcactgacccag

SEQ ID NO: 334371 - DNA, 522 bp, Homo Sapiens
  misc_feature (504)..(504): n is a, c, g, or t
ttcccggtctctgagttccctcagtatttattcattaccattttcactatctttgcatgaggaatgcggcaagacgcagaggtcagcaagaaaatgtgagcaaaggcatctgtgtcacaaatagcttgaagggaaggtgctgtgcccggatgtgcacgtaggccagattcatgcttctctccacccaaacatctcagtgtagcagagtaacagagcagcattgccgccagcatatctcgcctccagccacagggcggttttctcctgtctcagaatagaactaatgtacgatcgggttttacacggagacattccgttcccaggggcatgtcggagacagaagccttcctcttatctcaactgcaaagaggcctccctctttcactaatcctcctcagcacagaccctttatgggtgtcgggctgggggacgatcaggtctttcccttcccacgaggccatatctcaggccgtctcactggggggaaacctggacaacacccangctttcttgggcagaggt

SEQ ID NO: 334372 - DNA, 171 bp, Homo Sapiens
ttttgaattatcaaactttattggcttgttaaaaatgattgaattcagcaagtacatttatgatctatctacattgttaaaacagcactaaaaataaaaatttttaaaatgattatccattatttacagaaaatgtggaaaagatggcttttaaacccagaacattatagg

SEQ ID NO: 334373 - DNA, 425 bp, Homo Sapiens
acagacatacaatttgtaataaacacatcagggtaaatgaggtatccatcccttcaagcatttcttctttgtgttacaaacaatccaattatactcttttagttatttttaaatgtataattaaattattattgactgtcgtcatccttttgtgccatcaaataggtcttatatattctttctattttatgtacccattaatcatccccactttccctgctgcacccccactacccttcccagcctctggtaaccatcattctattctccatctccatgagttcaattgttttaatttttgactcccacaaataagtgagaacatgtgaagtgtgtctttctgtgcctggcttatttcatttaacataatgacttccagttctaaccacctggttgcaaatgacaggatctcattcttttttatg

SEQ ID NO: 334374 - DNA, 421 bp, Homo Sapiens
ttctcttccccaactttttcttctagtggaaagtgttttgagtggtgatatcagaattcataaacctgggaaagttatgaaatgtgtgtgctggtagttagctttgatagtatatttaatactatatttttgatacttgcgtggataactggacttatctgtgaacatggggtacctacccatcatatataacatcggaaatgagcagtagtgctgctcttagagctggacagggggtatcctggtctaggccctgcgatacatgtgtcttctccagactgctgtctcccctcaggtaaggagtcactgaagccaaggggatgtacccacccagattttgcaacatctcttcctacaacattctgaccctggtttatctgcctacaaaggcctctccaccgagccctatgcagtctcaaaa

SEQ ID NO: 334375 - DNA, 508 bp, Homo Sapiens
ttttttcattttcaaaagggcttttattaaattctccccacacgatggctcctgcaatctgccacagctctggggcgtgtcctgtagggaaaggccctgttttccctgaggcggggctgggcttgtccatgggtccgcggagctggccgtgcttggcgccctggcgtgtgtctagctgcttcttgccgggcacagagctgcggggtctgggggcaccgggagctaagagcaggctctggtgcaggggtggaggcctgtctcttaaccgacaccctgaggtgctcctgagatgctgggtccaccctgagtggcacggggagcagctgtggccggtgctccttcctaggccagtcctggggaaactaagctcgggcccttctttgcaaagaccgaggatggggtgggtgtgggggactcatggggaatggcctgaggagctacgtgtgaagagggcgccggtttgttggctgcagcggcctggagcgcctctctcctgagcctcagtttc

SEQ ID NO: 334376 - DNA, 377 bp, Homo Sapiens
agcccattttgggtgatatccaaggtgcttgtgattgttttcagccagggggtatgtttattcacgaatcccaaaatacttcctcactcctttgttgggaccacagagataaatatacagataagggactttgaaagaccattttattagtggggacttcagtgtgaaaaccgagtgttgaccctgggacctgggcctcttgtgttagagaacatctttatctacactgcccctaagctcagcacatccaaagtacacacacatcaaggtccagaccggagtcctggcctcagtctgacagtgtgtggcgtgggcatgcatgcccagttgggacctgcctcccatgctgtttttgtgggagagcagcccactttaga

SEQ ID NO: 334377 - DNA, 457 bp, Homo Sapiens
ttttaagttccacttttggtgttattggacagcagacaaacacacatatacacatgcaccccatccatcatctccttgtctcttctctgaggacaataccccagagtctgctaaggccctccaaagatggaaatgggctggtcagaagagctgtaggagctactactgggatgacctgactaagctgccttctgggctgggaagaggcaggtacaccacctgcccagtaaggagggagccatgggtaagtggtaaagctctaaagccaaagtttgttcatcataaagaactgtctggcaaagtgttggggtgggggatacagagggggcggggacaccagtaggaagacagccagtgtttatgcttaaggactagacgaccctcccctggcaatggcaataaggggagaccagaatgactggtgtgttcttttaagataaaacccagacttagggct

SEQ ID NO: 334378 - DNA, 465 bp, Homo Sapiens
  misc_feature (148)..(161): n is a, c, g, or t
gtggggtggggagggttgggagatagcttctgggctgatacagctctaatctttaaacaaggtactttgacgtggaaattgttttctcctccctgcaagctctcctgaacaatcttccttggcccagtcagcccgcctcctggctgannnnnnnnnnnnnngtacatactgagcatatgttccagtgctattcccaaatggcaaggagaaaagaagactctatggcagcccagaggatccaaaagtgcattctatcaatggcacatttgatcaagctcctgcttaggtgcggcacttgtaaaggtgaggcagggcccacagggaaaggtgtcacactcagccctgcaggaccatagcccacctgaccaaaagactgtgagcccaggaaagacagacatgtacacccacacccacctacatacacgcatgcacacacagacacaagcatgcatgcacatacagaca

SEQ ID NO: 334379 - DNA, 376 bp, Homo Sapiens
tcttgtgtttctctttaccttcagaggaactggagctgctcctatcttcatctgaggtagaatcctccagtaactgttttaactgctgtatccttacgtccttttcatgtcgtttattgtctcgtatgatgtcatacatgggatcttcatgtgccactctgaactgctctaacttttggttgcctttgataaagaaagggcattctttgtcactcgttcggtgaccatagcgtttgcaacgccaacactgtataactttgacttctttccccagtggcatccaaagtcctttagttggtgcatgagccagaaattccctggcgtgttcattgcctggtacatctggtatgcaatcttctggcttagtctcatcttc

SEQ ID NO: 334380 - DNA, 345 bp, Homo Sapiens
  misc_feature (260)..(277): n is a, c, g, or t
tcagatacttctttacttgtagtcttattagtcattttggatggaagagatttctcaaccattcttttgatttttttctctggagaccttgttctgcttttttccaactgattctgctttgcatctttcctgatgacgtctgatttttccttcccatctgggatctgctcagcattactgcccgtatagcctgctattcttcgactcttaccctctaataatttggcctcagcatttgatggagctttgcttccttcaannnnnnnnnnnnnnnnnngggctggccgaccgacctctgctttttctgcactgatcttgtccagagcctgccctggtgctgacctg

SEQ ID NO: 334381 - DNA, 480 bp, Homo Sapiens
  misc_feature (328)..(328): n is a, c, g, or t
  misc_feature (387)..(387): n is a, c, g, or t
  misc_feature (453)..(453): n is a, c, g, or t
tttttccttttagtaagaaaaactttatcaaaaatttaaatatataaaataaggccagaggctgcaacttggaggccacttcccagtggtgcactgctgcgctgggtgtccctatgcagctagatacatgttaactgcatagagtaccataaaggagcccactggtgagcttcactgtcacctggccctgctggctggggcttccattgtctactgggtctgtccacaccccagattgccttgtggtcctttcccctggccaagaagataacagttttttaaaaatccccttctgatatgggatgtgagcaagcagtggggggttcantttggggaccaagtagtgccatttacaaagagcattgggaagcacctccttaggagggngagcagggccatcttccacgttgttcaggggccgcgccttttgcctgcccagaccctggggcccanttttttcaaggcgcttttaagaagttg

SEQ ID NO: 334382 - DNA, 367 bp, Homo Sapiens
  misc_feature (250)..(251): n is a, c, g, or t
  misc_feature (292)..(292): n is a, c, g, or t
gggcgcaagtgctttattcaaagcgaggggtggggggtgagacccgccagcaggggcctggggcaagaggcggggccaagctcacacagggagaggggcaagaatcaattctgttcttcagggtcacaggcagcaggcaagagagttggggggccgggtccagcgcccactgtgccctcagggagcctccccagggcagcattgcatagtgaccagccgactggccttagcctgacctgcgctgagtggnngggaggccctgcctccctgccgggcacctttggggaagggngtgcgtgaaggcattggcaggccctgcaatatgagccgaaagacccctggacccaagggggaggctggtcagggc

SEQ ID NO: 334383 - DNA, 547 bp, Homo Sapiens
  misc_feature (466)..(466): n is a, c, g, or t
ccctttgcattaccttttattacctcatgccaggctggaatttcgggaaatctgtttctattacaatgtatacattatacattaaataagattatgcacattacaaataaaattatttcaaaattaagaaattacacatagttcaattaaaattaaatttgaaaataattttatttgtgctgttctttagagcaccaacaattcatacacatgatcttcattctcatagccacttaaggtaagtattacctccattttagaggtgaagaaattaaggttcaaaataactaatttggtgatggccacatagtttttaagaacgttgagtctagcccaagagtgactggaattttcagttcacttaccaccattccagcagaatagcagagcaatttcaattttgcagtaaatcagggttaatcatcccagaactgtttgatagcaaaagactaaaacaactcaagtngcctaccaacagtggacaggttacataaaatataatggcatttgcataatgcagtacatgcaactgtgtacagggaaaagg

SEQ ID NO: 334384 - DNA, 494 bp, Homo Sapiens
aacacagggctattatttagctttgaggtgaagttatgaggaccacattaaattatgttgtgaaagcactgctggaacactgcatggcacctgacatacattaaacttcaagattactaaccacgggtctgatttctcaacatcagcaactgctacaaaggacaggagatggacctttggatagttcagacactaagagaaaagactggcacaaggacagccagccccaagaagctggctagagaggagtgtgatttggtaaggacattcagctcctgctccaaaactaatgtttctgggaagccacttaatggtctcaaagtgcccccaacagtggctctgggaggaggtgcaggagacaccagacacacgggcctgatgctctttcagagggcacctcacactaccccctcctgtaggcatttccctggctcttccctggcacaggagagcccaaggatctaacagctaggaagcaggcctaaatcaaagaa

SEQ ID NO: 334385 - DNA, 431 bp, Homo Sapiens
atgttgaaaagtggggcccatcaatgcctccctacttgttgagtacccacggcactccagggcagttctgttttcagttgacaaagcccaggtccagacctgcaggtgggctctccaaaggtgacaggatgcgtccttatatgatccagtgctgtggcaccaaaggattatggccaccggatctcaatgacctgggatcaagtcccaaccccttaccaagtggacacccggagtaatcactcaacatattgtagcttacattcctatctataaaatggcaacagtagggataagctttttccctaccataggaatatcatgaggatcaagtgggataatttaatcggcacaggccacaagtactttgtagtcaaataatatttgttcaatcctggcaaaggccagcatcctagccatactggactagctat

SEQ ID NO: 334386 - DNA, 477 bp, Homo Sapiens
cctcgttttccccctaggcagacctaaatcaagcagcttaccacaatagtgcatgctgagtagattagttccaaggaagggagactggaatgctggtgtcaaggaaaagcctccctcctcatctagtctaagaccataacgggcagaagcataagaggttccagggccataggagaatgagaagtagggcacatatagggaggaaagaaaagtgaagaagggggaaatctctgaatttttttactgctgggaaaagtgtactacatgaaggatgcttggggctttgctaacctgttcaccgctaaccctccaagtctaaccatccccagaggccacacaaaccaagtgactcctgtagttcccatttgccccactatggagtcagggcaaaagtggaatagccactccatgtgattttagcatgtttaatcattttaacaataaaccaccccacaaatggggtcatttaacctctaa

SEQ ID NO: 334387 - DNA, 410 bp, Homo Sapiens
tttttgaatggtcagcctctttggtgtttttaatgaagcagctacaaaaggatttcttttaaccaagtttcaccgtcctgtgtgattttgagtaaataccatcctgtgccgattcctcccacaagcccggccctttaagcctgcttgggggctgtggcttgggctggcgggccagaagcaggatggcaaacaggtgtgcgagtgtgacagggcagaggctggagccacagctgtgggaatacgaggctttggcaggccgaggccaggaggggcgggaggctggtgctgactgatggtcctgtcatcccggttcaggatgccactgccaaacttcatgccaattgctcccaccagagtacacggctatgagagggagagagctgggaccagatgaaggcatccctgtgacg

SEQ ID NO: 334388 - DNA, 362 bp, Homo Sapiens
caccaagcccagcctaggaggagaattttcttgacaaaatgtttctctgctaccaagtaccatacccttgacgcctgcccaggactttatcttgctctagcaataccaaactctttgtaattcttatacacatcccactttcacttgcttgtctttgctcataatatcctccctgctaggtgtgattctcaacatgcttgccccttatgatttggacatcttactccaagacgcctttcctgtttcttctggccaggttaagcaactttcttccaagcttacataataatctgctcatgtgtagatttgtctctctcctagagagtgaaccggttaagggcaaggagttcgtttcacttata

SEQ ID NO: 334389 - DNA, 411 bp, Homo Sapiens
  misc_feature (51)..(51): n is a, c, g, or t
ttctttttcctgaagagaagcatgctgcctctgaacagtggagaggagganaatcatcagcatcctcattggggtcaggtgacctgggcctcgttcttccgctgccacctgccagggttgggattgtcacagaagactgttcctctccgtggtgactgattgcggagagataagggggttaggaacatgcagcttgctgtgctgggctcagaagggactccatgtgattgactccagtggagactgtgttttacctgccatttctgtagcaagaaggaacccagatggggcctaggggtctgtgaatgcctggaaagtatatgtcaaacattgtgtgagggtacacatccttttctggggaagaagttccatggcttttaaaaatcagagtcctaaaggatcccagtgact

SEQ ID NO: 334390 - DNA, 482 bp, Homo Sapiens
ttttgttccaatatagctttattccctaccccctcctttacccctcctttagcaaaagtgtatgaaacatgcatcgttggaagacttctgggaaatgacaaactatttgtagtttaattacaaataccatattagtgatctgactacatattactcagtcatacaaagtcatgataaatcaagtacaaaggtcatgacaaacacagtttttagtgatttctatgcctaaagctttatattcccttaatatgctgtgtaagaaaaaaataacagctatgtgtgcaatcccaggggaagagggtggaaacttcagcagtctacagtacctcaaagcagttgtgcaaggctggaatatattagatcttcagtagcccctggaataacccttgatgcagagctcatgggtcactaagtaatgggatggtcttcagttgaaatgagacttaataactcttgaatggtgctttgctcatggacatcaa

SEQ ID NO: 334391 - DNA, 497 bp, Homo Sapiens
ctcgcaaatgcactggtcctgttctcaacctgcatggctcaccatggttctccccactggctgtgactgagccccgtggccttgtgggacctgactgggcagcgaatttaccgtccaccacacacagacacccagagccacactcctgcagccacaggaggagcacagaaggcaaggagaggctgcttccacacatcagtgcaaaccctatttctagctccctggatgaagcccaggcagtgacagggtttgggagagggaaggctggctgggttcttatagaaagggcctgtccactggccagtccatgagtgactgcctggaggacagggagccatctgccaacaaacgtcacttctgaaaaactaaaactgccgacaccccccacgcccctccccacacacatggttttgttctcattggggcttgaatgcagcctcggaagcaagaaagggtgaacaagatgccacgctgagtgcctggactcttcacagctg

SEQ ID NO: 334392 - DNA, 663 bp, Homo Sapiens
taatgtagaaaggctatactttattcagatagagtacactcacatattggcttgtctatggcacatcgatatcatgccaagaatgtaagcactaagagagaataagaggaaaatccaggctttatccctattgaattatttatcccactattagaatattagtgaggtaggtgtggccacactgtgatggcaaattaagcttcggtcacaaacatgccttactgttccccccagtctactgacatcagcttcctttacatagcggtagatgcacaaaagtttgcacagttgagggtattgtcatcatgttttggtatgtactggaatcctggcagcttcttctctgattcggagaggcgcaaacattaaagacaaaaagaacaactcgagtctgtcctttggggtgatttagggtggctgtttaaatttgtagtggttgaaaagtcttgagattgtcacacctagcaactcttatacttttcttctctcagctgcagcttgttcttttcacctgtgtaacaagctgtcttctcttctcacagaagcttagcatttcttcctctgccccatagcattttttcaatacttaatttaccaggtgctgtttatgttgtaggcacctaagtacttatacaagtgagataacatgtccgaagttcttag

SEQ ID NO: 334393 - DNA, 487 bp, Homo Sapiens
  misc_feature (79)..(262): n is a, c, g, or t
ccaaacattcttcaaaactgctggatgcttgcttttctttacataactgcagttcagttggaggagtgagagaagtgannnnnnnnnnnnnnnnnnnnnnnnnnnnnnnnnnnnnnnnnnnnnnnnnnnnnnnnnnnnnnnnnnnnnnnnnnnnnnnnnnnnnnnnnnnnnnnnnnnnnnnnnnnnnnnnnnnnnnnnnnnnnnnnnnnnnnnnnnnnnnnnnnnnnnnnnnnnnnnnnnnnnnnnnnnnnnnnnnnnnnnncataaatttgatcttagacctttctagttgccaaggccttcctacttagacagaatccatttggagagaaaactttctaacattcttctaagaggtcttgattcttggcacattcttctgtgtgatgtgttctctgtcaggcttgtcattataggggcaggaagaacgcactcatttcacttatacatatctaccattgggatgtgttagtagtgggaaagtaaa

SEQ ID NO: 334394 - DNA, 346 bp, Homo Sapiens
  misc_feature (221)..(221): n is a, c, g, or t
  misc_feature (321)..(321): n is a, c, g, or t
caatttcaatggctatttttatttctttgactaattcttctggccacacacttccagtgctacattaaaatagaaccagacaatgggcataatatagttttgtactggtgtctgaatttgatggagcaaacaccttttcaagttttcataaactgatgttagaagataaagatctttcgttgggcccttagggtgatgagatgccctctgaatttgtagtngatgaggggttttaagcttggtcacaaggttgctgggtctgcactatagtccacctttagctggcttgttagagggggttggggagttgaaatcttattntagttttgacagactaaatatcctt

SEQ ID NO: 334395 - DNA, 354 bp, Homo Sapiens
tttgagatggagtctcactctgtcacccaggctggagggaaaaaggctctcataaaataacctacaatttcccagagttaagaaggacccctgtgtccagacacctttggaaactcccatgaaagtaggcccatgtaatgtggaacaagctctgcactgggagtcatgagagaaaagttctaagcctatttcttcctctaattttctggatgacctacacaggatttttctcacatctgtgaggcagctactaaatgcctgacattggcctggcacagtggctcacggactattgccaatattttttttaaatcagaaaacaaactaaaaatcagaacttctggcttgtcatgg

SEQ ID NO: 334396 - DNA, 321 bp, Homo Sapiens
aagagaaataatagtaacgataatagctagtatctacttgagtgcacactctgtcaggaatcatgctaagtaggtctcattcaatcctcaccacagtctacggggttgggtatatggagagaaggggattctgattaagcccccgtgactctacaaaggggtctcctgcaatgggcacctgaaaaagcctcgactagtaaaggaagaagctgtttaaagacgaaacaaggaacccaaatttctcaggcagtgtgagcctacacacggaaagaagtctcaggcctgaagcacaggcacctttctattctcctgacagcccac

SEQ ID NO: 334397 - DNA, 362 bp, Homo Sapiens
  misc_feature (47)..(47): n is a, c, g, or t
  misc_feature (135)..(146): n is a, c, g, or t
agtatcttctcattttagctttttcctagtacttaccctacactganatattttttgtatacttcaagaatgaaatcagaaggcaattccccaatgcacccagacatagcaacacatagacctcactttggaggnnnnnnnnnnnncttttacactctaggatctatttgctttttacattaaaattcgtttctccaattgctggctataaaataaaataatcttcacagttgtatttattctacctggtttcaagtgcctaaaaagtcattatttttcactgcaaagaactgaaaaaataaacgtatatacctagaatttgacagaacaaagatccaagtgccagtctttttctttttctc

SEQ ID NO: 334398 - DNA, 395 bp, Homo Sapiens
tacattttttaactttttattttcttattacttcatagtggcagtatgttgttgactcagtcaccatatcagtaatagtgactctatctctccaatgtccttggacttagcaaaatttactcgttctccatttatgcgtggtcccatgggccatgaatggctttgactgggttcctcgttaagtctccttatgctagtctcttttcagtcttgaaagtcttaagccctgcctctgaagaattaatgtggatcctttcacagctttcacctaggtcatgaggtttaaattgttggagaggcccactgtgatatgattgtaagagtcaccatgccatttttacaaccttgagttataagtttcttgtaggtgcttcactagcctcatgatatgcctt

SEQ ID NO: 334399 - DNA, 362 bp, Homo Sapiens
acacccagagaacaggaaagcggcggccattttatttttccctgggatgctggtggctgcgggcctgacgtgtccctgaggctttcttatgcttctggtccagcacctgggccatgtagctctcctgctgcttctggatccggaagtcagacatgtgattcctgcaacggagccggctggtggtgggctgtggacagccaagggtaggtaggggccagaggtctggctccccagtgtcatcaacaacccccagccgggcccagacccctcacctgaagatctgtttctgctggctgataacttgctgcaactctttaatctcattctctttgccattaagaatatcttcttgctttataaaa

SEQ ID NO: 334400 - DNA, 452 bp, Homo Sapiens
gcatctgttctgtgcatattttattgaataaataaaaattttattggtttggtttttaaaacctataaacaatattcttagtttgatcacttaaaacatacaactttatgtaaccaaaatgcttaaaggattttgttcactgagtgttggctatttatacctatacatatgaaaatctgacctgtcaaaactggttttgcagtagccagatttgagatatatgtggatttctaaaaggttaacttgtcaaattatgagatctaatacaacacccaggtattaagggaaaaaatgattttgcaaccccaagttgggacttaacataagaaatccttatgggtgttgccaacgttaaaaattctattgagcactttcatttttcagaataaaacaggataagcaaataactcacaacagtacctcatagtcttctataaatagctaagctatac

SEQ ID NO: 334401 - DNA, 349 bp, Homo Sapiens
agctcacttgctcctcttcttttgccaccaaatgccctttgcacacctctcacctggctcctaccagatcttacttcataatatctgttatctgtttattttatttctcccctctcactagcctggggttaggtgacggggtcaactcaagggcagggattgcattatggtcgctgttgatttcccagtgccccacacagcatctggcctaaagaagtgttggctggatgaatgaactcctaagcagtctcattccccagtgccccacacagcatctggcctaaagaagtgttggctggatgaatgaactcctaagcagtctcattccccagtcctgggcttgaacttg

SEQ ID NO: 334402 - DNA, 293 bp, Homo Sapiens
aaatatttaagagctcaaaggtatacaggcagaaagtggaaaatctcactactactttttattctaagctcacggtgtttcagatatctatttcacaaccaagaccatgaaacccatcatagtatttgtgactactatgaaaactatgacatgtcagtcagccttgctgcctgctgtgtgctgtatataattccattacatattccttatagctggattgaaaacctgaaaatgaaatgaagtccctagagaaacttggccatgctggtgctttttaccaagtttgacaattt

SEQ ID NO: 334403 - DNA, 970 bp, Homo Sapiens
  misc_feature (691)..(691): n is a, c, g, or t
  misc_feature (701)..(701): n is a, c, g, or t
ttttttttgcttgcattcatgtttattaagacgcagccaagtgaaatgtgtcagctcctcctcttgagtacagccttctttactggtgtataacaatgcccaagggctggatgaactacataatcaaaatcaaatgacagctttctacagacttggccaaaatagtacaacctcagacaccattttaaactgcaagaaatctgagcctttcatagtcttgctttttattgttgacattcacattttaatttttatgatcattgcagattcacattttaaaaacccaagaaacaaaaaagctcttattctaatttagcaaaaagcagaatcatcgggtgtgaagacaatacactatctacatacagctgctttgtatccataattatctatgtaagaaacatgctgtcattcacagggactccatttacacgtgcacataagccatgctgaggcttaacagtgtggtgtgggttttcgtctagcatcttctctttactctggatccttatcctcatctgaaaaatgggggacagacttctttgcaacaacattatccagtctctgtccttggtagatatggattgacactcctccgctttcggtctctctcctcccttcatcttctcgtaaaggagtttcttgttccacttgcccaagcctggatagtcatgttccggatcaaagagatgcntggtgcaacntggaactctcgacgtgaactctgcagtgtcaggggtgttttctagacatccatcatctgtttttccaacaggacagggatttggagggtctgggtacccctgatcctcactaaagtccttaggaatgttgtctccagtcaactctgccacgatgttggggatgttgccaaaaggacccaaatgctgaagtccttcatgagctccaccaactccatgaggacagaggagccccacactcacagttccctaagggacaatcatggtgtacg

SEQ ID NO: 334404 - DNA, 367 bp, Homo Sapiens
  misc_feature (50)..(50): n is a, c, g, or t
cgaactagagatgtgcaattgatttcttttcttcctggctttttaactcnccctgtttcaatcactgtcctccacacaagggaaggacagaaaggagagtggccattctttttttcttggcccccttcccaaggccttaagctttggacccaaggaaaactgcatggagacgcatttcggttgagaatggaaaccacaacttttaaccaaacaattatttaaagcaatgctgatgaatcactgtttttagacaccttcattttgaggggaggagttccacagattgtttctatacaaatataaatcttaaaaagttgttcaactattttattatcctagattatatcaaagtatttgtcgtgtgtag

SEQ ID NO: 334405 - DNA, 334 bp, Homo Sapiens
caacaacatttgtattcactgactgtagcaatcataagtaattctcatccatgtatgagaccttctaagacaaattccccctctcacatcgacagcaagaattcatttctttttaaatctcctagaacagatgtttactgtcaggctgacctttctgccaagtagtgaggttctgggcatttgtggtgatgatgtctgtttctgagctgctgcaatccctccccagacattcaccagctgctcccaaaccattactgattctatccagggctttcctctgggatctcctccatattcaaagcatatattagaacaaatatgaaccaaaaggttt

SEQ ID NO: 334406 - DNA, 443 bp, Homo Sapiens
aatacctaacatcttctctttgggggaactgctaaaaatcaccgggattcacttctctagaacaaaggagtacttggaggataaatgcaggtgacagacagacattagtacccagtaaagccccaaatattggatagatacccttatttgtcctggagcctctctgcctgttaagaatttgattaccttgcccagaatcatttagattatttggctcaacaaaacttggcttatgaaccgcacctctaagttcccaagcatgtttcaggaaaggtttgaaacaaagctattagatttgtactaaaactattcaaactggagacttgtggtaagccatgccttggaagacaggatatttataactctctgaccactcccacccctatattgggagatgagggttctaaaaacagtctctctgagtttctggagaaggagatcaa

SEQ ID NO: 334407 - DNA, 655 bp, Homo Sapiens
gggtcacgctggtattaccctgggttttagccagcttgataaatagaggaagttgggtggcttcccagcctccctgatgtcatggtttggggcaatctgcaactgtgggaggtttcatgaatcctagcaagtcggtgagtttgctgttcttctctgcgaaatttctctgttccgtgccatgtcttacataagttgatatggttccttttgtgacttgccctttcccttcaatgatgtaagaaccccaaacattggtaagtcactatgttttgtcactgaagcgctggtgctcatcagatcctcattcctgttccgcttctctaggagataaaggctggtgggtgtgtggtggccacaggggcaaggagggatctgtggactgaaggatgggcctttctttaatgaagttgaggccttggtattcatcaggcatttttgcatcattgcttttgccattattttccacaacttgctgaagtgagttcctgctccctggctgggaagctggtttcttggccctgaaaccagaagtctttgtgttcccagttgggcctttctaactgaggtagagcaggcgaaggggagatgacgttgagctgagcaagtgatggctttccgtcccattccccacccactgagcttgatggaggactct

SEQ ID NO: 334408 - DNA, 478 bp, Homo Sapiens
gccgagcagatgatggtgccgtgcttgtacaggctgcagaactgagagccaaagtaacccctgttttctttgtaaatgatccagtctcaggtatttcttcatagcagtacaaaacagactaacatagagacactggaaagtgtttaataaaaatgctgggtaatagttactgagcataaacgatgtgccagacacatatgttcatagatttcatcctcaaaaactacatgcgtgttttcccaagttcacagagtgagtggtaaccactaggcacctctgcctctgtaccatgtatcacctcctttttattttctaaaacaatgcataggataaccatcacagtttctatccaacattacatacacatacgtgtgtgtgtatgtctggctctctggaggcaagatgatgggtgattttaatttttttctttgtgcttcccagtttttctgcagcatagatggataaatgttataaaaag

SEQ ID NO: 334409 - DNA, 636 bp, Homo Sapiens
ccatgaaaagtgaagaacttgtccctaaagtgtggaaaagtgtccttcaagattttagactcttctcccatgttcaagctgcagcgccacccgcccttacaacctgcccggccgtctgtctcttggtattgggtaaaggagggggcacctgcatgtctcctgcaatgagcaaggaattatgtctcatgttttgacttcagaggctttttgctttggtgcatttcagaaaggatggagaacatttattatgtgtgaaagcatcctcttccggttttgctgttattcaaaagtgggaaatgtacctggcacgtttgaaaataaaaaatctgactacctatcagaagagtaaatcagactgaagtacatttggataacacaaggtttctataaaatttgttcttcctgtcctccatgtcactgtttcttggacctcagttctctttttgaaagcattattccaaaatgccctgagagggtctcttagatcattgtttaaaaaaggaaaaaagtatatggatgtgctgtccatccaactcaggattatcattcttagcaacacgtaaccgaagcaatattcttaagaatattgaaggggtttttttaattgaacttaagactggagtttttcctttgaaa

SEQ ID NO: 334410 - DNA, 395 bp, Homo Sapiens
  misc_feature (62)..(62): n is a, c, g, or t
  misc_feature (78)..(78): n is a, c, g, or t
  misc_feature (90)..(90): n is a, c, g, or t
  misc_feature (117)..(117): n is a, c, g, or t
  misc_feature (124)..(124): n is a, c, g, or t
agcacctctggctgtctgccacccatactcatggccatggcacagatgagtgccacctgacntggtggagcaaggcanaacaggataganttggactgaccactgtcaggcagttcnttccaanaaacaagggcaagactcaagtgattgaactgagctgtagacctttaagagccatagccatctagaaagctctgttgaaggcactgtcagcctatgcccctatgatgcagggctcactggtaattgtaagcagcactttccaggaccaatgcaacactgagactgcactctccctctgtgaagggcaggtattatctcccttgtcttcctcctagaagcatagtgacttgcaccttagcagtgatcatcagagaactttgagtatgtaaaga

SEQ ID NO: 334411 - DNA, 431 bp, Homo Sapiens
cacaggtgagatccaggaaaatgtattagggtgcattccagggtgcagtagctatagataaatagggtgctggggttgggggcaggagctccagatgggctggaggagcatgggtggtaagctccagggtccctggcacagggctgcacatgtgctggccactgtgttgatgaggggtctatgagtttttaactcagccccccatcccatggctctctctggtgcaggaactacatgtggtcgccttgcattgtaccacaggcctgcactccactgcgacagactggacccagtgtggggccaaggacaaaggcggccttccgtgaggtagttggacttgggagctctgagtgggtgggagtgcctgtcccacctagtcccatccatgcaccttcatgtgatacagaggagggaactgaggcacagaaggc

SEQ ID NO: 334412 - DNA, 655 bp, Homo Sapiens
ttttaactcacaaaaagtattcatttttcctcatgattttaatgggcttttggtagttttaataaaacagtgttggggctctgttttatttataacatttagagcttatgttagcctattaatgtcatttatgctgaataaagtggaaatatttcatggaatgtggaataatgtaagtcatttttatatctttctaaataaaaaggattgattaaacagaaatacctataaactattcttttggaacttccgtaatgggactatcagggtgtcttgcacctagtaagtgttcaatatgtactccttgaatatgtaaatataaataaacccagaactaggccattaggtgaactagacatgaggtgaaatggagcattcgtggtgggtgccgctcttctgggagaacaatgggcagaagttcatttgtccctgtctataggacttttggtgagacaggatcacctccatgcatttggcaggaagaaggaagacagagtgccccagcaccagcttataagtattgtgcagacgtttcacgggtatcacaggaaagatggggtgccgtggaacaaatgaaaactgattctccaatattccatttggcctcaccctattacattctaattttgtggatatatataagagattcttccaa

SEQ ID NO: 334413 - DNA, 479 bp, Homo Sapiens
tgtattggtttcttgtgtgttacttacaataggcatctaggagtcacatactcagaggcctaaagtccttgaaggccttgtttatgaaaggccacccagtgaaaagggctcacttttcctgtgtgagtcggggctggacagagctcaggccttgtctcaagggggcagtcgtagttgtacttaatcatgtggtaaggtgtacccaagtgttggtagagcttctgacttttatgtgaattcttccattatctaaatgttggctcaagttttaaaaactttgggctcaagttttaaaaacatatttggcctataatcactaatctactgttatttgagatatttaccctagacattttagactagccaaaatatacttaagtaatttaggtatatatctcattgatatacagtccttatccttgatgggaaggtgcagtgtcaactctcagaactgccattttgaagattaaaagtatgat

SEQ ID NO: 334414 - DNA, 182 bp, Homo Sapiens
ttttactgcaaaaatactgtatagaacttatttgtaaatagcacatacattgatagatggggtgtgggaccaacaaaccaaattaaaagaaattgtttttctttcagtacactaaggtgtgtgttttcaaaaccaaacacaaacctgtcaagagtatttgttggctagtttcttaaaaggcc

SEQ ID NO: 334415 - DNA, 184 bp, Homo Sapiens
tactttgtaacaggattttccatctgatagatttattgtcatatccccttcaaaacagacaagatgctcaccatattttaaagattatagaggttgccactgaaagaaaaattttacacagtcactgtacatcaaggttgaaaaactgtcctgcatgaaaaatatacttagaaatcatgtgaat

SEQ ID NO: 334416 - DNA, 515 bp, Homo Sapiens
ggcatggatagtcccactacccccagccaagaattatctgactccaggggtcaatattgccaagactgggaaacactgatatagacagtgttgtccctgcctcctgggttagggtaaattttcaccccaaccctggacaaacagtgccttttgacactcatgcaactgttggggaaggactggactgggatccttgaattctccccagactttgacttttgataactctgcatatagcaagagtgattcttgaaagagctgtggctccatgctgaatgcacacatgtactcagagggattcaggtgggcattgttctggtgtgtgctgtgcaatggtgggaaaggacaaagctctctaaactgtccagagcaacctgccctgccccggtgtgcttggaccctttgcccagggaaccaggacatcagaaataatgttccttctgtggaaggacaacggggagctagggtagcaaagagcaataaattccaactctttatgaggtcaggagttcttt

SEQ ID NO: 334417 - DNA, 377 bp, Homo Sapiens
ttttaacaaactgaacagtgtttggtctggaatgtgtttaaggaaaaggcaaagttcgcagagtgtgggtagacagaatagggaagaagtacagtttcagaagaacatgcaaaggtttcgtgcactggctgaattcaaggaccttcaattaatttgccagaagtgattgtgcaaacctgggaaagaggacatcttacttctgtttatgaaaaacgggaggagcttccctttgcccgcacttgccttcctttctcatatccaaaggaatcccagtcgtgtgcttgttaaattctgcgacgcagcgaggggctctggctgaagctgcggcagtggccctacttccaccttcagccctagagcaatggttccagcgtggc

SEQ ID NO: 334418 - DNA, 798 bp, Homo Sapiens
ttttgagacctagaattaggaaggagttcaatcgctttctgttacaaggtttttggaccacaggagatgggaaaaacacagtttggaagactaaattatactgattgcccagaatagtctggttatccaaggcctctaaggaatgactgagacagctaagtctctcttcctttttattccttcttagctgtggggaacttcaaagagcctagccatctcttgatgaggttttttcagagagtggttttagaatttagaatggttctttgcaatcaggatcccattccttatgtttttcttgccctggtgaaagggtatttcaaattttcttctggtttcctctaaatttcagggacctgggacctgcatagatctagggtttttatggtttgaatacaaatggagaggagtctagaagttcaaggtgtgtctcactcttccctgcttcatttccaactcttccataggtccccctgtgtcatctgcagtgaacaaacccaaaacacttgagtcttaatgggaattatgcaataggcatttagagaaaggaagtcagaaggggccagtgaattttttcttgacataagctattgccttgcattctgttccagagagatgcagggctgaatgccctctcccaggccagcatttgtccattctccaaaagcattctgcaggccagtttgcttttagctcagccaatgccagggtttgatgattaacccatttgcccaggtgaggaaggcatctacttgggatgggtggccccaggcctaagttttagtggtcctaagagat

SEQ ID NO: 334419 - DNA, 471 bp, Homo Sapiens
tggagctggtgggacaaacctggactgggtggagctggggccccagcagttggctctgcacatagcaggcgccataagctggaatttgtgcctccaggcctggagggcacgcaggcggtttctgatgaagccgatacattcagaattggggtccaaataggaaataatgcccttttcaggctagtgaaaatgttgaactctaagagataagtttatttagagactggattgagcttttgtttaagatttcccacctgcgtaaaattcctttcagcccataggattcttgattctgaagtccagacagaagcctgtgttctgtagctgctgaacaaagatgagagatcactggggctgctgtttgtccgaagtttgtgtgggtatcatgatgaaccctcttctaagaagtaaaaggatcttttaaatcaaaatagacaactgcagtcagtccaccatgcccaacgacattta

SEQ ID NO: 334420 - DNA, 394 bp, Homo Sapiens
tactagaagttatttatgtttaatgcttaaaagtctgaattcacaaacaatctaccattatagaagtactggtggtcaatacaatgcattagaactatgtacaacgcacagtttagtatcaaaatctttctacactgtagagttttacgaaactgttaatgacatcaaacactaagcacttaagacaccatttttttctgctaccacattaggaacgtcaatggacagtccatttcaacttgcagcatccatccatttctagtatgaaattaagtaattttctacttatacaataaagtatatctacacggttcttttgattttgatccatagcagcaaaggcactgtacatcagcagatccacagacttaaaagatttttaaagcattcaaac

SEQ ID NO: 334421 - DNA, 454 bp, Homo Sapiens
  misc_feature (320)..(320): n is a, c, g, or t
ctttgtaaaagtgtgtgtacattttttattgtgtttctccccagctaccttccctctccccgccacacacatcctatttgcagagtgttgggggaggtggaactgtgatgtgggccctgctgtctagcagtctgcagtcacacacagccatccaaactacgagattgtatatgattcagtgccaaactgtgagctttggggaatccagaaagaaggatgaagcctttcccaagtttcctttagttaaatgtgccacttgaatcctgttctgactcctaggcacatgcaagagtcaatcacatatgttcctgtggcctttnatcattttggtccatctcttgagcccacatgaatactgtcatggatggaggaggaaggaccaggctgggtcagggcctgaatgcaggttttgtttggactataggggctaagttcactttaataggctgtgacc

SEQ ID NO: 334422 - DNA, 381 bp, Homo Sapiens
ttgcaaatataaagaggtttattcattctaaaatcctggctagtgcttcagccacaggtcaccaggaatttgggatgagggaatgggagaatcagtgacaactcttgatttaaacagcatgctcgactgacgcatgaaagataccacccacagagccaaaataacgaaatgaggcttcaggagaccaaagaggtcattttcaccaagacctctgaggtgaacacaacccagcccagagagcaaacgtaacccagtaagtcaggctgggagaggacctgcgttccacacacaaggggaggggtcagggatgccaattgtctcatgaacacttatcattgttttacaaaagtgaagaaataaggactcagctcaggctgctct

SEQ ID NO: 334423 - DNA, 428 bp, Homo Sapiens
gcttataaaaaccattttaaattaaaaaagggaggaagcatcagtgcacacagatggggacacaggggcagagggcccagccccaagtacagtgtggtcaccccacagcccagtgggcaccagggcagactcccctcgcagcacagacagctgaggcccgggtgctggttcctctaggtacagctttggtccttgtgggctcagaggtctgcctttcggaaacttgctctgttcaaggagttcctgaggccgggtggggtgggtgccatcagctggggcaggcgctgggtaagcaggggctgcagagcctcccgcaggcggcagtagttgcgctccagctcacggtggtactccttctggtccggcccaatcagggccttatttttccgcagcgatcctcacatttcttgcagaagtcttgaagcaga

SEQ ID NO: 334424 - DNA, 868 bp, Homo Sapiens
  misc_feature (528)..(528): n is a, c, g, or t
  misc_feature (724)..(724): n is a, c, g, or t
  misc_feature (741)..(741): n is a, c, g, or t
catgggaagaagaagcttgtttattgtgttacatacacagcacggggctctggcctgccagccatggggacctactcaaactcaggaacaggccggtctcctgaacctcagtttcacttgggggctcagccagtcgccagggccttctgctcgttgttcctccctccaaggtcctgccctggaggctccaggagaaatccaaggagtgggagggtggagtcaggatgaggagtggacactggtcagctgccccttctgctggaagtagaactggaaccgagactgggcatagtccaagtaaccaaattctatggtggacatggatgcctggaggatggaccacagaccccagaagaaatgggatgccagagcataccgactgacttctaccagcaaatcttcttccagttttctctgctcctcttgggagagggtctcacctttctttgcctctgccaggtaatgacgaataaaatgcaactgctgttcttgagtggggtagtctgtgggccttgctttgtagaaagngcattcatcgtgagtataatcataaacccactcacaaaaatggttcccaatgtcaaagcccctatagttataactgctgtactcgaagtccaacagcatgaggctgtcagcattttctggctctgagagcagcaagatgttccctttcctgatgttcttgtggcacgagacgactggcgaatgggtagaatctagntaactacctgaggttgncccatcctcatccttcagccgtacattcccacgcagtttcatctcagggaggccagttggcggccggtcctggatttgttttaaggtacggctcatggttcccaaacaaccagtggggccccttgct

SEQ ID NO: 334425 - DNA, 367 bp, Homo Sapiens
taaaatcaaaaacaaattatttacttccaagatacaatgggggtatagggattgggtaaatgtttccatcccaaaaagggggaaattggccaaaagaaagggtctacaggatccacacagctccaaaacccagtagggaagtcactaaatcttaaagttccaaaataatcttcgacatcatgttccacatccaggccacactggtacaaggggtgggctccccaggccttgagcagtcctgcccctatggctttgcagggtaaagaatccaaggctgcgctcatgggctgcagttgagtgcctgtggcttttccaggtgcagaatacaagctgctggtagatctatcatccttaggtctggagggca

SEQ ID NO: 334426 - DNA, 436 bp, Homo Sapiens
gcagggtcaagaaataataaatctaagtctagcgttggtgggataatgtcggtgtcactaaaagaaatggggaatttggaaggtaaagtaactggaggtaggaatgaacccaagatttactaagcaccttctgtataccaaactcaacactaggagtttatacaatctttaaaacagctctaagagtagatattataattcccttctgccaataataaataataagtgactaaggtgtttttgaagctcaagattgcttgattctgcagtcttgttttaaattttggacatggagagtttggagttctgagatgagggaaggcatctgtcatagtgagagagctgaaaacatggagctcaggacaaaagtcagtgctagagagatcagttggaagagttatctttattgtagtgagacattgaatttttcagtgga

SEQ ID NO: 334427 - DNA, 273 bp, Homo Sapiens
ttttgggttcggaacatttccaactgtttctgctgctgtcgtcttaatgtattaacaatagctattgctagtctcagtgcttctctggggtacccatgagaacgtaatgcgtccactcttgcacaggctgtaggaacatgttcatgccagaggggccacccgcgggagtcgaagagggagttttcagtgtcgtcatggtaacagtagttggtgtataggtcactgctgataatgtgctgcaagtggctatcctgccagtggagatcgcatgcc

SEQ ID NO: 334428 - DNA, 548 bp, Homo Sapiens
  misc_feature (103)..(103): n is a, c, g, or t
ggtagccagctgaacctccagttataactgagggtgccaagagtgagctgttgagagcagcgaggacagaggttttcccagccaggattgcggtactgagacnatcacacacgtgcatacacatgcacagacatgtacactcacaccctaaattgcttgtgctatgtgggaaattttgacccacatattcctatgtttaattgaaggcactgttaacttcttaacaatgctacatctctgatgattttaggaggaattagactgcgtaaacatctcaaaacagggaggtgaagctaggaagcataaatgccccagtgatggctgcaactaggtctcttaacttattgtaatctaaaccttgggtgagggagaaagaaaaaaagagcagctttttaaagtccactgaagacttcagatgtggcaaaaataatcattttttttctggccatgagaaattgtctgagtagagggtggaaaatttcatccttatcaggaagttaatcatagtaatttatgtggaacttccaggtggttacttagtcaatctt

SEQ ID NO: 334429 - DNA, 567 bp, Homo Sapiens
  misc_feature (355)..(355): n is a, c, g, or t
  misc_feature (457)..(457): n is a, c, g, or t
  misc_feature (496)..(496): n is a, c, g, or t
  misc_feature (505)..(505): n is a, c, g, or t
  misc_feature (523)..(523): n is a, c, g, or t
  misc_feature (541)..(541): n is a, c, g, or t
  misc_feature (556)..(556): n is a, c, g, or t
tttgggaatcaccattttcagtttttaatgttaaaggggctaacactgtatgggactcaagactggttttgaaattctcttttacatcagtcataaataactgattgttaacattatttaatttctgtgttagattttccaccaaactctgaggttcacaagttggaattacatttgaatgaaggttagtagttgggatttcaacactctttgctatgaagtcccattgttgttaaagtcacttgttaccaagttttgggaagcgttaggtgcaattagtggaggagcaactttctttcttctcttaagaagcactgtttccctttttatttaaatgactgggatcttgtgttcntgaggaccacttataacagaaacacgagaactgttactggtaaaattttgtgatggcccaccagaattaggaaatgaactagagcacaaaccattttcaacnagtcttcattagtaagtcattcgtggaaaaacaggcaangctgtacanttcctcaatgggagaagntttggagtttgcgtcctnattcttgtggtcaancaggtgtttga

SEQ ID NO: 334430 - DNA, 445 bp, Homo Sapiens
tgcatgaacttcatagagatgggatcctttagcatgttctctgtgcacatgcttgaccatgttctttcacatgctttttgccacttgatctttccagcaactcagtgagagaagcaaaaaagtaagttgcatcctgctattgtctgaatgtttgtgtctccccaaaattcatcttttgaaacctaattaccaaagtgatattactgggaggtggggcctttgggaggtggtgagatcatgagggtggagcccccatgaataggattagtgcccttataaaagaggccctggagagctgccttgccccttccaccacatgagaacacagccagcaggtgcctataagcaagaaagtgggttctcaccagccatcgaatctgctggtgcattgattgcagacttcccagactccagagctatgagacataaatttctgttgtgtata

SEQ ID NO: 334431 - DNA, 420 bp, Homo Sapiens
ttctaacaacttaaataatttttattacaaaaggaagaaaagaccaaaacatccccaaaattctcccatgggcttccccctccactccaataaataaggtatgggagactgaccggcggagggggtggggatcatggttcagcagaagggggagcttagccgggggggtggcaagcacatccaacccacctcccccagtccccggcactacggtcacattggccagaacacagaactctgcccacagacagcaacagtctctggatgtgtcttgaggagtgtggccggggaggaatgtcatacctcagaatggccgggatggctgccccacccctgtgtccttcccagttctggacagcatcgggtccagccagatccatgctggctcccagggaatttagcagcatcaactgaggcgca

SEQ ID NO: 334432 - DNA, 432 bp, Homo Sapiens
caagtgacctactattaatatatcctattttttctctgtatttaagaaggccaaatagaaaataatgctgatatgggagtaactgttcacattgagaaatgagaacagaatcccaatctcatttattgtctatacttggacctgtttactattcttaattggaacaagacattatcatttttagtgtaaaacacctaaattctatacactatgttttaattcctgcagctatccgagaagcgaagaaatcttgccaagtgaccaagtcacttacgtgagctatccccatgtaccgagggtaggtatcgcagtttccagcagaaaacccctatctgtcctggctgatcagtatctttaatcctactttctctggctttgacagcacttggtccaaacctaaagggcagagagagcttcagagttccaatgaca

SEQ ID NO: 334433 - DNA, 441 bp, Homo Sapiens
tttttgtccttaggggatggtaaatttgacagggctgtaagtgagcacttgttgtctgctgaacactgggtggtcaagagacccactgagattggttagttggaacagaacatgaagagtggataccttaatctgcttgggctgctataacaaaataccatagactgggtggcttaaacaatggaagtttatttctcatagtactgaaagctgcgaagtccaaaatcaatgtactggcagattaagttcttggtgaggaccctcttcctggctcgtaaatggctgacttctcactgtatccttacatgacagggagagaaacagctcaggtgtttcctcttccaagggcactaatcccattgtgtgggctccaccctcatgacctcaactaaacctagttactgcccccccccacctcctaatgtaattatagtaagagtc

SEQ ID NO: 334434 - DNA, 1017 bp, Homo Sapiens
atgaccttacatatgtttttttctaattataaaatatcttttagcttcagaatacatcttgcttgttgttttcaggtaaatgaaattggactgcagggctcctaacctgggctgctaaatgaaattggattgcaaatctcctaaccggagatgaatgcatagtattaatgagatctgtgggcagattctatgcaattcacatatttacaggcaatatttctcaaatcatatgcaatcattgtgcagatttttctgaggaagggtccataattttcattagaattcaaaggaagtctatgacccaaaaaaggttaagaaccactgctctgatgttttctgcacaaagtaaatggcaagttcagaggttacgttgctaatactagtgtgtgtacgaaacagatgacttccgaatctcatctactggagttttcattcttctttactaatccatctagacaatgatgcagaacagcaaggagaatttgggaacccagacccccaccttcagcagcttagctttcatggtggatgtgatggttgtggggttaataaactggaaggaaggggcggcgttgtttgggtactgtgcagggaacttcaccagcatcttgacacgatggttgctgcagtgcacagacactgtgcagctcctgtctgccgcatccatctccacattgacattccggatttgcacattgatcagggagaattcctgctgcaaggtctgaggcagccccagttgatctgatttcctctcttccaggagatttctagggggatcttcttttagggcttcttcctccccatggcttgcagtgtgctggtgatctgtatcttcagtgtgcagggtcttctcaggttccggcagaagggaaatactctcaatgaactcatcaacaccatctaatatgtcatttgcacaaagcctctgcatctgggaatccacccgccacattctcaaggtctgatcccgggaccacgtcaccagttgatagtccttggacccttccttctgct

SEQ ID NO: 334435 - DNA, 449 bp, Homo Sapiens
  misc_feature (430)..(430): n is a, c, g, or t
tagttatttggagggaattgatgtgcttcttactgatttctcagatcttttgagtcagttatgactctttcatctactttctatttccaaaattttattgctgtctcttattttctattgcccttctctctttggaggttaagcctttttaaaattcttactgtactttagcaggattttggggaaggagttgaagtaaatcagtatgttcagttaccatacttaactggatgtctttatatcaacactctcagtataaatttaggttttactatggagaagtactatgcctaatgcagttgacatataaaacttaagtgattgtatagtctgtttgggttgctataacaaaataccttagactgggtaatttatgtacaaaagatatgtattgctcacagttctggaggcttggaagttcaagatctangtgctagcagatttgtgtc

SEQ ID NO: 334436 - DNA, 760 bp, Homo Sapiens
tactctcttgtttggaatggcacccaaagcactttatgaaaggttatttcaggaacagcggaagggttactgatcccgggagcacacagcattgcacagtcgtccagatatgctcttcattgagagaaagacattttgcaaagatgctgctgaagaatagtcctttgggcctgtgacgtggcagcccccatagggtttgtggaatgagtttacccaagcctctgcctccctgtgctccccaggggtgcatgctcctgagaggctcattgcccgccttggtctccaaacacctgtttaatctgggggttgaacggattctcctttcccaggatttggggccacttgagctgcacctttttccaggaatgatccgccaacaacagctaagccacctcgttggggtggaatccatccacgggctcgatgagctggcagggctgtcgggctctcttctggcactcgtgtatgatttcatggaagggcaaatgcactgtagaaaagattgaagtttgtaaatttctcactggctgccatctgttgtcagtgtgtgggagagttgctctgctctctctgaagtgagagtccgcaacgtcgtgtttgtagacatccagccgtggcaggcgctgacctgtgaggcagattcaggaaggagtacaactgcggcataggtcatgttcttaattcagctggccgataggatgatatcctgttgtgcaaattatcccacagaatggttccatcgtgtaagacatatcaaaat

SEQ ID NO: 334437 - DNA, 391 bp, Homo Sapiens
ttttgagactgcatagggctcggcgtggggtcttacaagggagacaggaattgccagatggacaagcacagagtgggcacccggaagagggaggaggacgttctgaacgaggagccagctcatgggcactaaagctggcagggggtgggctgggagcaggagatgagacaggatcagggagaggcgcgccctcgggggtctggctgccacactcaggggcttggggctgtgtgtgagttgggggtcctgctggcggttccaggcagggagtgctcccatgatccaagctgcgtgctggctgtgcagacggcagcttggagaaggaggagcctgggtgaaacggcccagtcacaccagatggacaccagggccgagacagagctgagcgctg

SEQ ID NO: 334438 - DNA, 445 bp, Homo Sapiens
tttttatacaaatatatttaatttaggagtatatgtgtgtctatacacacacatacataaatataccacatatacacctgatagtcaaataaggtacagaaattttatcttgtcaattatgccaaataatctctttaatgtgcactcaaacatgtaataaactttggataattaaataatgtgccaaatttaagttgtaccacaatattcaaatcatagtcttatggaactctgtaattggatacaaacaaaaacttgtcatataggaatttttttctgtcttttccctgtgtacagcaaactgaggaagaaagatcattatttaatactgggccctgaaatgacacccaatttgttaatggaattatgaagaacagcaatataatacactgaagaataacttagtatcagagaccaataaatcacttttttaaggatgaaaaaa

SEQ ID NO: 334439 - DNA, 504 bp, Homo Sapiens
tgtgagtgtggaagctacctgctgcctggatgtcagtttgacagcactggtagtggtagtaatggagtgagtgctgcattgagtgcttcctgtgtacctaagcattatgatgagggctttatagacacttttcattctcaaaacaagctgaagagaggttaccacattttacagagtcataagactgaaactgtataattagttcaagatcacgtagtaagatacagagctggaatttgaatatagtctgttaattccaaaactggtattcttaagtgttgataaagaatttcttcatgagcaccgcagatattggtcctggaagaaattttggcctcaaaggcagctctctcccacctggatactttttgtccttacagatagtaaactgtaacattaaaattaaatctgtaattggttatacagtaataatgtcacgggcacagtacttaatgtaacatgcctaaatgagaaatgtctttgacttagagcaataggaatcta

SEQ ID NO: 334440 - DNA, 408 bp, Homo Sapiens
agagggctgttgcttgtcaggcaaaaaagttttctcttcctaacccaccatccctctctctgcttcccttgcatttggcaggctgtatgaagccaatgagctgcaaggtgttttgacaggggaggtctgcatgcagcctcttctttgtcctaacaattcctttgttgatcttgcctgtgatgaatcatagcgcctgcattgctctggtctaggcattatttgcaacacacagtatcgtaagcgagagattgttctgcctatattcagtgttttccatgcagcaattcttgttgacgttcacagtactgtaacgagtaacagacttgatcacagtctcctactgcctgtgcagggctgcacaggcatgatcttatcagggttccaatctgttagattgcctttaaacaa

SEQ ID NO: 334441 - DNA, 441 bp, Homo Sapiens
gtaccaggagtctgttttatgacttcagcctaccctggtcaccagcagattgagtgcaataaatttgggggcagtgaaaagcattttatattgtgataagtaaagatgacttcaaagccagcttgtactagtgtatctcaaaagccttgaaatatgtatttgtgttaatttagcaattcagccccaggacaaagtatgcaaagctgttacgtacaagcatgtttattataatgttatttgtgatagtcaaaaattggagataatctaaatgtgattagttaaataaattataatctacttgatggcatatcaggcagccattaaaatgacattttaggtgtgtactactacatattaaaaataatattagaatattctgtgtatagaatgattcattaaaaaatctatgcataaataaaaatttacaaagctgtccaaaaa

SEQ ID NO: 334442 - DNA, 564 bp, Homo Sapiens
  misc_feature (141)..(141): n is a, c, g, or t
tttttaaggataaatcacatggatctgcctcttctccataccaagtcatacccagagggcttcctgcgtccagcactaacctcgcacctctccggacacacgaatgggtggtggatggtggagcgcagagctgatgctgcnttctcacctgctactcccctgacctgccactccctggtggtctccatccttgagagagtgtcagccttgagggaagcacatggatgtcaggttgttctaaggcaagttactggtggagctccctgagcctgcctgtgccctctgggactgtcgctggactccaatggccagtcctcggagcacattgtccagtgattgcacctgagtgtgccttgggcaggtgtgtctggtcttcaggactcctttgtcgctagagtctgacgctggggccctctttttgtttgtttcgaggcaggtacaggtgacacattcttggatctggtcatctctaggacaaccagcctcagaggagagacattgtctcagcgctctccagctctgagaatgcctgcagatgccttcttctctgataactccatgtcc

SEQ ID NO: 334443 - DNA, 373 bp, Homo Sapiens
ttttgaatgaaaagggcttttactttctttttaaaacaagtgatttttaagggtttgtagaaaaagcaaagaaaagcataattctcctcttacttcaagctagtgtctgatgagaaagtaccaggctaacctctgaagaatcctaccccaacaccttcttctttcttctgctgggatgaacatctaggggtaagatatgactgctctctaccatctggggacttctcttctttatattgttgcattcctcaatctttgcataaggaagagaatggctaattcctctaggtgccaaggaagagcttccctcttcctacagcctcgcatgtttcttttcccactggttgccaggaagcttggagatatggtgacg

SEQ ID NO: 334444 - DNA, 466 bp, Homo Sapiens
ttcatccagtaagggagatgatttgggcagatttcacaccccacttgtcttccacagggtcaagagtcacacagggaagcagtgcaattcttgcagagtttaaggactgaatatgcaaccttccctacctaaaaaaagctgacttgtatagcacctaactgtgattccctattttttttctcagagaaatgttttaaatacttgtttcaaagttatcttccccaaaacaggaataccttttgtcattctttctacacagaaatgtggagtactgatgacacgtttacgctctcaatgctctaaaggcttgaattgtatcatcctagaaatttatcctattatcacaataaacttaatgataatgatgacgatgatgatgatagcagcagctaacatttgttgagcgtttagtatgtgccaggcactattctaagcattttccattgattaacctcagttactcctg

SEQ ID NO: 334445 - DNA, 614 bp, Homo Sapiens
gatctgaatataaaagtgagaaaagggctacagtgcatttcttggtaacttaaactgagtcttgaagttataatgatccattcgagttctgtgatccttattgttcttaattgtgtttctctacgtattgttacagatgagccatacgtttctttgtatcaatgtagacatgacttcagatacctctgaggacctacccagcagtctaggaccctgggccaagtgctgggactatggtactaaatccagtagatgggctgtgtagcaactctcccagggaacacactagggtacttagggaggtgctttgtggagcatgttgaagctttgagatctgagcaggaggcagtgatgtccctggtctattcagggaaagatttcagtgtgaaatggtaaacatccaattgacaggatttagattttgcttagtttttctgctttttaatgtttctatcccccatctcagtgttttctttatccatcccagtgatgccttatttgaaactgggcttaaactgcaaaaagaatgaagttggatttaggaagctgttagatcattgagtggtgttgagagtgaagtttcactagcagggaagtttccttgagcctaaaat

SEQ ID NO: 334446 - DNA, 377 bp, Homo Sapiens
  misc_feature (328)..(328): n is a, c, g, or t
  misc_feature (346)..(346): n is a, c, g, or t
tttgagctgagtcaatcattcctgctttatatttaaactgcaaagacagaacacagagcattcgatttgaaaattctggacccatttgcaccagtccctgctgaccccacacccttccttcctgtcacagccagggctcactgtgcggtgactgcgaccctgggtgcaggagccgggggcccccgcaggacaggcacttggggggtggccttctggctcctctctgcagacaggcgctccaggcgttccgatgtagaaaccattgaagtcaagcctggagatgacgctggccatgccgtgctcacagtcactggtgctatagatgctnagccgggccaggaggtcnagcaggtgggctgagaagttcttgtcaaact

SEQ ID NO: 334447 - DNA, 377 bp, Homo Sapiens
aaatattataactcatttgttgtttgacacttatagattgaaatttcctaatttattctaaattttaagtggttctttggttccagtgctttatgttgttgttgtttttggatggtgttacatattatatgttctagaaacatgtaatcctaaatttaccctcttgaatataatccctggatgatattttttatcataaatgcagaataatcaaatacattttaagcaagttaagtgtcctccatcaattctgtattccagacttgggaggatgtacagttgctgttgtgtgatcaaacatgtctctgtgtagttccagcaaatcaagctgagctttgaaaaagtttgtcttagttttgtgaaggtgatttattctt

SEQ ID NO: 334448 - DNA, 681 bp, Homo Sapiens
gagaattgagaacctggagctggtccctgtggagtatcaatggtatggcttcttttatgggggagactgttatctggtcctctacacatacgaggttaatgggaagccacatcacatcttgtacatctggcagggcgccacgcctcacaggatgagctggcagcctcagcataccaggcagtggaggtggatcggcagtttgatggggctgctgttcaggttccgagtcaggatgggaacggagccacgccacttcatggccatcttcaaagggaagcttagttatctttgagggtgggacttccaggaagggaaatgccgagcctgaccctccagtaagactcttccaaattcatggaaatgacaaatctaacaccaaagcagtggaagttccagcctttgcctcctccctaaactccaatgatgtctttctgctgcgaactcaggcagagcactacctgtggtatggcaaggtaggatggctgggccccgggtcagaccagcccctcggagcccagacctgcactcccctcctcctgtcagcaaggtcaaaggacctagagtaggctggagtgcttgctttggcagcacatatactaaaactggaatgatacagagaagattagcatggtccctgtgcaaggatggcatgcaaattcatgaagcgtttgatattaaaaa

SEQ ID NO: 334449 - DNA, 454 bp, Homo Sapiens
caaagttggtgaatttattagtcatgattttcccatgatttttaaagatatgaactatttttagaaattagtaaaattacatctgaaaatactgtaaaatactaccagtaactgcagaatgtgaatgatagtggaagaaaagcccatattcttaagatttggagtctggggttaactcttggaaagatatgtcacagtcagccactagtgaagaattctatttcccaggagtaggaattcctgtggtgagttactgatcctgatgttccccatgttctgtttccttgttgtttggtccgtgatgcagctttaccctgtgtctcctcactatttataaatgatcacgccctctcccattgtccagtcatgctgctttgaaaaaacagtctccacttcctcatttaccagtcagtctttaacccacagtcagactttcactctcacagttcctcgg

SEQ ID NO: 334450 - DNA, 399 bp, Homo Sapiens
  misc_feature (328)..(328): n is a, c, g, or t
tagaaacagggtctcactttgtttcccaggcttgtctggaactcgtgggctcaggcgatcttcctacctgagcctcccaaagtgatggaattacaggcatgagccaccatgcccagctcactagtcagtttcataaacttgcagagaaatcgaattttgtcaaataattttgacattattttacaaaaataatgaaaacaacatgttggagaaatttggggcattatgaaaatattgttatatgatgctttcctgctccttaaatataacctttaggaaaaagcagcattaattcatatgtgcttagtagttgaactaataagcaatngggagatgcatctagaaaccttttagaaattttatagcaagatcttacctaataaacaaatgagttacaca

SEQ ID NO: 334451 - DNA, 344 bp, Homo Sapiens
attttaaaataaaatatgtaagagaaacatatgaaagacggccacatttagtcccttatcagatccacacttccccctgtgacctgggaaatcggggtgcgtctccagtctgtggggggcagggtctcgtccagacaggaggctgcatggtgctgcttgtagcaagtgactcgtttgtggttggcacgcccagtgcagctgaggatgaccccgtggcttggccccaggacaggacccaggccccacagaaaggcctggaaacagcagcaaaccttagagaaggaaacacccaccaccggggacctgcgatcccctgctctccccggagaaggaaacacccaccg

SEQ ID NO: 334452 - DNA, 472 bp, Homo Sapiens
tttttgacactttaaaaacatgatctcttgaaaaaataaatcgcaacaattttcaacttcatgcaaatcgagggcagaggagtgtgaataatgataaaagggagagctgaaaaaataaacatgattctatttgggcggaatcagttcatctccaaaatcttgaacgccatgccccggctgccaacttcacatctctcgtttccattcctccctcactgtcctcctccgcggctcctgggaagggcacaaggtctttggtctcaggatgttgcagggtacagcatggcggacaagctcacaccagtgaagtcatgggcagacagggccgggccttcgggactgggcgggtgcgggcctgggcgggtgcagccagcgcggcctaagatggcgccttcgttgtgcaggctgtggttggccttactgtgcgtcacacagttctgttcgttgagcaggttggctgtctcgtctggca

SEQ ID NO: 334453 - DNA, 674 bp, Homo Sapiens
tcatatgcaaaaattttcagacataacaccagtgctcacattttctcatggtttgttttctctccagaaaatgaattgtgacttgtcccggtctctcttatctagtggtaagcatccgtggcattcaagacgaagatccccctgacgcccagctcctgaggctggataacatgctgctggctgagggcgtgtgcaggcccgagaagagaggaagaggaggagcggtggccagggccggcacagcaacaccaggtggctgtccaaatgacaatagcattgagcactctgactacagggccaagctgtcccagatccgacagatttaccactctgagctagagaaatatgaacaggtgatctttctgcatggaagagtttctgtcatgtgaatgcgcatttgtcaaagcgaaacacggaacgctaaccacctttctttcgtggcgcagaacagggagtccatgcagttggtcgctgcagaggtggtccattgttactgaaagccctttccatttacttaacagtcacccgccggtgtgtgaactacagggggtggcaggcggctgtccgctgtggaacctgctgccctgtgccaccctgctgcctagtcacaggccggcgtgtctgtgctcccaccccaggcctgtcgtgagttcaccacgccgagccctatgaaa

SEQ ID NO: 334454 - DNA, 186 bp, Homo Sapiens
tctttaatggtttgtgtttattgataataaagaacactttgcctaactctgtgtcatgaagattttgtcttatattttctgctatactttttctagttttatagtttatatttagttgcataatccattttgagttagtttttgagttagtattgaggttcaggtgaatttttttcctttggggat

SEQ ID NO: 334455 - DNA, 458 bp, Homo Sapiens
ttaacagttctctgttttattgcaatacagcaaagtctggttaatattaagtgatatcaacataaagtattggtgaggagtcttttgtgacattttttaccatcccaccttaaatatttctgtgcaaaagaatccacatcattgtttggtagcagaggatctcttaaaaagttccctaagacactgagggcataaaaccaaacaaaataaaataaggagtgataggctaaagcagtatcttcccctccatccacatttgtcagcattatattctaaccaaaaaatgatcacaccaggccatgcaaaactgtacaatattacgagaaaaaccctaaaaaatttataaaatggaatgatattacactatcaaataaaaagacaagtcattttgttttcatgagatttcaaggttggatttgagtcagcttcccccggaactggcacggtgtcctgtgtgg

SEQ ID NO: 334456 - DNA, 494 bp, Homo Sapiens
tgttactgattttagaaacagtattaagcaccttgttgttttgtttctgttttcaaggaatgcagattctactaagatctccttgcaaaatgaatgcatttaattttccctatgtgtttttcctctgcaggtagttttcccaagagtggctcaggtttgtaagaatgatatgggaggatctcaaagagtcctggagaaacagtggacgtcgttcctgaaggcgcgcttgaactgctcagttcctggagactctcatttttatttcaacattctccaggcagttacagatgtgattcgtatcaacgggcgtgatgttgtcctggcaacgttttctacaccttataacaggtaatcatgccctagctgtgttgacctcatcaattcttcctggcttccttctcccagggggttctcttctaataaaccatatttgcaactgactgaaaattgcattcattgtgtgtagctaagaagcacttaacacttagttttca

SEQ ID NO: 334457 - DNA, 584 bp, Homo Sapiens
agaacttttggaatagcagtgctcgtatccttcatctttacctcattttgtctataagatgtagtaattttgttattcacctaccagtgcgtgactttggcacagacatgaatgaacctaagtggtaagctcaggtgaagatgtatgaatcactcaggcccttctgtagcttttccaggtgttcacagaaagagatgtttaccacaagatgtcaagaacccacaggaagaaaatgagattgtcagatgatacttccacaaatatatccaaacatggggagaagacaccactgcagtctcctgcgctagctcttctcatcacacctcataattgtcatgtgacgtgggctgctaaggtgggggtcggggtgagatggggacagattactgcctggagtatagagggtacaacagaaagtgctgcagtgagggacctgggtttaatctaaagagtgctttgtcgacatttatttctctaagaaatattatcaggtctgagatttgcttcaaggtcatccaacaggtatggaaagtggatgtggatgagggtttagaggaaacaaaacaggtggtgagttgataact

SEQ ID NO: 334458 - DNA, 627 bp, Homo Sapiens
taccaatgattttctctttttttaaactaataagtatcatttgctactaaaattagattataatgaagtggccagtgcctccttggtcacctctaaattttgatgtcattttcaggagaatcaggcttgttgatcttattctcctccaagcctcttttttaaccccctagtcatagtccttgtcatgatcagcttcttcttcaatcctgtatcatttaggaaaagtaaagaatatgcatgtatgtgtacatgtatgtgcatatgagagtgtgtacctatgtgtattgtgggagagaaagaggggagagagaacacgaggggctgtggacttcagcctctggacagcacagctttatacccagggacacagactctcctcttcaggccagtggactgcacccaccagtcacatcaccagagtgcctcaccgaggaacagcctcagagtggagttcctccatgtggtttctcctacagcacagcacttggccttggcaagtggagggagaggggagacaggggccagccaggggcggtcactgtgctaccctgctgggaagctcaccatgaggcaggtgccagtctgcgtgccagctaacttgcaggttcgagaaaccttgcccaatca

SEQ ID NO: 334459 - DNA, 458 bp, Homo Sapiens
  misc_feature (164)..(215): n is a, c, g, or t
aaacaactaaaaaagtagccaggcatggtggcgtgtaccggtagttccaagctactttaagaggctgaggcaggaggacagcctcagcagaagttcagggctgcagtgagcctatgattgcaccagtccactcaagcctgggtgacacagcaagattgtctctnnnnnnnnnnnnnnnnnnnnnnnnnnnnnnnnnnnnnnnnnnnnnnnnnnnntctaagtggtttccacatttgttaaagagattagctatggtctctcaaattcctttggtactcaaaactataagattctagttttaatactgaaaaccttattttaagcaatactgaaaatttagtatatttggaaaaataacccccatacttcggcaaattgcaatttgctaaattcaactgaatgacataactttctttctggccacaatgggtttctaaatatccaagctctgtttaccg

SEQ ID NO: 334460 - DNA, 696 bp, Homo Sapiens
  misc_feature (647)..(647): n is a, c, g, or t
catgagtagatcccactgaccatgtcatagttctgacatgaagtgttcacgctgctgggcccagctgctttagagataaggagcaccaccaagcccctcaactggaggctattccagctgtcatgtacaagccccctggctgtggtaagcagagggtgctgagtgcccaccagcttccgcacctgcatagcgatgttgctgagctcgtcgctcagcaggcagcgaaggctcatgaaggacgtggggtaccccacgatcttctccgcctctgacactacctgattccagtgggccggggacttggaggaccgaccacgccaagagcccaccgaggagttgttgtcgagggacggggacccaccacaggcgaccgcggggaacccgaggctccaagataacgtggcaagtgcaacagcagctgccgaaagttcatggtttgagtctggaagggtctgggacctgggggtatccagaagtgccgcgggaaacaaaccaggggcagaggaggaacttacagtaactaaaaggaagcggcaattcttgaccctcagagtaaggtggcttcctggagcagtgaccagaaacgaactttaactgctgctttctagcagcccaggctgggcaaacaacagtcccagctcagcacntgccgccggccacccggggtagaaaccacagccactgcctatgtggagg

SEQ ID NO: 334461 - DNA, 774 bp, Homo Sapiens
  misc_feature (70)..(98): n is a, c, g, or t
  misc_feature (250)..(250): n is a, c, g, or t
  misc_feature (605)..(687): n is a, c, g, or t
ttactgttgccttcacatttagctattctttctaattttttctccaaattttttcgtaacatgcatgcannnnnnnnnnnnnnnnnnnnnnnnnnnnnccaaaatctaaaactttttgagcaacagtatgacactcacaggaaatgcccattggagtattttggatttttgggatttgaaatgctgaactgatataatgcaaatattccaaattctgaaaaattcctaaatcagaaacccttcttttttntttttccaaaatcggaaacacttctggtcagcatttcagataaggggtactcagcattttactggtagttgttgatccctctctcctccccgcctcctgtttaaggcagtatctactgattctttttctttggaagatgggaattttgccatcctcctcctcccacctccttgtgcacatttgccctccctccatctttccattaaagttctctcattgggagtcaatgtgccatagtgttcagagccaggctgtctgccttcacctcccagctctagcacttagttgctctgtggcattggacaagttatttaacttttttgtgcctacatttgcacatttgggaatcctcctnnnnnnnnnnnnnnnnnnnnnnnnnnnnnnnnnnnnnnnnnnnnnnnnnnnnnnnnnnnnnnnnnnnnnnnnnnnnnnnnnnnatttgttatttcttagcaaatgacaaaattaaattttaaaaggttattttttaatctcccactatggttttgaactttatataaatg

SEQ ID NO: 334462 - DNA, 536 bp, Homo Sapiens
ccatatgtcagtctaatcatcctagaaacaaatgacatgtatgtgtgtgtgtatactaattccatttatataaagttcaaaaccatagtgggagattaaaaaataaccttttaaaatttaattttgtcatttgctaagaaataacaaatgctttccatacgacatacaccattctaagcaatttttatgtgtttgaattcaatttcacaacaaccctacagattagatgccaaggaggattcccaaatgtgcaaatgtaggcacaaaaaagttaaataacttgtccaatgccacagagcaactaagtgctagagctgggaggtgaaggcagacagcctggctctgaacactatggcacattgactcccaatgagagaactttaatggaaagatggagggagggcaaatgtgcacaaggaggtgggaggaggaggatggcaaaattcccatcttccaaagaaaaagaatcagtagatactgccttaaacaggaggcggggaggagagagggatcaacaactaccagtacatgctgag

SEQ ID NO: 334463 - DNA, 705 bp, Homo Sapiens
  misc_feature (52)..(52): n is a, c, g, or t
gaggggatgtcagagactttattgccgtcctgcccaacaaaggccttcaggntttacatgagagcaggctgggaagcagccccagcagtggggtcatgcctgagacccctccagcaggtcatgggaggaaggaatggcttatactgcagcaggacgccttcaggttagacaccaggcagcacttctgggcatggggcctgggcaccaaccgcaccctccaggctctgtagaaaggccaccactgccaggttcccggctgcctctgcctatggggaagcagtggggaggggctgccttggggccactgactagcagcctggcccaaggatccccatccccaggatgccctcccctgtccccagcccacacacacagggccccagcagctcctccactctcgtcacccccaccactcagagccccgggaaggggacccagtctgtgcgggtcctgcatggggagggccaggcatttgggggaggggcagagcggggaggggcagagcagtgagctggtgaattgtccaggtgtccttcctggaggtggcagcctttggagagggtgcagggggtgggggcactcacgacgtgcagggcgctgtgcccgtcatagcccggctgccccaggtcagcccctgcctgccaccacacctgcaggccttcgaggtcggccctgtatgccagcctgggggtgggggcagaggag

SEQ ID NO: 334464 - DNA, 514 bp, Homo Sapiens
  misc_feature (179)..(212): n is a, c, g, or t
  misc_feature (326)..(383): n is a, c, g, or t
aaattccatatttgtaaatgagtctgctgggacgtatgaagcattaacaggtgatatccaaccctcacaagtcacttccagggagggtttttcaacaagtcccaaccatgccagatactgaaaaaagctacttggagttgcaaaaaaagaaaatgtgtgagtctcctaaccctctgtannnnnnnnnnnnnnnnnnnnnnnnnnnnnnnnnngttcccatacaattctgaggccctgcaagccttggaaacacacaggctcttgctctttcattctataaacattcactgagcacatgctaaatgacctattctgagctcagcatnnnnnnnnnnnnnnnnnnnnnnnnnnnnnnnnnnnnnnnnnnnnnnnnnnnnnnnnnntaacgtgtcttaagaggtggcaagaactttaggtaaaaggaaaatagaggagacaaagggagtccaaaatactagggtagggagtggcaggaggcaagctgctctcttaaagatgggtgggaaggtaggtg

SEQ ID NO: 334465 - DNA, 800 bp, Homo Sapiens
ccagtattgcctattgtcttctttcttagtttattccgtccttcagggcaaatcaaagccttcagtatcttcctaagctaggcctcaggaagtgagaatgagtgagaatgtgtgacatttgtctttctgtgcctggcttatttcacttaacttaatgacctccggttccatccatgttgctgcaaatgacagggcttcgttgttgtgtatggctgaatggttttgcattgtgtattatgcatattttctttatccattcatccgctgatggacactcaggctgattccacatgttggctattgtgaatagtgctgcaatgaacacaggagtgcagatagctctttggtatactggtccacattatttcttattgcaacattaaactctggaaaaggacgctgactgcctttgaaatcatcccctggcttgtttcatgagtgtgtcacgttctcccggcaggtcattgtgcagcgctgccttgtgtggcaaggacatgtctcacgtgaaggccgcttgcattatgtgtgcttacctgaagctgctgcccatgttcctcatggtgatgccggggatgatcagccgcatcctgtacacaggtaagccctgaatccgtatgttctctctttttttatgcttgtattctgataagtgtttttaaaatgtcataaaaccttgagaaaatccattctggaaggaagtaaaagcagacttccaggtggagggagcagcctgcacagtggtcaaaggcaggaaaatttggcatattggacgctctgttcctttatcctcttcataccaa

SEQ ID NO: 334466 - DNA, 828 bp, Homo Sapiens
gctgtgggaagtctggatttatgagcaggagaggttgggggacgggagggagctgctggcagggtctccgtgccgctggcttagaaggagcagacgaagggcagttgcttgtcgcattgagctcgtcgccaataacctcctttggtgcatagggccacacaggagccttgcccattcccaggttgccctggggaccagtaagcaaaattccagtggctcccatcagtccagcaaaaccgcttccacaggaaccagcccctgaggttgcctccaatccagacctgggcttggttgactgtgctagtgcagcactgaatgcgatagttgaagttgaagtcatggatagagacaaggttgcctccgtagcatctgctgcagacattctgagcttctgcaaaagttttaggagtccgcaccaataggtagcggcaggtcttgcaccttggacttccctgcacttcaacaatgtcttcttccctggggcactggaagtccttgtctaaggcagctgggtccgactccatggcttcctcatcctcaaagttgtcttgacaggcagaagccttgacctcctctccctctgcctgaatcacctcctccgtcagagccaagtctctctcctgctcctttgaactatccagatcctggcctaggtctgcctgtgtctctaggctctccagatggggggcatcattctccagatgaagagcagaaactgttcccagcaggagaaagggcaggagcaagaggcgttgcatatctactgtcttttagcgaggacactactccaccgtccttcttggggctgtctttgtgtgtctagtatag

SEQ ID NO: 334467 - DNA, 485 bp, Homo Sapiens
  misc_feature (90)..(90): n is a, c, g, or t
  misc_feature (137)..(137): n is a, c, g, or t
  misc_feature (187)..(187): n is a, c, g, or t
tgctgctccgtggtatttgttccacgagtctggcccctgtgctgacaccacatccatggcacctggcagcagcttgggtgagagaggtcnacggaagatatccagattgcccacatgtggtgctggtgatgctgacnattgctcttgaatgttttgccgttgttcaagctgacttcaatgaagtacntcccaatgatagtgctttcactgaagataaatctgcaaataacgttcatcccgtttctttagattctgaaagccatttccatgaataaccacatggtaggattttctttgagagtgtccaaagatggatgtttcatcattgttccatcagtcatagcaataatcatgctggaaaccttgtcatctgcaggagaagcaaggagtggcctgctcagcaaaggccccagaagtgacctccaaaagttcctgtattgggagaaaagctgagtgttgggagagaagctgaggcagggcttgca

SEQ ID NO: 334468 - DNA, 642 bp, Homo Sapiens
ccgaagagtgaaaatagggctcttgactgcattcaaattcttgtctgaaaccaggggcagccgcatgctctccaggtgcttgccctgcttgctgaagacaaaatgactctctttggatttgggaatgatgaaatagagctgaacctcttctcccagcatagaagaagagaatgtgaaggcatgaagggtggagtcagacatctgggaggcagaggtgaagtccatgtactggcggcactgttcacagtggtgaaaggtgttataggctgcatatttggtcagcattatggatacagtttcccgtttcctgggctcttcaactttggattcctttatcacttcttgtttgacccctgccagcttctcagtatacaccaggctcatcaaactgtacttggggtcatgcacactgacatcaaaaggcattttactgaagctctcgatgtcaggccagggctctccctctgactggctcacttcactgctttcattgtgatcggtgttgatctcctcctcatcatacacgtccacctccaggagcctgatgagcatgcggaagaggatcctgaggaactgtaaataggagcccgtctttcccacctgtgggggccctgtcagcaggagccgtcgggggaggaagtt

SEQ ID NO: 334469 - DNA, 666 bp, Homo Sapiens
  misc_feature (439)..(439): n is a, c, g, or t
tgacataacaagacaccatactttattgtgaaaaggaacagagatcctgggggtaacaggggtggacaagtgcacagaacaactggcccctttggaaggatgagagtcagccctgtgagttgggcttcggcttcttagccccagccagatctcctggttcagtcacagggaaatacatctattggaacaaaaatacagggaagatgatgaggctgaagattatgacacttaaggatttcctcttagggctttgttttcaggatcctaggtcagtctgtgtgagggccttctctaaggatcttgcccttggccgagaggaagtgcaggagggagctgggagatcagcagaaccgggaagcccaagttccaatccccaggccacccaacctctgctcacttggcctgaattcctagacctcaccctgggccatgcaagaangatgaggagctctgacgtagtcacactggttgttacgaaggcagctgtggtggaggaaggacaggtaacatccattaggacccaagtgcagacactctgacaatacaatgccatttcttaatctatgcaacagaaacatgtctgtgttttctggaatttattgcagcagaaggaaccctgtgaaaagccaaatgtctaccaacaaaggaacaggatccatggaactt

SEQ ID NO: 334470 - DNA, 725 bp, Homo Sapiens
ttcatgctctctttttaatttcagaagtcatgtacaatcacattgtgaaacttgggaaacaacgcttccttccttcaaagtcagttctgctattcatgtggacctaatgtctctaggaccttgtgccctcattagtggcctggaaggacgcccagaccttccggttcatcaagggttgaagtgggcgatagttgttcaccatcatcttctcctcttcaccaagtgcagaaaacaggagagtacgaaatgcagagagctggcttggggccacttcaacgggctccttctggatgatccaggtgaccgactcggtcagcggcggggtggtgagcgagcccgcgtaggtccagtaatcccagcaggtgggcagcagagtggaggggtcgaaggggcgcatggccgcgcgcgcgtcctgagagaccgagaagcacaggacgtgtcagtcctcaggggagactaggagcttccatcttgtctcagcacgtgaggccttcatggtgcttggaaggaagtgctttcccccagataaggccatgaggccactgctgtcacacttgcaagcagtgatgagaaaatgtgacccttctatacagagcaaggattcctgccaacttacattggtgggaattacgttacattacaccagcttacgttggtgctcacatttttcctttgaagtcatttcttggggcgcagtagctcacccctgtaatctcagcactttg

SEQ ID NO: 334471 - DNA, 508 bp, Homo Sapiens
tgtcaggcctggggttttctgtgtccttccctgggtcagggacgagccagtgacttgactcttgggcgctaagcttgggagggagcgcaggaggccgctgtccttcctttccggttcacgtcacccttctctccctctgttgctccacctgcagccacttggacggctccgggactgattgcctggggcaggggtggcagtcgaggccgccggggccgaggtgaggctgcagctctccgggcggcggtagcgctggggaggaggaggagagaagatggcgtcggagctagagccagaggtgcaggccatcgaccggagtttgctggaatgttcggccgaggagattgcggggaaatggctgcaagcaactgacctcactagagaagtgtaccagcatttagcccactatgtacccaaaatctactgcaggggtcccaacccttttccacagaaagaagacatgctggcacagcatgttttgttgggaccaatggaatggtacctttgt

SEQ ID NO: 334472 - DNA, 487 bp, Homo Sapiens
gtgtgtgttcaccatcaggaacaaatatctccaatgaggagcaggcatttattttcaaagaatggaatttaaaaatggctatcaaattattacttcaattcttttttctaaaaacacaaaaatatcttctataaacactttcacttacctcataatataaaggagcattaccacctacaggtttttttgcctttttagatgaagcagatccaacaagtgtatttatttcattaatctgctggagaatgtcttgccacgacaccatactgaagagtttacgctgagggacctggacagccacggtaagggcttggatgagaagatcatcttcaatctggttcccaaccacaaaagcaatggaggcctgccaatcgttctgattgaactgtgcagctatgagcgagggttcccatatcttagaactggtgttcacagttcctcctttctccttcttgggtgccatgcaaaggacgggagaagcattggc

SEQ ID NO: 334473 - DNA, 354 bp, Homo Sapiens
  misc_feature (60)..(60): n is a, c, g, or t
  misc_feature (202)..(202): n is a, c, g, or t
caagcaggtaattgccaagtacttttaccgtggttgctagtctctcgtgttttggggtangggtgtgatagtgggaagcacaactatttgaatctcacatttagtagggttaatcagttactgattctggcagttataatagttcattatgcttgggtagaagacatgctactaagacactgagttcacctaatatacaacnttcatttattatttaaaaagtaactggtgcttcaaatattttaagttttttattttttacaacttattcagaaacattagttacatggacaggtaggacttttttaaaaaattggctttcctttcctttttggggggaacatggataagcta

SEQ ID NO: 334474 - DNA, 479 bp, Homo Sapiens
ttgtgtgcttgcactccaaacccactgagtcatgctgcaccagaaggctgcctcagcctactcctgactaaagcacagccatttcccttacactacaccccctaggctgagggcgtcctccaggcagggacacatgcctatatggcggagccctgagtccataacccacaacaacaatacagagagcaacagctcactactaggatctcagctatgatacttatgactattagggcccaatgtacgccagaacctagggatgctcaccatctctgcagggggttgacagtgaggctctcagtcaccttaatctcctggaagacccctttgcagggctgctgttatgttctgctgattgtcagggataaggtacaacattgtgttcctaaaagggcacaggtggctccttgggcagcagttatgtctaaggccacttggttttgcaacaccactttttgatctgatcaacctcattcatt

SEQ ID NO: 334475 - DNA, 896 bp, Homo Sapiens
  misc_feature (27)..(27): n is a, c, g, or t
  misc_feature (196)..(196): n is a, c, g, or t
  misc_feature (229)..(229): n is a, c, g, or t
  misc_feature (295)..(295): n is a, c, g, or t
gctcccaggacgtgtcgcaagccgccnacgcaatttttacggaacagaaaccctcacaggtgaaaacgcgggccactaaccaagctcgggctgtgtcgaatcccagggtctactctccgcccgccgcggaactcgcacactgcaagggggccctcataccatcagtgtacgcgcagcgtcgagacgatctgctgtntagtgacaggctatctagctcgactgcactcangtgatgaggagattcgacgctacacagatgtcgacacatgtttgttttggctaaacatgaaactangacaggaaacggaagttttaaaacacaatctaaagagatatgtgtgatagatatggattcatggagtttatctatataaatgtatatgggtcttccaaattctgagaaagcagtatctttgttcggttcccctcctttgtgattttcctttttattaaaaggtcagtcttagcaataatttagtgaggatgcacatttgtacaacagaaatggcaaacaggcagacttcctttcatttgaagtctgcagaagacaaatgggttatttgacctctgtacggaagacctgggagctctgtttttgtgatgtttcacgaacactgcaacctgattcaattcctcaagatttatgggctctgcaatcaggggaaggagactggtgaccactcagtctcaatcaatgcatgacaccctcccttgcagtgcagagaccttcaccagggtagaagctccatcctgcattgctattcagatgcacacatcacatctgggaggtggcagggtgcatgctgctgctcccttggaggggaagtgctttcctgatagatggaccatttgatctcatcttattttgtctctgcctcatctcctataaatctttt

SEQ ID NO: 334476 - DNA, 734 bp, Homo Sapiens
acctggacaccactgattggaaagctctctacggcctgaaagccaagcgctccacaagtagtaaacgctcaagggatgggcatcaagtggaaggagaaagcccccaaaacgaagatacatgtcccatgtacacaagctcacaggctggtgaatacaaacggtagacctagaatgtgccacaccaaggctgagcgtgttaccacaggtaccagaatggtgaccacgctggaggttccacaaaccctgatcagagaagtaggcgtgagtggcaggcagagaacacagctctgtgtggcagggagggaggacaagcagtggcagcacagcagacaacaggtggaaattctacatgaaaggcactaaatgggcgaggaaagcctgggccgcccagttggaagggactatcgtgatcatctctctcaccctagggacacctttaaaggaggtaactgagccccaaagggaggcacccagcacagctgagtcacagagctgcagccatccaacccacagctccaggagggactctccaacttcacaatttcaaaatcaaccctagcagctaacaatttcttaatgccaagtaaagactagaattagaaacaaacagaaaccctatcatcttctaccatcattacttcacaaaagaaaacatttcaatgatcaaagagcaggaagaactactggcagtcctgcacctatgcagttctccaggcctggcaaaggctctgagc

SEQ ID NO: 334477 - DNA, 437 bp, Homo Sapiens
  misc_feature (51)..(51): n is a, c, g, or t
aagacggaacacatttctacacccagtgactggccaggtcccagaggaaanacaaaaaatttgacttgaaaaatgtaagtgtgtcccctacttgctgtttggctttctgcccttaaccaactaccatcccactgcctccttgcagctggaaagcagaaggcaacagggaggggaaggaaagcagaagggctttgcagtcactcacctcggttctgaggactggaagcatctgagacccatctggcttgacaccctcatccacttttcctagggtctagcaaaagcccagggtggtgcaccccacaggttgagctgatggagtagaagacaggtatgaggctggcatagcacccaggggcctttgacggaagcgctgagaaaatctgatatgatcatgagagccaaatgctaattcctctcactgtggatcctggctc

SEQ ID NO: 334478 - DNA, 402 bp, Homo Sapiens
tacatttatgtacattttatttctattattattacattgtaacatatagtgaaatatacaactcacagtaatgtaggatccgtgggagccctgagcttgttttcctgcaactagacagtcctatctggaggtgatgggcaacaacgacagatcaggcattaggttttcaaaagaagcgcgcaacctcctcacatgcgcagttcaccatagggttccagctcctatgacaatctccagccgccactgatctgacaggaggcggacgtcaggctgctgtgggatcaatggggaggtggctgtaaatacagatgaagcttcccttgctcgcctgctgctcacctcctgctgtgtggcccggttctggtaccggtctgtagcccggggttggggaccctagtctat

SEQ ID NO: 334479 - DNA, 417 bp, Homo Sapiens
caatttagaaagtttattttgccaaggttaaggacatgccagtgacacagcctcaggatgatgtcctgaggatatgtgcccaaggtggtcgaggcacagcttgctttgatacatattagggagacacaggacatcaattaatacgtgtaagatgtacactggttctgtctggaaaggcgcaacaactgggggtggtgggcagctcgcaggtcataggtagataagagataaactgttgcattcctttgggtctttgatcagcctttcactgaacacacaatctccatgtgagaggcaggtagaggaacagtcactgatgccttagtctggctcagtgaatctgcattttcacataaacaatagggcagaggaagcaatcagacatgcatttgtctcaggtgagcagaggactgatgg

SEQ ID NO: 334480 - DNA, 424 bp, Homo Sapiens
  misc_feature (68)..(68): n is a, c, g, or t
  misc_feature (164)..(172): n is a, c, g, or t
tctgtgacattttgtgacttcggtgaaggcatgcaggctaaggaacctgaggagaattaattcatcangtacatatgctaaaacaacagcagcacaaatgttgaaacaacttatttatttattcctaaaaatgaaagtgatgcacaaattagagcaaagttatnnnnnnnnntttctaagggagaggcatgatgatgttgtagaaagagccactagattgaaaccaagaaccttagacttttagacaaaatacttaagattttagtttccagctctaccgtattagctgacttcctacaagcaaaaattccatatactccttcaaaatgtcaagttcagctaaccaactgaagtagctctttattctctaaatattacaggccctttaaaaaagaatatagttttggccaggcgtggctgcacg

SEQ ID NO: 334481 - DNA, 425 bp, Homo Sapiens
acctgtattcatttatggaactttatcatcattaaacagactgtgatggaattatttcacagataaattagttagatttcacataatacagtattaaaaacttttggaaataatactattaagatgaacatgaaaaagcaattcaagtacttttatcttacatgagatattttgctcagtctcgagatattaattaggggagaatagcttcaaggttatcaccaccaagtagtgagtgtgagggtgaagcatgagtcagcgttttgacagtaggttaaatgtgcctcaaaaaagaaaagagatgactaaccctacacagtgtgtacagcttcctgctaatgcagacagctatccaaatgcagcccacagcagcccacagacactgttcaccagtgagcatgtgtgaatctaggccacgcactaga

SEQ ID NO: 334482 - DNA, 445 bp, Homo Sapiens
cccatgaattccatccatttcagtttccgtaggtcaagtgttccggtccggggaagcgtattcattaacccacctgggagttgcccaaggaagcagaccagtctcccagtgtctgactctcggatatttggatttgactggtgtgaggcaaagtgaaaaagggatgggggaaatggagatggcacgggctcctcagagcgtggtagccgactgtgaggaaaagcagagggaatgtgaaagaaaataagagaatccacgggatttgatgcctggaagattctccttcaagtggcaacatggcatatatatccttctccggggagtcacatgcaccatttggttcttagatacgttgatgttttgatttttaatgatttgtatcaacctgtaggtaccacagaagagctgtagtcatacaatcacataacttttacaaatatagtgg

SEQ ID NO: 334483 - DNA, 487 bp, Homo Sapiens
  misc_feature (95)..(95): n is a, c, g, or t
cttcttttcctgggtgctcagggcatgcttattagcagctgggttggtatggagttggcagacaggatgttcaacttaatgaagaaatacagctnaaggccttgccagcaacacctgccgtaagttactggctgagtgagggcatagaagttaaaggttactgtttttatcctctatccttttttcctttcctgatcaaggtgctcttctcattttttcctgagaaccttagccatcagatgaggctccttagtttattgtggttggttgttttttctttataatggcctctgggctatatgcccatatttataaaccagcagcaggggaaagattatattttataagagggaacaaattttcacaatttgaaaagcccacataagttttctcttttaaggtagaatcttgttaatttcattccaaacatcggggctaacagagactggaggcatttctttttaggctctgagactaaatgagagga

SEQ ID NO: 334484 - DNA, 473 bp, Homo Sapiens
gaaataagttatgttccttttattcccactgcactgagccaatgggatgcttggcacccctgactgcttgcctggcctgcctcattaattgcagtggcacttggccacccttcgaacccccttgataagccgcttgtgcccctgtttggagcccagtagtgacctgtgctgtccaaaggggcgctgcaggagcgcaccctctgctgtcgttgcctcttgaccttgagcttggacttggaggcctgcttcttgcccagggtgaaggagcctgaggccccctgccggtcacctgctgagcccttgtccaccagccccttgagcacacgcttgaagtgataggcatttcgggccatgtcgtagcccgtggtggaaacagccttcttcagggtgtgcagggacacatacttgcaggtcccctttgtccgccacagccctcaggatcaccttggacgtgctgggcttctggcagggtt

SEQ ID NO: 334485 - DNA, 506 bp, Homo Sapiens
ggagcttattagaacatttatttttttctgaatgacaggccgggagttggagtagctgaacagggcatgttagttgtgtgcgtgctggcttaagcgaaggagctggagtgggggtttgtgttgggtgagcagtgggattggaaacacacctgtgttgcagctgaactagaaagaaggatgcccagtatagctatgagacacctacaaagcatgggaacgcagttcgcctaagcccaccccatccccagatccctttttttctcccttaagttaaaaaaattccttgaggcagcttaagtcagaggctgtaagggtcagactggtcacaggttagacagcagagttttctccggccagcagagccacgttctggctggatggcagctcaggcctcctcagctgtggcatcaatgtccgcgtaagttaagttctcaaacagcgacatgttcacatatgccttcctggcttccagcatgcggcctagctgtagcgcaatctgggcaaag

SEQ ID NO: 334486 - DNA, 433 bp, Homo Sapiens
agtgaaagaagagatttattgcaaagcaaaaagtacacactcaagaaaggggagcttgggcatacccaagagagaataatgggttctggggtttcatcttgatgggtttctttaaccaagaattggaatattcacgaaaattcctgggtaaaggtggagatttcttggaactgtggtgccatttttacatcaaacactggtctcagaactgtcatggcactggcgggtgtgtgatttagtatgttaatgagcatataatgagggcctaggtaaaacctccatccaatccagcaccacgttgggtccactcagccttagccagcttggtccacaccctggtttttcagcgtcttaacagcccacagcctcaagtcatgtaaatctgctgcctagaatttgttatcctgtgaccaccctgtagtattcctgtctg

SEQ ID NO: 334487 - DNA, 510 bp, Homo Sapiens
  misc_feature (103)..(103): n is a, c, g, or t
  misc_feature (105)..(105): n is a, c, g, or t
  misc_feature (107)..(107): n is a, c, g, or t
tctggccttttaataggaagtaattttggtctagaaatgcactggagcctgtgccctggtagctggaaaggtgctctagagagtggtgaaatgtagcctgccnanancgctctgcctggagtgtggattctggacatccttcccagttggggaaatgggccctggaactattctttgatgtagtatgtgtgtttactcctacatgccccagtccttgaagggtagcttaagaaacccagccagtgaggccaaagtgcttgttctaccaacagagtagtaggtgggggaaaaccccaaagattgctatccacactcctcttctttggtgcctggaaaaacagtactctttctagcaattaacatttgaaacagatatactggcctgtcagataaatcagtggcttagcattgttttgtggtacaaattctggaaagagttgtttattaggaaaaccttcttaaaaaattgtgagatgaccatagttctccctctctaaatgccagattaaa

SEQ ID NO: 334488 - DNA, 470 bp, Homo Sapiens
gttgcaataatatacattttttaaactaattgaatgttgccattacaagtgctattttggacaatctgctaaatatgtaatttaggaattaagattcatatcttacaggatacgctaattattcctttgaatccgtttgggtactttctgaacacacacaagaagtctgagagttggcgacaatatccacccttctccacagcgcagaggtcaggccactagtaagggcacaagcgtgggctcagcacagttgtgagagtgcagacccagctgcgcaggccggaggtggccatgaggccatcgcctttccagtccaggaggctccggctcaaagcagcgggaagttcagtttattaaaccacagccgattttcctaaggctcccctccactgatctcacacacgttagtcaaaatgacacagatgtccagatggcagcacctcgaagattcttgaagcctcctcctgtga

SEQ ID NO: 334489 - DNA, 447 bp, Homo Sapiens
cctcctcaagcgtttcagggaacccggggccaggcgggtgacgccattgaggaagaggctgggccccagatcattaggacacagcggctgcccaacacaacccaagggtatggttgcaaccagggtaaacgtgggtttgaatcccacttcccactttcctaaggaacttggggcaggttacttgatctctctggccttgttttctgtctgtgaaatggggaagatggccgttctccctcctgcagttattctgatgccagcctaagttaattcagagaaggcgcacacctgcagtgttcactccagttagtggacttgatgggactatggacccagtgtggctcggaaaccctagggtttcccaaagaggatggccgtgcagattctggtgttcacagggtggtgattcattcaaatttgttgttgctgttgttggacacaaggtct

SEQ ID NO: 334490 - DNA, 450 bp, Homo Sapiens
gtttttgtatgatgagtaattttccactgaaatatggacatttcaatatgatgagactctgaatcttatttaaaccttttgttttagctaccttcatctcacaccatcctcacagacgaaggtgggtgtcgcttcattactgccaggtagggtaaaagttcaggtttcttaactcagcttctgttgacctctgaaagggggcttctcattcctgctaagcaggagtgggagtttcagttccccactaggcctccaataaagcagttatctcttggcatacatgggaatttgcatcccatgaatattgtatttggatctgccttcagttctggacacagaacttgtggagacagagggcttgtggtaaacagagatttacattccttggtgttttccttgtatcctgagattcccttgtcaggtagctttcttctctccacattcctgcct

SEQ ID NO: 334491 - DNA, 460 bp, Homo Sapiens
tttaaattttccataagtaatgtaatcagtcatcatcaattacttagtttctacatgattctgtcataaaaagagcctacatatatctatcataataatttcctatgatacctataagcttcctaactattctccctgcttctgctcttgactctccaccttccaaacctattttcaaaagacccatcagggtgatccttagaaaatttaactcagatcatggcactcctctgcacaaaatccttcaatggtttcctatttcctatgctgaaaaacagcagagtcttcacagtagcctgtaagacccttcataacttgacctctggtatctctgcaatgtcatgtcccagacctctgtctcatttgagaatgggaaacactgcctcattcacggtgccccaaccacactgggctcctgtggcctctgccggcaccaggcaggtccccacgcatgggtgtg

SEQ ID NO: 334492 - DNA, 439 bp, Homo Sapiens
cattctcctgggatgctgtctcacctaaaatggcagggaggaccctggaccgctcaccttcccatgtaataagtgataagtatacttatcatacaaaagagatggagaggctcttccctatcacaatctaaagcccagacagatacagtcatcatttgtgacaatgaagattttcctttgcaaatgcagcacacttaacggtaaaattgtggaaaggaggctgtgtgtgttcaccttggtcggtgctgcagcccaagcacagctggcgcctctatgcgggtatccaagtgagggaatagttatacttggcaggcagtcctgaccagccattttgcccaggtctccttggatgccttcagactgcagagatcttattcagtttgcatcccccgcacagtctgcaagccaagctgcagacatcaatctgtttcaggagaaa

SEQ ID NO: 334493 - DNA, 165 bp, Homo Sapiens
actttttaaatgtatcacctattcaaaaaaactcatataacttagttaaaaatggtcaaatctcttcaatgcagcctacctcagttcccaaggcccaatcagatacagctttccaaacctgccagtgctggtgaacgcgctgctgggagcactggcaccccacag

SEQ ID NO: 334494 - DNA, 426 bp, Homo Sapiens
  misc_feature (245)..(273): n is a, c, g, or t
  misc_feature (304)..(304): n is a, c, g, or t
  misc_feature (316)..(316): n is a, c, g, or t
  misc_feature (367)..(367): n is a, c, g, or t
taacgttttaaaaatatttaatttacacacagcttttgaagaactccccatgcacgtctgtcattctcaattggcttccacaagtctcaaacttactaggtagaaagtaactaaagtcataaagcacttggtggaaatgcaggaaatgtcaaatattaaacaataattactacaggcttaggcaatcagatggtagttttgcatacaaacaaaaacaggaatctgagatgttaaataatttgtgnnnnnnnnnnnnnnnnnnnnnnnnnnnnngagacagtgtcttgctctgtcacccaggctngcagttgcagtnggcatgaatttgggctccctgcagcctgggattctcaatctcttcggcctncaagcggattctccctacctaaacctccctgaggtagctgggactacaggcaaggacca

SEQ ID NO: 334495 - DNA, 1137 bp, Homo Sapiens
aacaattcaagtttactaagaaactttttgtcatcagtaactacttttaacactttcagagttacagtacagcttagtgtccaaaaattctaatcatgtaaattgcagggtcacattagataaaaacagtattgttcagtctataaactgacactaaaaatcatactgtacacaactgatgatacactgtacaaagaactaaggctgaaggatgggagccattcatgtcttttttccaaatttgtgttagtatggatggcagtattatatacttttcagtacttactgaaactaacgttattaaggctacttgcaggattccttttgaatataaattaatataaatttagagtagaaaacagactagaattttcaagtatttgtcctaattataggtattttcttcactttcttcagtaattgctgggccctattatgagccaagcacaattctacatggtagagatagagtgggtgaaaaacacctccttacatagaggttacattttagttgacatccattttttctgtccatcctacttttggttaaaggaaggcctctctcctgtgcagactccgacaagacttttctgctgtgttacatcttgagaaccgggacacctggtactctgatataaacactgatcatatttacagaaccaaagttttctcgcatctgtgaaatatgacgtttgtaaagaattcatgtcctaaccaagtctaaaacacagcatttgagagacttctttcctgtcaagattctttgaagcttctagttttaaaggaacttttcacaatcatcagcatggacttcccaacggagacaaagatgtgagctctaactgaaggctgaaccacacctctcatttctacagattccctccagtgtggactctctgatggtagatgagatgtgacctctgactgaagcccttacaacagacatcacatatgtaaggcctctctccagtgtggactctctggtgtgtgtgaaaatgtgaggcctgactgaagcccttcccacactgctgacacgtataggggtttctcttctgtgtggaccctctgatgggcactgagaccagcactccaactgaattctttcccacattcctcacatttaaatggtttctctcc

SEQ ID NO: 334496 - DNA, 576 bp, Homo Sapiens
  misc_feature (370)..(370): n is a, c, g, or t
  misc_feature (482)..(482): n is a, c, g, or t
gtggcagtcatttggtctatattgtttgaatgcactaggagacattgtacatattaatgaaattaggtttgttaagcttgtttgctagagatgtaagccctagtaaaaaaacttcaactttgagatctgacagtctcaggtctgccacttactagctgtgtgatcttgaacaaggaattttgcctcttttgagcatcagttttctcttctgtaagacgagagaaataatacctagcctagtgtggttgttatgaaaattatatgagatgatgtatttatgcatcctacaaagtctctgtacacatagtagttgatgaatcactcttagttctattttcaagtaagtaaagctgctgatctcatagcccantatttttataaaaatgtactttcctccttggtaattgtgattctgctgtcttctgtctacttcttgggactctggtgccgagaacctttctgaccccttcctgcctgccccnatgcgtacggctcagagagtagagacttcgcctattttgtccactgctctagactcactaccaggtgctcaataagtatttgaggtgtatatgt

SEQ ID NO: 334497 - DNA, 462 bp, Homo Sapiens
ttttaagtcaaaggtttaatcatgatccaagagcccagagagactttaggacaataataggaataaagcaaggcccacaggctccagctcctgatgcccagatgttcggcaggatccggggacagggcagtgcaggcagtagttttccatcctccactcagaggaggagacgagggggcaggagcttcttcacaaaggagaatgactttctaggctgcctcagaacacccagtcctccctaccctaaccctaatctggaatgcaatagagaatggctaacttattagattctggtgatcctggtagtcaagaggaagggctcagaaaggggcttggtggagctggtcaccaccagatgacatggctaaattgtggccaccaaggaggggcagcatgaatcagaagtggagatggggtggagggaatgaggactggaccagtaaggatctggaggtcataacc

SEQ ID NO: 334498 - DNA, 466 bp, Homo Sapiens
aatttcccattttattttaatccctcaaaattataaaagaatgggtaaatgttaaagtcccgttattcactttaagatgcagcccagaacagtgactggagtggtttcatacctcatgggtttcccacacttccatcaacacacacttcacaacaccttggaggcattgtgaaaaggtcaagctttggagatggggaagagtcctgaagatgttgggtgacattgtacagtgaatggaggctgcctgcttggcacactttccatcacacttcacattttgctaatcttttggaataagggggaaagacatttaaatgagataattagagataagaatggagattttaatcttttccctgaagtcaagaaggcagataaggagaaattgctgtcactgaaagactgtatattttacaagaagttatttcagaagcagtctctattcctttaggctttaaatgaactt

SEQ ID NO: 334499 - DNA, 786 bp, Homo Sapiens
aatttatttttttattgataattcttggtcttatcagggcgccagggccgccagtgcctctggtcacgggaacgctcagcagcaagccagatctgccacctgggcagagtcttatcttttatttcctggtcatcctcttctggttcatcgtcatcctcatctgggttgatgaccacccagccacctcgttcctgctggtgcatccacgccttccagcctcgggctcccttctccccagcccggggctctccactgtcccaaaagggttcaaagaattccacctgtcctttggtaggcaagatctttcacgctgtcggggtttgaaagaaggtgaagtccaccatggcctgggaacaatggagatggccttctcaagagtggccagcctgccgcaagaaagtggcactgctgaagaaagagtgcaaaacatggcctcttccgtgccagggcaacggcaggggtgagataagatgctgccgtccttaacagcagacaaagtgctcaagcattttccataaagactgtgaatttttgatatcgaaaaggtactaaactggctctggcaaaataaaaggtatttctgccaaagggctgtattattgggatgcaaaaatatcagtttcttccactctttgaccagagtggagggctcccagaactctgtgcagagcttcagcttggccagtttcagatccacactgctctggttgctctcaatggcccgctccagaatggccagcttcttctccagaatgagcttcagggacctctttcgcttttcctgct

SEQ ID NO: 334500 - DNA, 359 bp, Homo Sapiens
tctgagatttatttttacttagttggttctttaggtttgttttattattttcttaagtcaggttcattgaggtataattttcatatagtaacattcacgctttttaagtgtacagtttgatgagtctgacaaatgtatagttacataaccaccaccacattcccaatataaagcatttctgatgcctcaaaaaggcccctactgtccctttgtaggcaatcccatcctcccaccatcagcccctgttagctactaatctgatttctgttcctatacttttgccttttccagaatgtcttataaatggaatcatatagcacatagcctcttgtgtttggctcctttcacaaagcctaatt

SEQ ID NO: 334501 - DNA, 370 bp, Homo Sapiens
agatattgcccttttaattctaaaaatttccctttgttctcttttgaagttcctgtgtgtgtctgctgagaacctctgtctttccattcaccagtgttcaccattatcttgcagaacatgggatagtctttgataattccaacaagtgggtcatctcgtggttgccatctattggttcttttcctgagagaggtggatccagtttttcctggttctttgtacggctgagtaattttagagtgtatcctgggcattgtgaattagttgtgaaaactctgagtcttagtaaattaatatgaatttagtaggcaatcaacctacttaggttcaaattggaagtctcaccttctatgtgcaattgtttcaatgc

SEQ ID NO: 334502 - DNA, 501 bp, Homo Sapiens
ccacagagctgctgcctccactcttcagcttgtgggctggacctacaacttggggcaaagtcagcctcccctctgagggctttgtaggcatggagcaggacagaagccttgcccaggccttccctgaaccaccctggtcctgtgtctgcactgtagattggcctggggaaactgaaggcccagaaatgggacttctctatggaaaccaagcttgggcccccagccttgtggctcctgagtccctggctagtagacttccctactctcaccttctgccctctcgccatgcctaatattaaatttgccctggtttctctacctacactttagaattctgccctgtgagctgccctagaggtgtcctcagccagaagggcatgctcagtcctcacccatcatgccggtcaatgggagcctcccacatcatcccacacttgagatggccaatagtcctgcctgatgagtgtcaccagctactagggccagacttaaatcagaagc

SEQ ID NO: 334503 - DNA, 637 bp, Homo Sapiens
  misc_feature (447)..(447): n is a, c, g, or t
gcagctagcaccatgatcaataccctgtaagtaggtgttatacctattttacacaagatctgaggcccagagaggctggctaacttgcccaccttctcacccaggtagtcagtggcagtgttgctgtctgtgtccaatctgagcaacaagctggtctcaagggccagacagtagcaatatagagtaagacatggccctgtgactgagattacagaatatccgctacaaagtacatacaccttccattttaagaaatgtttttcctttaattgtaattcacggagctacttgggtgttcgtccgtatttaggactttactcaattgttgacaagtaaaggccaactccattttgatgattcccagccttccttggggatttgggggaaaggggctagaaggataatcagtggaagtacaccctcctctggagtttgcctaagtgaccnaccctgagagtaacaaccattgcacaactatttcctaatgtcaggggtggaaggggacccaagtggcagttacaggctcttcacggaaaacaagcctatactatctgccagggaacattctgagcactttatcccacattcctgcaaggcatctgagatgcttacgactttaaaatttttttatttctta

SEQ ID NO: 334504 - DNA, 408 bp, Homo Sapiens
agaatagtaaaaatgctgtagaacctagatgatgtgtatatgggtgtttactgttaaagtctttcaacttttctgtatgtatgaaaattttcattataaaacgtcaagaagaaaaaatgaagactgtgtgagaagagtggcaggatgtgctctggcccatggaacaaagacattctcttgggtgcacagccctgacaggtgggaggatgacttggcatgagagctgtcgaaaacactataagccatgctcaagaatttttaatgtggaatagagaacttttctgaaaaagcatagttgaaagcaaggacaagcattaataaggcacttctactcttttatttattaccatgttgggaattattttgggaggagtgcttgcttcagaaatgctaaagtaggtaatttgt

SEQ ID NO: 334505 - DNA, 488 bp, Homo Sapiens
gcttattttgtttaggtttcttgtagattctggatattggaactcatcagatgcatagtataataataggcattctgactggtatgagatggtatctcattgtggttttgatttacattcctctaatgatcagtgatgttgagcatttttcatatgtttgccacaagtatgtcttcttttaaaaagcatctcttcacgtattttccccactttttaatggagttgttgttctttttgcttgttattttgtttaagtttcttgtagattctggatattggacattcatcagatgcatagtgtgtgggcattttcttccattctttaggttgtctgtttattctgttgctagtgtcttttgctgtgtagaagctgtttagtttattaggtcccacttgtcttttctgtttttcttgcaattgcttttggtgtcttcatcatgaaatctttgccagggcctatttcagaatggtatttcctgggatatctt

SEQ ID NO: 334506 - DNA, 511 bp, Homo Sapiens
gatttatcacacattcattaaatatagaacattgactagcaaccagtttcctccaacaacagatccatttggaaatggcacactgtagaaggcaatcttgtgacttccttctagttgtatataaaaaatacaaatcggtcagggagtcaggtacaaaacagtggtacaaaagcatgaatagatacgccttatcaaagaatgtgctcatttcatattgcagaacttctatctagattctgatttttagaaacttactgctggttcatttgttcggagaggtttcttcacacctctcttccactcctacctccccttgctaaaatccactgactgaagaatacttagtatggatcccacatggaacccaaaatccccaactgaatgggagtcacatgcatcagcacagtgggctaccggttttcatctgctcacccagcctcatgtattttagggactggaattcaagctagaagcacccaacactttttgtcttttggaatctaatacaagt

SEQ ID NO: 334507 - DNA, 529 bp, Homo Sapiens
  misc_feature (207)..(207): n is a, c, g, or t
ctttctgaagagctacgaagacgatgtggaggagcttgggctgaacttcactgtggtgaacaatgacctgggagaggcgcaggtgaggggtcaggaggaggattcacatacctgtatagcaagtagcagcatctccttgtgtgtggaagtcccatttgtgttacagcgtttgacttccgcacatttttagttagaatgactgtggcntgtgagttagacgtcgaagcatatagctccaaagcaccttagccctggcgtctgagcttgagttcagttcctgctcccacgcatgaagcctgttcctgcccggcagctccctctgcggagctccactctcgaggctgcggcccaggcttgctgcttgtctggctcttcccggtgctgggggtggccgttcagcagcttcccggcaggaccccttgcttagtcctcactccttgcccgctcagagccacctcagctgctccagcactgtctagggggtgtgttcattacccatctggttacttttgttacttatatccttttt

SEQ ID NO: 334508 - DNA, 423 bp, Homo Sapiens
ctctttgtccatttattaaatacacagtgagcactcgctctgttccaagcactggggatacagagaacggacaagacacggtccctgccctcatggagctcacagtctggtgggggagacagacacacagacaatcacaaacacagtgtgatggggctacatggccacagcctgccttgtctcaaagaagatctagggtcatccaatacagtgtggttgcttataaaaaagaaaagacaggatattcaggcatagggagaactaggatgggaaaaaccaaggtgaagccagggatgaggtcaacacaaagtgcatgcgttgaagtcctgggcattcgctcgaagggagccactaatttggctctgagcttccgatgggaccccagggctcctcgtcccgcgtgccctctcccaggcgctggga

SEQ ID NO: 334509 - DNA, 360 bp, Homo Sapiens
aagaaaacaacagctcaccaatgaatgacattattatttctatttccccattttttgttttgcaactagaaattcaggaattaatttatgtcaccaattcaaaatttcatctccagtagaaatgatttaaggggaaacaaagaatccatttgaagtagcctcatcatttgtgttcactttttgaattagcctttgtatgtttacagtctctttggatgattggtgactaatacgtaaaaaatggctaaacaatgatgtttcttcagaaaaggacattaaggagttttgtgagacaaaaagacacaaatattggccgggcgcagtggctccagcctgggcgacagactgggactccgtttc

SEQ ID NO: 334510 - DNA, 376 bp, Homo Sapiens
  misc_feature (273)..(273): n is a, c, g, or t
accattttgcacaaaaatgtatttctgtgacttcccaaagtacagacatttccccaggccccagggggtaaagcaatgaggtgtgaagtctgccagggtctggccggggcgctgagcgtgggaaggaagggagcgccgcatgcagcccatctgccaagctgggggaacacagggctgcgcaacttcccagggccgggagggagaggctccaggagaaaaaggccaggtgtctctcccaaagctgctcacccctgccgtcctgcctggaggagnaaatgctaggaacacctgaaaacaggcccgcgggaggaaaagggaagaaaaagccatcacccaaaggctgcctccagggttagcgctgctccccaggcccctg

SEQ ID NO: 334511 - DNA, 723 bp, Homo Sapiens
  misc_feature (213)..(213): n is a, c, g, or t
  misc_feature (301)..(301): n is a, c, g, or t
  misc_feature (421)..(421): n is a, c, g, or t
ttccaccctctggcctgctctccttacaggcattaggcttcaaaagacaattttctccctgtttctcctccttgcccaatctctccttctaaaccctcttccacctgtactcacattctccaggaagccttctctgatgggactcctgtgactctaaggttgctactacagcatccaacatcccagccccttgggccctggcaactgccaccntgggatggccttgtgctcgttgcccgttactatgttaaatgtagatgtgtgtgtctagttcaccctcagattcagtgctcactagaangtaggaaccaacgtgtccccatcacgacctgaagctctgcccctgctttgggtacaagacactcacttgcactgacacacacactcgtacacaactgcctaatcaggctgggagtgcccnaaggacaggtcctgtgtccttttctctgccggctcacctttgcctacccacagcctcagccttggcacacagagatggttgtcccccaggtcggtaaggtgggggtggcagtgagggaccatgagcctggagccctccaggattccaagcccagatccctctatcctgatgaagggctgttcccaccttgttcctgccgcccccgccccctacttcctctgagcaagaatctgaatgtcagaaccagggagggccgtgggggacttttgacagcaagtccaagtgagccaaggttgcccaat

SEQ ID NO: 334512 - DNA, 373 bp, Homo Sapiens
gccctcactggcttgcctttcttttccttaaatacatcatgttctctcctattttagatccttttccccgaaggtatggaaacattatttctgtaagcttattcttctatatagatgggaagtttttaaatcagataaggttctaagggcatgtggacaatttacgttatcatagtattgttcataacgtccatcattattctgtagactgtaagggcttacttagctcgtgtaagaattatccttcaaaaagcatttttaaggtattagtattgctaatctataaactttgtgcaagaagtcctaaagtcaatagcaacatttaaagtacagtttgtcatacttaataaacctctggtatattttcctttaa

SEQ ID NO: 334513 - DNA, 372 bp, Homo Sapiens
  misc_feature (11)..(11): n is a, c, g, or t
  misc_feature (44)..(44): n is a, c, g, or t
  misc_feature (68)..(68): n is a, c, g, or t
  misc_feature (94)..(94): n is a, c, g, or t
aaatttatttnataatcctccccaacaatagcccccattaattnacccaattgaaaaaaggccatgcnaattctttcttatttgaaaggcttgnttccccttttttaccaaaagtactagtaaaaatctgagtcatacataagagcaggtcaggtgtcactaataacagtttacctcagcttcatctccaatgaaggttttacttctaatcccagagtctcatgtttatgtattacaagagtgtatgaaagctgggcatggtggcacacaccattagtcccagctactcggtcgggggttgaggtgagaggatcgcttgaactcaggagtttgaatccagcctggtcaatgtagcgagatcctatctcttaa

SEQ ID NO: 334514 - DNA, 335 bp, Homo Sapiens
tttatataaaataagatttattttaaaaaagaaaagtttgtcttcaatccagaaagaaccactattaccattttttggtgttccattccaaaatatcccacaaatatacaattgttcaatcaaatttaacattagactttatacttgaacattcaaagtacgtaagaaattatagaaaagtgtctgcgtgactccctgtctgtagggcacaggcttcatctccactaacacacacacgaccagtaccttatacagagagtccttgtttgtctttagtctgacaccatgggcgagcccgaggtggccgtggtccacattcctgaccaggtgtcttt

SEQ ID NO: 334515 - DNA, 568 bp, Homo Sapiens
  misc_feature (218)..(218): n is a, c, g, or t
  misc_feature (501)..(501): n is a, c, g, or t
gacgatgtctctcaacaatacctgaagtttctcatactcatcatcccaagtctgaaaaacttcaaagcatgctaccataactttttcaaaattcttcataaggcaacatgcatcaaatttcctagtgcccaatactttgagtaattggagaactcaagtctcttgaaattgcctccaccaaacgcagtgccctctggaataggatattttgtgtttcnggatctttctcaaatgtgtgaaaatggcaacaagcgcctgtcttattttgtccagctccgtggcagacagaatcattcagagggaaatctttcatcagaggattgtagtcattcacagtttccaaagcctgttttagacctgtgtcagtgtcaaaactgacggtggcatggaagcgcttgccatgtttcaagatatccagagtcaggagaacttccgggctctcccgtttctcctggatgcggtataacgcacgttccaagtttagccaaaaactaatttccntgtaaggcagttcctgatgcaggatctcgatccagtttggtcactttttgaatttctcggatccagc

SEQ ID NO: 334516 - DNA, 519 bp, Homo Sapiens
gggggcggggggagggagggaagaacgaaagaaaaatgacctaagtctgcagccccagcccctagtccaactttataggaccatatggtgtccaaactattccctgggaaagaagggagccacccactccattagaggggcaccactcactgcttactctggcccatctcttattccattgaataaaacgttcctttctggcacgaccagtatctgaacatctctcacaatacccacgccacagtacgagacactgtagcctaagagtaaagcctaacagtcagctcctagcattagctttggagttaaacacggggtccaaatcctaacttcccaggtgtaaatatgggcaaattacgtaagctctccaagctgtaaaacggcaatgttatccatctgataggggctactctgcagattaactgagatgctgtaacgtgcgtggcccggtgcccaacacatagtaagagagaagtaagtggcagttactggtatttattaccgtcgttgctcgtgccg

SEQ ID NO: 334517 - DNA, 685 bp, Homo Sapiens
  misc_feature (50)..(50): n is a, c, g, or t
  misc_feature (74)..(74): n is a, c, g, or t
  misc_feature (125)..(125): n is a, c, g, or t
  misc_feature (136)..(136): n is a, c, g, or t
  misc_feature (153)..(153): n is a, c, g, or t
ctgttacccttaagactaagacccataaactctatcaattacctattcgnggaagaatgacactgtaaactggnggcaatgtcaaaatgtgtactgcactttataaaagcatggataatattaanggatcacaaanggcagcattagcattcnctatccaggtattattaaatctttttatcccatgcccccctcaaattttgggagaattattatctgataagcctgaaacgactttttttaataccataacctaaaaagacacttcttacaggtgtatgcaactttggtcagcagaaacacaatacggagcctctggcctagctaaggcactctattctgaaagtacggaaaacatggcacgtatgctccttatcattggcattgctcccccaaaggcagctcattgtatgctggggagaaaggctgggggatgaagtcccccacaatatcatgcataagcctggaagacctttcatactttggaaatgttatagtaattggcatgacataaatgcacacagctatctggaatgaagtcctgcttcagctgctatatctctacacaacaaatgggggctctcaagatgcactttcaagaatggcagacaaaacaagaaaaagagtcagcagtacactaaagatcctcaagtatcctgaaacagtgaattgctcaatttcactt

SEQ ID NO: 334518 - DNA, 467 bp, Homo Sapiens
  misc_feature (210)..(210): n is a, c, g, or t
  misc_feature (247)..(247): n is a, c, g, or t
  misc_feature (279)..(279): n is a, c, g, or t
  misc_feature (393)..(393): n is a, c, g, or t
  misc_feature (401)..(401): n is a, c, g, or t
  misc_feature (426)..(426): n is a, c, g, or t
  misc_feature (440)..(440): n is a, c, g, or t
ttggagcagccactaaaatatacccagaaacatcttcctaatctacatctgtgccaaccctcattccctggcgcagatggaccatcacatgcccgccattgttcctgatctctgctgctcatgacctgctctccagcgctccttctcatgctcacattccagttggcctgacctagataagtggaggtttatttgaccccaaaaattaancttctacaaacgaatataatagtgtccattacagagnataaacttagtgcgggtcccatttaaagcagnaagttactgaaagccctgagtttaaagtttccagggcctgaaaagttttccaatgacagttttcctgcataatattaccctacaatttcaaacctgttatttaaaagccattcnttgtggtntgttgtactttggattaagccttantttgatttgaagtncctttacaatacggggcagttaacgcc

SEQ ID NO: 334519 - DNA, 635 bp, Homo Sapiens
  misc_feature (332)..(332): n is a, c, g, or t
cctctaacagagagaattccagttctaatagatctcactctttggccttgtggaagttacttcacttctttagccacagtttgggagaaactgatcatcccaaagaagaaaggcatacattcaatataaaggactataactgaagaacttaatttagtttggaagatcaataatcatctctgaggaagtgacatttaagctgaaatctaaaggatgagtaggagttacttttggaggaaaagagtgatactgggaggcagagtggcagaggatgaggctggaaatgtgggcagaaggcaggcaggaaacagacaaccatacagaccacattnaatggtgttggtgttttatacccaatgcattgaggtagggggtgagggaggtcttaagaagtggcatgttctgatttaatggatggttgtgactggattagacatggggaagaggagaagctacaatattagttgctgcataggcaagaaaaatgggggcttagattggagaagtggcaacaagatagaagtggtagatgtgagatactctgaagggcctatctatcacaggagttgatgaattacatgtgcagaggaaggagagaagtcatagatatgtatgatgaagattagggacagcta

SEQ ID NO: 334520 - DNA, 639 bp, Homo Sapiens
ttttgcggggggagaattaaatttaaaaatagaagaaaaatgtccataatgtgtattaaaagtgaagagagattactagagtcccaacaagcctaatttatgtgaaagcacaaattaccagttagcaaaggctaaaaggctgtaagacaaacagaggagaggtgagaatttggtattaggcaaagagaagcagacactgagaataatgtatactgctggggatactaaagttccagggaactcctgctgctaagagttcttggctctctctggtcccagcccctcttcagtgctgtgtctctgaggtccaggacatgtgacagtttcttccatcatggacacatgttccattggataaccctggtttccttaagccttgtccaagtggagagggttgttcctttgcaacattaaagaagcggactaaaattatggaactgggccactaaccagatggtgtaagctgtctcagtctcagatgtttcctctctaaaataaagaggtaaattaggtccttggggattggtctccaagtctcatctagctctatgtcttataaatgaattgatgacgctatatatagttatcttcatttgactgttttgagaattcattattattcattatactcacatgccc

SEQ ID NO: 334521 - DNA, 500 bp, Homo Sapiens
  misc_feature (168)..(168): n is a, c, g, or t
  misc_feature (352)..(352): n is a, c, g, or t
tcccaagagaggaaccctcaaggcttgtggctgagaaccccacttccaacaaagaaggccttccccaaccagcgactgctgcttcaagatcatgcaacctcaagtattagtcgctgacttgcaagcagatctctgagaggatgagattcagcattttcatcccccacnttgggtttgccacccttggatcagcaccagtccccttgagggcatgccttggacatgcaattgcatgaggagaggtaagacgtgcaagcccaaggagtgatgcccatcctggttagagggaaaaccgcctctgatggctgtcctgacaaaggcagggcagtcctggagtattgtggcatggatncgatggcaccattcctccagccagtccagcccttcaatctcttttacaatatctttcagcctccctcagattccccagcgacagggcagcatcctgggcagctccgttctacttcagccgatttgctaacactgctgacacagttcat

SEQ ID NO: 334522 - DNA, 899 bp, Homo Sapiens
  misc_feature (732)..(732): n is a, c, g, or t
cataacgttttctttggccaactccagcaatttcccacattttgacatgcaatcatgttaactcccattttcttttgtaatccaacatcttctatttagataattactttaacaatcaatgacttaatattctaatcataaatttatacaaaaataaaattacctccaaaacattgctacctttcctaaacattcagtcttgccacagtttaataaaaggaaagaacattaaaaaggataagacactgtaatgattagatgctttttataagcctaaaggcattgtgattatttagacagaagagaagaaagtgaagtgaaaacctgatagttatgtagtctcatggtttgctgttgagaggctgaacaccagctgctttccttttctaggaagataataaagtgggctttggctacaacataaagatgttgggttagacagtttcactacagtaagaacaacgggatgagttgcccaggaaattgtgaaatactttctaatgatctttaaagatataatgaacactaattcatctggatttgtttaggtgtggtcactggttaaaggcaaagggaaggatcagataacttcatgttgttccattacataccaatagatcttgattagggaaggaaatggcagatcagtcagatctaaacgacaggtagggacattcaacactgtttgactagcttggcctccgatgcgtcaggaaatctgagctggttatnggtagacctcgctatgcgactcggtgaacgatggctcttgggttctcttcggttggacaatatggggttccactgcagatttcttctggccttcccgcggagggtgggcccagggtgaaccccggtgtgaggccccacatgtgacgtctgttggcagttcaaacatg

SEQ ID NO: 334523 - DNA, 704 bp, Homo Sapiens
  misc_feature (41)..(50): n is a, c, g, or t
  misc_feature (509)..(509): n is a, c, g, or t
gaattttctgtaggatttttattggtggcatacaaaggttnnnnnnnnnnctcataattttcctactctacatgaaactaggaggagaaaaacggaaaggatgattcctgtaatttcagtaatcttcgggttttatgaaagtaatactgtgttattgtttgttcagaacctgttttgcaggcctgtgatcttcccccactgggaagggtagactggcgtactatatcctgggaaatccgaaacacaaggccttgctgtgtcatagcaggaatgagtggaacagttactttgaaaggagcggcacacttttgctagtgtgtatgcacagacgcatctcacggagcttcccagaaatcccaggcccttttgtgactcgaccaagaaagcaaaccagtttgaatgggacacagtaaaatccccttccctttgttctcaaagagcagtacgccagtgttcaagaaagccccttacttactatggttctaaggcattttcttttcttcttcttntattaatgatctaccttagaattcggccaaaaagcatctcagggcagccttggacagattctttcaggtggaaaaaaatgtgaaaatatatttagaggttttcaagtatctttaaaatactccttaatttttttctttgtgctacaggatacgttcaggcaagttaatgttttgaatcctttgaattctccagct

SEQ ID NO: 334524 - DNA, 520 bp, Homo Sapiens
  misc_feature (70)..(84): n is a, c, g, or t
tggttttttttgagacaaagtttcactcttgttgcccaggctggagtgacagggtagaaaactccttctnnnnnnnnnnnnnnncaaaatgtccagtagagacacatgtcggcctgactctaagtacagatcctggccgcaagtggagttgggggcgcaggcttggaggccaaggtgaccccattgtgtagctgttgcagtatcttccaggtgagaaattgtgggacttaaaacagcagcagccagaatgctgagcagggatggatccaagtggcatttaggacacagactgacatgcacgtggaggatgggggaacaggagtatgatttcagttgttagcttgggtggtaagtgaatcatatcgaccctgccaaagctgaggaacaggggtgaatgaggatgacgctgcatggcgctcaggaaggaaggggctggaccatcaggaaggtctgattatactggactggctcagctgggggcagcccctcactgggaagcatctgcaacttgggaaggaga

SEQ ID NO: 334525 - DNA, 477 bp, Homo Sapiens
  misc_feature (185)..(292): n is a, c, g, or t
gaagcagagaagtcatagagtagatgctagtcatttagggcgaagttagtagttgaagtttatttgttggctcatgtcagtagtggagaagaagagaaagaaagacttaaggaatggcataatggatggagcaaggcctaggacagtctatcaaattgttttactggttgtcacacactgttagnnnnnnnnnnnnnnnnnnnnnnnnnnnnnnnnnnnnnnnnnnnnnnnnnnnnnnnnnnnnnnnnnnnnnnnnnnnnnnnnnnnnnnnnnnnnnnnnnnnnnnnnnnnnagtggtagaactgagattcaaactgcacagtatttataccacactgtacgtcatatactttattgacagactagattttaaagaaaaaattagcttgaagtggtagattgacacatagaactgatagctgttttgaagaactgcaagttttggtaaagttaaagagcttgtagagtgtaagtggg

SEQ ID NO: 334526 - DNA, 367 bp, Homo Sapiens
  misc_feature (248)..(248): n is a, c, g, or t
aggtaggcttattctttccccagattaaacaagagccctgccaacactaggcaagtctggtggctctagcaagggggaattgatttggaaccactggcaatcagtgaccagggagaagcattctccttccctcctgggcatgagactccccttccccactgacagatactgggtggccagtgtgcctggcaagggggatgtcctcacaaatgcctagcccagaaagtgatctttgttcctgtcacctngagactcctttctctcccctaaaaggtaccagacttacccaacctgaaggaagctctctttccccctacttgtaaggcaccagtgtggactgttggactagtggggaacccaacggggc

SEQ ID NO: 334527 - DNA, 436 bp, Homo Sapiens
  misc_feature (249)..(357): n is a, c, g, or t
ggcacgagttgtcggtcagcttttttgaaatgatcttggtgctagaaagacttgtaactgtttaagggtctctcttccactaatcttatcctcctaaacttctgccatacttgtgacatgtgaaatgcaggggtgttctgagtaggtttctgccttctcagcatagtgcttggcattttgttggcccccaggcccccagtaaataattattgcaagaatgaatctcagctcggtgcagtggctcacacnnnnnnnnnnnnnnnnnnnnnnnnnnnnnnnnnnnnnnnnnnnnnnnnnnnnnnnnnnnnnnnnnnnnnnnnnnnnnnnnnnnnnnnnnnnnnnnnnnnnnnnnnnnnntattagccagacatggtggcacatgcctatagtgccagctactaggggtgactgaggtgggaggatcacttgagtgtgg

SEQ ID NO: 334528 - DNA, 523 bp, Homo Sapiens
  misc_feature (477)..(477): n is a, c, g, or t
gtgtgtgctctttttgctttgttaatcagcaaggttttgaaaatcaggagatgtcaatttaaacaaacaaaccaatgaaaagtagtcaagactggaggtggggattgggcggagttggcggggggatgctcttcagcaatgagagactgtgccaagctggtgtagccaccaaaggggtgggctgggtagaagctgtctcctatcagctgggcaggagcgcccccaccaggtacactgacatgtttgcaacacctgccagctcctgggcacttaccggtcttcaacacctgcaaatgggtgatatgtaaaatatgtgcagagagctggcagtggcctagcctctgatccatcaaatcagacaccttctgaagggtcccggaggctcctggaggtggctcctgttaatcctttagttgctggacagtagggtggtcaggggtacagggctggaatagattgatgggaacagcagggagntcagatgggtgcactcccccctgaaaatcagcccctgctagtaacc

SEQ ID NO: 334529 - DNA, 638 bp, Homo Sapiens
  misc_feature (13)..(13): n is a, c, g, or t
  misc_feature (44)..(44): n is a, c, g, or t
  misc_feature (66)..(66): n is a, c, g, or t
  misc_feature (87)..(87): n is a, c, g, or t
  misc_feature (114)..(114): n is a, c, g, or t
  misc_feature (120)..(120): n is a, c, g, or t
  misc_feature (148)..(148): n is a, c, g, or t
  misc_feature (178)..(178): n is a, c, g, or t
  misc_feature (312)..(312): n is a, c, g, or t
  misc_feature (335)..(335): n is a, c, g, or t
ggcccttccgggnataaccttaggcgggccctttagccggagtncggaacccgggttaagttcccnggcccggaaggtttcccaggncagtttcggcaaatattcccaccattncaatcngtatttaaagccattctggggttggtgnaccttggattagctttatttgatttgaagnccttttacattacgggcagttaacgctttgtctctgttagatttgctttttagttcaccaggggaacctcattccctctgtatttgaatagttgcaaatgatggaacagctgtccctggagggaaatgaaaacnagtgattccccgaaattgtgacngatagaaatttgctcttgggttacttacaatgtatctgagtattaaaaaattttctttttaaacgtttgaagtaaaactacccagaaacacttagtggctgaccagaaactaaactcctggcatcctcaaaatgggatttattggcttataaatgtcctgtgttgattcacaaaggcacaaactatctaggtaagttttcttctaaatgttgatgggagagctggccactgttatgcaagtttcattgtcctgactaaactgccaaagagattacataaaattatatcaactagacgaaaagg

SEQ ID NO: 334530 - DNA, 560 bp, Homo Sapiens
  misc_feature (66)..(66): n is a, c, g, or t
  misc_feature (226)..(226): n is a, c, g, or t
ggaattctagtttctatggcttgcctcgagggcaaatgagggggttgagagacaggagagcaggangaaagtcagagagggactttgctttctggggctacttctgaagcatccaactttgttgtattgtttcctgagccccaactagtctaactaaattcccacacgtcatccccactttctccgtaatctgatgcctctgattcctgagccttcttaggattcnagtggggtgaatgcaatttgattctgctccgttctcccctctgccggaatttttgagtgtcagctttcctccttctgcctgagttcatctgtcactcttccatataccctcagtcttccagaaattactccatctttctcatctgctgggtctcctctccctttctcattgtccctgtgggttaacgttaactctcccagggccaaaaggatgacttgcacgtcttcagtttgcttacagggcaaacatgaaggcttaagaatcattcattgattggtttgcccatctcccataatcattgaaatactctgccctttttccgatttttgagctt

SEQ ID NO: 334531 - DNA, 594 bp, Homo Sapiens
  misc_feature (37)..(37): n is a, c, g, or t
  misc_feature (72)..(72): n is a, c, g, or t
  misc_feature (111)..(111): n is a, c, g, or t
  misc_feature (236)..(236): n is a, c, g, or t
catcactccttgggcttgccaattctaccctctcctnatccattgccattcccaaagcatgcccctcagggnatggtcctgaatccaggttggcaaaacccaaagtgggangaaaatcttgaatctcatccttctcagagaatctgctgcagtcagcgactatactgaggtgcatgatctgagcagcagtcgctggttggggagggcttcttttgtggagtggggtctccagccancagcctgagggtcctctcttggggatgctacccagttaattgggtcatcttcagcctccacccaaacttaggcctgtaggtccatcaattactatatcagcctcaaggactgaacaggtgggaggaaggactagtgtgagtgatggaagcagctgagctgaggagtgctggcacctgtgcaaatccagcaagaatgacatctggctgagcttcagtcattcacctaagcaccaatcgggggtcactcccagatctgagcaatgagggaaacttcccagggggaaccccgcacttgggtagacctgggggagcagccagaaggaaaggggttgaacctgtagttgattaagattcagag

SEQ ID NO: 334532 - DNA, 589 bp, Homo Sapiens
  misc_feature (270)..(270): n is a, c, g, or t
  misc_feature (356)..(356): n is a, c, g, or t
gtctgcaccgtctcttttatgcagagcattaggagaggtacatactggaaaagcggcgagcttcacccccaggtgcaggagggcacttgcaggatgggttccggaggaaatgttcagcctcccattttgtgattgtctcagtgatggacacagacgatgacgttttggctccataccacgagtgttcgcttacaatttgctgcccgtgtcaccagagccagttgctaacacatcagcatttgccacatgttcatcctgactgccctgtcnagatgtgaggatgttctttcattgcttagtattctggcagaggactttgaaagactcatgtaggccagtgtgcccccgccttcccntggggtctggaggtggaattccaagcggtgtttgggcgtgtgtgtgaggacacggggtgggggcagctgtcacagtagtagccggtcttcacagcatgttaaattttttctgttcctaggaatccatattcaggtgtacagtgctttctgcacagacggtggtgtaggaaacacgagaatttcctatagctaaaaatcccaaatgttgcagaggtattgcagctatttctctt

SEQ ID NO: 334533 - DNA, 346 bp, Homo Sapiens
caaattttaacacaagattttattaaagacgggcaaattggtgaggcatacctgaatttctggagatatacaaatgcgtgaggctggcatcatatgcaaatgtggctttacaaattggttttattttctagctgtatttaaagaggtgttcaaaattccctactaatcaagaagcacccctgaaaaaactatgagataagatagtgttattaatggtttgcatctaaagaccaggaaacacattagccaatacagtccacaatcggtgaaatgctgccgtgcaaattgcacgtgcatatgcatttttactatattccctcagagaccgtaaaacaacaacaacaac

SEQ ID NO: 334534 - DNA, 519 bp, Homo Sapiens
  misc_feature (13)..(13): n is a, c, g, or t
  misc_feature (41)..(41): n is a, c, g, or t
gggtttaccttcnccaatgggccccattccctgggggaggnccattcctcaacgggggctccggacccatgatcttctttgccttcaatccccatatccaggccttgggcagggctgtaggcactactccaatcccagaggcttcatcatgtgcttttccatatgtgtctctgaccttagtgcctactggccacaagttggctcagagcttcatgaagtccagtgtgttttacagctgacttgcctgaagtgctgattaggatacttcacggaaactgtgcatccctttgcaacacagagcctctttctgagaagtgaacaccatttcaccttcccagagagtgttctctataatctattccaaatgtgaaccaccaaagctatctgcaatttctatcgatttggcacatcttgaacctaacatgaattaaatttcaggaataaaaaatttcaggactattactcgaggagggagaaatcattgttaaaatagaaaaatagcctaacccggtggctcat

SEQ ID NO: 334535 - DNA, 183 bp, Homo Sapiens
ttacgaatcaaggctgccttttaattgctttcagatattcggatatcccgtctgatgtcagcaaggcccccgcgccccgccggaacccgcagatcgcgagcagcaccgccgcctgactgcacagaagggctggggcagggtcgctgtgcctctcggcctccttgctgccaccgtctcttagcc

SEQ ID NO: 334536 - DNA, 189 bp, Homo Sapiens
agctgtactcatgactgtcatttattacagtgaagagatagatgcaaagcaaaatcagcgaaaggaaaaggcacgtgaagtctggaggaaaccaggtgcaagcttccagagcttacaggagtcctctcccagtggagtcacatagggttgggcttaaaacctccatcagtcgagctgtgacaacaggtt

SEQ ID NO: 334537 - DNA, 431 bp, Homo Sapiens
actctaagaatttgtcttatttttaatgcatggaaaatagcaaaattatcatgccaacatgaggaatatatactataattcataaatgcctaattatcaaaataatgacatagtcatggttagatgcaacctagaaatcttatataagatgcaactacatattgtatgatcattcctcttatatatgacattcaatcctcatcaaattcagctatgtataaatggcattatgaaataaacacttaatatcacaatagggtcatagtctgctactgtacaaccatggcatgcaagtaactatgcattagctgtaaacagtaaagtgtcataaccttccagaaatccaaagaatgtgaaaagtacatatatagtactaaacatcaattgtatttaaaggaccttcatatttaacaaagctatatcatatacag

SEQ ID NO: 334538 - DNA, 439 bp, Homo Sapiens
cctctttgtttctcctagccctattagggcacactgtagtcaccttctatgagagcaagggaaacaggaagatgggctcctggagtccaaacaggatgtggacgtccctggtagttctctcttttcacacaacttttccctgagaactgtcccagtcaggtggaccttcacaacaacacgaacagctaaaactctgagagaaaaccctgactttcagaaagcataaagctgagaaaaaacaaccctggaaattggagacatgggataaaccagacagtggagaaagctggacgagggatgctctaattctgtatatgaatcaacagaagtcccaggctcacccccgagctgcaaaaatgtgcccaaacccaaataagcacaggacagggtctggggaattactcagggtcctacacaacaggccctgacaagcactggc

SEQ ID NO: 334539 - DNA, 466 bp, Homo Sapiens
  misc_feature (363)..(363): n is a, c, g, or t
ggaagatgcacaacctttattatgggtgagagcttcactacaactttagaaataaaaagtaaaattacaacataggtcctaggccttgggagcctgaaaaagaagattgggaaggagggcacagggtccttccacctccctggaaaggtgcagaatgagccaggcctaactacagggccatgagcctctagaagcttaggggggaataagaaacactgtgaacttagatatataaatagagagagacccaagcaataggccgggcctgactcccagacccctgcagatcatggctaaggccttacatcctcctctgtcatactggagtaggaggcaggggaagtcatctttgggagtattttnggtttttcttaatttatgtaccaaaaagtccacatcacaatccaaataaagttctctgtccatctctgagactgcctgtctcagtttttcacctgtctgtttg

SEQ ID NO: 334540 - DNA, 426 bp, Homo Sapiens
  misc_feature (234)..(234): n is a, c, g, or t
atacagtgaaaaataatctctgattgtttacctcacaactctccttattcaaaagcagtatcaatttcctgtggtttgtattctttcttaacacattttaaacatatggtagtgttttcatacgatttattggtctttagcatggattttagaacataaggttttcgtgaatagtctaggggatataaagcacccagtgaataataacattccaggaattcaagtgtcccttcntgcatgggatgacaagaatcattaatgctttctggggaaaataatggagtttcctatgggaaaaatgtgtagagagataatattgaaagagatgggaaatacagaacagagttcagggagattaaggcagctggaatatgcagaaccagtaataaagaggaaaaagagaatgccaggtgcagcggctcacac

SEQ ID NO: 334541 - DNA, 580 bp, Homo Sapiens
  misc_feature (284)..(433): n is a, c, g, or t
tttctgtaccatctaaaccccctaaaaataatcttgaaacctagtgaaggaacttgagtcactagtgacagtcggttgttgggatagcttgtgaaggctggtggatccatttggttgtagctaatggcgtgaaagaattattaaagttttaaggtttttaataggagtttggaagaaaccttagaacctatgaagtctaatcttgacccaaatagctgtttcttctaaatatctcttgtcagatggtcatctggtttacattcaatttcttttatataaagatnnnnnnnnnnnnnnnnnnnnnnnnnnnnnnnnnnnnnnnnnnnnnnnnnnnnnnnnnnnnnnnnnnnnnnnnnnnnnnnnnnnnnnnnnnnnnnnnnnnnnnnnnnnnnnnnnnnnnnnnnnnnnnnnnnnnnnnnnnnnnnnnnnnnnngttaatacttatgtctgcattagaagaaattatagtgagcttgcctaccaaattgttgaagatctgagaaaggcaccaaggcaacaaaattggaatctcagaacatctcagcagtatgcaacagggatagaatataacaggatgacc

SEQ ID NO: 334542 - DNA, 450 bp, Homo Sapiens
gagaaaatccagttagtttttattgatgacgaaattaagacttggtgagtgtctcgtcttatccaaggtcactcagctaatcagtctcctagtgacacagtgcaatttccacaaattcccttcacttctcacctatttatccactatgactaggcttcaaatactctttaatcaccgctcagtgatgagggtgggagaaaggaaaggcaggtctggaaacgtatgcggcacctcaaaatgtgtccatctctcatccttccgctcatttcacctcgaggtcccgaagaaccggggggggaaaaagacacctcaccggaatcaaagcaaatggcgactaagggagagcagaaaaatcaagaccggggtcggttcgctcgcgaccccgttttgcagaaacgtcaaagggcgatgacgacactgcgggagaggggcccacagacgggcttctcc

SEQ ID NO: 334543 - DNA, 451 bp, Homo Sapiens
gcagcatgatagaaatgtatctgttttataagtttaataaattctgatttttctcctacatagaataatttagattgttagtgctggaagaaacttgaagaccaccctctccaaagcctctttttacagatgaggaagctgaggcctagaggttggaaatgatttacccaacatcccacagtcttctagttccaaggctggaaccagaactggcttcacacaggcttgcgttctctcatctcgaccagggccctacaggctctgaattgcttctccagaccagaccagcaagctcagatcagaactgcgttttctgccatggctttgctccccagccacagagggctcgggcagtcgggttctgcgtcagtgggaggacatggtccaagttgtgtttgctcatcgagggggagctcaggttcacctgacccagcagctcccgtgggctgct

SEQ ID NO: 334544 - DNA, 495 bp, Homo Sapiens
  misc_feature (133)..(133): n is a, c, g, or t
aaatactttgcatattgtctgattaaacacaaacagacctcagaatctgatcaacagtttattgaacatcctactgtgtgctggaaagcgagatggggcggaatgcgagaacaaacttccccttgaggggtcntttgggcagcactagtagctggagggcttcaaggccaaggcaggggtgacatcagattggagacagctacggcagaatgtggctgtttgtgaacatctgcacctgtgttagggggtgagcacctgggagaaggacaaggcacatcacaggacttccctgagcatgacaagttcaaggactcaaatgtccgtggtggatggtagcgagtgacgattggggagtgggtggggctgtcaagcttgcctagaggagatcacaaatacacgacgagaataccgttgtgtgtgctcttcgtgtgtttcctaggagtgcagggcaggggtgctgggtcgatccacaaaagccctgaaacgcttgagagg

SEQ ID NO: 334545 - DNA, 700 bp, Homo Sapiens
  misc_feature (141)..(150): n is a, c, g, or t
  misc_feature (155)..(156): n is a, c, g, or t
  misc_feature (179)..(235): n is a, c, g, or t
  misc_feature (649)..(657): n is a, c, g, or t
cttttaaaattagagttttaaatgatacaaaaagtattggagatcagcattaatatcattctatactaacaagaatgaaactgttccaataagtagctaaaagacaaacttccttctgtccatggacataaattagcaagnnnnnnnnnngtagnngggtgggggcagggtctcactcnnnnnnnnnnnnnnnnnnnnnnnnnnnnnnnnnnnnnnnnnnnnnnnnnnnnnnnnntggacttaagttatcctcccaactcactccctcccctaccaagtagctgggactaccggtgtgcaccaccacacccagctataaattggcaattcttatattcctaactagttacttgtaaggaatgaatagtgtggatttgttttcattccccagctagttctaatatcctttaaggcagactcaaatttcttctgtcctcttgaattgtgaagcatcatatttttcacattgtgcatgctcaacaaatgcttatgattaataaactgactgatacggtagtttgcaagtgggaccctagcaaacgataattctttccaaatgtgctgcatacatgtaaattgcaaccatttctttgggcaagaatcataaattaagctcccccaaatattcagctgagtaatttttaatagnnnnnnnnnaattataaagctaatcattatctttgcaaaattatcaggaaat

SEQ ID NO: 334546 - DNA, 409 bp, Homo Sapiens
  misc_feature (25)..(25): n is a, c, g, or t
  misc_feature (41)..(41): n is a, c, g, or t
tctgggatcttctgtccttgagggncacccaacctgatgcncagtagaaatgctcctgtataaggtgtctggtgacccacttggggtgtttcacccagttgaggggcacaggatccaggactttgcttaatgaagcacttttgatttgtcctttgggaagggggtatgctgtgccggggaaaatcccactcatctgggctgcctggaatcctcagagtgagcagggggaaagaacaagtcttccggtttgtggagacaacagccagccacccctcccactagggactcagacctagagagatcagagttctctccctaattccctggcttgagttgctggagttcctgcagggaggccccacccagtgaggagggatgggtcagggtcagcctaaagaggcagtctggc

SEQ ID NO: 334547 - DNA, 646 bp, Homo Sapiens
  misc_feature (137)..(137): n is a, c, g, or t
  misc_feature (139)..(139): n is a, c, g, or t
  misc_feature (609)..(609): n is a, c, g, or t
aaaggagaattgtcatttatttttggttttgtttgtttacattttaataggattgctctagcagctgtgttgagaaaagacaacacagggagacaagcatagaagcaggaaggggaggtagctgcaaaaggcaggananaggtgaggcgggctggtccaggaggtggccaggattcgggggtgaggcagtgggagtagcaaaagcagattctggatgctcttgacagtagagcctgtaggacttgctgatggatcaaatgtgggtgtgagaagtcaggcaggactcccaaggtttggccctggtgtgatgtttaatattaagtgtcaacttgattgaaggattcacagtattgttcctaggtgtgtcgtgagggtgttcccaaaggagattaacatttgagtcagtggaccggaagaggctgacccaccctcaatctgggtgggccccatctaatcggctaccagagcggctagaataaagcagacttgctgagtcttctggccttcatctttctgccgtactggatgcttcctgcccttgaacatcagcctcccagttcttcagctttcggactcttagacttacaccagtggtttgccgaggcctcnttgcctttgcccacagatggaaggctacactgtcggc

SEQ ID NO: 334548 - DNA, 578 bp, Homo Sapiens
gataagtatccatttattaacactcggtaacattttcagggcacacagaacatgcattctttggtagcaaaattttaaaatcacagatatatttcttttatatattatgaatatatttctagtaaggaatatataactagtcttcagaaactgaagatggaaacatagctaagcctcaacttccggtcaagcagaaagtaatgaaaagtgccgaaaatgccacagtcacatgggcccactgctccttaaatgccacaatcacgcgggccacgtgctccgtttcattctctacagacaaccgtgagtctcacactgtcatagcaccaagaagaaaacagttactttcacttttcttatagcaacatagggatttgtgtacataaaacatgttggacagggttctccttcaatcatggtttgtatgtcaacagttggtttcataaaacagagaaaggtggaaagaagatagaagatggtctctttacaaaagaaaggtgaatacatttcgatgcaccaggttgtttaggctaagtcagtaactgtgtgtattatcagccctatgactgctaagtgtcaac

SEQ ID NO: 334549 - DNA, 448 bp, Homo Sapiens
tgggccccaatttcttctacatgtagtattgctgtaaattaatgggtaaaggacaacatttcaggtccctgtgggttttgcaacactcaaatgtttgcagaatgtttcagggagctcactgtagcccccaaatcacagaaaatactgcagaggaccttgaaggtactagcagacccacctagatctcctggtcagaggaataaacaccctgtccttgggaatcacctcagtttcatgggggtgagaaaaggtccaaataacagcaggttttgtctggggacttggagtctcccaatctgctcaagacaatcaggttagcctaggctgcctgagatctttttgaaactaagtgagttcagtgtaaagtccaagaattcctatttcccaagttttccccagaaactcaaaactggttcaaagctaaaaaggacacactcaaaaaccaaaa

SEQ ID NO: 334550 - DNA, 672 bp, Homo Sapiens
atgtgattgcctttttattatgctggttattgcatcactgcagattatagagtaaatggtaacttatactgttgacataggtatttgctgaggggtgagttaaggtacctcctgcacctttctgttttaagattgccttctgcacctttttgtcatctgcttgcactggtgtgccttgtgaatgcccctctattcattctatttccatgagtccaagactctggccacagaaggcataaacctaccatcttcctgtctgtatactacagaccttatccccctcacccctccagttgagtagctgttgagctctggcccaagccttcaggtgataaaatggagaatcagtccaaatccaaggtgtagatggagttatgtttccccagtgccactctcaggcgtgtttgtagtgaagatggtgagctttgccacatgcgtctgtctggtccccaggcgctgctagcggctacagtctcttatcctgtttttctctatcacactggcaagacagggccggtggaaggacagcacagctgaagccagggcttccaaagaaagttgttccatgaaaactgatctggcacctctggcagggtctgggtgtgtctgtccgcagcttcctgcatgactttgaggatttcataaaaccggggctcaggatgctggagttag

SEQ ID NO: 334551 - DNA, 396 bp, Homo Sapiens
acttacttcaaataattttatttgagacttactagagaaataagtagcaatgtgtaagtttctcatcctatacatacatgaatgctctttctgaagtgtatgatgagaaaagactttaacaattacttacattactaccaggaggaccaggaagaccacgagcaccagggaagccagcagcaccctgtgaaatggtaatatatttttgaatttcaaaacgtagaacaaataactatacaacaaacaaaaagtataatgtgtggtatgatctgcattgtacctgaaagtcatttatggtttcgtgtttccccttggaatttacatataactcatgtatgaatgagcgattacaattttttacattctccttatggaactagtgtctcaatgcagctt

SEQ ID NO: 334552 - DNA, 396 bp, Homo Sapiens
  misc_feature (71)..(71): n is a, c, g, or t
  misc_feature (81)..(81): n is a, c, g, or t
  misc_feature (339)..(339): n is a, c, g, or t
attcaactggtttaatctgaaagtctccatttactacaatttcaatgggctagagccatgttggtgacgcnctctcgctgntctctagaaagttcttctactgtcacaaagcgaggaggactagagtgaggtctctgcactctttgggggctggaggagtctgactttattgctttttgtaaggcttcatcagcaccttccacagcatcttcgaggccttcctcagaatcattggattttgattttcctgcttcatttacattggacttgtcaaggttttcagacattctcaattaagtttattcactttcttgccaagaagacgatcatccgtcgggnctgcacgcgggcctaggctggacacaagaggctccccagcagaaagggtctttcggc

SEQ ID NO: 334553 - DNA, 304 bp, Homo Sapiens
  misc_feature (23)..(23): n is a, c, g, or t
  misc_feature (37)..(37): n is a, c, g, or t
  misc_feature (212)..(212): n is a, c, g, or t
  misc_feature (261)..(261): n is a, c, g, or t
cccccttttgaccaccttggggnacccggggggaccntatatggaaatgggaaggaaattatgtaggaatagcacccaaattcaaaaattttgggaaaagcattaagcctttgaaaaccagggaacttcttatgaagaggttaaaataactttttagatttgcttggtgcttgagattcatactttggacttatattcatataaagattacntctcttgacactattgacatgctatctcagtataaaatattaaattacntgataaacctccatgtttttccattagaacacttaggacttac

SEQ ID NO: 334554 - DNA, 439 bp, Homo Sapiens
  misc_feature (43)..(43): n is a, c, g, or t
  misc_feature (129)..(129): n is a, c, g, or t
  misc_feature (264)..(290): n is a, c, g, or t
  misc_feature (305)..(305): n is a, c, g, or t
  misc_feature (382)..(382): n is a, c, g, or t
  misc_feature (391)..(391): n is a, c, g, or t
ggaatatacacgggcaacctgtattttagatggggtaagttcnttgcagcttatctgaccaacatttgtcttggtcccttctgagaatccacgttttcttagcccgagaaggggcaaggcggcccttcnatggcgccttcttcggcggtttccttgcgaagcgcccatccttccccaagcaccaggaacggaggccgtccatattaatactcgcgggcagcctgttctgacctatactgtcattttttccatcggtcgggatcnnnnnnnnnnnnnnnnnnnnnnnnnnntctcctccgaggggntcagcacggatcgttgggttttccccggcgaacttaacacggaggcaaaaggggcagatggaaaccagccccggctnggcgcccgncgtaagcgcggcactcagcagctcgacgcaaagccagggctggatttt

SEQ ID NO: 334555 - DNA, 487 bp, Homo Sapiens
  misc_feature (341)..(341): n is a, c, g, or t
aaaatttccaggaatttattggaaacacaatacaaattggttagtagatggcatctccttacagacagacaatccacactgtggtatcatgctcagaacgaattatcctgcggaaacactcatgagcacaggtgcgtgctctgggttagcttccctggcagggaaaatcagagacatagtgcagaggaacaggaggggtggacagaaaacttgggacatggccttcctggggggaatggtgaggaggggctgctaactgagtaaattcccccaaaggaaaacagggacaacagtaaagaataaaggcttccccctccctccccaaagccgtttcctctctnaggcagagtaaaacagaatctccaaacacccacggggcagctcctccacctcccctcgccaggggactttaggacagcagtggggcataaacaccaggctcagacatgacaccgagtgcactgaggccacgcacagccccacctgc

SEQ ID NO: 334556 - DNA, 564 bp, Homo Sapiens
gtgagtatgccgtttcctcaagttttacctcctgcaacttaaaggcagattttgcagcaactttttggtaaactgtcaactagtggcttgctgttggactgtacttctctgagtgaggtgctgtgaggacccctggaaggacacaagggcagaatagtgaaggccgacgctgacttccagaagcaatgagtgggagacatcttcctgccacaccctgagcaacacagttgtgaagagtaaatagacactagtagcttctagactttttccgaattctcatcacataaaatatctccttgtgaaattctggcttattgaggacaaagaagattctggaacacaaaccccaaacagcgcatcttcggaaacatgcctgttttcaacataagaagtaatccacgcttcaggggctagcacaaagccacagttccactttgagtccttccagaagtgacaaagaccaaaatgtggcccagtatgtgaggcaaggcggaagtaggaatttcatgctgttttaaggttgcttagtgtactttaactgaaggtgtaataaaaagcaaattc

SEQ ID NO: 334557 - DNA, 449 bp, Homo Sapiens
ttgctttattcatgtagaaatatccaacattgggaatcgtgtgggtgtagatacaaaaaaaggaaaatgggggcataaacagcagttgggttcatcgtggcagttggtggcagtttcagccagtgtgtgggttgagggccctctactgctttacccatcaccctccactgttttagccaaggtgtttgacaacacttggcctgtactttaagggtcacagtgattaaaaacaacacagtcaagacatttgggtctgagtgactgctcctgagctgcttagtacgaattcgggcaacaagaaagcgaggagcagcgtgttatgcccttatcctcagcaagtgagaacaaggcagatcacagcaccgacacagaagatggccttctcccatgtgccagcggagaatccccttccagccaaatcctcaggaagcagagcaccacacaagcag

SEQ ID NO: 334558 - DNA, 329 bp, Homo Sapiens
  misc_feature (137)..(147): n is a, c, g, or t
tatttagataatgctataaaaattatctttatttttttaataaatgttgaaattttttccacctataataagcccctttgaaattcagagttgactatgcctgcttttgggaggtatttattgttgtatcactgtcnnnnnnnnnnnaatctaactttacattacagattaacagaataaatataagcaagatgtttccataatataaggcttttgatttatttaaaattcctattgtatggttcttagaacaagcctttctgtagacagaactgctgaaaacatacttctcttatctaatcaatacattatttcaagaaattagtacc

SEQ ID NO: 334559 - DNA, 448 bp, Homo Sapiens
ttcctgctaaaggttttgaatttatcctgaagcctattaggagctattcaaaaatttttaagtgtgaaggtgatatgatcagattgcatttagaaaaatctctttgacatcatgatgaatgatacagctgtagagagatcagtttgtaggaacttaagaaatgatgagggctgggaataggtaattacaatagacttgaaaggaagtgaataaattccaaaagtattaagatgggttagaaaaaacctagatgctgaattgaatatgaagcaggatgataatgtaatttattgaagcattcattgagatagggaaataggttgataatcaggattggataggagtaggggtgggaaggaatatgtcctgcccatgagtcatcaggtggaactatccagaagcaagtacttattcaggtccaggtcctatcaagaaatgtggcttacca

SEQ ID NO: 334560 - DNA, 487 bp, Homo Sapiens
  misc_feature (453)..(453): n is a, c, g, or t
  misc_feature (473)..(473): n is a, c, g, or t
ttttaatgtaaaaatcaatttattatacaacaatcatagataatgctttttatctacaaagaaaaatggcttctgcagcctccctgtctactccattcatgatactatgttcttaagatataattactttcaaaggaaaacaaagcgatatccatattttccaaacaaggaagcccccagacacatttatgaacgatatggaaatattggaaagaactcaaatggactcctagatacaaaaggctgttctgcccatcacagtaaacactgttttgccttaaaataaaaataataaaatatttctcaaatgcaggggtgaggactttaccccgtaacatgcctaagtggttcgatatataattttgatggcttggacaattgctatggtttaattcccattcagttaacattcccattttgttagtttaaaaaattgggggggaattattaatnggatatgcctttaccggtantttaagtattttcc

SEQ ID NO: 334561 - DNA, 555 bp, Homo Sapiens
ctgcatagggctcggcgtggaactgatttttccttccttttttccccatcacagagccacgggaagaagctgcggcgccagagctctgtcaaagccagctggacagagggatggctacttgcattgttaagtaggagcgcttcacagtgaccatgggccagcctggaactgccttcccccaggacggggggacaggcgtgagtgggtgtgaagcacagggaagcttctctgcctggtgatcccaagagggcctgcaacaggtgccctgcctggctgaaggaggaggctgccgggaaatcagacttggatttgccaggttgtttgaaggttaatgttatgggtaatcaaagggaggagacaaaagacagaaaaatggaaacccttcagaacagtgaaaggtttcatttacctttggtaaataaaagtgtgttcatattttcacaaggattcttctatttcaccagcttacaactcaaaccgggctgggcaaacacgctgcgatacggcggtcacggctgtaatccagagagaatgctcagaaatgggaaacaaaaa

SEQ ID NO: 334562 - DNA, 263 bp, Homo Sapiens
cttctaaatttcaattcaataggtctaattaactgctagaaagaaatgtagaccattcaaaaataagcagtgggtggtatatttttagggataattatggctttccataaatctatcaaaatactttcttgtaagtattttccagaggtttaagatgccctgttacaggttatgacaaattaaataacttttctttgctttatttttattatatcagtttatatttatgtaggaaagtgatagtgtggatgaattaatgtaag

SEQ ID NO: 334563 - DNA, 407 bp, Homo Sapiens
  misc_feature (49)..(49): n is a, c, g, or t
  misc_feature (92)..(92): n is a, c, g, or t
tagctctgaggcatgggttttctgctcctgtgcagggcagctgatgggnataaggtggggaaggacgggtccagtgcttgggccccagctgngccagcctggcggatggggaaaccaaaccatgtcccccagcgaagggccagagtgggaacctgtcctcatgcccttcgtcctgaggagccctgaggtgggcagcaggggccaggggaagttttcaggccttcatcaaagagaacaacatccgtcgcgtccgcacccctcgatcctgtatcagcacttaccggtgtgtgactgcccttgtcagctagcatcacggtggcccacctggcccactggctgtttatgccactgatttatgatagggaatattatctttgaacccaatgaagtgttttctcccccatcac

SEQ ID NO: 334564 - DNA, 424 bp, Homo Sapiens
  misc_feature (136)..(136): n is a, c, g, or t
  misc_feature (261)..(261): n is a, c, g, or t
caagagcgatcttttattttctgaaagtcctaaaactgatccatttatcaaaagatgattgatgccccagttcacaaaccatatctttttctctttcagcaaatcctggagccccaagagggttgcagcctgagtngaagtggtgacatcagaacctgccctccacacccaacagctggactgcagcctcctgcaaggcctcggtggatgtgcctgacctctctctgggacagagtccgttccatggtggcggtacgtgantgcggtacagtcggctgggtcttggtgcgtctttggatgtacaaacttgtctattgagatcaaccttttccaccaggtctcctccaattgtttcggactaagtcatagaaatcattttctgcgtaattctcagagggcaaccagaatgaaatatcattgatca

SEQ ID NO: 334565 - DNA, 453 bp, Homo Sapiens
gcaaccaattcagatttttactggacattcatgacagaatgagatgtgcatccagctgcatcgcccagcccatccgctgcccagggcacgtgaccgagcagaaacacactctgcagtggcccttgtccgtgccggggccctcgcccgcagcaccgcacgttctttgtaggagcagaacccgaaactcagagcacagcttgccctgataactgtcttcccagctggcagccctctagaagatgtgggaaatgacacattcctgtccagacacaagccacagtcacacaggcagtggggacaacagcagggcccaggcagctcaaggggcatgtcgggtgggaggcagggacatggcgggtgggccacaggggagggaaggacacggtgggcgggccgtggaggaggagggacacggcgggcgggccacgggggaggaaggattctgaggaggag

SEQ ID NO: 334566 - DNA, 423 bp, Homo Sapiens
  misc_feature (277)..(277): n is a, c, g, or t
  misc_feature (295)..(295): n is a, c, g, or t
  misc_feature (332)..(332): n is a, c, g, or t
  misc_feature (346)..(346): n is a, c, g, or t
  misc_feature (370)..(370): n is a, c, g, or t
  misc_feature (413)..(413): n is a, c, g, or t
aaatttagacatggggtctcagtacgctgtccaggctggtttcaaactcctggactcaagcaatacccccgactcaacctcccaaagtgctaggattacaggtatgagccattgtgcccagccctcacattctttcataacttttattcatttatctaagtgtatattttaggtttcacttctaggaagctttcttttctttctttaaccagctttgtcacacaagaaagctttcttagcaccttttacacccttgcaaaatatttctaatccccancctgcagtgatgactatntatgtgtctgtttctcctactgtattatgagatccanaaagagaggaccantttatccaatctatcagcaaatcnagttgttcgaccttcaactataatcataatccaaccacgtgtnaccatgtcgc

SEQ ID NO: 334567 - DNA, 439 bp, Homo Sapiens
  misc_feature (341)..(341): n is a, c, g, or t
agcctattgaaacttttattgtctagcacttcaagcatacatccaactagttagataatttaaaagaaaacacacacaaaccttgaagagatttatggaaaaattaaaggtattgaatatacctcaggaaacggtgattttacagagcaaacttcagccacatatcacattacagatcaaattagtacttagtactacaactgaagacaatttaagaacaagaagagatcacggagaagcaagcagcatcccaggatgataacaggcaagcagtagctaaaacagatatgctaccccatggctcatctatttagctattcattcaactaatacttattttngggtttgctggctgccagatgaacaacctagacagagttcctgccctcaccaagactttcagtcttgtgggaatgtattaaacaaatacacaaacata

SEQ ID NO: 334568 - DNA, 523 bp, Homo Sapiens
  misc_feature (21)..(21): n is a, c, g, or t
  misc_feature (220)..(220): n is a, c, g, or t
cacaatcgtggtagaagtcanggaggagcaagtcacatcttacgtggatggtggtgggcaaagagagagagcttgtgcaggggaactcctctttttaaaagtatcagatctcgtgagatttattcactattatgacaacagcagaagacagacctgcccccatgattcaattacctcccactcgagtgcctccctcaacatgtgggaattacgagttatncttcaagatgatttgggtggggacacacagccaaaccatattacgggagcaggaaaaagaaacaaaaacagcaactaataactcccaagacctacagcttcgctcctgtctagagctttgctacttagccacaggaacacgggtgatcatacctcaacgagaagtctgccagcattcattacgaccagtgcttaatctcatctgacaatatcaatgtcaaaatcagagcttggagctggcggtgtttcagcagaggagtctttggagcttccacgaactggttcaataaacaatcttgctgtg

SEQ ID NO: 334569 - DNA, 723 bp, Homo Sapiens
  misc_feature (603)..(603): n is a, c, g, or t
  misc_feature (689)..(689): n is a, c, g, or t
  misc_feature (691)..(691): n is a, c, g, or t
gtgaatgtggacagggcccacgctggctgctctaagctcctccatccaaatctgcacaatgtgtaaggtagctgttatgaaccccacatgaggcaggtggaacctagggctgtgcagttaagccaaatgccccaggcccccagcaagcagagcggcactccaacttcagctccccttcccttggccccctcttcctaaggagaacctgagtagggcctggaggttctaaagggagcttcctgactggtaaaagtggccaagtccttgcccagaaagagaacaaggctgtcacactgaactagctaaaaataaagcaggcccccattccctcggggagaacagaacagccctggaatgtggcagggcaggcacaacaggcttacttctcagcctcctggtggatggcttagcagacagccagcctctggacctccagtctcacaattcccactgtcccagcacctcccgacaacagggagaaaaggatctgagtgcagacaggtttactttcactgtgagacaaccaaatcccaatgctgtggcttggagatactgcagtggtgggactggactgagctagaaatcgaaagacctcagcctcgncatggcactgcctccctctatgaccctgagcaagtcacttcgatctcttgtgtatttccatcagtaaaacagcaatcatgaaatcntncttctggcctcacataccatacacaggagctc

SEQ ID NO: 334570 - DNA, 510 bp, Homo Sapiens
cattggtattgatgaatttgtaagatttttactagaaggacgagagtttcgctcacgttcatctaattcctcaattttccgcttttttgtggtgctccttgaagatgctctaaactgttgtgtgttatctttcagaggagttgctgaagtagtcctagaaatggctgccctggagagaatcattaatgtgtgggcagccatatttacactgttttcacttcctgtttcactggcagggctgcaggcaggcaagtctggggtgacaggagggaccattacttttgatgtactactgtcttcactgaaacgcctactagagggggccttgataatatctataggttcttctttatgtttttcccctgcccctgagccaggtgtccggggcacaggtaaatcactactatcagcaagcctacttactgagctgtgcctctgtatatcctgtaacatttctgtgggtaatcaaagaactggcggatttagtttgttcttgttttagctcgtgcc

SEQ ID NO: 334571 - DNA, 508 bp, Homo Sapiens
  misc_feature (418)..(418): n is a, c, g, or t
  misc_feature (452)..(452): n is a, c, g, or t
  misc_feature (493)..(493): n is a, c, g, or t
tagagaacaacaggaatagaagtatttgcctcccaggagtagataagacggtgtatgtgaaaccttgacacgattggcattcattcgtaaaatcagagcagatacctgcacacacaggcataaatgaaagatactttgaattacagaaaagttaaggtctttgcaagtgcatgtaggaatgctgccaggcacacagcgtgactccagccaccaacaaagtgtttccaagtctggagctgtgtggtccttgaaggaaatataaatgtttcacttgttatacgctgtgatttttgcgtacttagcggtttctggagtccgtgaaagtggtttgttttctctgaacgggaagtgcgtttcctccaatcacaccgacctgatttgtttgttgcttgttgggcctccccacgggaacaccgangaatcccacaagaacacaagcaaggacgtgtccnttggtttacttgaggaatctctgggggctcggcacaggttntgcagaaaggcattt

SEQ ID NO: 334572 - DNA, 410 bp, Homo Sapiens
gatacagcacagaagcatcctggctaattcccatttgttgtcctgccagcaaaagcaccatcgtttctaagcataagaagtgagagaaggcaatttgtgttgctttgtttatgcaggacaacccttaagccagttgtggcatgcaaaatacttaagagtgaatgcgtatttccacagtggttcagaaagtaaaagatggccatatacacccgatgattctaattccatattatgcttgtgaggcagtgcagagactttcagaaactttaggaagtgatcctaaactcttcacactctataaactgaagcctaccctaatgaagctccacaaaggacgttgatcttatgctcatttcaaattggccatgttttctaaactgtagtttttcctatcagctgtatatcagacc

SEQ ID NO: 334573 - DNA, 738 bp, Homo Sapiens
  misc_feature (429)..(429): n is a, c, g, or t
  misc_feature (588)..(588): n is a, c, g, or t
ttgcaaccaggggagctattttttaagaataaaacaatgagagagaataaatatcattaatgcagaatgagtgacatgggaattcccaaggaacgggggattttctgaatctgacatcagactctaattctggagagactatcttagttgtcactaacctgttttttaaaaaataatgtaacatgtaatttgttagatataagatccaaaggccttgggtggtgagagggttcctgaaaagcccacttggcggcggtttccacttggtgttgctctcggaagagtggtcgtgactgactggtcaccacagccaaaaagccagctcttaacaggcgcccctcaggaacagtcactgggctttttcttggatgtctggagagagaacagaacacatgaattatgacagctgccccagtccttaatttcttncactttgttcttctgcgtaggtgtccatgggcggtttaagaagcccagggccttcctgggggtccatggcccacattcaaacccagcaccaaggggccttctaagcaggtagggagtgggcgcagagcacacgatgcccaatcaggaagcacagcgcangtcgctgttggatgcagccagggattctctcggaattctgtctggcaggtccccacctggtcaggatggatgagacactcagaatgaccacactacacatcttgtatgtggaacccttcttttggtcagcattggtctagtcctgttttc

SEQ ID NO: 334574 - DNA, 758 bp, Homo Sapiens
  misc_feature (48)..(178): n is a, c, g, or t
  misc_feature (705)..(705): n is a, c, g, or t
cagatggagtctcactgcgtcacctaggctggagtgcagtcggtgagnnnnnnnnnnnnnnnnnnnnnnnnnnnnnnnnnnnnnnnnnnnnnnnnnnnnnnnnnnnnnnnnnnnnnnnnnnnnnnnnnnnnnnnnnnnnnnnnnnnnnnnnnnnnnnnnnnnnnnnnnnnnnnnnnnnaccatgttgggggtatgagttaaatgggtgtatactgttgtatattctgtaccttttactttatataattatgctctaattattaacaaaaatattaaattttcacaaaattaaatacaattatagagacttccaaaaatagtttataagtgttaggtgactgggagacctgaacaagactttcacaggcatacataccttcctttgaatgtgattctcacaaaggccagataggataagtaatatatcagactggatttccaaaacaatggcttcttccttttcattaggcttgcttattatatttttaaagattcctatcatttgctgaattgttcccttttcacaaagatctttgtttacagtctcatcttcaaggtagaccatggctctcaggagtcttaaactgtaacgcatctgggcaaacttgttgcctcggccacctgtaccatgaaaactgttaccatgactgaaaaacggatcttcactctcacaccattctagaaatgcaaggactcgagcatttncctggcatgacatgtattcttctattaataaaggagccactgatgacaaagtg

SEQ ID NO: 334575 - DNA, 368 bp, Homo Sapiens
aattccaatacgtacccatttttctactacaaagtgaaaaaaatgaaaggaaatacgacaagccctatggaaaagtacttcaaaagtgtcttctacaaaaataccattactcgtagcatattaaattttacatctactaaaaattatcagctatctgaaagtactaatcaaaactaaatatttaaaaaaattaaataccccatttccattattttggtcccatgagaatatttcgtacttttatatgccaatacattctaaaaagagtccccttcaaaaatgtattttgtagacatctgtattgatttttatatggtatagggtaacatttcacaataataaaaatattttctaggcgtggtggctca

SEQ ID NO: 334576 - DNA, 220 bp, Homo Sapiens
aggatggtacattttatgtcacacatattttagcataactaaaaaaaggcagagagatgagagggcaagggtcttgagaagacagtgtgggagaggggaggcagacagacagagtttgttcctcgaaggacaggtctatgaggcgaactggaggtccagaaactgcgcttcctcagtccacagagcatgaggggtacaggggacatggcatggggtgatg

SEQ ID NO: 334577 - DNA, 575 bp, Homo Sapiens
cggtttgttttagctttaaagagacaaaagagttgcatgcagcatggaggaaagaggtagtaatctaatagaaaggaagcattagagcagggtttcccagcctcaacactgttgtcatttggggctggatcactcttggttatgggaggctgccctgtgcactgtgagatgtttagcagcatctctgtcattcacccactagatgccagtagcaccctttcctcccagttgtgacaaaaatatctgcagccatcaccaaatgtcttctagggggtaaaactgtccctggttgagaaccaccagattaaagtaagggaggaccatggagagagcaagttctgcagaacagaatgggacccaaagagcaaactatgtctgtataaagtggcaataattttgctaatgatcaaacacaaaattaattacctttatgtctggatctaacagctgggttcttcaacaactcaaagtcatttgtttcacccttaacaagaaggggaaagaattaagttatgcttttgtttcctgtttagtatcaacagcaagacttttaaccgtactttaacatcagatga

SEQ ID NO: 334578 - DNA, 484 bp, Homo Sapiens
  misc_feature (466)..(466): n is a, c, g, or t
cccaggtcaatgaggcagcaacattaacaaaaagtgagacatacttttttcttgcaagataattcaataattcttcccaaactgatgctccacagataatcctaagaggttttcattacatttagcctaatctggaagatctggcattctacatatcaaaaataactcccaggctgatatgaggccaacccatgagcactcaattccacgcaggggcaatacctcaagcagagagagggcttcaggccaccccacttctggttctttccagtcctagcaggtaaaagaggagatccaggctaaattttctggcccttcaggaaggctgggcacctctggctctccctacctggggaacctccaggggctactggatcagcagggactttgggggttggtttatggacccggattttgtgcaagaagctccatgcttgctggcccaacaaactcctgaatggtctcngcctctctctccttttct

SEQ ID NO: 334579 - DNA, 541 bp, Homo Sapiens
tatgaaccatcctttttagagactataatagtaaagtcatgaaaatcatgttatagaagacaacacaataacatagaaagatttcctagatatattttgaaaagggcaggttatataactgtccagaaatttattttctatgtataatacaatcttaatgtatataaatctacacatatatgcatggaaaaacttgtgtaagaacatactgacattttaacagtatttatctttggatagagtaattgtaaaatgtttacatgtttttctttactctttcatgtatttttgcagagtttctgtgataggaccattttgtttttgagactggattaaaaacaatgtagcagaggccatgggtgcctcacccatattcctcaagctggccctaagttccaagtagctaagagcctggcggttggccctctacctacaaaggattgggagttggagtggctctctctcacagccttcctcagccccaggggacaactctgcagcatgtttcctcacagctttgacagagggccctgggcgtggc

SEQ ID NO: 334580 - DNA, 407 bp, Homo Sapiens
  misc_feature (52)..(107): n is a, c, g, or t
  misc_feature (277)..(277): n is a, c, g, or t
  misc_feature (309)..(309): n is a, c, g, or t
  misc_feature (319)..(319): n is a, c, g, or t
ttttcggtggtggggtggggtcggggggtagcagcattgtctcactctgtgnnnnnnnnnnnnnnnnnnnnnnnnnnnnnnnnnnnnnnnnnnnnnnnnnnnnnnnnttcaagcacctctcccacctcagcctccctagcagctgagactgcaggtgtgcgccaccacacgtgactgggaagccttctggttttaagatggctttagaatgaaaggcagttcctagcacctgtggtcaatcacatctgaccgaacacacccccttttaaaataggangcttctgtttgttccatgaaattaaggcattnggaagaaatngggggcggtgtacacagtttcctgctgagaaggctgattgttctggaccctgacttagcatctgcgggaggttaagcttccgccaagc

SEQ ID NO: 334581 - DNA, 645 bp, Homo Sapiens
tttagttatttgagtatgtaaatgttgtaacaaattatctgagtaatatacccaaaagtataatgcatttggtttcttatatctttctaatatactgggacacatgtagtcattctggttaagccattcctaaggaagaattatgaaataaaaattttttcttatcactctactattcaagagtctccactgaagcactctacttaactgtgttatatcctctttaaagcaccctatgtctgatgtattattccagaatttacagcagaagctctcttaacagatctttacctaacagatttgatagattaacagactctccttttcctctgtaaaacatactgaatgttgctcacggggtgctacacgcttgtggttgctcaggtactctgttaagcctgcgcccttctacttccatcggttaggctgttttgcttactatatccattgggtttgttgctaaacttatttatgctagttttctatgttgtaattataatttactttatgtaaagagacaaagtaagtgcccactaccaagaggtttattacttatttgaaaatcaggtaaatgctttgaaaagcctctaaaaaggagacgcatacctccgacaaataaggctgatttatgtggaggtaagacag

SEQ ID NO: 334582 - DNA, 446 bp, Homo Sapiens
  misc_feature (412)..(412): n is a, c, g, or t
gcacagttgattttggacagctgctgtttattaggaaagggctccaggtggcaaaggtgcacacttcctcagacacaggtgagaagatgcagcaccttccacaggtgaatgggacggattcgaagtgagcaaagggattcacaaattatgtatttatttgttttcatagttaagtagctgaagctcagaggctttcagcaacagagatgaaagtgtggctttttagttttgtgaatggatgatcacaaagaaaaagcatttttaaaaagttggcaaacgctgaaacgcactgtggtatgaagcgcattgcatttccatagcactgaagtaccagtttccattcctgggctgagattgtttttcccgtggttgtattgttctgatttcacgtacaccagagtaactgattttnttttgtttgttttcttgtggagttaacaccaaat

SEQ ID NO: 334583 - DNA, 173 bp, Homo Sapiens
tttttttgtttattgtcatttcagggagggttaaggggaaatttctaaacacttgtgtctgtaattttcagactcttttcacaaatactgaagcatgacagagtcgtttacacaaacgagacagaaaaatatgtgaggggcctaaggctcaagataattataattctgacatt

SEQ ID NO: 334584 - DNA, 463 bp, Homo Sapiens
  misc_feature (417)..(417): n is a, c, g, or t
  misc_feature (427)..(427): n is a, c, g, or t
  misc_feature (446)..(446): n is a, c, g, or t
agctagtatcttttattgtcagaacttctgtgagccaacaaacagttttgcatggttgtacccaaagggacaaggcaaatttcttttttcgtgtgggtagacttagttggcccaagtccttaaaacttttccatataaaaataaaaagtccaagaccagattatttttcttctggtcataaatgctgatttatttacaggtgccttgttcagaccaccattataaacttgggataaaatatgtgtgtattaaagcctcagcatttaatgtcagggtcctttgaagattcactcaagtgttaagacgttttctggaatgcagcgtctctcccccatagtcaacatggttattatatctgtaatctatccagaatgatagaagctaaccttccaagtaacactttgtttttttaacttnaatcctttangacatggaaaagactcccnaaatggactttcattct

SEQ ID NO: 334585 - DNA, 219 bp, Homo Sapiens
tttttttgatgtgggataggcccaagagaattttcagggattctcaaccaattgcttcaggtcctggggaaagtgttgcttcaaacaggcccgaagagaaaagcagtattgggaattttacaactacttttatgtgcattaatggatactgctgtgaagaacaaggccagagagagctaataaaattagtttctccattaacctgcctagaccacattg

SEQ ID NO: 334586 - DNA, 457 bp, Homo Sapiens
ggagtgggaggggaaatctgccattttaacaaggacctccagattattcagaaaccccaatgtttcagagctacttctttactctgtaatatcttctacatgagaattttaatttatttgtatattaaaaggtgcctttaaaactaaatccgatcagcaatcatcaaatgagtatacttgacaacacttagtctgctttttcccctaatatgttatggaagatgggataaacgtagttaacatagactgttccgactataaacaaagccaatttaagtttgattggaattatatttttggaaatatatttgaaacatatttgaatactttgacttacaggaaaattaaatataacctctaaataacaggaatatcatatctgaatttttatgttatcttttatcataatattccttgggattacctactgaagacagtgattggaattttgaaaggc

SEQ ID NO: 334587 - DNA, 708 bp, Homo Sapiens
  misc_feature (181)..(181): n is a, c, g, or t
ggcacgagccagtagatctgttggctgcaaatgacagtgaacttggaaatggctcattctcacaggagtcagtcaccaaaactcaagtcatgcagagagatctggcttccacagaaaagttctgaagataccgtggcaatatatttaaagcaagccactagcccctgaatggggttaaatnggttctccctttaaaagaaaaacatttatataaatgtatagtttgcctgtgttggtttattgttttcaatgatcatttctttacgtcacacttttataacaggtaggatggactaggaaagccccaattatgagtagactattgcagcagtccagcagcagcccggatggggtcatggatggggacatggatgaggctggagccgaggctgggtgactgggggcccagtgattctgttgatggacacagggaaggctggttccacaccactgggtttcaacactaacagttcaccacaatcacttaggtaccttttaaaagatattaatgtctgtgccttacctaagaccagttaaaacaaaacatttcgtaagtagtctagaagagaaatgaaaataaaaaatcagaaaaatgagttttcccttctcagtttttgtcacatcaagagttgaccaaacagtcttgtatctataatttaatgtttagttaatgttacatttttggattaaaggattttgccacgttgt

SEQ ID NO: 334588 - DNA, 462 bp, Homo Sapiens
ttccattttgatggtcgtttgtatacattctgctaaaaatcatgtatgaaaagttttcatttttggttgaaagaggggccacttaaactttgccatgctcaaatgtgtaaagccaccctcgtataagggaacatgccaataccgtgcagaactcacgtgacagccatctcctcacggtggcacagtaatagatttagagacctgacagctggggggccggagagagcactgtgtccctctcctcatgttatggatgaggaaactgagacccaccagtggtgagttgagtatctcatggtcacagcatcagtcactgaagatccaagactcaaccaggcctcctaacttcccggaaatattcttttccccaaccctggctacctgtttcatggacttgaaatctggaaaccaatcactgccctgctgacagctcaggattatgattacatgcctcgaatcaca

SEQ ID NO: 334589 - DNA, 425 bp, Homo Sapiens
  misc_feature (68)..(68): n is a, c, g, or t
aaaagaaggtggcatcatccacgcctcccctgcttagcccaagaagtctcttctgggtgggtgtggcncattccaactgacctccccaaatgcacacactggggttgtggtgatgtgaggaacagagaaggagcttcatcctacacaagcgtgtacaaacttcaaatataccgaaatattagtgctgtgtccatgcaatggaatgttattcagcaataaaagggagtgaagttctggtacatcctgcaatatgcatgaacctcgaaaacgatgctaagtgaaagaagccagtcacaaaagaccacacaataggctgggcacggtgctcatgcctgtaatcccagccctttggaggccaaggtgggagaatcacttgaagctaggagttcatgaccagcttgggcaacatagcaagacctcatctc

SEQ ID NO: 334590 - DNA, 476 bp, Homo Sapiens
  misc_feature (110)..(110): n is a, c, g, or t
  misc_feature (191)..(191): n is a, c, g, or t
  misc_feature (341)..(341): n is a, c, g, or t
  misc_feature (442)..(442): n is a, c, g, or t
ctttgatctcaaaagtctgttttatttttttaatagctttgttagtgaatgcatgtgttggcacaggagttgcaatgtcaaatgcctacaggggccaggcacgtgttttnggctcctctcaaaatcctcgaacaggtcagggtcagagtccagttaagtttggaagaatccctagagcaataaaacttgtngtcccatttgggaccttatgggaggagaacacttgtttcacggccagaagttagcagctgtgggggttgaggggtggtagagatgaccatgtgacacaaggtggttgagacagagggtctgagggtccccacccttgctggttccccatnggtttgaacctgaggggacagtttcagaagtttcctgtagcgtccccagtgggggacatggaaagtaggtgagagatgcaagtcaggagcatttccatggncaccctgggtgagaggcaaggtaacgccatcaga

SEQ ID NO: 334591 - DNA, 441 bp, Homo Sapiens
  misc_feature (80)..(80): n is a, c, g, or t
  misc_feature (90)..(90): n is a, c, g, or t
  misc_feature (146)..(146): n is a, c, g, or t
  misc_feature (204)..(204): n is a, c, g, or t
  misc_feature (215)..(215): n is a, c, g, or t
  misc_feature (268)..(268): n is a, c, g, or t
ctgtttcataacacagggagacctggcccaagctcagaggggaaagacccctgggtgttcatggaaaacctttaagcacnagtgagaccnaaatgttagtagatgggggattaaaaagggagaaattcatggagtatgcctagaancaggccttgtatgcagcatccccttcgttgcctagggacttgaagggccaggcttccntgtcattgccntcactcaaatgtagcccaggaagacattagactgatagcactgatcacctccnagacaaaacccctgcacctgcacagtcacatagacttggacaaaagcccatccttactaaggaagacctaacaactatttcttctcacgcccattcttgtccaccgtctttatcaaaaagccaggaaaactgcttcttcagacactttctgagccggctgtattttgaaggac

SEQ ID NO: 334592 - DNA, 491 bp, Homo Sapiens
  misc_feature (113)..(113): n is a, c, g, or t
aatacacaaagtcattccctctccttcaagttcaaacttcctactcggctttctcactcctctatgcctaacttatcctttatgtttatggacatagtataaactatagaaanaagtaggtactaggaccccatggcaagtcattaagttgagccacgatttcatcaaaatgtaaaggtaatagtacctacttctggctattgtggatggaaaaatgagatgatatgcacagaatcaagcaccatacccagtattcaggacgtctcccctcctactgcctgcaaaattaagttttttcctatcttcctagaacttctggcttctacagttattgatctccctgtcaactgcattccatgaaattccctgctaatcctagagtgtatcagacggaaactgaaaaagtgaccatatcagacagcattttcagttttctagaaggcagaaaaacacaaaggggataatttgatggctgcttgccagaaagtagc

SEQ ID NO: 334593 - DNA, 591 bp, Homo Sapiens
  misc_feature (556)..(556): n is a, c, g, or t
atgtcctgagacagcagagataagtccttttaattatgtgtttgaaaaatgtcacaagtcaaaaaaggaacacaaggcaggctccggctccctccacccccgtgagtagcccttgtccatttcagccttgcactcagaaagaccccgggggtcttcgtacgttccacgtgcttcatgtttcgtggtatctgtcagagccttaaaacaggcccacccactactgtgaaatttcaaggaaataactgattcagttaaataacagtcccaaggtagacctggtctcacaggtgaccacccgcttaaatccagagccttcttttctgtccaaagccactgaaatttgatctcctccttcacacattcccaggtccccaatatgccacccaccttctgacaggtggctacaggtctacactaatggaagctctgctaaaaacatctccacccaaccctcctgccaacgaggtcagctggcaggcatctgctaagcccctaaactggtcagcgcaggttatgcgccattccgagacccaaacaatactccaggacttcgganctcctcctcgagaggcaacggagagaatgctctta

SEQ ID NO: 334594 - DNA, 444 bp, Homo Sapiens
  misc_feature (417)..(417): n is a, c, g, or t
  misc_feature (419)..(419): n is a, c, g, or t
tgtcagatttaaaaactccctctccttttctgtaggtactttcaagttgtgtaatctagaaaggtgttctgaaagtaaaatgtcacacaattctcctgctggaggtttttctggaacttcaggcagacaaaaaaccacccaggagtgaacttcagcaaaactgaactggcctgttagggtcagtgtattcatgggtctgtcatgatcaataaagtgagttctttgatggagtgaaagaggtttgatgtggtactggcggacctgacaggttttgggttgaattcttggagtcacatatgcttgtacgtgtccatactggccttcaattgagcgaatcttgagttccagccttgtagtatctgcctggcaccgataagtggcaagaaggaagttgtcgtttgactcagaatcacagcntntaaagctaacaacagcagaattttc

SEQ ID NO: 334595 - DNA, 458 bp, Homo Sapiens
  misc_feature (363)..(363): n is a, c, g, or t
  misc_feature (418)..(418): n is a, c, g, or t
actgtatatcctttattaaattttgccttaaaaattttaaatgctgcatttttataattcacaatagcaacaaaacatgacaattatttgtgtgaaatacagtctaagctctaaaggttcatagattacattcattttataccaggtttgttcatatatatagattaattcatcacagtatacttatttcttaatatacttgcattttatcaagtaaaagaattaaatattaaaagtagcttgacaaaatacagaaatattctgtgcaataaattttgttgtcaactgattcagtgactggttcatgaatcatgactgatgtaatctttttatctttctgcccagcttctcttacatgatccntggggaaatagccagttgaaaagaaatatgggccaggtattccagaatgggtccnctaaccatagagtccttccaagatggtgcagggtgccttt

SEQ ID NO: 334596 - DNA, 648 bp, Homo Sapiens
  misc_feature (211)..(211): n is a, c, g, or t
tacaaccgtgcccggcccaaagatattttagacaaacaagaactcgagagaatttatcttcagcagacctgcactaaagaaaatactaaaaattatttcagctgtaacacagagatgcagaaaataataaagagcaatggaaaaaatcacttttgagtaaacctacataaccatcatatttaacaaataagacattttattttaaaaaatngaaaaaatcttgtaagggttttaaaaataaagaatattctccctaaccataccctagaatgtcagtagccatctcactttcaagacaattattaggttgaccagaacagaaatccagtaaactaactatgagatcattccaaatgtgaatcctatccccctaagattagtttgctttcaatggatatttgatttcttttccaactttggatattatttacccagaaagatatcactattcttttggagtgggtgtatgtctatatctatatatatgtctttgcatattctttcccttatgtgaaataagtttttagaacagaggatgctgatcgaaaaaaatgtgtccattttctgttttgctctgtactggcaaactaacagaacttttaaaagtaatccttctatcctccaattattttaaaatgtatttatttt

SEQ ID NO: 334597 - DNA, 510 bp, Homo Sapiens
  misc_feature (435)..(435): n is a, c, g, or t
  misc_feature (480)..(480): n is a, c, g, or t
  misc_feature (498)..(498): n is a, c, g, or t
cagaaatacagctttatgcagagacaggaagcagttagtggtagggctttattttgggaggattagagtggtagggggtggggcatggggagaaattgctttctgcagtgtcagatgaatgagttataggaaatgatagctcagccagcagcttggtgcttgctagtgagtcagcagtgattccatcctcagccccagtgctgggatcacagctgagagacactcttcctggtgagggctcctccccgccctgctgtctgggacatggatgttctgcttacctgatgtgaaccattcagttacctgtcatggaggagaaagagacacagaacgatctttttgttttaatgcagatgtttctacacttctttgggattaattgggtatttctaattatttttcctgatatccagcagaaagattcggtgattttcnaatctagaggatgatatttggggactgggtgtcaaagcaggatcnaagttcttaaagcaacanttttataccttt

SEQ ID NO: 334598 - DNA, 513 bp, Homo Sapiens
  misc_feature (88)..(193): n is a, c, g, or t
  misc_feature (391)..(431): n is a, c, g, or t
cggttttatctgttgttatttttttgttgtttaattgaaatggggtctattccacacctgccccctgcactgcagtggctattcacannnnnnnnnnnnnnnnnnnnnnnnnnnnnnnnnnnnnnnnnnnnnnnnnnnnnnnnnnnnnnnnnnnnnnnnnnnnnnnnnnnnnnnnnnnnnnnnnnnnnnnnnntaaaaaaaattcattacagcactaattcagtggagagaaataaatcaatactcattaaatctaatgagagagtgtctgtgcactatttgtaagtattcttaaatgactaaatgaaaaagatgaaaagtaaatatcccaaacagctaacagtagatgcatatcctctgggtgccgaggtaagagtggatgtatgaatgnnnnnnnnnnnnnnnnnnnnnnnnnnnnnnnnnnnnnnnnnctttctacaaatgtggcagataaacatggagaccaacactcacatctacaggcatttcactcacccccaaacctctctacga

SEQ ID NO: 334599 - DNA, 1075 bp, Homo Sapiens
  misc_feature (211)..(211): n is a, c, g, or t
  misc_feature (351)..(351): n is a, c, g, or t
  misc_feature (753)..(753): n is a, c, g, or t
  misc_feature (823)..(823): n is a, c, g, or t
acatttccaaaccccaaagcctaaactgtccaggaaaagattctagctttgtgggctgagtttattttgcttctggttataaacaaatgtagtgtatacacacatctgtccaagaaatcttgcacaaggtggattttacatggggtatcatgcacaagattaaaaacaagaccaaaaggtggaaattttaaaagaggaaaatataaaggcnccaaggtttaactgctctgggtagaagagatcacatctgttgactgaggatcacagaaaggcccaaaacgtccataaatatccttggctcgtactgcaaagtagtatttgctaccagatacaaactgggtgagagtaacnatgccatgggcaagggaagtgccttgacttccccaatctttttccattgtgagggcacagtggcactgggttcctcatggtaagcatagagatggtagctatcaacagtggcacagcttcgatccacctccaggacactccatgaccagtactatgcccattttgactctgaacgcgtgctaacttcaagtgtggcttctgaggcagagatgtgctggcagcttctgggggcagacgctgtggttgtggagcttctggtaagggtgctgggtgcacggggcgtgggggctcagtatgcacttgtggtggtcggtgatgcactgtgagctgaggtcctgttgatcccagggttagtccattgtttacaacatatgtggttgtttgaggcactcgaactgtaanactattttggggattgacctgccgaacagcaggagcctgcataacagttcctcgcaagggagcctgagcntggtggtgcaggaagagttgtataaaccacctggtggtttgcaggagctcttggtacagggagtcttgtggtcacctgagttactggacgatgtgttacattcacggtagttggagctgtaggtagtaagtgtatggtggtctgagatggtccacttgttggcaccccagatggttgaagaggcggtgctggttgtatgggttgcaatggtcgtgacacaggctgagaagaactcatggttgatacaggagt

SEQ ID NO: 334600 - DNA, 576 bp, Homo Sapiens
tcggtgcgtttggtttgcttttttgggacttgcctgtgctcaaagcccagtgtctcatggcagaaacaagcaggaccgggctttgtctcttgggcccagtactgtaagagctgagtttcctttcctcagcacttaagaccatggttagctatggatgtagtaggacctcggaggtccccactctctcatctctgggacttgatacttcctcattagtttaagatatgtttgcatgagttgctagactattcatattacatattagctattacatatcctcaagatgaattcagaaccagaatcttcttttaaaaatttgactacggagttaaggaggcaggagaagtttttattttcttgcctactgttttgctagagaattagcattgaaagttctggtgctatgggttctctctggccgcacacacagaggccgttgggaggggcttctgaaaactccctgtgcatgcctgatgagttccctgctggcgacccagggaccacactttgagaaccactgttctagtataaaccagacatttaaaactccacttttaatccggtgaccggtaattg

SEQ ID NO: 334601 - DNA, 526 bp, Homo Sapiens
  misc_feature (348)..(348): n is a, c, g, or t
cttcacgttctttcttccttctttcttctctttcccgaatctgctgctgcaaacctcttggtaagactgaagtgactgtttggaaggtttcggtttatcttcaaaaatcaatcctgaatttatcacttgatcacttgtaatcttcagttcattctgtccaaccgtattcacaacaggttgtgctagttggtgggtgacaggagcactaacataagctgcaggctgtacgcccatcattcctgaaccataataagcaagactgggatcgaaagtattcctggacccataaaaatagtatgcatcatcataaggagttcgatagttagtagccaaaggtggtagtagggngaggtggaggcagaggtgcaatcctgggagacaccatttcaccaaggggcgctggctggagtccactgcgcaaatcttcattttgagaaggaacagggatgaactgatggggatgggtgggacagatgggggcagataaaggcgggagaggtgtctggaaagctattctgggtctttc

SEQ ID NO: 334602 - DNA, 628 bp, Homo Sapiens
  misc_feature (285)..(285): n is a, c, g, or t
  misc_feature (374)..(374): n is a, c, g, or t
ggagatggagagaatatatttctctgttctttaccaagggttcaagaaaggcccatgcttgggccatgagtcagcccttagacaccgcagcattatattgtccatagggtatgaggatgtttccaattgtcaaatgtgtttttggcttctggggactggctgaaatctgcatcataccttggccaggctacacataggttgctgtcactctcctgtcaacaactgccatctgctatccagaggacagctgcttgggaaatgagggccccattaacattccgagtnctctctggctctagaccttgataaaaccagagcattgtacgtgtgaatgtggacaattccctctccattcctgttattgctgctgagcntggtcgtaaggaaaccgagtgagaagggaatgcaacagaagaaaaagaccaaagacctgggtttcagggctgggaaagaaagcaagacagaatggaggaaatgaggcctgcaggacatggcgtctcaaatgtttgcgttgcctttaaagtagcctgtcacagctgccttccacgactcttcaatgccctcatcccttctccagatagaaatggagcagctcttcttggaggccaggcttcagctgatagcaagt

SEQ ID NO: 334603 - DNA, 362 bp, Homo Sapiens
tgtgacctggctcagcacctggccggccagcatctggcaaaggcgctggtggtgaaggcgctgaaggcctttgtgcgggacccagcccccaccaagccgctggtcctctccctgcacggctggaccggcaccggcaaatcctatgtcagctccctgctggcgcactacctcttccagggcggcctccgaagcccccagcgtgcaccacttttctcccgtcctccacttcccccaccccaggcacatcgagcgctacaagaatggatctgaagagctgggtccaagggaacctcactgcctgtggcgctccctcttcctcttcgaatgagatggacaagattgcccccaggccttatggaaag

SEQ ID NO: 334604 - DNA, 328 bp, Homo Sapiens
  misc_feature (20)..(20): n is a, c, g, or t
actggaagaatattataganaacttggaattcatccataatacaaatatgaagctaaactattaagagtagatggaatcaacaatgaaactagtattttgaaggcagagatcggacataagatatcctaaattcagcctacaaaagcggtacgtctagaaacatctcagataaggaaatacacagggcctttgtaattttttaaaataaaagtttaaaaggcttcattactactttggtactgtgagttgaatatcccctgtttcaaaaatccaaaatgcagctgggtgctacttgagggactgaggcgggaggatcagttgagccat

SEQ ID NO: 334605 - DNA, 541 bp, Homo Sapiens
  misc_feature (135)..(135): n is a, c, g, or t
  misc_feature (140)..(140): n is a, c, g, or t
  misc_feature (239)..(248): n is a, c, g, or t
  misc_feature (437)..(437): n is a, c, g, or t
gagccactgtgtccagcctagaacttccttgttagactccttgtttcctgtatcgtcattttatcccctttatggattcactttcttgttttactgaagcacatcctctggtagcttctttgaaaagatcacatnggaanggcaaatttttttgagtcattgcatctcatgatagtgtcttttttctttccttacatttgggtttatagtttcggctgaatatataattctaggtaaannnnnnnnnncccacagaattttgaaggcttgctctattgtcgtaggaatatagttacacagagagacactttctgttgggcacaatttgacttaaggaagccacttaaagctggggctggagtggccatatttaggatatgccaaagtagtaatggagcagggggagcatgcatagagtgaaagacagatgcagagancagaggccttgctgcttcacagtttgaaacggtaactgttttgcgtcctgtcccctttctagtttctgattccaggagctagaactcatgagggccagctgtac

SEQ ID NO: 334606 - DNA, 439 bp, Homo Sapiens
  misc_feature (428)..(428): n is a, c, g, or t
ggcacgaggttgggggaaagcagaagtcaagccagccgcggccccacacagccccgacccgctcaaccgacttgtcccttaaatgtgtcttggatcccgcagtgatgacgtgagccagccaggcccgaaagggtgcaggccagtgcagagaagcttcccaggggattcctgggttcccccgaaagacaagcgaggtcattgcagttcacccgatgttgctcctgtcccgtgcgtcccggggaggctgtccttggtccgtagctgctcgttgcagcccctcccctgctggcggttacgatgcgtggggtccccctccccgcccaagccccgggcacgtcgccgtgtcccgcctgtgcctgtgacgtccctgtggacctgtgagccatccccccccttatctctgctctgaatactgcatgaagcattanacgtgcaatga

SEQ ID NO: 334607 - DNA, 567 bp, Homo Sapiens
ggaaacaaggatttgaaatcttgggactagagttatagagatttattaatgtagtgtagccatgtttgggaaaaaaatggagttggaggtccagaggtctgtttgcattgaatcctggcttaactaaaaatacattaggtgtgtcccagtttacaaaatagcttagaaatgagatcttttaagaaactctatacaccatggaataatatacagccatagaaaagaatgagatcatgtcctttgcagggacatggctggagctggaggccgttatccttagcaacctagtgtaggagcagaaaaccaaatgctgccgtgttctccctttatgggtgggagctgaatgatgagaacacatggacacatagaagggaacagcacacactgccgcttgtggaagggtggaggatgggaagagggagaagatcaggaagaataatggatacttattcttcctgaatcacccagggtgatgaaataatatatacaacaaacccgcatgacacatgtttacctatgtaataaacctgcactaccctgctagttgtactcctgaacttacaagtt

SEQ ID NO: 334608 - DNA, 712 bp, Homo Sapiens
  misc_feature (55)..(55): n is a, c, g, or t
  misc_feature (154)..(154): n is a, c, g, or t
  misc_feature (226)..(226): n is a, c, g, or t
  misc_feature (253)..(253): n is a, c, g, or t
  misc_feature (674)..(674): n is a, c, g, or t
atcccgacaaagatgcctttattgggcgacagaagcggggtggggcgctacgggnggtgcacggcgggccggtaccacgcggactctcggcgctgtgcgacacgtgtatttgaactctttctcctgcatcgcgctgtccaggtagcggcgtacncaaagactccgcggggatgggcgcctggcggaagtgcgcgcacaccgtgtcgacgatgtgcagcttgggcangaggctgcagtcggccagcgtgacctngtcgccgtccaggaagcggcggcgggaacttcgcgcagcttcggctcccccgccagctcgtgcttccaggggcgcgcgcaggtagctgtccagcctggcgagggcgcgcagcagcttgctggtacagggcttcgtcctgcgcgggcaccgggttcttgatgaacgcggagaacttgtggaaaacgtcgttgccggcggtgttggactccctgtaacgaggcgccaggctggggaagtcgggcggccccagcgtctcctccagaaagtcctcgatctgcagcgtgtctgtcttggcgtcgctgtcatagagcaggatgggcagctgcgagccgggggcgaagtccttcagcacgtccggggacctgcgcgtgtccaccgtggtgagggtgaaaggtacgcccttgaggagcaggaccatganagaccgctggcaggaggggcagtgacccacgctctccc

SEQ ID NO: 334609 - DNA, 319 bp, Homo Sapiens
tcatgttcacagcacatcccagtgtgaactagtcacaatgcaagtgttcagtgcgacaagtggctagtgacaactgtattggaacccatagctccagactctgttcaattatctgtgctatcctctcgaggtactccttcctcagaaggagcctagacctgggagggagatgcttgggcaacaatcctgctttgggtgaaaagctaagtccctgccacttatcaagcttccagaacacccacacctttagcacagcacaacctgctgcccccatttaacttaacaggtgttttgccacttgccaggaaggttcaatttg

SEQ ID NO: 334610 - DNA, 331 bp, Homo Sapiens
  misc_feature (281)..(281): n is a, c, g, or t
  misc_feature (284)..(284): n is a, c, g, or t
cttgttcctctgactggatactctcaatttacctgtttcaagtcttctcattctttctttggtctgttcaaatcttctgttaagcccctctagtaattttttcttttagttattctacttttcaattccaaaatttctatttcggtcccattttataatttatatctctttattggtattcactatttggtgaggtattgctctcataacttaactctttagacttagtttcagctttttgaatatatttacaatagctgatttaaacgtctttgtctagnaangaactcgttttcactttgctcactttctcaaagacagttactgttga

SEQ ID NO: 334611 - DNA, 429 bp, Homo Sapiens
  misc_feature (51)..(51): n is a, c, g, or t
gcgcccggcccgctagttcattcttaaattattcaaattaactaaaaggcnaaatcaggatgctttctagataattttttgtattataaaaccaaggaaggtaaacagtgctaggtttaagcaatttggctgacgttaacagatttttcccaaacaagagcacactgcagccatgtatttctcaaaacatctattactattgcatgtcatccatcagcataaacaaatggaagttcaaaaaatagggctgaaacaagacagctttggtaagaattaatatttaaatgtcttcctcagtgtcgtgtcatcaggaatcccagctgaggcccagagacaacctcatggcctttaaatctaaacaacatagaaacataagccttcactatctcttattagttatttgagatctactatttactccataaacta

SEQ ID NO: 334612 - DNA, 317 bp, Homo Sapiens
cacctttggggaaaagggatatagtggaagagctctcagccctgaagcagctcacacagaccacacacacagacaaagtaccaggagatgaggataaaggcatcaacgtgttcagggaaactgcaaaacagaaactggacccagcagcaagtgtaactggtagcaagaggcagccaagaactcctaagggaaaagcccaacccctagaagacttggctggcttgaaagagctcttccagacaccaatatgcactgacaagcccacgactcatgagaaaactaccaaaatacccattacaatctccagcatcccccct

SEQ ID NO: 334613 - DNA, 814 bp, Homo Sapiens
  misc_feature (476)..(476): n is a, c, g, or t
  misc_feature (505)..(505): n is a, c, g, or t
  misc_feature (535)..(535): n is a, c, g, or t
  misc_feature (627)..(627): n is a, c, g, or t
  misc_feature (695)..(695): n is a, c, g, or t
  misc_feature (780)..(780): n is a, c, g, or t
tgtattccttaattctaaagcaattagtatcttcatcatgattttgcaattgtcttctgttcttctattagtttcataaagaattgtcattctgaagacatagggcagaaacactggtttatgtcaaataatgcagtatacctaaacctcacacaaaaagcatctgctgacatagaagaaacggactttctatatgctcagatttaaactgcaatctgatttccagcactaaatttgtaatactgggtgttacttataacctctcaaattttagattccagagatgtatatgtttttaaataaccacagataccaacaggatcattattgaaattgaatactgaaatttcataggcctggatccacagtcattgcaaaatggttaccatgggcatatagtgatgggcgactgggattcatttttatttatcactccattctcatgacctagagtaataactggtatatgctatgtnactaataaatattggctgtgtgaaatacntggctgtgttaaatattggctgtgtgacanttttgcatgagtagtcaccactgcacacaggggctctccgtatttcctcgctaataatgactgagcatctctggttcacaggtcctcctccntctcttcagcttctttagccttttcctttaggttcagctggctccctgaacccagagaacaatccttncctgaagctctctactcaaaacagtcaaccttaacctcgtcctcacttttactcactcttcaaatggtccaatccagtttcctanctggatgctccattgactgcaaatatcgactcca

SEQ ID NO: 334614 - DNA, 604 bp, Homo Sapiens
  misc_feature (218)..(218): n is a, c, g, or t
  misc_feature (234)..(234): n is a, c, g, or t
  misc_feature (286)..(286): n is a, c, g, or t
  misc_feature (485)..(485): n is a, c, g, or t
  misc_feature (515)..(515): n is a, c, g, or t
  misc_feature (538)..(538): n is a, c, g, or t
  misc_feature (548)..(548): n is a, c, g, or t
acaaacactatctggtaacagttttaccggttacaactgggaaggcatctggaagaaggtcccctctttgtctttctctctcccctgtctcaatgaagctccgagctctgcaggcggacattcccacacagtgctggttttcgaaaggtagtcaagacacagtcgcccgttcaggacgggtctccacagtcctgcccctgggccctccccgttacaanggcctttttgtgaggngctgctacgcaaactctctttcccccgcctctgccgtaccacaaagtccttnctcagttagaaagagagattggggcggtcaagtgtttggggctggggatggcattggtcacgtctctgcccacggttctgtttcctagctgggggaggctgggctggggcagggtccttccctttggttttccctacggtggcagtcaccgagaagagccctgtcccggtggctggcccgcccatggtgtttggggtcnggggtggtgtgactccagagcaaggtgganaccgaaggaagggcaaggagtantccttgtcangtgggttcggcctccccggaagctgagccttcctctcgtgcgaatcttgggctcaa

SEQ ID NO: 334615 - DNA, 199 bp, Homo Sapiens
cacacctggccatattttcctgtttctttgcatgtcttataatttactggaaattggacattttagataacatattgtaacaatgtgggtactagcccactctccccctaccacccctgaccaactgggcttgttattgttatctgcttgtttactaactgactggattattttaatgaaatttgttaccctcttctcc

SEQ ID NO: 334616 - DNA, 553 bp, Homo Sapiens
  misc_feature (54)..(54): n is a, c, g, or t
  misc_feature (140)..(140): n is a, c, g, or t
  misc_feature (478)..(478): n is a, c, g, or t
atgagccaccgcacccagcctcagattttattaatactacaccactgccctctngttttatggatgtggatgtccatagaaatagcatgagtggaattcaaaaccccaatcagacttgtgccttccaggtaaggacaacntgaatacatcatcatagaggcccacgacattcttgtcttacagtgccaggacttgggacccaaagcaaagatgaatgactccagcacaggaagccaccgaagtcttggtaaatgagcctgtcagtcaaggggcaaagaaaactccagggcacatataaactcaggacaccagattctggccagtcctggcaaataggctacataacctcctaaatgctccacttgggggatgcaattaagcatttccctacagtaggcacctttctgggtatggcatggcaatgtaggtccttaccacagattaggaggtagatgtaacataaattttaggggactcngcagatgacctgtggttacatacttgagattccctgaatgtatctcatcaaatgatgcgcatttatagtcaagag

SEQ ID NO: 334617 - DNA, 523 bp, Homo Sapiens
  misc_feature (81)..(81): n is a, c, g, or t
  misc_feature (96)..(96): n is a, c, g, or t
  misc_feature (98)..(98): n is a, c, g, or t
  misc_feature (126)..(126): n is a, c, g, or t
  misc_feature (135)..(136): n is a, c, g, or t
  misc_feature (139)..(139): n is a, c, g, or t
  misc_feature (197)..(197): n is a, c, g, or t
  misc_feature (243)..(243): n is a, c, g, or t
  misc_feature (312)..(312): n is a, c, g, or t
gatttttgttatcggaggacgtctctctctctggttggaagtttggtgcttgggtgcatagtcttccagagctgagacagnaaatgtactgtgctnanaaatggccccttgccagatgctcccctnatccttacnntcntgcgaggcagaagtcagaaggtagagattgctggcaaaacttgtgaaagtcccacccntggggtctcaaccccaacatccacttgagggcagccttccctgacngtgtgtgactaggcagtaagggtggcggttgatggcggccgggaaaccgagtttcgaggttcacatggncaagtctggcttctgattctgctgccctgcaaagaaattgtgctccagataactgcaccggtgtctctaatgcctctgattcactctcaggcccctcaaaggcctgcagtgatatcactaaaaggtgaacacacctccattagcacctaacttccaccaggaagcggctgaggcactggggaagcctacgagctctctccacgtcaggtgc

SEQ ID NO: 334618 - DNA, 803 bp, Homo Sapiens
  misc_feature (27)..(27): n is a, c, g, or t
  misc_feature (51)..(51): n is a, c, g, or t
  misc_feature (67)..(67): n is a, c, g, or t
  misc_feature (129)..(182): n is a, c, g, or t
  misc_feature (405)..(405): n is a, c, g, or t
  misc_feature (453)..(453): n is a, c, g, or t
agggtgggttttaccatgttgcccaanctggcgtcgaactcctgggctgangcgatctgcttcccanagtgctaggattacaggtgtgagccaccacgccaggcctaggaggtatctttttgccctcannnnnnnnnnnnnnnnnnnnnnnnnnnnnnnnnnnnnnnnnnnnnnnnnnnnnngacatgacccaattatgtttagataaaacaattctagagtccaaatgatggcatggagagtgtcacaacacgttgccaagatatgaagagatgaggacctgagcaaaggatacaccggtagacacagacaaaagagggcagatggggagatgctggtgaagggaaactgagaggtcaatgagagagtgagtctgaatgggaagaaggcctggacaggaaagangaaggagcagcacaggtggaggacaaaaaggtttctcttagccacttnaaacctttagtttccatcatctggaaaacaggtgtaataatttgtacctatgcttcattcctgtgaggatagaattacggagtggctgggacataataagcactctacaagtagtccaaaagaaaaagcaagaaagttccaaccctgacaacaaaccaggcaccaatgttaccaatcttttgcatttccgtggagctactaacctagttaagatgctaagaaatattcagacattcaaagctctccagattgctcaactatctgcctgtcaactcaatccatgcacaagagccacctcaaaaacagccaacttaaggtataacttaagtctcctctgctgcaaaatctcc

SEQ ID NO: 334619 - DNA, 735 bp, Homo Sapiens
  misc_feature (380)..(380): n is a, c, g, or t
  misc_feature (386)..(386): n is a, c, g, or t
  misc_feature (431)..(431): n is a, c, g, or t
  misc_feature (466)..(466): n is a, c, g, or t
tagccctctccatttatttcatggtctgtttgatgtgaaatccctgccctcagttctgcttagagaaggggtttggtaatttcccatttattccttatagtacataataccttgtcgctacatatgggaaacacctaagacacagctgccatttgcatgaagaatgcacagtgaaaagaggaattggactgcttaatacataatatctctcatttgacatacaaaggtttatggagtgagtgtgtcttatgcactatgcctgatgttcggggaagcacagctcaatgaaacgcaatctttgcctttgatttggttcatagtctggtggggaagtcagatatgaaaacctaaagcccacactgtaataaaaacttaatccntgagcntgtgggccggaggcttgtgagcacgggaggatggggtagcaccantccatttcttgggagaaatcagaggggccttcacntgagcaagtgaacttggaggctacactgaagaaagagtgaatgtttcccagataggaagggaaaaggaggcatttgaagcagagataagtgcaaaggcctgagaacctaaaagaacttagtgccttattgttctcagcctcactgagtacttcctaatttagagccttgcattggctgacccctggggttcctctgcctggggtggtttctccaaccacttcttcgcctccaagtcttggctcatcaagtcctaagcaattctccctat

SEQ ID NO: 334620 - DNA, 536 bp, Homo Sapiens
gctcacctcgggctttgtttgctcagcccaacagcaggtaaaagagaaggccttgcttcatcaagcaatagggagcaagtgtgctcctccaggatctgccctgtgcttgattattcacattcaggaaaagtgccaggactatgccctgcccaggaagcctgaatatctgctttccgatgtctatttgccaaatataatttgttgccatgtcagtttattttcatccgtgcccattaaagagacctttcaacttcccgagttttgggaactcttgttctggtaatgcaaaacacttcaaaacaaaaccccaaacaaaacaaagaagcctctgcactcaagactgcaggatgcatctcaccagctggataagtcaagttaacctaatattatattgactttgatccaataatgggccaaggtgagtctgtctgagaatctgctgggaaatattgaaagtcccctcttcagaccatcctttccagttctgtggctattttcacatgtaagatgcaaggtttcctcgtgccgctcgtgcc

SEQ ID NO: 334621 - DNA, 882 bp, Homo Sapiens
  misc_feature (252)..(252): n is a, c, g, or t
  misc_feature (322)..(322): n is a, c, g, or t
cgttagtgtgggaccgccgacgcggtttacaattccagactgcaagagagggcctattctcccagcccccgcgtggagactctccaaactcacaagacccacccctgtcccacttggtgggtgaggaaccacccacacgagcgccttattttccctacccaacagttacagggccctaatagccatactcaagagaaatcgccaatgttctaattagaaatcttacgatccatttgaagttagtctccactngtagctactatacccacattacatgtttaccagaattgacgtgatggtttctcataggacgcttatgaanaatcacagggccaagcagaccagctaagacaggtgaccatgtgcatcgggtcaggagagtgaggcagggatctgttgactaggaattctgcaagaggcctgcaaaggcagcccccaataactgaacagcgtttatgtacaacaatccatgctgtgtgctatgtatctttatggaatatgccaggattctgttcagaagatggagttttttcccctttgcattgtttgtaaaattggagcagacattacctgctataaacaagataacatttcagaaataagcttgtaaatcaaataatagcaagcaaatgttacacgaggtttttcaaattaatattctgaacagtatggtggcttattgatagaaggataatgatgttggttagactatgaatcctaaactcttaattttctaatcctaaattggtgtcttttcaacagaatttcttgaatcttttgatatgcaaatatgcatgacgacttttgaagaagctctacctttaatttattgaatttatgatggcattaattataaacatttatcattatcatgtaccacta

SEQ ID NO: 334622 - DNA, 992 bp, Homo Sapiens
  misc_feature (489)..(497): n is a, c, g, or t
  misc_feature (702)..(702): n is a, c, g, or t
ccgtaggagagggggcgcccggaaagggcgtcaggggtgcactgtataccgaaaccagagccggaactgttctaacatttacgcgaaaaaagcgtgcgccacaaaagatctctcttgcaacaaccccaagcggccgccttacgaacacgagagacgcaagatcacaagcgtcagtttggcgcagacgcttctaccataaaccagctagtctaaagcttgacccctctaagagcctcatcacatgatctgtgcacactgagcaggctctgtctcgacgcagtagccacagaggacctgcacgaacgcactcgtgctgcaggccacagtcaaggcagctttgtgagatgagaacagcgagcgagcctatagctcaaatcctgtctctaaaccacagccagaaaagaggctgtggacactggccaaacagtgcactaggtttagaaatttccccttttactcagcaaagactaatttgttaaacagctattnnnnnnnnntcagaaaacaaacatttggttccatttcagctgtaatcagcagttggtaatttttggaaaaagagcagttttctcatcttgagttgctcattaagtctgtattttttatcaggcccctgactcctttctttctcactccatggttttttggggaggggggcaagtacagctataggagaaggctgtttgttgatttgagaaaacntgttaaaatgttttgcactcacatacaaaggcatgatggaattcaaaaatgatcccactgatttttatgagaaacatgactgttcctcttgggtgtctcaagtcaaaacaaggcaaccgcctagtgatttatagttcccacattttccgccttccagaaggcattagagaaagggccaacctctgccaggagagattgtaaacacaccactgacagcttggacactttgtttttaaatgcagcagggctttttcctttggccctggctgaaaagccaactccctaggaca

SEQ ID NO: 334623 - DNA, 704 bp, Homo Sapiens
  misc_feature (636)..(636): n is a, c, g, or t
agttgtagctatttagctcactttattggtaaataataattatgctaattagcaacgatagtatgtttaaccaattaatcatcagattaactttcggtcagaataatggacttcaatttttaagtcaaagcaatcgtacaggcgtcccagtcaccatatttcacttctgaattccaagagagaaatggcgttgcgcttactgacgcaaatatgtacctagataaagtaagacgctttcatttcaggtatgtctaacccacgctatccttgctttgttccagggcactctcgcagggaaaacgccgcctctggactacacttggggtggttaagacgagatcttcaaatgaaaattctcaacgctaccgtccacttctctcatacggcttgaattccgaacaccccaatacttggccaaaagactccatttctcatgcttggtcttgcttttgaggtagctctaactcagaggcacgatttttagagcctgggaagtcggctgctgttcagtccttcctagcctcctcaggcgggagccgcggcccactcagtcagttgcggcccactcagtcagttccgccccagccccgactacctgtcgccttgttgggggaaggaaggcagataccgcagccnagtcagggtaagccgctgacccagaggatggaactgcggctctggagattagaaagaggaggacttcg

SEQ ID NO: 334624 - DNA, 345 bp, Homo Sapiens
tttgtatttgacgtgttaaacaaagaaaagttattctagctttggcatcctttaaaataaatagaattttggctttacctctgatctgcctttgagtgtgatgttatatgaagatagtaactcactatgaaaagattagttttgtctttgttctgaaaagacattcctgaagtaattcatattccttaaaatttgccactttgtataacatattcatgtcagaaattgcttttttcctttttagcgtggttctgaaatcttggatataaagcttctctgagttagataagctggaacaactgatacctcagtatcagttgttactgattacagtacattaaatac

SEQ ID NO: 334625 - DNA, 807 bp, Homo Sapiens
  misc_feature (62)..(76): n is a, c, g, or t
  misc_feature (102)..(125): n is a, c, g, or t
  misc_feature (434)..(434): n is a, c, g, or t
atgaaccactgtgcctggcccatggtcacacagggtacatgtgcacacagtaggcactcaannnnnnnnnnnnnnngagatggagtcttactctgtctcagnnnnnnnnnnnnnnnnnnnnnnnntgaagtccagctcataaagacttcatagaaaccttcttcagaccacctgatggaatcaggcctcagatgagcatctcagggcaggcagatgggatgatggaaaaagaccaaagaagaatcaaaagggagggtgatgagaacagggcctttcttctcataagcctgaaaattacacataggttaactgaagaaaatattcttctagtgcgactgaactatctccctctgagaaaccacttcccactaggccccttcgttccgcccctaacaaccccgttctatttattgttcagttttaaatgactgggnagctgctgcctagccatgcccctctagtattgaccaacactgtcaccagcaccccccacacgtaaaccaccaacggaattgaagctcgtggtaagggggcttaacttggaatgtgaactgtcaccagcacaccacacttcctgcgaactctgacagactgtctccattcaagaaaaaatgaaaagactaccttaaggcccggtgggtaaccacccgaaagatgaacaagcggaattgcatggtagttaaggagtaggctctggaaccacatcgcaaatcctgcctctaccacttgccagcagtggtaagtggcctgacccttagacagttagggaacctctcagttctgcaatttcctcatctgtgagatgga

SEQ ID NO: 334626 - DNA, 455 bp, Homo Sapiens
  misc_feature (343)..(343): n is a, c, g, or t
  misc_feature (355)..(355): n is a, c, g, or t
cattcacatgacattttatgtacatggattaggtagttcttgacaatgttatatgtttactgaaaaatgactttttataaaaataaagcttggaaaataacaaatcaatttagaagactaaaattatccatggatacacagaacagatataggttttcataattaagaacagtattttcaccctctcgtacctctgaccacctctttcctaggcagtcagtatagggcagaaaattataaattaatcaaggatagtgcttcaaggtactggttcccagactgtgatggacataaagaaagagcaatagacgaacaagcattttagtatttgccaaagccttgngtcttcctccancccagaatgggagatgtcctgcccactgaaaaaatgatggggcctcctgttgccagcttctctgcagtggatctcaatccctttgcctcacaagagcatc

SEQ ID NO: 334627 - DNA, 627 bp, Homo Sapiens
  misc_feature (495)..(495): n is a, c, g, or t
  misc_feature (506)..(506): n is a, c, g, or t
tagaaagaaaaattgtgtgaaggctgaaaaggggcttggagttttgtctttgttgattagaaagaaggaagaagtcagctctgagtgtttcaggaagaagagagcaggtagaaagggaatttagtgatttaacacccaagggtccagccatagcaggttggaaaatcctccaaatttggccacagaagctggctaggaaaaaactgccactcattgggccacacgctgggtccccatcagttctcaatgaatggtcattgatttacttagcagagagaagtcaccagccacaaaccaatctttgagtttgcaggccctgattccagaatatatgcatccagctcccgggttctcagctggttttgcccacttccctttggactgtccaatccaaagccagtctctcaagttgtatggctcaaagagcagtgaccacaatgggtcatacagtagggacccacctccacaaattagaaccagagttcagactccatntgggcacatcntgggagggaaggcaacctcctttgtcgtcttgtttggtaccagtcattctcaagtatctctgacacctgtggtgggttcagtttgctgagcctgccacctggtatgaattagattgggtgt

SEQ ID NO: 334628 - DNA, 642 bp, Homo Sapiens
  misc_feature (24)..(24): n is a, c, g, or t
  misc_feature (145)..(209): n is a, c, g, or t
  misc_feature (213)..(226): n is a, c, g, or t
  misc_feature (541)..(586): n is a, c, g, or t
atggtaaaaatagtagggactgcnggagagagaaagagtagtgtcccctgacaagtactagaatgacataggtgccaccattaaacgaaactagctaggatggttactttcgattaacactttgctactcaagagtgtggtctgnnnnnnnnnnnnnnnnnnnnnnnnnnnnnnnnnnnnnnnnnnnnnnnnnnnnnnnnnnnnnnnnntcgnnnnnnnnnnnnnnaacaaactcttcagccaggtttagatgtagctttgtttggaggaagtgtgagattcgttttaggatttctccaaggagttccagccttcaatcagtgaccatggggatctggcaggagggcttgaatttctagctgattcttctattctgtcttaccctcctgtcttccatcatttctgcattgctaatctctatccctggagaaatctatggaactgctggttattactgtagaaagtaacatagttgccaatagtacgactttgtggatgtcacagtcaaaactcaactgcctggctggcacagtggctcacnnnnnnnnnnnnnnnnnnnnnnnnnnnnnnnnnnnnnnnnnnnnnncctttgagctcaggagttcgggactagcctgggcaacatagcaagaccctgtctct

SEQ ID NO: 334629 - DNA, 697 bp, Homo Sapiens
  misc_feature (658)..(658): n is a, c, g, or t
aacaatcagctcttgtgggaactaataaagcaagaactcactcactacagcaaggatgacactaagccattcacaagagatctgcccccatgacccaaacaccccctgttaagcctcacctccaacactagggatcaaatttcaacatgaagtttggaggggacaaacatccaaactatagcagcttctatggaaccatcctgaccctaaattccaaattcaaatgctaatgttatcatttgttccatttaattcagccatcctagcacaggtctggcacatgtctggggacaggaatacaggctggatggaaaggcctctttcaattcccaccttggaaatacttaggtgttagtgcttatccttgaccaggaaatggaagagaagacgatattgggatctctcttgagagaggaaaaaagacaacttttagaagtactgaatgctgtgagccttcagacaaagaactcgtaccccattaaggcatcctgaaggagacttaaaatgtgagtagagttttaaggtggtagggctggggtttagtgaagcaatgcaggagtgaagaagagagcaatgcaagcagagtgaatagtgtgagccacagttagaggtcaaatgtgaggccatcacagaccgggcactgggaaggagggcgccnaatcaagccacctcttgctcactctctcattagctcatt

SEQ ID NO: 334630 - DNA, 524 bp, Homo Sapiens
  misc_feature (422)..(422): n is a, c, g, or t
  misc_feature (445)..(445): n is a, c, g, or t
  misc_feature (453)..(453): n is a, c, g, or t
  misc_feature (461)..(461): n is a, c, g, or t
  misc_feature (477)..(477): n is a, c, g, or t
  misc_feature (491)..(491): n is a, c, g, or t
  misc_feature (499)..(499): n is a, c, g, or t
tccaaaattacatgttttattttcatgtttgtaaaacgaagagcttttttctggatggttttcttatcagcttttcacacaacagtcaagtaaacctcgtggcactagccagaaatcgttgcaactttggaacttccaagacaatctgggcctctatcaatgggcagacagcgaccctcactttgcatcttcagagctgctccactgtgccactgaagacagcgccattgttcctgcgggaaatcggtatttaagcattctcgcagaaatgtcacactccaaggcgtttttccacacaaaacccttccccttcattaatccgaattgcacacaacgccgccttcgaacaagctcagtttcaatacagggtccgaggcttcccattttaaaacaacgccgacggaagggcttcggccattttnagtaaagggccctttggctcttnaaactaanccttcggncccaatttaaggtggnttttccgccgccgntcaagganatgccggaggaagcaaagttcggcg

SEQ ID NO: 334631 - DNA, 638 bp, Homo Sapiens
  misc_feature (101)..(101): n is a, c, g, or t
  misc_feature (109)..(109): n is a, c, g, or t
  misc_feature (432)..(432): n is a, c, g, or t
aagaaacaaagatcagttaaattttattgggagccggggtggaggtcgggccgaacagaagcgtcgggcagcggaggccgcggtgttgcccctaactcctnggtccttnggcgtcgccgtgcttgatgacgtagcagatgtttttgtagtcgacgttgccgcccacgtcgggggggaaggccgcccacatgttcttgatctcctcctgggagaagcggtcacactgcgtggtcagcagctcctccaggaacttcttcttgatggtgccctttccctcagggtccaagaccttgaaggctccggtgatcacatcctcagggtcggcacccttgagcttctccccgaacatggtcaggaagacggtgaagttgatgggaccgctggcttccttcatcatggcatccaactcctcattcttcacattgaggcggnccatggctgcggaaggtgtcccggaaggtcctccttgtctataataccatcacggttctggtcgatcacagtgaaggcctctttgaactcctggatctgagtctggtcgaacatggagaagacgctggagttccgccctctactgtccttctcttggccctcttgggtgccatgtcttcagtctccggggggcaaggcaagcggct

SEQ ID NO: 334632 - DNA, 641 bp, Homo Sapiens
cctctcaagcgtttcagggagtttgtacagcccctcacccctgcaccctacacaacataaaagttttgggatgggtgagaagtctgccttattttgtatgctaggagaagggggactggaatactagcagaccatagacacattcccaggtaggtcaattttacggagtgcaaatggaagctgagactcagaaattggtcctttcaagctgttcctgcccatgtacatcatagaaattcttcaagttcccccaagggtacacatcgcaatttgaccaccattggagaggaggtgctatgccattttggggaaatgctttaaacaggaaacagtgcatgtgattaaataaaccctattcagaaaggttccagtaagattcagtttctggcttcttaggctacactcaacacggaaagccatcagaaactagggtcaaggctcaggcaggtctccttgggacaatagaacacatcatgcattgccctgcctcctgcctttgaagtttctcttccctgagaggtggaagacgggtgtcagattgcatggttcgttttagagaacgttattttttctagaataacttcctggtagtgtgtagattgtgtgacagagaacttctaattgtttctctcttcctcata

SEQ ID NO: 334633 - DNA, 768 bp, Homo Sapiens
  misc_feature (45)..(45): n is a, c, g, or t
  misc_feature (83)..(83): n is a, c, g, or t
cctggtctgttatatcactgggcagagtccggggctccagcacangacacctccctccattcacccctttataaagcccttgngccatctggacccccaccatgggtgacgtgtacatctggtgacaggtgtgcctgagagcagctgaaccttcacaaagtctgggagagcagaagcccaggaggcccacccacccctgtggactcgcccacagccccgagccaccagccctccagagctgccaaatcgcccttgcctgatgctcgccaggcaacctcaggctgtgaatcccattctgcaggaacccaggtggggaaaagaaggtcgaataatcagcacaagtgttttccacctgaaaaaggggtagtcccttcccacttccgtcatttactatatcagtatctcatcgtggttttgttttaaaccccgaagaaaatccccatgacaacatggaagtcaccccaccagaaggctctttgaggggcgctcctcaaactgaatgagatcagcagattggaggataacggggtctggtctcagctgaggggacggcaggcacgaggggacaggcgcacacaggaggtcgacgggggagtcgtcggtcaggcggagaagctcctgctctgtgtgactgggccctgggcaaacaaggagggccgtgacaccacaggacctccacgcccacccccagcacacaccctgggctcacacctgaagttttccttctaagccttaaagataagagagtcaagaagtatttaaggtatt

SEQ ID NO: 334634 - DNA, 381 bp, Homo Sapiens
aatttgtaaaggaatgaggtttaattggctcatggttccacaggctgtacaggaagcatggtgctgacatctgctcagcttctggagaggcctctggatacttacaatcatggcagaaggcaaagggggagccagcatatcttacatggcaggaacaggagcaagagagacagaggggaggttcttcacacctttaaacaaccagatctcgtgagaacttactcactatcacgagaatagcaccaagaagatggtgctaaaccatgcatgagaaatccacctccacgatccaatcacctcccacctggccacacctcaaacactggggattacaatttgacatgagattatggtgaggacacagatccaaatcatgtcaat

SEQ ID NO: 334635 - DNA, 556 bp, Homo Sapiens
  misc_feature (47)..(47): n is a, c, g, or t
  misc_feature (68)..(68): n is a, c, g, or t
  misc_feature (93)..(93): n is a, c, g, or t
  misc_feature (140)..(140): n is a, c, g, or t
gtaccaggttaaggttttaagttatgactaccccggaaagatggggnaaagataccccctcttaaaantggatttaggaaagaaacccccaantttagtatctggggaaaggacaccaaccacatttttaaaaaatgtgnagtggcttccccaattaagcttaacgtaaaactttttaagcattgagaattgtttaccataaaatatagtttcttgagaataagttgctctcttttatgtttcagccagaaagtccatgtatatacagattacagcaggtccttgaataatgttgtttcaagataatgttgagaaaaaaaactgtctgtggagtttacacgttctccctatccctgcatgggttttctctgggtactcttgatttcctcccacatcccaaagctgtgcacgtgaggttcactggtgtgtggagctgtgtgtgtaagtgtgagtgctttctgcagtggatgtcctgtccaggactggttccggccttgcaccctaagctgctgagatagctccagccaccccaaccctgaactggaataagtggtaa

SEQ ID NO: 334636 - DNA, 445 bp, Homo Sapiens
  misc_feature (59)..(59): n is a, c, g, or t
  misc_feature (315)..(358): n is a, c, g, or t
  misc_feature (381)..(381): n is a, c, g, or t
  misc_feature (410)..(410): n is a, c, g, or t
  misc_feature (417)..(417): n is a, c, g, or t
  misc_feature (424)..(424): n is a, c, g, or t
ttggtttcttcctcagacctgttccccttttctttcctagtctttctccgcatttccanttaaatgctgtctttcccaatttctctagaggaacctaagagttatcttttctctccttttgcttgtggtgtcccctccagcccccattattttggccttgagtttaagttacattcactgctactgcaatagctcctggccaccaacactttttaaaaatctagaatattgcacaagtttcataaagtatctttatccccttactacccattatcctaagccattctcctcttagcgctaagaatggccttcttnnnnnnnnnnnnnnnnnnnnnnnnnnnnnnnnnnnnnnnnnnnngaaagccaagggaaggcggatcnacgaggtcaggaagatggagacaaacccngtctaanacggtgnaaccctggtctctactaaaaa

SEQ ID NO: 334637 - DNA, 657 bp, Homo Sapiens
  misc_feature (58)..(58): n is a, c, g, or t
  misc_feature (91)..(91): n is a, c, g, or t
  misc_feature (94)..(94): n is a, c, g, or t
  misc_feature (113)..(113): n is a, c, g, or t
  misc_feature (122)..(122): n is a, c, g, or t
  misc_feature (155)..(155): n is a, c, g, or t
  misc_feature (349)..(349): n is a, c, g, or t
gctagatggttagtgcggctctctggaggacttcctttcgagtcagggactgacgcgncgtattttcgtggctacgactggatattctgcncanaagagggtccttgagagcnctggccgtncgtgccgccaaacactcctcaccaccgaatgtnggaaacgtcttccttggagtctagcactccctgccctccctggaatggaatttggttttctgcgcagggtcgcccctttggagcccgtttccaaatgattttaagagggaagggaatctagggaggccgattccaggggcgagggtggaaaacccaggccgggcagccgaggagcggcgtgggcaacgtatganggctcgccgcttcctactgtgagaggcggaaagcgaagcccgggggtgtgccggggcactcggaatgtagacaagtttggtgcccagcgaaaggaagaggtgtggactgaaagtacgaacttgggaagtcatcaacagtagctggtggctggcatcagtggagtgagttgagtctttcagagccatggtctccaaactcgagaatgcaaacctctgagagtgttgcggccaggaacgttttcaggacaccagtgtttatcctatatcctaaaatgttgcctaacgataatacactcttctcccgcttt

SEQ ID NO: 334638 - DNA, 653 bp, Homo Sapiens
  misc_feature (305)..(305): n is a, c, g, or t
  misc_feature (622)..(623): n is a, c, g, or t
gcccaaatgaccaatttattagaggctttgcagggatcaggacactctcaaagcttttctgatatgtcctgaggactctgggcctgagtctactttttaaagccattctggaagagaaaaaaattcagatgcttcataatactaaactttttggaggctcgtgtattctgtggagccccatttgggttcccaggtgcctcctggccctggggactctctgtcttaggaagggtggccccagtacagcagtgaccttgcagctgaagatccctctgtgaagcagtgtgaatctccgatgctgtccntccccttgcacggaggatcacccactttgggaggcagagtagaatcaggttccctcaggctcaggttaggggccaaagtgcttgcgcttggggagctgtggggaccaggacatcttggccagaagggtcaggcccagctttgccaccgcagagtggagcctccctttgaagctgacaggttctgcagaatggcaggaagctgctgcccagcccctctgcaccctgtaaattccaggcttcctcttctccagtatgtgagctgctggcatttgagtctggggagcttagaggcctcccaggatgtacattccttcctnnagtgggcgtggtctgccctagagaatgaag

SEQ ID NO: 334639 - DNA, 430 bp, Homo Sapiens
ggtactcgctacacagctgggtggccctgtctgcagccttcatcctgaaggggcccttctccaagacggcgtgggtgtgtgtgtgccttgctgttgcctgctattgaagcagaagggttgagcttgcccccgccctaccaggggccctggcacctgcagctgccccggacccttggccagcctcagcatggcggcgggatgggggtgcccctggacctgccttaaggagatgaggtgctttcttctccaacctcttatttttttcccttacacggtgtgggtgttgttttaatattttaatttttaacactaaaatacatcttaatctttcaaaagactgtatagtagggtctatttgaggaacaggagccagcttgtctactgcacccatatgctgcagcattgggttgggctcagtcagaatgaatga

SEQ ID NO: 334640 - DNA, 478 bp, Homo Sapiens
  misc_feature (461)..(461): n is a, c, g, or t
gtgaatttcagcttatatgttttatctagttatcaactgaggtcttaaaagtttgctaatttataaagctttttataggaatattaactcaatgttaattgtatttgcaataaaattttcccagtctggtttttcccttttaattatggattattaagttgtttttgataaaataactttctctcaaaggtattcataaacatcacaaaagaagtcttaacaccttataattttctaaatatagaagctaatctattgctttgagcatatcagtgaatcactttcaatacaagacttgtaaaacaatataaacctatatcaaaatatgtatgttcacttaatggaattaccaagtttgagaaatcttgactatgtgtcatataaaattaacccaatgactaacagtccgccctacccccaaatctccaaaataaaggcaaagagccacatacctggtcgcnggtaaacatagggtgga

SEQ ID NO: 334641 - DNA, 804 bp, Homo Sapiens
accaattataaattttaataaagactaaacgaaaaggtttggctgttacatattctcaggccaaattgttgatgcatgtttggattaactagccctcaggctgcttccaatattatgggtaatcacaaaacgaccagctctaactcctcctctcaccagctggaagggagcacatcacatttgccatccatggttggcaaaactcaaggcatcaacaactggaaaagatctccaccttgggaatcattatacatattgtgatcctgcaatgggtcagaatccacaaaatacagttcccctgcatggatgtcagaaaagttagctagaaattcatcaggattgaagccaacccacacagtatacctatagtctatggtgcgtatggaatagcccatgatctttatatcttttaaactcggcttgtcagaattccactgagggatgtctgaaggccggggatactggctataggcaatcagttcacggggattaccagggaggtacggatcctcttccaagctcccggcatcgacaatgcttcagaaggttcttgccttctctgcacagctcaacgtgaaatgaaggaacggggcagcgaggtggaacctgcagtcctgcaagttcagccagcgttgggaaaaagagacacaagttcccaccaggttcatggattgccctgcctggctcccatcaactttgaggcggaatcaaaagggtcgaggtaaggggaaagcttctcgcctgtttccggaagtgaagccgttcttccaggaacatagaatatcaggggaacatgggtagcaa

SEQ ID NO: 334642 - DNA, 441 bp, Homo Sapiens
  misc_feature (20)..(20): n is a, c, g, or t
  misc_feature (91)..(91): n is a, c, g, or t
ggtgtttgtctggagctganaagccattatccctaactgaacttaaccacaggaactgaaaacggaaatactgcatctttgtcactttacnaagtgggagcttaaaccactgagtacacatggatgcaaagaaaggaacaacagaccttggggcctacttgacgatggatggtgggaggagggtgagaatcaaaaaattgcctaccagatactgtgcttattacccaagtgacaaaatatctgtacacacgcaacccctgtgacacacaatttacctgtttaacaaagctgcacatgcactcctgaacctaaaataagagttaaaaagaaataaaaaccaaataccccaggagaattgcttgaacccaggggacagaggttgcagtgagccaagatttgccactgcactccagccagggtgacagcataggactccatacc

SEQ ID NO: 334643 - DNA, 809 bp, Homo Sapiens
  misc_feature (158)..(200): n is a, c, g, or t
  misc_feature (638)..(638): n is a, c, g, or t
  misc_feature (640)..(640): n is a, c, g, or t
cggtacagacagcatcttgctatgttgctcaggctgatctggaactcctggcctcacaatactcctgcctcagcctcccacatgagctaccatacctggtaggacattatttttaagctcccatcaggtggaaatcaaaagacaaagcttttagtaannnnnnnnnnnnnnnnnnnnnnnnnnnnnnnnnnnnnnnnnnnctgaatcccaggtacagttttctaatctacaaaaatgactggaaaaaattatttctaagaccctctccaccttaagttattccactagtgcaaaatttaaaaataaagactcttatggtttggatgtttgtcccctccaaatctcatgttgaaatgtgattccccaatgttggaggtgggcctagcgggaggtgtttggggtcatgggaggcgggattcctcatgaatagcttggtgccctccacatggtaaataatggagttctcactgttagttcatgccagagctggttgtttagagcctgccacctcctctctctcttgttcctgctatccccatatgacttggctgctacctctttaccttccgccatgactgaaaaaaagtttcctgggcctcaccagaagctgagcagatgttggtgtcaatgcttgtacnanctgcaggcccgagagccaaataagcctcttttttttatgaattacctcagacagtcctttagagcaatgcaaacaggctaacacatagactttatatagaatatgaggtacaaaaaatttttttgagtcccccagttcattatttgattcttttcacaatcattttaca

SEQ ID NO: 334644 - DNA, 379 bp, Homo Sapiens
  misc_feature (79)..(79): n is a, c, g, or t
  misc_feature (313)..(313): n is a, c, g, or t
gactggaagccttgtgacaggaaaactgaacatctgagacatctataggaaaaaaagatctgcttacatccagtccttnggagttccagtagactgatttattcaccaacagcattgctcctccagctccattccaggagacaggcaccccagaagtagcaggactggtagacatcactagtattgtatatgtgttgtgcatgtatgtgtgttgaggaagaggatggggaaaacaatgatggtggtcaccaggtaagatggggacccaggaagggattgcaattccaggccccatgaacacccccaaagaatngcccctcctcttggaaataaaagtggttctggatccagggagatcaacagttgcaaggctgatatt

SEQ ID NO: 334645 - DNA, 374 bp, Homo Sapiens
gggttttatttttacattttctaattggtatgtgcttggggcaaagggaagctaaagagtaatcttgactggatggccgttgcacagccattttgctatgatattaatctatgactacctcttttcaaaaaagatatctgttgttcacaacaaagtgttaaattgtacatgtgcaagatgtacaaaagtcatctatagaactcacactcattgcctcctcgcaattccataaacacagctcattacggcatgagaaaaccagaggaggcataaaaagtggaaacattaatctatgaatgggtacaaccaatagacccgctacatgctatacacagagtacgcacatttttacagtagaagtgttcccagattgg

SEQ ID NO: 334646 - DNA, 452 bp, Homo Sapiens
  misc_feature (36)..(36): n is a, c, g, or t
  misc_feature (94)..(94): n is a, c, g, or t
  misc_feature (157)..(157): n is a, c, g, or t
cgctcttgggcctgaagggaatcctatgtatgcggnagtatacaaagtatgcagggatggggaggatgacaaatggcaaaaagggtgatcatcnaagagcagtgcccacggttgggtatggtcgaagcacctcttttgacatgtggagagatggganaaagggttcagaatatcaaaatccccaagagaaaaggaagagttgtggaggggaaggatgggtggggaaccaaagcagaaaacccatgagtcttcgggcagtaagagaatgagatgactgggttctttcacccagagtgaattgaaaggtctggcccctacttccaaaggggttctgggtcctgggggaggctcacggtgcttgagtcccaggacatgtaggtgatcggcttcatacaaagatgaaccatcatggtcacaaagatgattagcagcacaactggacacagatgggg

SEQ ID NO: 334647 - DNA, 326 bp, Homo Sapiens
  misc_feature (246)..(246): n is a, c, g, or t
  misc_feature (301)..(301): n is a, c, g, or t
tcataacaccaagaacctggaactcccaacttccaatctggtaacatattttggtgagccagccaggagggtcaagcctgcaatacctaaagctccagaccctggaacccaaagctcccatcagtcgctaccctgtgaacctgtggaggatcttgaagtacctgtttaaaaggcatccaaaagatagaatctatcaagctacaaatggctatgttgcctgaagccccagacatcatcctacaaganataagtccagacttcttaatttccccctggatagaggcaggggtaagagttctgnggtccccctggttaggtggggggcc

SEQ ID NO: 334648 - DNA, 440 bp, Homo Sapiens
cgggcttcctgactggtctctggtggccgagtaactctacttccctgacctgggaagaaggcgtgaataaccagcttaagaggagacacccatcctcttagagttgcctggggtatctgaggcagaggtggtagcagcagacttcctcaacagaggcactgagatccaagaattccaggatgatgtccccaaggcagtaaatcaaatgcctgttgatgaggggttgttgtagtgactccaggactagaccccagctcagccggcatttgttcaccccaagaatttctactacgagatctgggaggactcccatcaggctctgcaaagcctgtttctcagcagccagtttctgctcttgggtcttacgggccgtggaaacttaggcaaaactccaccaggccagatggactcctgaagaagccggaggtactgcacccagc

SEQ ID NO: 334649 - DNA, 416 bp, Homo Sapiens
  misc_feature (239)..(239): n is a, c, g, or t
tatgtaaatatttaaattttattcttaaatactatttattaatacagagaaatactcctgctataattttaagtgacacaatagtacaacaattgttaagaacaatccacctgtgtcaaagagacacatacacaaacacacatccatatacacatacaagcttggagaaaattctgaaaggatctcattgtcctagatcggtggcattatcgggcaattattttgcaaatgtcacccangtgaagaagcaatggtgcctttggaaagtatgtagctcttagttaagcttttatctggaaggtgctggagaaggtctgggcacagagctggttggctccatggttttgtggacctgtgccatcacattaggaccccatggttcagaagggacccccactccttgggttttaaatggc

SEQ ID NO: 334650 - DNA, 468 bp, Homo Sapiens
  misc_feature (440)..(440): n is a, c, g, or t
tatacattattataaaatgctgtgattttaaagccttatataaggcaaatacatttcaagattaattgaaaaaaatgccttttatgaggaccaaactaagaactagtgatgttaccttaatttgttaatgtaaaacaactgacagtagaggtcacttgttggggatgaaggagtagttgtatgttatttaaatgaggtgcatttcatttctatgtgtctcttaggaaaggaaaattatcaactacttacttttgcttgtcttgaaaaactatggaaaagtagcaatttaactgctcttgagttcttttctttgctgtaaaaattacctattgcttctttttttcttttgggttttaaaactttggaaacttgtgtgtgttttgttttttcctcctaaaatccagtaatccttgagtcctcagcctttaatgacatggtcntaaatatgtgtgtggttggccaaatccc

SEQ ID NO: 334651 - DNA, 594 bp, Homo Sapiens
  misc_feature (196)..(196): n is a, c, g, or t
  misc_feature (370)..(370): n is a, c, g, or t
  misc_feature (432)..(432): n is a, c, g, or t
  misc_feature (453)..(453): n is a, c, g, or t
  misc_feature (503)..(503): n is a, c, g, or t
  misc_feature (512)..(512): n is a, c, g, or t
  misc_feature (517)..(517): n is a, c, g, or t
  misc_feature (552)..(552): n is a, c, g, or t
gctcgctcggcatttcgcatttttatttctatcattgtgaactttttcctctcctgatccagttcatcatggaggctcatcatttctgtttccaaagtcaagtttcgctgttctaagctctttatcctggactcatactctatcttctcgtttggtcatttcctgtttcaggctggaaactaaactgtgcagtgcnctgtggttgctgctgctgttgcccacaaatgtctcactgttgtcactgctactggtggcacgactacttcgacctcccacactcctgtggtcacttttgctttcatagtcccttggggtggggaaagggtccgtcctgcggggggcccatccaaaacagggtcctcaaaagttnccccccaaaaaaagtcttgctcctggggaaaggtggtgggtaagaaagaagcgacagggagnttgggaagttccccaggggangggagaatttcaccaaggaagggaaattggaccagggtaagcactggtcnaatggctcntggcntggtcaatcaagggttccatccatggaggaactgnttgaatgggacaattatccatagggtggggcaagtctttttg

SEQ ID NO: 334652 - DNA, 484 bp, Homo Sapiens
ttttaaaaagacagatgcaaccatacatttaatttttaaaaatggaatgtatcttacataaggattttgtgaaaaatcttatacctatctgagtattacagaagatgcatataccttccagagctcatggaggaaagagtgtataaacaattttgataaggagttgaaaaacaatttgaaaatagtttacaaagagagaatcaggaggcagaaaaagcttcaagaggcatggtcttcagaaattgttctggaatgctgtttcacttgtatcgatgtcatgttcctggttcaatttcttgaactccaccacttggaagaagacgtgctcaaggatatgtttggcatcctgttggtcctttggtagtttactggttactccaagaatatcaccacacttcctgacataaaattccaggtcttcttcagtacacttattggtaatctgagccagccgtgccttctcagaggagaacgtttcatctaa

SEQ ID NO: 334653 - DNA, 411 bp, Homo Sapiens
gacttttggtgcacttaaagctatgctagcagaagcgtgaaatcacctcccaaaggaagtgggtcctgcctcctcagaaccagaaaagggaaggccataactggagcagtaacctaccgcagccaagtctcagtttcctcatctgtaaagtgtgagagtcaggcaaaattgcctccaagatccttttctgttcgaatattcattgagccaaagaaggttaagaacacatataaattgagaattctgtaattttaagattcatctggaaaaatggcaccctggtaccaaccatcaggactaagagggagagtttgcagtcaaatgaaattaaggttgaacccagttctgccagttccttgctctataacccctagaaaattacttctgtctgagccttgggattctctgtct

SEQ ID NO: 334654 - DNA, 401 bp, Homo Sapiens
aaccactcccttttcagtaatacagaatgcatagggacccggggaatttgagaagttgcgatcagtaaggtcttccaagaacgatattcccagcttttttcctgcagctgcgagatcagtgactgtttcctgtctcttgacaacgactcgtggaactgtagatataattaagtatttcagtaaacacttcagctttgagatcgtccagctccagggacgtggctggaaatacagattgtatggctccaaaagatatttttaaaatacaggcttgaagctgccagaacattgctatgggctttaaatttgggtatcttccacaatgatagtggacatccgcataaaatgccccgaatgcgctgctcatttaagatggagagtaccgtgtcactgtgaaagtc

SEQ ID NO: 334655 - DNA, 634 bp, Homo Sapiens
  misc_feature (500)..(500): n is a, c, g, or t
  misc_feature (540)..(540): n is a, c, g, or t
  misc_feature (558)..(558): n is a, c, g, or t
  misc_feature (567)..(567): n is a, c, g, or t
  misc_feature (598)..(598): n is a, c, g, or t
gagacagtctcgctctgttgcccaggctgggtccctggtgttttaatcatcgtgaaacagcagctgagatttagaagatgatctcatggcactctgtgaagtttctgcaactctgttgctttctctgttggtcattgcctttcatttttatattctttttttctgataagttgtttcattattgataagtgttaaattgcactgtgtcttgctcccctctataatgaaagctattcttcgcttgagatcacagcttagattttctttgaaattccccaagagcttaacacagggctttgaacacagtgggcatttaataaatccttgatgatgatgttcaagttccacattggtcttcaactctctggcggggtcagaggaccatctgtgctcgctcagatatgtcaactgcaggacccagaaagcagccttctccagaaagttgctcctgtctcctgggcccgtggtgattcgaggcatgtaatcataatcctgagctngtcagcaagggcagttgatttggtttccaagattttcaangtcccatgaaacaggtangccaggggnttggggaaaagaatatttccggggaagttanggagggcctgggtttgaggcttggatcttccgtgac

SEQ ID NO: 334656 - DNA, 445 bp, Homo Sapiens
  misc_feature (41)..(41): n is a, c, g, or t
  misc_feature (75)..(75): n is a, c, g, or t
cccaattaaggtgatttaatttcccagtgggaaggattccngccattctcgtaaatgaaaattagctataaaaanatttgaaattattataaggaatagtcacaagttataaaagaaacattcattgctatggccaggaatatattgctatattggaatctttaagggcagaatggaaaaaaaatgaaagcatatgaacaattattacataacatataaattaggaaattttaaaggagaaatgatcagaatttaggaaagtattcttaaaggatgtgaattttgataaaaatttgaagaaagtatgcatgctgtgcatatatggagttggcagagaagcctgataagtagagtaccacaggccttatgagaggcttggggaaggaaggacagggagaaactggcaaagagcgttgcatatacattttaaatttgtttagctgga

SEQ ID NO: 334657 - DNA, 439 bp, Homo Sapiens
  misc_feature (73)..(73): n is a, c, g, or t
ccctcctgggttggttcttactgtttgagtcaaaaacctccatcaatatatcattgactcctgggttccctcnaggtcatttccctaaatatctgtcccttatcccaaatgcctctaattttatcttgaaaaaaggacccaaaaattatttttagctatggcaagggcaccaggccacatggcccctgatggcgtccctgctggttttcaattctctgaagccttgtgtagctttcagagcacacgtatcctaattaccctcctcttcctcagcagaacccatttgagattctaaatgaatactcttagtctctaaagttgcagttagaaactaaaataatgttttttaatatgtaatatgctcctcttggctaattttcttctgactttacatgtgccaatgtaacttcctttcacaggatcctatgccatttattac

SEQ ID NO: 334658 - DNA, 512 bp, Homo Sapiens
ggtcccccagtgttgggagtggaatgaccccaggggcagccggcttctctcccagtgctgcgtcagatgccagcggcttcagcccaggttactcccctgcctggtctcccacaccgggctccccggggtccccaggtccctcaagcccctacatcccttcaccaggtggagttgtccgccatctgtcaggccaggtttgtttcctccacagttctgggtgagtctgtccattgctcatctcctttgttggctgcttccccacaggtggtgccatgtctcccagctactcgccaacgtcacctgccttacgagccccgctctcctgggggctacacaccccagagtccctcttattcccccacttcaccctcctactcccctacctctccatcctattctccaaccagtcccaactatagtcccacatcacccagctattcgccaacgtcacccagctactcaccgacctcccccagctactcacccacttccccaagttactcacccaccaa

SEQ ID NO: 334659 - DNA, 312 bp, Homo Sapiens
  misc_feature (17)..(17): n is a, c, g, or t
  misc_feature (22)..(22): n is a, c, g, or t
gctgagatttctctttncccanagagccggccactgcttacttagccaaagtttcctgagaagggggggaagaaataattaaaagagtaacagtggcaaagactgtagtgacttaaatgtcaggagggcctaatttgccccttaggagattgagccttgagaagcccctgacttctgctgatgtctaggaccactgccctctgcaggccagaagtggaaaggcaggctgctacctagccggctagggctgcacctcagtccgtttgtgagtacagggtctgtgttctcttcttaaaatggacaacttccttc

SEQ ID NO: 334660 - DNA, 440 bp, Homo Sapiens
  misc_feature (42)..(42): n is a, c, g, or t
  misc_feature (79)..(79): n is a, c, g, or t
  misc_feature (101)..(101): n is a, c, g, or t
  misc_feature (296)..(296): n is a, c, g, or t
tttccattgcccctaggggaacttgctagggggttaaccccngttaggatttagccaaactgggaaaacacttggatcnaaacttaaaattggtaaaatcnggtctaactttttaaatatactttccacagttgtacttaagttcaattaactacagtatagagaaaaataattattctcttctttgcacccggagttgcaaacaaattaagtttacaaatctcatttaaacatatatctttgtaatgtaatctccgcggttctttctttgttctaccctcctgcacctgttgtcngatgtaatcattttgggaacagaaacgttgtgtctcaaaaagattcgttgtcagttcagccaagatgttctttacctgagattctggaaagatgtttatctatatcggaacacttctacattattaaatgtccttaagctttaa

SEQ ID NO: 334661 - DNA, 577 bp, Homo Sapiens
  misc_feature (240)..(240): n is a, c, g, or t
  misc_feature (259)..(259): n is a, c, g, or t
  misc_feature (275)..(275): n is a, c, g, or t
  misc_feature (469)..(469): n is a, c, g, or t
  misc_feature (527)..(527): n is a, c, g, or t
gtgtgagctaccgtgcccaacctaaatatgttaaatttatttatctttagaataatggtataaggtagatactattatcctattttacagagtcagaaactgtggcagagagtaacttacggccaggatacacagctaataactggcagaaccaggattccaacacaggcagtggagggtaggagtccttgtcattaagacgcactgcacaggcctgtgtcggattaattgaataatgcngagtgaaggctgagagcanggggcctggcaagcangtaggcacgcttgattattttaaaatgtaaaactccttggcctagagatcaagaattatttcaaagacctttatattctgcgtgaacccagcaggtgttttccctcgcatatgaaattgatggttgagaaggacatcggagacaagtcttaggttcgtacagctttcggttcttttacccagatcctccgtttntaagtagaagcgaaagtagctgatgcgcaaataagcccacttcggtgttaccctgggnctttttccagctgagcagagataaggtcgcccgcttcccacgccgagccc

SEQ ID NO: 334662 - DNA, 476 bp, Homo Sapiens
  misc_feature (24)..(24): n is a, c, g, or t
  misc_feature (217)..(217): n is a, c, g, or t
  misc_feature (286)..(286): n is a, c, g, or t
acaactcaccttgttgaacggatntaggggcttgagggaacctggggacccccggggagcccgggtgtgggaagaccaaggcaaggggagtaaccttggcttgaaaccgcttggcaatctgacgcagcacttgggagagaagccggcttgccccttggggtcattccacgttccaacactgggggacccaggccccataggcaaggggttgcacccntggttccaaggtgtcatggcaggagagattccacccatgggactgggtgctgaaccaaagaacatgccnggtgggtccagcagcccccaggccggggatattggtggggatctccatgccatacttgcacttctctgcatcaagcaggaggtcaaagcagccagtgccgccggagcagctggcccagcatgatattctcagagacccccttcatggggtcactctcaccgtgtgcggctgcttccataagcacgtccac

SEQ ID NO: 334663 - DNA, 522 bp, Homo Sapiens
  misc_feature (432)..(432): n is a, c, g, or t
  misc_feature (448)..(448): n is a, c, g, or t
  misc_feature (470)..(470): n is a, c, g, or t
  misc_feature (475)..(475): n is a, c, g, or t
  misc_feature (486)..(486): n is a, c, g, or t
  misc_feature (496)..(496): n is a, c, g, or t
ctaggtcagcctttctctattgttgaacagccaatgaatggaacctcattctgggcctgtctatgtgatcaaaacacctggaacagttagactctgggcaaatcatctaaactctgtgggtttctgtagcccctaaaggagaaatatgcagagattgcagcagggagatgctaaagccctggtcagctcccagatcctgctactgaggtattttctccagattccttttcctgcagcatgtccttccgggggctgcagagtctgcttgctgacaggcgtctttgaatggagaaaggaaaggctgcttgaatacagaacaggcagggagggcatctcaggtccatgaaaatggaaccgaacagaacttgcttgaagattctcttgtgccagagaagcagggccactggtttactaaagcaaagtatccctgangaaggagggggaaganataattaaaaagaggtaacagntggcnagactgtaatngaccttaaantggttcaggaggggcctaattttgaa

SEQ ID NO: 334664 - DNA, 508 bp, Homo Sapiens
  misc_feature (28)..(28): n is a, c, g, or t
  misc_feature (50)..(51): n is a, c, g, or t
  misc_feature (98)..(98): n is a, c, g, or t
gcctgctagaaatgcaggtcccagctcncccgccccccacccaaatcagnncctgtgtttcaacaagattccaaggtgatctgtgtgcacagtgacanttaagaagccctggttctcaggggaaaaaggccagctttggtggatggagccaatttctaggtcagacttacacagcatgctgcctagagaccaagaggcttcctcccccaccctgaaaacagcagtatgctcagctgatttaagttacaatattttgactgggtaaatacttacatgattcaaagtttagaaggtgcaaaggatagtcagtgaaaatcaacctccggtctcccggttccccagaggcagccagtgttactaatgcaggaggctccctgattttgccgaaaactcgtgtggtttcttacacattcactcaggtaatgaacttctcctagactggcgcttaagacccagtctcccctgtcaaaaatggacatgaagtacgtttcgatgttgggcttgggag

SEQ ID NO: 334665 - DNA, 407 bp, Homo Sapiens
ttttccacaaattgatatatttacttcattgccagcggagtacactcgcattacatagatatctctgagtcactttaagtcacataactgcaaggatacaaacaaacactagttcatccctgtggctgagtgcccttggggaatactcagatcccagtggggcttctctctgcatcttctggccactctggcgttctccctgagcccacccaccttctccccctcccttccattcttccacgatggtagcaaagcagggaagtgccagtggaaagagactgcaggtgcacagaggcttggacaggccagagtccatggcagctgctttgggcgtctctccttggttcatgtggtgggcacttcaccacttcaaggacactgtcaactccctgaaggcaaggccaggg

SEQ ID NO: 334666 - DNA, 412 bp, Homo Sapiens
ttttgggtgattagataacttactgtccaaactgtgacacacgtgagaaaggggacactaatgagataaaacaatgggaaagcagatgcaaactggggtagtaccctgcaaactggcctatggtcaccccactcgtcattggcccagtgaattcatcatcactgtgatctcactacctaacactcagtgcgtgcttcaaaaatcttagctaaaatttattatgtactgtacgatctattgctgtttttactgctctctctaaccttggtcaccacttacacattatagaaactttgtgtcagttacaaaatggtgcccctttcttcttgggcagcaaattccaagactatatggtgaatgggacaccaggctggatttcacaactttcccctcccatgaacatttttgtgtt

SEQ ID NO: 334667 - DNA, 483 bp, Homo Sapiens
  misc_feature (461)..(461): n is a, c, g, or t
aagtgcctaatggctaatatttttaatgtatgtaccatgctaaaagtactgcaaaagtgttgaaaaacaacaaaaacactgatagatttgttaagatagatttcttaaaacaaattgaacattttatacataatttatcaaagcccattttggagagagaagaatatcagtttttctttttcttaggttgatattggcagtatgttttcccaaagtaatattatagccatatgttccacttgtaaaatactcaactgtttctatgtgtaacaaatttattacttcccaatagattttcacagtgttctcatattcactgcataaaattccagataggtattttggatacttgaacttccgttctcttgacgacagatccactttggcatcttatctcacccaaaattcagctggcatctgacatgtattttagtgggaatgtttccatatctttacaaccncttaattttttatacagggttt

SEQ ID NO: 334668 - DNA, 531 bp, Homo Sapiens
  misc_feature (151)..(151): n is a, c, g, or t
  misc_feature (345)..(345): n is a, c, g, or t
  misc_feature (381)..(381): n is a, c, g, or t
  misc_feature (458)..(458): n is a, c, g, or t
  misc_feature (495)..(495): n is a, c, g, or t
ccaaaatccagttttcatatttaaagcgaatgagccccctcctctcagtgggaaagatgagctgaagctttactccctcgatagtgttgggaaaagaaatcagacaaaaatctaaggaaggaccaaatattgtacagagtgtgccagtagnttttgcaactggactgaaaatacctgccttttctctccacaggggaaagtggaagttgaagctgggaaagaaggtatgaagtttgaagcgagcgccttctcatactatggcgtgatggccctgacagcctctccaggtgaaaataagtcccctcctcgcccatgtggcttgaatcactcagactctctcagtcngaagcgaccgggattgacgccgtcacaccaacactnggggagcagcaataaccagctcaattcttcgctcctccaagtctacatccccgattactccggtgcgagccctttcnggatctgcagtttgttaagatctcaagacagcaatancaaaatgccttgatggcatcccgggatggacaaaac

SEQ ID NO: 334669 - DNA, 295 bp, Homo Sapiens
gagacagggtgtcactctatcacccagggtggagtgatgattgagactctgcctcaacaaaataaaaataataatatatttagacatattataagagtagtcatctagcatcctcagaaaatagctaagcaaatataagttattttctcttttgccagattcatcccaaatgttcagatgtttaagagtgattacataggagaatacataagaaattggtaacagtggtttcttccagaagagaaagctagaagactaaagggagaggggaaggagacttttttgctgtataccc

SEQ ID NO: 334670 - DNA, 421 bp, Homo Sapiens
  misc_feature (106)..(106): n is a, c, g, or t
  misc_feature (224)..(224): n is a, c, g, or t
  misc_feature (267)..(267): n is a, c, g, or t
ccacttttgaagtcttccctcagatttccattgtgtggcctggtgggtcaagggggagtctttgcaaccaaagatgtcctgactttgcccccttgcccatcagccnatttgccatcaccccgaaacaactcagcttcggggccggtgaggggaggggcctcccccagcacagatgaggagcagctggggtaggctgtcgtgtgccatggccccccactcccccntcccttggagggagaggtggcaggaatacttcacctttcctcntccctcaggggcaggtggtggaggggcgcccagggtcgtctttgtgtatgggggaaggcgctgggtgcctgcagcgcctcccttgtctcagatggtgtgtccagcactcgattgttgtaaactgttgttttgtatgagcgaaattgtctttact

SEQ ID NO: 334671 - DNA, 547 bp, Homo Sapiens
  misc_feature (212)..(212): n is a, c, g, or t
tttagatacagactgagataatttgcatactaaaagagctcatgaccctgctcttgctagggcacgtgtttattataattaagaatgttttcctttatggagcacatgcacacaggcacccgttgaaagtgccaggctcgcccactgccttaggtcccctattactctggcctggagtgctctttcctcactccctccccacctttcccccnatcttgacctgactgatacttttatattcctcagttcagctcatttggtcacctcttcagagaggtcatcccagacaacccttcctaaaatagttctccaagctctgtcatcattctccatcccattagcctgttttacatttgccattatctgaaataatcttacttatatgttttttacttgtttctcctcactagaatgtaatttctgtgaggttagagaccttgtctgtcttgttcaacactgtatccctaattgtagaatggcggatctttaatgaatattggtttaatgaattaatttaacttttttacattaaatgttaatcttagtt

SEQ ID NO: 334672 - DNA, 439 bp, Homo Sapiens
ggatttttgagtctaagagactattcacaaagtccctaaatgtctgagccactgtaattgtgtgtcataggcatgctgacagcctctccaagttctgtctccagccacagcagtgtccttgcctggaccacctctcttccctgctcacccttcaggacctctgcacgtcacacccgtttattctgtaaatgtttgctgcatgtgactccatgccaatcatcatggtgggttcagatgatgccacctccagccttcaaggaagttacagacaagtatgttcagaaaaacagggcaaactcacacatgaaaaatgggcacgtatgtgaataaacatttcactaatcatggtcccttgggcctgtcctgtgctgggtgctgaagaaagatgatgggagacaaaagccctggactttaagaagcggatgctagggctcctggt

SEQ ID NO: 334673 - DNA, 678 bp, Homo Sapiens
  misc_feature (232)..(232): n is a, c, g, or t
  misc_feature (443)..(443): n is a, c, g, or t
  misc_feature (475)..(475): n is a, c, g, or t
  misc_feature (549)..(550): n is a, c, g, or t
  misc_feature (603)..(603): n is a, c, g, or t
  misc_feature (663)..(663): n is a, c, g, or t
taaaacatataatactattattaacataggatcagagggcatctgtaagaacaggacatcttcatttcagggtatcaccttcaataaatctgtctctttcaataatataggggtacagagtcagatatacaaaaggtttattaggggcaacgctataaaacataaaagggagagggaacaggaccagacaaggaacacctttagttcgtgatgtaggactaaaacctgaganaggagaggggccaggaaagatatttggggtaggaggagcccttgggactgcagtgcaagctctggagaaagcctaggccttgcaaaacagggagtgctggtgcaaagatttgccctcccgaagagtcccatactgggccagaaatggtgagcccttgttaccatgggcagtgcctggcctttgcttagaggctgtctgggaagcatgtaanctcagcttgaaagctgaggcagatcttgacantgtccgctaactccaccccttgtggcaggtctgctgtagggagatctgagtgggacacctccatggctaccacnnttaccccctgcactgcacagatcgatttccccatacacattcagggaactccntcatggttcccatgggtctctcttcctgaagggaaacttagaagaggtaggttagtaggnctaactacagtccct

SEQ ID NO: 334674 - DNA, 390 bp, Homo Sapiens
  misc_feature (189)..(189): n is a, c, g, or t
  misc_feature (284)..(284): n is a, c, g, or t
  misc_feature (289)..(289): n is a, c, g, or t
tgccatgttagccatgccggtctcaaactcctgacctcaggtgatctgccctccttaagcctccgaaagttctgggattacaggcgtgacactttgcgctcggctgttatttcttaatgtttttgtcataaatactatacaacgtggttacattctgtctttgggaaaaaatgtaccctaaattaaatnagaatgtaagtattcaggaaatgatttcataattctccagacatctagaataaagaatatgggaatgcagagtgtatactccaagataatgattntattntaataaattgaggcaagttcttcagtgggcttctagatttcttaggatacaagtagcaggatacgtaattacaggtgacttgcagtataagtacattttaa

SEQ ID NO: 334675 - DNA, 816 bp, Homo Sapiens
cacagctttacttgcttctgcaggtaggctttggaaggcatccattgtagattctgacattttctcatcttgcagcactgcttctttatattgcgaccaccaaacttgggcttatctaagcaattagtacaaacaccacagtcctcaggcacctggcagccgggacactgcccacaccgcctcgatcgacgtcctttctttactggaggttcctggggtgccttgtttctagtgacaggtttaattggtttgatgggtggagcaagaggttcagcatcttctgagccagcaattgatgacttgtcatcattccccatggaagacaaaatcttttctcgttcttcccatggtaaggcactcagggtgggcatgtcatcaggaaacacagctcgttttcggccaagggcaacagctgctcttctgcagacatgtttaatccggggtcctcgcacagaggtctctgatgagtcactttcttgaccctgtgctttgggctggtcggtttgtttaagacgtcttactcttctcaatcttgcagagctgagcatttggccttttttaggaggctggcaaccctcttgtcagtcattggaagcttgtctgcctgagccaacatggagcctatggaggaagtggaatgtttaacagtgctagatgaaggagtggaaaggcagagggttttctccttctccagggatggggcagttgggccgaggtccaagttggttttttccagatttcctctccctttctttaagagtattttggttttgacagctgttgtatccccaagagtcacagaagtaatatcagtcc

SEQ ID NO: 334676 - DNA, 564 bp, Homo Sapiens
  misc_feature (338)..(338): n is a, c, g, or t
caaactcttatttaatttttagttaaaattaaaacactagtacttcagaatatagatacaagtacaccatcttgaagaatttggagtttttcagggcaattcaaatgacctcattttttgttctttttgtattccagacagtgtttctgtcattggatctctgattggtagtgttaataaatattctttcagtgtgagccagattcataaaattaattttcttcattttagtagtaaaaagtagtctaatagctttttgtcagcttggatttttttgtggtgtgtaatattcaagggcagaatgacaggacagataagcaataagaaatgtatagaanttggaaaatatagtagttccctcttacccatgggacatacggttccaagacccccagtgaacgtctgaaaccatggatagtatagacacctctatacactgttttttcctatacatatatacctatgataaagttctatttataaatcagggacagcaagagataaacaataactgcaaatagaacaattataacagtgcactgtaataaaagtgatgtaaatgtg

SEQ ID NO: 334677 - DNA, 509 bp, Homo Sapiens
  misc_feature (25)..(25): n is a, c, g, or t
  misc_feature (44)..(44): n is a, c, g, or t
  misc_feature (385)..(385): n is a, c, g, or t
tttatgcccattttattgggtgctngctcttatgcatccggtancccaaacaccatttctgttaagtttctctcaaactataatccatttaggggcaggtgtctgcaaactttttttccaaaaagtgccaaagtatatttattttggctctttagggcctatggtccatgtcacaattactcaactctcccatggttgaacaatcatagatagtaggtaaacaaatgagtgtggctgtgttccaacaaatctttatctataaaaacagggagtgggctagatttggcctgggggttatagtttgctgatccctggtttagaggatagatataatttgaggaacactaaggaaaagataagagaaagtaaataatcaggacacatntgaggagtgcttatcagagaaggtatatatgtgttaatttcctatgtggacattttattcatattttatacatgacattattaaatatatacatttagtatacatttaatatattgcagagggc

SEQ ID NO: 334678 - DNA, 641 bp, Homo Sapiens
  misc_feature (334)..(334): n is a, c, g, or t
aaaccttaaaaacctaggacaatgaaggagtccaatcccttggcagatccaacaagatggctggggagagggagaaacaaactggaggctcccaaaggaacctaacttagcaaaggttctcatcttataccctccccttacccaaatactgtcctactgaaagggccctaccagttaagggatctcttctaaataacaggcaacccctagatccaagtagttcagtccaggaagactgggagccaatcactcttgaaccttgtgggcaaacagtatgggggaggaccctcttgacaggccttggtaggcaagattccaacacaggaagacagcnaagatggggcctagagtatggggccctacatgctgttaaggttgtggttaggaatggtgcaatgctgcaggagctggaacaaagctacaccaaggaacagagcacagagcagcaggggccgaaatttgaggaggccttaaatgctttgagcttttgccttcagtctaaagctgtagaatagggggttaagagcttaggcttgaccacaggggagtttacaagctagagcgaatatctggactgctaatatctgacaacagtaggcgaaatttactttttcttcaaatacacattttcaagaattgac

SEQ ID NO: 334679 - DNA, 374 bp, Homo Sapiens
aggcctcagagcaaaaagaccaggcagctaatgaaggtccagaacagtcctctgaagtaaatgaattgaaccaaattccttctcataaagcattaacattaacccatgacaatgttgtcaccgtgtccccttatgctctcacacacgttgcggggccctataaccattgggtctgaaggcttttctccccctcttaatgcctttgctagtgcagtgtattttttcaaggtgctgttaaaagaaagtcatgttgtcgtttactatcttcatctcacccatttcaagtctgaggtaaaaaaataataatgataacaaaacggggtgggtattcttaactgtgactatatttgtactgaagtctgatacagaattag

SEQ ID NO: 334680 - DNA, 861 bp, Homo Sapiens
  misc_feature (34)..(34): n is a, c, g, or t
  misc_feature (346)..(346): n is a, c, g, or t
  misc_feature (492)..(492): n is a, c, g, or t
  misc_feature (522)..(522): n is a, c, g, or t
gggaaaattatcttcatttgcagccagcgggacnaaggcacacgaaccaccaggtttataaaattccgtagtgtaccagtgaccatcagcctgtgctgacatcgcagatgctgctttcttctctaatggctgattatgaactggttaaaacaatgtctttcccaccagggctccgaaaggggttccccttcctgtttagtcggagcgatcggcagtcactacacaggctggaacctgagaggcacaaactcagggcgggggtattctctgttgttgcctggcttgcctgttggtcctgtccctgttcttcttggaaggtgaaattatgggtaaagcagtccctttngcagcaagcaccccctctctagctccactctactgaccttcagcttttgtctttggaaggtggtacgtgatgcgctgtgaaccctggaagcattttcatcccagcccaccaatctgttagagcatggtgctatcagggcaaacccnggtggctcttcagacttcccaagtggtgangcttgtgccttcccttggccagcttccacatgtgtgaagagggtaaagaggggaacagctgcagttttaaatggggatagtcctcaactcctcagcacagagaagggaaaaaagagtccagggctgtttagaaaagttcgggcattttcctttgactagctgtggtagggcatgaaaagtttgaggggtggctgcagtcaactcatatgccagtatggtgcagggcggagctgtgctttaaagcattaatgtgcaccatctattacccctaggcatggagtatgaggcaccatccttttgaagatgctgatcctcagaacctccttgtacttcatctac

SEQ ID NO: 334681 - DNA, 795 bp, Homo Sapiens
  misc_feature (546)..(546): n is a, c, g, or t
  misc_feature (743)..(743): n is a, c, g, or t
agtcttttgttcagcttttactggaaactgctgtctaggaccacctgccctaaccaggaataaaggcaagacagcctggagaccagtttgtttcttcagctgcaaacagctgcctgggcaggcaggtgacacaaggcctctgtccccagggatgggacctgcagggtctgttcacccagggcacccacagtcctgaagtgcaggcccagggtctgtccagctgggagagggcagaggtggcggctggttgagttgccggcctcagctgggggcctgggggaggcccttcttcagcagagatgtgaggaagctccccagctcctcgtcctggtaggtccaggagaccagcagcaccttggtgcctgggtcctcagaaggggcggcggcctggaggaggacggactccacaagtcacagagccgtccgggaggtgcttgcacacagtggtccttcaaggacgctcttgaggtggctgtagacgcgcaatgccgtctcctgctccttgcgtgtgtcatgcaggtgcacgcggcaggtgaagcgcagctngtgctcagccagacccagctctttgagggcttgctctgaggacaccagccggaagttgctgtccttcatgatcagggtgccgtgcaggagccgaggcttcttggcctcagggagcagcccctgcgccatctcccgcttcagcagccccagcgagatgctacggggatgctggggcttgtgttgcagcgtcaccgtcntcccattggccggcatgtagcagttgacccggagctcctgctcgctcgtgcc

SEQ ID NO: 334682 - DNA, 452 bp, Homo Sapiens
  misc_feature (39)..(39): n is a, c, g, or t
tttggatcaattggactgggctggagaaccatcctttcnacatggcccttcccatggatgtgcttgtacatctgcatcaaaaagcaaaataattactcttgaatgagccgtcttcaaaacggactcttggtgcaacagacatcaattggcactccagcgttttctaactgtcacatgcaccaagctctgctggaggagtgaccagactcacgatttggtatagtggggctctcaagcatcttcaatttgaatgtacatgctgctgaggagccggtgaagtccatcagttccgcacatcccttctaccctccaactgcatgggaagccaaagtcctggttttgaaatgcttgggcagctcagccgcttgccctcaccctgcatgtcttgttactgggtctccctgtgtacttgtggcattatccacaaccatcatgtttcttaggtgccaaac

SEQ ID NO: 334683 - DNA, 401 bp, Homo Sapiens
  misc_feature (106)..(119): n is a, c, g, or t
agtgtatatatttaacatgtacagcttgatgttttgatatacatataccaagtgaaatgattactatagtcaagcaaatttacacacctcacagagtcagtgggtnnnnnnnnnnnnnngttaggaatccctaacgtctacacccttagcaaacttgcagtacacaatatcatcaactgtagtcctcatatgtattagatatccaaatttgctcattctacataactacaagtgtgtaccttttgaccttcatagaaagaaactatctgaaattaatcttattaatgttcttatttattatctgccttcccttcaagaaagctaagtccattagaacaggggatcttccaagtcctatattctaccgtaacctctgtcctcagcacagggcctggcatata

SEQ ID NO: 334684 - DNA, 311 bp, Homo Sapiens
agtgacttccagtttctttctcatttcactgtactcaactaaattacatgaacaaaggcacaggcaggattaagctaccattttatattagatggtataaaaacaatcaactagcctggggtcaattgaattaagtctgtcagtctgtttctacaaaagttgcagaaggatgggcttcagtttgtctcttcaaagtgaactaatattttgatttttctggttgaaatatgctacaactcaccgaagtagctttctcagttgaaggtaagctccttaaaaaatgttcctattcttgggccgggtgtggtggc

SEQ ID NO: 334685 - DNA, 732 bp, Homo Sapiens
tgtcttgtctatttttatcagtaccatcactgccgacggtttctagtagtgtgagtaacatattttgtcttagtttcaaattccaggtctgttggtattggatgtgttgagcaagttgattagcctttcctaatttcttctcttttatcaaatgggtaataaccctcctaaaaatgttacaggtctgtttgggggttcagtgagataccatctggtaaaagtataaagctctttaccagtctttgctatttttagagacctgcaatagggagacagaggagagattctctgaaagcaaccaaatttagagacatagttcctagtggaaattggacccagattatggcccatctctgttgagactaaagtatacagaagaatgtgaacaaagatactgaatttctgagtttgtcttcattgaagaattgtagtcctcatattattaaactaaaattcccaattatgctaaactgtaaccaaagaggtcttatctcaaggcatacaaaataaacatatgcctagaaaaagcagaaatgaatttctggacatatggaagatcctgatttattgagctaggaaaggaaacaggtagtagaagcataaggcttttctattgcaaccttctctttcatcctttgcacttattcagagcatattcagtcaatcattcgatgttgaaaggtgtgcaattacagagatagacagactttcagctgccatagcgaaatgaga

SEQ ID NO: 334686 - DNA, 506 bp, Homo Sapiens
attcggcacgagcaatatggacacctttttgtacttttttattctggtaacaatatgcagtttctgaggattctgtggatctccgtcatatttttcatgatctgcaagtgaaggctgaaacgctttatatggaattcttgacctggtaaatttgtgatgaatccaatctatgtaaacgagagacttcacaccttttgtcccagtctgtagttcattttgcctcttgagctactgacagcaaagtccctgccataagtgtggtggctgttctctttagagagagcgcctgctaaatattcagcatgaaccttcccaccagcagaagctgaggactcactgcttccattattacttacagatcacctttttgtatctgaaaaattttaccttaagtaattctctcttcctttcttccttttatttccctgaatggagtagggattagagaatggctagaaggggcagaggcttggagcttaataccttatggtgttttagcccattag

SEQ ID NO: 334687 - DNA, 668 bp, Homo Sapiens
  misc_feature (518)..(518): n is a, c, g, or t
tatattgaactctttgcattttatttttcaggctatctcattcatcaagcaactctactttgtgaaacataaaatgatacaaacaaagtcattatcaaatgtatttattgctgaaaacataacatttttcaagaaaggcaaactggctaaaaagtcctgaaagtgttcaaaagtagataaaatagcagaagacacccaccaaggatacaaaacaatttttagtagcgatcctgcatttaatcagtatgttcttaaataaactgctttaaaaaaattcttcaaatgacactgccaaaaaaattaggacacccaaacagatgccagaaaacctgtaagtgggctggattttatgtgacctggtcattaagcatagggattcattttgtgagctcatggcaaatcagtttgaggccagttgacctagaaccgatttgggatgcaggcacttacctccctgcacgtgcaatatgtgggcatggggacacccattgaccccaggggaaaggaatgcccctccngaacatgacctccaagagtaagggcgaactgtcagcttttaactgtttattataaagacatatttacacagaacaatctttacaaacattgaacacaggggaagggaacaatttcttaatgaacagggccttaatatctttgtataaatt

SEQ ID NO: 334688 - DNA, 554 bp, Homo Sapiens
  misc_feature (23)..(23): n is a, c, g, or t
  misc_feature (97)..(97): n is a, c, g, or t
gggttcttcttctggctacaaancctctttctgggtgattcatctcccccaaaagttttggtgagcaccttctctgggtctctgattcctacccttngaaaaatggctattgggtctggataacccatttaggtcctccaactttttttataaatttgaaattcctaaaaaggtcttaaattattagggtgtcttacttgccaaggccttcgggccagatgggccaagagctcaggccagacctctgtgttagtagtggacatgaagccttgactagccacgaaaaaatataccacagagagcaaaccctatgaggggcaggcatcttctcatgtcttactcctcagtgcctggagaagtgctggtgcatggtagatgctcaagaaaatgcttactgagtaaacgaacgatgtgattgcctctggacaatactgttaaaactaaatacttgccaggtgtggtggctcacacctgtgatagttcttttggaggccgaggtgggaggatagcttgagcccaggagttcaagctaaatagtgagaccctgtctctac

SEQ ID NO: 334689 - DNA, 618 bp, Homo Sapiens
tcccttcatacacaaatctcaggccagtctctctctgggacttctaaaattttaccattcattgtgatgagaatcaaccatttttggttcatttcaaaggacaggctcaagttttgcccaatgctaatatggctcagcagaaaaatgcatgtggcttgtattaagaaagcacataaaggatctacattgactgggttttcataatccacaaaaaacgaataaatttgtatgagtatctttatatgaaggcaaggaggaaaacaggtgaatggaagcctacgtaaatgtgcttatgatttaaaacaaacttatttcctcaggaaaaatatatttttcacctcacctgttaaagtcttaggaaagcttaaccttgataatctcctaataacagaacttatgtttcttttctgaacctcattccttctcatattgtaataatgaaatgaataaatgaatagcaagtgagtagtggtgcacactaaactctgagtactgactgccttctattccacttaatacctttataagaacattgttatgtacctaagtcatgtcatctataaaactaaggtaatgataacaatcatatgtccctaatataatggttttgatgattca

SEQ ID NO: 334690 - DNA, 556 bp, Homo Sapiens
  misc_feature (455)..(455): n is a, c, g, or t
  misc_feature (465)..(465): n is a, c, g, or t
  misc_feature (506)..(506): n is a, c, g, or t
  misc_feature (524)..(524): n is a, c, g, or t
  misc_feature (533)..(533): n is a, c, g, or t
gattcattatgaagagtgaaaggacaaagcttccgcagtgtggaaggggacccgggcaggttgccgtgtttgtgttttaagctaagtgttattacaaaagattcagaagttaagaattttaaagttttactttttatgtagcctaagtgtgtttataaagtctacagtgatgtacaataatgtcccttcatattcagtcaccactcagagcaacttccagtcccgcaagtgcccaatataggtgtaccaatttttcttttatattgcatttttactgtaccttttctatgcttcactatgtttaagaaacacaaatacttaccattggtgttaatcactctcatagtattcagtatatagtattctcttatagtaacatgccatacaagtttgtagcctaggagcaacaggccataccatatagcgtaggggtaataggaggctataccacctanggtccggggnaagtaaccccttaatgatgtttgtagcaacaatggccatcncctaacaggggcatttcncagaatggnatcccatccattaagccatgggg

SEQ ID NO: 334691 - DNA, 565 bp, Homo Sapiens
  misc_feature (205)..(205): n is a, c, g, or t
  misc_feature (316)..(316): n is a, c, g, or t
  misc_feature (366)..(366): n is a, c, g, or t
  misc_feature (420)..(420): n is a, c, g, or t
  misc_feature (452)..(452): n is a, c, g, or t
  misc_feature (538)..(538): n is a, c, g, or t
  misc_feature (548)..(548): n is a, c, g, or t
aatattatctttgttaagttcgggtatcaaggtcatactaattttatacatgatgtaagaattccctttttcaataatctgatcagtttaataaaattagaatgttctctcttatttgcaatatttcggtagaagtcacctgtaaaactcgacagacctgctcttttattagtactgtaggtagtttttaactcattttttccantttctttaatggctgtggcagacggttatattcagaatatttaaataacaagcaccgcactgaacacttgccagtcagaatagatgcagatggctgtgctcgcgaacaggngtcctggaatcgccatattgtgtaagggggacttttgctgctgaatcatngggaaggttttgtggggaggtatctctagaagaggggcctggggtagtccagangggtgtcagagggtaactcaggggcagtgccnattttacgaatttggtatggaagaagttcaatcctttaacagtaccttcagctgaaccggtacatattgggccaaatattagtccnagtaataggnccaattcagggttccaa

SEQ ID NO: 334692 - DNA, 538 bp, Homo Sapiens
  misc_feature (514)..(514): n is a, c, g, or t
tactctgattctactactcgcctgccagctttctgtgtgactttgcttcatctgctaccctcattttcccctttttatcttcaacttctctcacctttgaattcttcttttgctttgacccaaaaatatgcctaagtgtgttccatcctaagaaaagcaaacaacaactgccttcccaggccactccagcatcccttggaccaagacaagtgggcagctcaacaaccagtttttaacagaaaatgtggccagaaaattagtactcattccacagaataccactggctgtgatggagactgtgtggctgtggttcaggcatcttcattggcctttttgtagcaatcactgcacatccaaagtcctgagggggagcacccacatgcaaagccagggtctcaggcccatcgcttggcatccaggggaacaggaaggaggaggagctttccatcgatcctgaatgggagcaagacacagccatcccaccacaattataccttgtggcaaggtcccccngatctaccggcatatcctcgtgcc

SEQ ID NO: 334693 - DNA, 707 bp, Homo Sapiens
  misc_feature (563)..(563): n is a, c, g, or t
  misc_feature (618)..(618): n is a, c, g, or t
ttgggagctggaagtccaaggtgaaggtgttgtcagggtgggttccttccgagggctctctccttggcttgcagacggtgtcctttttccttgtgtcctcacatgcccttctctctcttcacatgcatcccttgtgtcttttcctcctcttaaaaatagacaccagtcataatccattagagccctactttaatggcctcattttaagttaatcacctatttaaggccctatctccaaataaagtcacattctgaggtactgggggttggaacttcaacaagtgttttgacgagatgagggaaacaactttgtccatgccctttatatgtggttaccattggagtgtgtgtgtgcatgcatgtgtacccaattaatgtagaaccatgattaagaacttgaaggaacattgaagaatgcctcattcccaaactcccattgtagaggtgaagagatgacacccagcagtggtttgggcgaccaagttgggcctgaaaccgatgcacttcccccatgcagctctccattaaggagtaaaggtgagaacataggttcagaacattcntgctgaaatgaggaggacagggtagatcattaatctccattcgatgttcacagcngtacttcctaagctgttttctaaggaacgttagtcttgcaaactgttgattagtattttataagttttttctgccgtctcatgaggaag

SEQ ID NO: 334694 - DNA, 761 bp, Homo Sapiens
  misc_feature (666)..(666): n is a, c, g, or t
  misc_feature (668)..(668): n is a, c, g, or t
  misc_feature (671)..(671): n is a, c, g, or t
gatattgggtatattttttattgtctccctttgtaccttatctttattcccaatgcctagcttaggtatacagtaggttccaaataaatatatggttgaatatgccaatcagggaatttaggaggattgagccctgtctaggatcagagataaaggtaggtctttcatgggaaagggtccttgaagagggaataagtatcaaagacatgttaactgtattccttctcttccttccaggcagtagaacgagtcctgtacccacacctgtccacctactggacaaacttgcaggctgtgctggatgattattcagtatctaatgcccaggtcaaagcacatggacacaaagtctatggagccattctggtgagtaccgtccccttccaagcctcccttccctgcatgagcttagcagccaagcaggcttactttggaatatttgatgggcccaggttcctcgaattttttgcctatcttagtccttggctcttacaggtggcggtagagcgactgctgaagatgaaggcccaggcagcagagcccaacaggggtggcccaggtggcagggggtgccggcgcctggacgacctgccatgggacagccttctctttcaagaatcggtctccgggggcggtgcagaacccagctttgggtcggccttcccntngcnccagggggcgcggggccggaggacccttctctttcggtgaccctggccgacatctaccgggagctctacgccttcttcggtgacagcttg

SEQ ID NO: 334695 - DNA, 818 bp, Homo Sapiens
agaagaaagatgttacctgttctttcctggactgtggctatcagggtgccccaccacgatcactaatacatgtaccctgtttccatttagctgggcttgggcagagtccttccgttgtcacacgtcatatgaggctgtctgctgaggaattgtcttctgcttcatcgttagcatgttgaaatattgctttccaaagcatattctactttatcatttgtatttatgtaaaataatggaatggttattctaaccgtgcagtttcctatccttggttatttaattgcggaaagataacacgtgggttttattttgcctaaaatctgctaggaattgtgcaaaatctttgtgaaatgcccaatttcctagcttaagttatagatgtttgtatataagagaaaaagcctattgctaaaagcagcaatgtctttatcgatgcaaaaagctttaaacttactggccgtgtagtcagtaaaatgcatcagaacgtggcaaaaattgagaaaagcattgaagttttaaaatcgctatgcagttttcttcaactcccttgcaagatacttaatttgagtagaagacagaataaagtgttcccgttgaggaaagtgacagggaggaccgttcagaacgtgtttggaatctgagcagtcctgtcacgctctagtctgtgatgtggtggtgtgtccatggtaccactttatagaacttgaagaatgctgcttctgtgaataaaatacattttattcttggcatttcatttgtgagttttgagatgtgtaaaacgtgttaatggtttctttctcttacacaattacttgttc

SEQ ID NO: 334696 - DNA, 877 bp, Homo Sapiens
  misc_feature (37)..(37): n is a, c, g, or t
  misc_feature (602)..(602): n is a, c, g, or t
  misc_feature (687)..(687): n is a, c, g, or t
  misc_feature (738)..(738): n is a, c, g, or t
  misc_feature (743)..(833): n is a, c, g, or t
ggacaattttatggcatttctctacagtaaaatttanactatacatgtttttgcctgtaagcttgacaacatttggctgtgagcttgtgttcttttatcacattcgtaagtaatagaggacgtttgtaggactgcccagcagagtattagtttatagaaattttgttttaagcaattatctcaactgttttctcaattttatctgatcatatacatgctttatcactgatatacagctacctgtttctattttcatttcagatgttttcttgtctattatcacactttctatcttaaaactttatatactatagtagcctaacataaaagtctaagaaggcttttctcaaaagttgcctgactacttttctcctggatatgtctggttttccacgcattttagctctcaccattccaatttatttttccttccctatggtgtacagacatattggagttaagggggtcctaagtctttcagtattgcagtctgcatttgagagaccaaaaagtttaattctctgtaagcagttcttctgtgcttttctgtcaactaggaatctctctcaagctttatatcactctttgcccatccattaccnacttacaggaataaggaaatttaactgaaatatggtgaataggcagtctaccaaatttccagagatcttagtctagaaatggtcngtttaccagttttcaggtaggcttataagtaaaatccacagctttcaaatntaaannnnnnnnnnnnnnnnnnnnnnnnnnnnnnnnnnnnnnnnnnnnnnnnnnnnnnnnnnnnnnnnnnnnnnnnnnnnnnnnnnnnnnnnnnnagttttgcactatattttctattctccaccgccccaccccccca

SEQ ID NO: 334697 - DNA, 570 bp, Homo Sapiens
agaaaggaatcagaggtgattcctgttcctaaggggctcacagtctggctccaactcttttttcctcaccctatcctatataagtttccactgcccttctccatttcctcggtcccaattcaccttcccatttcctgcctctcttctcctgagccccacctgtaagggatgacctttttactgattaaaaaaacacaagatgtgctcagatttgaggagagaaggacatttgtaagaaaatcttttggtagaaaggcactgaagatcagcaactcttgtcggatggaggactttatgtgtgtttatttcagcaaacatgtaaggaaactgcctctttccttagtcaacaagaccagattcttgagctggtaatggaaagagcatctccaagtagggagaggtggttgcatctggaagccccaactctcatcctgaccccctgggcattctcttattcatgaactctgccacacggatctggtggggtgtgtatctgtgccatcttcctgttaatgatctagacaggcatgatggacccttcctgagtggctattaaatggggatgttttg

SEQ ID NO: 334698 - DNA, 423 bp, Homo Sapiens
ttgctagttccaatgatgtttattacccgccctgagcttgaaataacagtagacaaagatagaagctagcctctggttttacaaagcctttgtacaagtcctctctgtcttttctgtccatgccagggaaatgtattgctggtgctagagggagaggaaacgtggacggccaagaacagggcggcacagtcctctgggctggaggcttgtgttccttcccataagcagggcctgtggggtgtatggggcagaacataggcctccacaccaaactgacagcagagaaaagccaggcaacctgtttcaatccgccccagcagtgacctgggttctatgtgtgggagttgaactgctgcggccctggagcgactgctcccagccttgggggctgatgtggtctagaaggacacctcgccacacagt

SEQ ID NO: 334699 - DNA, 493 bp, Homo Sapiens
ctgaagtagttacctgtttttaccccattttaacataagttcaaagatgactttgaataaatggcacaactggcgttcaatgctcttaaagagtaggacatcttagtgcctttcatctctatttctacctatccccttacactggtagctcaaaagcctcttcattctagaaaaggggttatgtgctaccttcataacgttttataaccaggaactactcacaagtagttgggagaaaaaaactatacatgcaaagtgtttcatttttctcaaaaaagccacaaaagaccaagtcacacagtaccgctgccaacctgtttgcaaaagatgcactacataccatgtttataaatcttgtgtttaaagctcagtatgatacggccaaaccgcatgcatcatcaatggagtcactgaaaactggaagcagatgctatacttttaaaaaatgagtgtaagacttcaggcacctaatttccagaatttctatgagcaa

SEQ ID NO: 334700 - DNA, 455 bp, Homo Sapiens
  misc_feature (190)..(218): n is a, c, g, or t
aagatggaaagaagctatgccttagtcgaatattacttccttttgaatctcaaacatcttcctcttattgatactattcagctcctctgacaacctcctcataaagaagcagtttcttaatctttgaggagtaatgaccctttgagatctaatgagcactaaagaccatatctgcttttgttgtcggggnnnnnnnnnnnnnnnnnnnnnnnnnnnnnggcatacattcaattttgcaaaccacttcataacacctgtggtccctctgtggcatcgggatgagaacccttggtctggtggcaccgtgccactctaatttcaatggggcattcttttaagaaagcgtattacaagcccagccccaatgtttcattttcctaccagggttatcagttcatcactggtcaaagctgaaaacaagcaacttttatgtcccacagtaagggagctacctt

SEQ ID NO: 334701 - DNA, 588 bp, Homo Sapiens
ttaactgttccctgccacagcacacacaaaagtttataaaaatattgaaaggatagtctcacaaaaaaagcgaagtctgagtttacagactgagtatcaagtacatgcaaaaaagctttcatttcacccgtatataaatggtctagagaaagatacatgagaaaagtactgactacataacacagtctttgtggcacttaactaggggtaggggaggaggaaataaatagttcatagttagttagggtcaattctctgtcccatagtccaaacatggagatcccacagtgtcccaaggcagtaaacatccaggtatctttccagataacttcctgagagtcagagctttcttccagagtttctcgtcttgcccccttccaaaagccaacattattgccttcagtttccgcagcctgaagtcagccatcctgaaacacaaattggaacctattgcatggctggatctcatataacaaaataagagtgttcctagaaagcagtttttcagatgactttgagggaacatctgaaaagatcagtaccttgtagtctcaggatttagtgggaattaggagatcatgtaggtag

SEQ ID NO: 334702 - DNA, 756 bp, Homo Sapiens
  misc_feature (254)..(254): n is a, c, g, or t
ttttttctagcccgtcttagaacttatccttaagcaaattagtggataggaggtactctcatcccgcccccattcaggctgatagtaacagcctaggtagagtcaacacataaaaaagtgtaattccaggggaggaggattagaataaggacacaaaggaagggaggaaaatgttctttgaggctgaaattccattaatttttcatagtattgagtttatatttgccattgcatccttcaatctttctaaaaangggaatccccggaacataataaaatctcttctgtatagaaaagctacagctccacactaagaggaatgccgtctgccttaaagaatggaatcatcagtgaccaagaattacttccaaggagaaattcattgatattaaaaccaaagccagatccagctcagcaaaccgacagccagaacagtgatacggagcagtattttagagaatggttttccaaacccgccaacctgcacggtgttattctgccacgtgtctctggaacacacataaaactgtggaaactgtgctacttccgctgggttcccgaggcccagatcagcctgggtggctccatcacagcctttcacaagctctccctcctggctgatgaagtcgacgtactgagcaggatgctgcggcaacagcgcagtggccccctggaggcctgctatggggagctgggccagagcaggatgtacttcgaacccagcggccctcaccacgccgaccctatgcagtcttg

SEQ ID NO: 334703 - DNA, 532 bp, Homo Sapiens
  misc_feature (37)..(37): n is a, c, g, or t
  misc_feature (188)..(188): n is a, c, g, or t
  misc_feature (215)..(215): n is a, c, g, or t
  misc_feature (452)..(454): n is a, c, g, or t
ataaactgaagctttatctggagtgggggaatggggngtgtgggtggaaatcttgtggtggtagctgtgggaaaagtggggtttgttatcacagctcttgtcctttaagttttcagtcctcgctcacccttggaggagacctgaaatcacaggacaacgagcttgtgtacaggagagcagagcctccncattccaggcacccagagttccattcncaggccaggcctctgtgatatcttttttctggcaccaaatctgtagaatttactgaacacaaagcaatcctccaacactcattggtctaacgtttgaattctgacaccacccagagttcagcatagaccctggattcagagcacaatcccacaacactgtctttaactgcagatgccagtcacaaacttcatgggctgatctatgcttctgagccactgtttaataactgggggctnnnagaactttcctcaagttcagtaatataacagagctattcacagaactcagtgaaacactgtagttatctttaccagtt

SEQ ID NO: 334704 - DNA, 590 bp, Homo Sapiens
  misc_feature (573)..(573): n is a, c, g, or t
gggagacacgttttgttttaatatagggggattaaaatgatctctgagaccccggggctcccgttttgaatgccgagcactggagtaacaaacccaggagtgggcccagtgctttcttcttcaaagccctacttaccacaacaaaatactttgcattccaatccagaagatggctatagaacagggctttttgtctttctataattctgaagggttatgggtctgaatcttgatgggctgcctgtagggactaaaatcaagcaagatggatttgtcacaatcctggtgatacatgttatattttgcaaactgtattttatagtgagcctttgaagaaagacacctgattccatttggaaaaacactccagaataccatatctatatctatattgtttacatcattataaagtttaaggtcaaactgaatttaaacttttcatagggtacattttttccttttatggtcagtgcttttttgtgtgttgcaagaaatctttacctacccatagaattgcccttgggtgcctttgtcaaaatccattgaccatatatctgtggatctggataatcnaattatgtcattggatc

SEQ ID NO: 334705 - DNA, 413 bp, Homo Sapiens
  misc_feature (336)..(336): n is a, c, g, or t
taacttagctagcaggctgtcaattttgtgtatcctttcaaagaaccaactttttgtttcaattatcctttgtatcatttttttatctcatttaggtctgctctgatctttgctcttttcttctgctagctttttgtgtggtttggttatttttctagttccttgatgtatggtggtagcttgagatcttcctatctttttaatgtgggcatttaacgctataaactttcctcttagcactgtctttgctgtatcccagaggttttaagtattgcctgtgtctccattttcatttatttcaaaattgttttcaatttcccgccttaaattggcatngtttacccaaagttccattccaggagccatggttggtttagttttcccatccaccttgaaataggttttaagaagtc

SEQ ID NO: 334706 - DNA, 545 bp, Homo Sapiens
acagagttcagaacttgtggtttattgacacttctgcatggtgggtccttgggagactgcctttctggcatcttgggacttgtccataagaatagggaagacagtcatcctgtcctggagcaaagctctcccttgcacaggaacacaactcccctgccggagccgccccccgagacgaatgcagataaacccttcgcaaggcctgcacttgcaccggaatggcagatctccgtgcattttggcaaagctaatggagccttggcagaatgcacaggactctgggggctgcccccttgagctacagaggcagaatcgaaccaaaaacactgcttcctttaacacagcccaactggcttacatttagcttgggacgaggctaggctaagaagggccagagctgtcctcccagccctgggaacacggctgagacggcccggtgcccacgctgggctcaccataggagaggagaggagagggagggggcccatactggccctgcgtctgcacccgtcctttcccactaacacaccatttctatctgggtt

SEQ ID NO: 334707 - DNA, 524 bp, Homo Sapiens
  misc_feature (73)..(73): n is a, c, g, or t
agccatacagaaatcactccagagcaatagacaatatcttactttccagattcccaaaatgatgtaggaaacnagagtaccaaggaaactctgaaaccaaatatacatgtatctggtcatgttgaagaaccagcatcaccactagcagcatatcagaaatctctagaagaaaccagcaagcttataatagaagagactaaaccctgtgtgcctgtcagtatgaaaaagatgagtaggacttctccagcagattgcaagccaaggcttagcctccatgaagaagaggggtccagtgggtctgagcaaaagcagggagaaggttttaaggtgaaaacgaagaaagaaatccggcatgtggaaaagaagagccactcgtaacagcgaacggtcagtcaaggatcataagtttttactgccagtattgagaaattcgtggaagaaatgtcagcaggaagtaaaaattcaccgagaagtgtgtgtgtgttcgctgcttccacacattaatggcatgattttttttatgc

SEQ ID NO: 334708 - DNA, 128 bp, Homo Sapiens
acactggtgaataacagtcattttatttcatcttctcaaaaccagtggaggtacagacaataaattaaacaaacaattacaaattgtgtcctaacactaaagaaagcattgaataggggacagtggtt

SEQ ID NO: 334709 - DNA, 541 bp, Homo Sapiens
  misc_feature (346)..(346): n is a, c, g, or t
ttaagacagacaggtcttcatttcaaagatttcactggtatttacaactaagcatataaatacccaaagcgagactccccagtcctgagttttcctgcttcacttcacagaacacactttgttaattaccaaagctgccgtccacaaattagaacttctgctggactgggaaggcagaaatgagaataaatacctcttcaaatctgcagatctgcggaactgcgcaaatatcctgtgaatcggacccacttggaagagtgtgtgggtcagcggtgcattcaggactgtgataaaatttaattagaagctgcatattgggacaccgttattgatgcgctggtacacngtagggggaaaaccgcagcctgtgtgctgccggtgcccttgggtgggagctgtcttcacggggctgctcacatagtgctgaaatcaaactcactggtcatactgcccactgtcattttgggttgaggaccagaatgtgcatttctgggcttccccaaatctggaccctgtctgttcccaccactccctatctccc

SEQ ID NO: 334710 - DNA, 588 bp, Homo Sapiens
ttttacctatccctggagcaagtaataggaagagaatgggcaaactggttgcacgagagaaaagagaatggagttgggagcaacacatgaacttgcgttataacattctgctgtccagatctgccctactgtgctggtggtcggtctgtccctcttctcattagccactcacaggagaggtgcttgtgcactctgattcacaggggatgaactcaggatctcaaaagacatacaaaaactagaggtatgtatcacttaaatagctacgaaactcacaccgtgatctcccttctgacacacatctgcgccatctcttccaacataaaataaactgtttcaatggtttgtcagttatttttcaaatcactaaaatgtacagtcatccaccaacaatttaagaaagaacctaagaggcaaatcactggggactgctatttgagttttatcagtcaaaggctcaagcatcaagaccctcagttagcatttcaaagtacatactagaaacaagaggctgggtggcgtgtgtgtgcgttatggctgattcaccaggtggtaaaaaaacaagaggttaatctcctctttttgatt

SEQ ID NO: 334711 - DNA, 383 bp, Homo Sapiens
taagaagtacttctgcgctgtagcaaagagagcttgaaaaattcagctacagaagctgcaaaaccagctaaacctgatgagaaaggagagatgcaggttgtcccagttttggtgcatctcctgtctgctatcagcagtgttaggctttacattcctaaagaccttcggccggtggacaatagacagagtgttttaaaatcaatacaggaagttcagaaacgttttcctgacggcatccccttattagaccctattgatgatatgggcattcaagatcaagggctgaaaaaagtcattcagaaagtagaagcttttgagcatcgaatgtattctcatccacttcacaattgatccaaatttggaaactgtgtatacgctttgtg

SEQ ID NO: 334712 - DNA, 300 bp, Homo Sapiens
  misc_feature (233)..(233): n is a, c, g, or t
ggagcaacatgctgttttaatgagcgcctgcatgcagacaggctgaggcctaaaatggcatcagcccaagtgaggatggggcaggggttttatagtcctctgtaaacaggaattgtcccagcctaacgtgactgctatgtagtaccagggcgacctccctcttgatcttcagggggtacgtgtcttccagctagctctcttcctgcctctgctatcttgctgctcggtgcaangtttgtaccttgggactgggcctgaggaggaggagttattcatcccgcaagctttcagggcccctga

SEQ ID NO: 334713 - DNA, 474 bp, Homo Sapiens
  misc_feature (41)..(41): n is a, c, g, or t
attagggagctcttcctttaaatgggtccctgatatggccnggctatccctcaccatcccgttaccatttccatccaggattggatgggaacatccattccagaggtcctttccaggggcaattttggaggtatgtaataaaataaatgaatatgtttgtcacagtatctttaatgcagattgagtatatatatactactatacacaattgtgtaggactgctacagtggctgggaatcacatgtgattttctgatgttgcttctgggagttacagaaatatttgtaagtattattaatcttagggtcaaaagttaccgaaatatttaaagatgagtaaatgaaaatatctaatatagaagaatataaaaatgtattaaatcaatataaatgtcagatatataactataccattaaatgtggtggggaacggaatgtttttgactcagctaaatttttagagaaatcggtagag

SEQ ID NO: 334714 - DNA, 574 bp, Homo Sapiens
  misc_feature (14)..(14): n is a, c, g, or t
  misc_feature (56)..(56): n is a, c, g, or t
gagactgcataggnctcggcgtgggtaaagtgagatgaaaatattgaccttatatncctaccttggaggaaccatccttcttccactatataataatcctgcttagttcatgtggtgctgaccctacttctatcctgctctgggcatcagcaggcaatcgaagcgtacaaacaaaatacttcatttcctggccactttgttcatggatgggcagatcgtaactcaggccaatcagagttctccctagacgtgtgctgaagctataggctacagggtacaatgtagaactgggacaattaagagacatcttttcaacttccagaaaatctatcagagaatgaagccagacaaagccaggaccccaacatattgcagcaactatatatggaattggcccacctttgaacatagcccaaaattttccttctgcacttaagctagtgtgacattcttttggttactcacaactgagtttcttgaatcactccaggccaatgtacatttcactcctcactgcatttaatgaaaaactactaatgaagaaagtatgtcatttcccttatgtgtgccggca

SEQ ID NO: 334715 - DNA, 335 bp, Homo Sapiens
  misc_feature (19)..(19): n is a, c, g, or t
  misc_feature (32)..(32): n is a, c, g, or t
gtttctccactgctgtccnttaatcactgatngaacatacagattaatgggtagcaagacaggaactgttttcatctgacgctattgaaactcgtgtgtttgttttatttctacgtaacagaatcagaatgagaaacttctgaggcatttactcccagatcatgtagctcacgtaagatgttttaatatctgtgctgtgttagaggtaagagtgttgcaaaacagaagttatgggtctagcctcatgaacttgcaagcgggttggggacaaaaggctgagtgctgcaccgtggctgaaagcatagaaattgtcaacagcccccatatagagcccc

SEQ ID NO: 334716 - DNA, 456 bp, Homo Sapiens
acttgatgtcggggtaaaagtaaatactgtcagaacctctgtgacagctacaagcgtgtaaaatttaagtctttctaacaaagtctttgtagtacaataccgtgatctgttgtgatcaaagggtgtcggttctttgattagaaacaacaaaagagccagcagatgatatccttggaaacgtctgtacaagcatccatctaagtgggggcatatggaggcagccacagacacatcactgtgcaaataatactcaggagcatcaggcacacagtagagaaacttgcttcctggatgactcacactctacttcgaggccatagagttgtggccagagtttaaaaagctggataaaaagctaattaactagtcataagaaatgcactaattgctttgtccagcattagcagaggggacctactgctctccctcattcttcagtgagaaggagggtgccat

SEQ ID NO: 334717 - DNA, 299 bp, Homo Sapiens
  misc_feature (220)..(252): n is a, c, g, or t
gggtatataccaagcagtgggattgctggattatatggtagctctatttctaaattgtgaggaacctttaaactgttctccatagtggttatactaatttacattcccaccaacagtgtatgagggttcaattttctccacatcctcaccagcattcgttactgcctgtcttttggatgaaagccattttaactagggtgagatgatatctcactcgtannnnnnnnnnnnnnnnnnnnnnnnnnnnnnnnncagacagggtctgctctgttgtccaggctggaatgcgcgtgtgacaa

SEQ ID NO: 334718 - DNA, 192 bp, Homo Sapiens
cagcatgagccaccatgcccagccttgaattatttttttatggatggggaagctggggcatagagaagggatgttctcccataaagtagcttatgtagacatcaagacagaagacatcagagaatcctagagtcctgatccagaacctcttggccattgactgtcctggatgtgtcagagagtgtggaatcc

SEQ ID NO: 334719 - DNA, 459 bp, Homo Sapiens
ttttcatcaaaggaaatgatttttattgttacacaaaacatttcttgtcagagcacacataaatctagacagcagctgcattttcagaacaaacagatgaaatacctttggtgaactgtgagttggggaaaacaagtcaccttattttaaaatttggtaatgtgtttactgagtttaacagaaatcaaaatcaggacagagtgagaaaaaacatttctgtggaaacaaaatgcgttctcatgagcacagcctattgtgatgcttattattttacacagaaagaagaagaactgggttccatttcctgggcttgggaaaatgcagcaaaccctgaccaatgcaaagaagggcttcctgggtctgcctctttagtctctgagctaacagttgctccccagctgccttctgacagacgcatataccagctgacacatccgggagcacacagctcacctgtgt

SEQ ID NO: 334720 - DNA, 643 bp, Homo Sapiens
  misc_feature (95)..(95): n is a, c, g, or t
  misc_feature (224)..(224): n is a, c, g, or t
aatttaaagagacgagacaatcatacaaatgatgtgagcactattaccatagaaagcagagaagtgtttttgagttggtttgtgtttaaaaatcncaacccactgcttaaacgttgttttaattaattagctgctaaccaccacacgtgcctgctgttcctagtgcacccagcagagaatgggctgtgctcccatctgcctgcctgcctacctgctgaaaagcncctcaaggcagagctccatgtgataaagacaggggatgttgctctgtacccaggccactttaaatgaagaacaaatcattatcaagtacgaatgacagatgacttgaaatctgaattatcttagtgcagacttattcacaaataaggatgtcttgttgtctctcaggtgtgagcattggatatattttgcaaacaagcaaaggccaaccaacaaaatatttcatcactttccccgcattccagttccttgcacgcttcctcagggcctgtttggtgctccagaccccaaaggccggttgggccaaaggaaagtggtctgtatgctgtgctaagccactatgaggaacccctggtcccaggtctgttaacacttggatttgacagatttgaacatttctgttgctagttgtttaatttgg

SEQ ID NO: 334721 - DNA, 467 bp, Homo Sapiens
  misc_feature (334)..(334): n is a, c, g, or t
  misc_feature (350)..(350): n is a, c, g, or t
  misc_feature (395)..(395): n is a, c, g, or t
cctaaagcaattgtttcagttaagccaggcccatggatcttttgagacagaaagctaccctttccattcacggcaacataacattcacaatgtgctttcctaaatggatggaaaacccctcaaaaaagcccctcaaatctgtgtttcataaactgtactcttagcaataaagtttattacagacctaaagtatctgcataaacccggttaattgaaaagtgggtggagaaggctgccaaattaaatgtttacattagcacagctgtattgtaaaaacattctgccccctgtgcttttgtaattataagatattttctggactggtgttatctcntacaaaagttttatcntccactggccaagagtggtcttgggcacggagcgactgcagtttnttgggcagccaggagctctccgcgcggggcaggattctaaaaatggctgccaagcgggcctcctgaaatgtc

SEQ ID NO: 334722 - DNA, 506 bp, Homo Sapiens
  misc_feature (60)..(60): n is a, c, g, or t
  misc_feature (102)..(102): n is a, c, g, or t
  misc_feature (167)..(167): n is a, c, g, or t
  misc_feature (169)..(169): n is a, c, g, or t
  misc_feature (177)..(177): n is a, c, g, or t
  misc_feature (210)..(210): n is a, c, g, or t
  misc_feature (215)..(215): n is a, c, g, or t
  misc_feature (221)..(222): n is a, c, g, or t
  misc_feature (224)..(224): n is a, c, g, or t
  misc_feature (232)..(234): n is a, c, g, or t
  misc_feature (244)..(244): n is a, c, g, or t
  misc_feature (247)..(247): n is a, c, g, or t
  misc_feature (249)..(249): n is a, c, g, or t
  misc_feature (252)..(253): n is a, c, g, or t
  misc_feature (258)..(258): n is a, c, g, or t
  misc_feature (261)..(261): n is a, c, g, or t
  misc_feature (265)..(267): n is a, c, g, or t
  misc_feature (272)..(272): n is a, c, g, or t
  misc_feature (274)..(274): n is a, c, g, or t
  misc_feature (281)..(281): n is a, c, g, or t
  misc_feature (283)..(284): n is a, c, g, or t
  misc_feature (286)..(286): n is a, c, g, or t
  misc_feature (288)..(290): n is a, c, g, or t
  misc_feature (298)..(299): n is a, c, g, or t
  misc_feature (301)..(301): n is a, c, g, or t
  misc_feature (304)..(304): n is a, c, g, or t
  misc_feature (306)..(306): n is a, c, g, or t
  misc_feature (309)..(310): n is a, c, g, or t
  misc_feature (323)..(324): n is a, c, g, or t
  misc_feature (327)..(327): n is a, c, g, or t
  misc_feature (337)..(338): n is a, c, g, or t
  misc_feature (344)..(344): n is a, c, g, or t
  misc_feature (348)..(349): n is a, c, g, or t
  misc_feature (353)..(353): n is a, c, g, or t
  misc_feature (377)..(377): n is a, c, g, or t
  misc_feature (390)..(390): n is a, c, g, or t
taggtgggaaggacaagctgactcacccacatgacagtgcttcccttcccagccgggggngcactcgaactggtccaggcctaaacgcagacgcctccgttncaaggcttggcgccagatggcttcaacaggtgagcggccccccgggtgccagcttcattccagcncntggcaagnacacttgtgttgggtctgctgaacctcccgccncagtnacgttnngnttatgttnnntagttgggcngtngnccnnctganctngcgnnnggtgncnccaaatntnncntnnnttgtgtgnngnttntnacnngtttgggtggtcnnaancaaaaaacgnncgccgnggcnnccanggtctgtttggagcagactccctnctgcgtccatgcnagaggatgaggtgggagagattgagtaggccaggccctggggagccaggagtcccacttccctcaagaggctactgaggccccccgctctccctccagatgacagcctctcacccc

SEQ ID NO: 334723 - DNA, 823 bp, Homo Sapiens
  misc_feature (306)..(306): n is a, c, g, or t
gagcccccaccacttgttggggacctgcctaccattatttcatgggtacactgcaggttccttctctcctatgctgcatgattggtggtctgctgtacactgtgcagatgtttctcctgtgctatttcatgattatttttcaagtggcctcttagtcaagggatggcaggtcaacacatgggaacatctgctcttaccatttttctaagcaaacagcagatggcattgctgctgtccttttgatctgaagcaaaaattcccatgtctgaggtgttggtttacattgacactgcctggcaagcgacntgcctgagatgtcggcctcccgcaacagtagcactgcttacagatgttttctctgcaatgctcatttttagtttgtttcttcctgtgactctacttctgcagggtgtcttaaactttgattcttcctcctgtgactgttgctccatcacctcactgatgtcaacttatggtcctcaggtttcctaccatttgtcacttgggatcaccattagagttgccaaagaggagacagtaacctgcctcacatcaggaagtagacactggctatgtgtgtgtgatggactacacaagattatcttggaaatagctgaaccaccaacctttttctaggtgattcctctgccagacaagaccatcttaaaattacattttaaccgttggatttataaaactttaatgtatgtattctgtaagatttgtactcatcgaacaacttatctttacaaacagtgcaaatatgcaaatgaaatgtccacttcagtgttattttctagacggagtagtagcctgttagaag

SEQ ID NO: 334724 - DNA, 559 bp, Homo Sapiens
  misc_feature (57)..(57): n is a, c, g, or t
ctcaggtgatccgcccgccttggctcccaaagtgctgggattacaggcgtgacactngtacctggtcaaaatatgctttttaaaggcaaccaaacagtttgcatttcagtttatgttctatagttatatggagccacggatacatcctttttctatactggcaaaatgagaaacatatttttcacctgaatttcaaaggatatgacacttcgtaagcctggtaatgttattggccaaagtaccagagggcccagggctttcccagttatttaacagttactgatatgtgtgcatcattgtacttattattaagttaatgcaaatagtcccccaaatttctggacctctgtgaaactgatgatgctgttgtctaagtcagtcatcggttatgtgagactgaattaacctattcagcaagtgtgaatgcctaccgtgtgtatgatactgtgctaggtgctgtagaggccatatacctgggacacatagctttcctgctctttaggatttcctgctccttgcaggacaaagcagcctgagctttatgaaactagtctgtaac

SEQ ID NO: 334725 - DNA, 566 bp, Homo Sapiens
  misc_feature (385)..(385): n is a, c, g, or t
  misc_feature (453)..(453): n is a, c, g, or t
tgtcatttgtcctggaatatttcagtgattctcagacattgtgtcatttcgactgtaaataattcagtgtgcatctctgagcgattgagatatcatctgtagatctagttatgtatctatctatgaatgctacgttcccttccatccacctctctggccttgtcctctgtgttgaccctggggaagaactacctggactacctgggtctttcttcctgggattacacacctgccagctcaccccatgctcactctgtgttgctaccacaggaatttgctggaacacagatcattcaacttccttggttgaaatcgttcagtaattttctgttacctccagaaacaccccaaatgcttccctgtgccatgcaaatcatttcgtgantttgacgcccacaagtcatccgctgggcactcgatgccaaacgaggtgcgttcacggtgctgctcctnggcgccgcttttcctgccttctcagaggctccggttgaggggagcggcccgggagccttggccgactctgactcctcctcctgcctctcccacgccgagccctatgcagtctc

SEQ ID NO: 334726 - DNA, 495 bp, Homo Sapiens
ttggtgttttccatgtgtacctttatttaatgctcacagcatccctatgagataggacttcttatacctacttcacagagaagaaaatggagacatggaaggttaaggagcttgtgtgacatcatacagttagcaaatgaaagagcacagatttgattccacgactctctgcttgcaaagtctaagatgatgttaatatagcaggaaactcacataatgtctataaacccattgcctgtggggtgttaaatctccaagaatcagcctttggtccccgacctgtagaggatgtggatcttctagctgagcctgatgctcttgtgggttcctcactgggtcctgacctctgagtattcggtggaggtgtccttggaaggattcatcccatgaaagttgagggaagcataatgcagctcctcatccatctccacagtaggggcggcacctgaacagcttgaggtttcagtggggccatgtaacttggacttcttctgg

SEQ ID NO: 334727 - DNA, 519 bp, Homo Sapiens
attaattatatttgtacatatgcatggggtacatatgaaactttgttatatgtagaatgtttaataattttttattgtttttcacactcaaatattttcaatccataattggttgaatctgcagatgcagaactggctcacatggaaggcaaaccgtaaaattccaacacaacctctgcatgtgagaaatcaatcagctttttctcctcctcctaccgcactcaaaattgtaaggcagtttgtcatcgtcgcacgtgaaggcacaggagggagactagctaaatgtggcagaaagaacgtcggggcccgcagcaccacttgttcctcagaactgcctcccagcctccgaccatccttcagttgagccagcgtacattaaagctctcaccatgtgtgctgccttcttccagatttttgcactgaagcacaccagtcagcagctttcaccacttgggagaatgatcaaggccaggaaagcactcatacacaggctgagtactaacaggacattctacggtt

SEQ ID NO: 334728 - DNA, 860 bp, Homo Sapiens
ataatcattagacttttttagatctgttggtgtgatcagttgtattagcagttttcctaacagtgaatcatccatgtctgtatgtatagaatagtcactcgcttgcttactatgtgtgaagtttttaacgtgctgctggatctttggggtgtgtgtcgtggcacacacatagagtgcacacatgaggctggtttgaaggtttcccttttgcacatacgctgtcttcatcctcgtttatatgccaatgttatgtttgtctcataataggaacttagaactttccttcttgtgctgtgatctagagctgtgctgtgtagtaatgtagcctctaaccacgtgtgattattaaaatttaagtgaactagcattacatgcaataaaaaaactgttcagtcaccagtagcctcatttaagagacagacgtggctagtgcaggtctagaacgtgtccatcaccgcggaacgtactgagacttcttgcgtcggtggaaacattcgttcactacacgggcagtcatgtgcaacggcctaggtggttctgacgtgtgtctgtagtgtgccaactcatagcatttgtcatttgtgggtgcgttcaagcctggacaggtgtgatgtcatcctggtagttgcgaagcaaacatagtgccgacctagaatcgtcgtttttctgcatcgaggttgtcacattggtggccaggtcctgtggttttccccatgggaacgcttggggcctttgccaataaaccccctgggggcccctcctactctagccgccacggggctgcaccctccgctcttggaaatcaacggctctccaaaaaaaggcggaaaaacgcatggcggcacgatcccgtccggagg

SEQ ID NO: 334729 - DNA, 513 bp, Homo Sapiens
  misc_feature (63)..(63): n is a, c, g, or t
  misc_feature (296)..(296): n is a, c, g, or t
  misc_feature (333)..(333): n is a, c, g, or t
  misc_feature (362)..(362): n is a, c, g, or t
tgagactgctggttcaaagtctgttttgtcagaaaataggattgcaacccctgcttttttctngctttccatttgcttggtaaattttcctccatccctttattctgagcctttgtatgtctttgcatgttagatgggtctcttgaatacaacagcatactgatgggtcgtgattctttatccagcttgttgttctgtgttttttaattggggcatttagcccacttacatttaaggttaatattttttatgtgtgaatttgatcctatcatcatgatggctagctgggttatttntgcagacttgttgaggtaactggcttcatagtgttanctgggtaaaagaaaacagtgtgtttctgntagtggccagtaagtttttcctttccatatttagtgcttccttcaggagctcttggcagacaggcctggtggtgacgaattccctcagcatttgcttgtctaaaaaggatttgatttcttctttgactatgaagcttagtttggccagata

SEQ ID NO: 334730 - DNA, 545 bp, Homo Sapiens
ttttagctagaaaaggtgtttcctcccattttatttcataatacattttcacagaaacatgatatatttacaaatatacaggtaagagactgctggtcagaaatcttaaaactcaaaatgtcatcaaaaattaatttacaaaagccaccaagggtccatggaggcggccaggtggatggtgtggccggcgtctgcgtgacctggcccagaagcccacgcagcctcccggctctgactccgctggccccgtctcaggaagcgctggtttgcaggtttttggaagctgcaagcatcgctctgactttggccatgagatcctgagtgattttgctctgcacggaagaaacgattgctgaagagatctgggcttctttttcctgagagactcccctggagcgctcctggctggagcccgactctccacaggggagacgctggctgagtgcgccgagtgggccgcgggggcgtggcggtggcgctgactgcttgctgggtgacacgactgaacctggcttgacttggtcgcgacgggacgctcttttctt

SEQ ID NO: 334731 - DNA, 432 bp, Homo Sapiens
  misc_feature (63)..(71): n is a, c, g, or t
  misc_feature (391)..(391): n is a, c, g, or t
gagatgaagtctcactctcttgcccaggctgtgtctcaaataaataaataaacttgtgcttgnnnnnnnnncgttaatttgattcttgttttcagaacaaagcaacacagagggtggagtgcacctagagagacccgctgcctttcgaggcctggaaggggtggtgcctgaagggccagaagggacacagacgtagccagaggatgtataaaaaggcctctgcagaacccagaggtagctccgggacacacagtgacttcccttgggggacatctgcaaaacttgtagaagggccccagagaaaatatgcagagctatgtgctggctgggagacacggaactggtcaaggagacataaagcagtgtttccaagagggctatgtccttggangaaagaggaccccttacacagggctcttcgggggaagccct

SEQ ID NO: 334732 - DNA, 714 bp, Homo Sapiens
  misc_feature (376)..(376): n is a, c, g, or t
  misc_feature (535)..(630): n is a, c, g, or t
ccaggttggcagcgggaggttgagtggggagtgttggggcataatggtttcagagaagaatctcaaatccctgctctgcctctgtacccttgtgcaaatggcttcacctttgtcagcctctaaagttttttaatctatgaaatgaccaacctgccatgccccatttatgaggccataacaaggactaataagataaccccaagtagagcctccagcgcagtgcctgaactactccttcatccccccacctccttctccctctgtctgcatgtgccagagcttggtttctttatctgcattcaaggaacctccctctgcttgagaagtatgagggcagcagccctccaaggctgggaatcttggcacatctgttttngtgctcaaaactgtgccctgtggtactaagggacaaactctgttgttttcagacaccatcatccccacccctcatttgtaagatgtactttctttgggtaggtgagacacatgaacatgaatcaagaatctctccataggccaggcacagtggctcatnnnnnnnnnnnnnnnnnnnnnnnnnnnnnnnnnnnnnnnnnnnnnnnnnnnnnnnnnnnnnnnnnnnnnnnnnnnnnnnnnnnnnnnnnnnnnnnnaaaaaatgttttaaattatctgggtgtggtgacgtgcacctgtagtcccagctattcaggaggttgacattggaggaccagtta

SEQ ID NO: 334733 - DNA, 593 bp, Homo Sapiens
  misc_feature (471)..(471): n is a, c, g, or t
  misc_feature (491)..(491): n is a, c, g, or t
  misc_feature (514)..(514): n is a, c, g, or t
  misc_feature (559)..(559): n is a, c, g, or t
gtgtgagccactgtgcccgacctgatttttcttttaaagatggtaccatatactaattttgccctttgcccttcctttaaaataatcttttattaatacatattttattcagaaaacaaatatgggtattttttttggcaccagtacattttcagagattcttttattcaacatgttactattggtgctaaaactgttgtacatttagctggaaccccttcataccagcccctgtgtcctggcgctcccactcagggtagcactgctctcttttttggcacagtggcacatcccagcctcaataaatccatgctgacctctgtaactcggcctggtcaccacagtgtcaccacagagacctacgtgttctcccttttcctaccaggagaactctgggtcacaacagtattgcatggtcctcatttactaaatccttacaatacagagaaattaacctcagatttgctatgncctttctactgtgaatgacnaacagtaattggtaatcaattgnataaaggtccacattcattggaggtccttttggtcctagaataangcctggtttatgtcagaagtactgaaattttttc

SEQ ID NO: 334734 - DNA, 481 bp, Homo Sapiens
  misc_feature (213)..(213): n is a, c, g, or t
gcatgtaaagtgtgcagtgcatggccaacaccatcctcaacacaccctagtgccagcacctgcccagtcccatttctgcagctccacctccatctcaccggctcacagaagacgctaaacagaaacacaggaggcaatgcatttactgcaggacttggatatctccagtgagtgtagcattgtggctaagagggtaggcttcggggcagacangatgcagggcctaatccccagctctgctacttaccagctttgtatcctgaacaagttaccttatcaccaccaagcctcagggtttctcatatattaaatcacacttaattttagaaatgttctggggattataaagtacttaagcatggggttgtcacagagaaggtcctcagtaagaagtgggcattttcatcacaggacagagtgagacatactctagaacagcccagtctgaaagctttgtgtgatgatgtaaatgttctatatt

SEQ ID NO: 334735 - DNA, 495 bp, Homo Sapiens
tcatactcgatctaaagacttccatgtttagaactgttcatttatgctttcaatataattcagagattataccctttatagtcacatgtattaatcttttccttgtgcttttttggttttcatttttatatttcaatactgctacaattattagtgctattcatgaaatattttcagttctcttctcaggtacaaagttgaactgtacacccttggccctttgaaagataagtgtgtccaagtgattgaccatgtgatcttaaccaatggaatatgaataaaaaggatctgttgctttcagagaacaagtttaagagccaacatggcaattccccagtctctctttccatctgccaaggagactggcaatcttctagagagtagagataatcactgggatagaaaacctactatcccacccacaatggtatgtgtagcataactactaacatttttttaagggacagggtcctcactatgttgcccaggctagaa

SEQ ID NO: 334736 - DNA, 523 bp, Homo Sapiens
  misc_feature (20)..(20): n is a, c, g, or t
  misc_feature (23)..(23): n is a, c, g, or t
  misc_feature (473)..(473): n is a, c, g, or t
  misc_feature (478)..(478): n is a, c, g, or t
  misc_feature (484)..(484): n is a, c, g, or t
  misc_feature (507)..(507): n is a, c, g, or t
tctcctgcgcatcgcagatncgncctgcacccgcccagcaccctcgtactcacctggtctcctgcgcattgcagatgccacatgcacccacccagcaaccttgtcctcacctggtctctggctgtccagagttgcttcctgttgacgacagctctcctcagaagaaagccagcttccctctacaagtgctctgggaaaaggagagcaggttgaagtaacatttcctgtactgagacttgcaccctgtgatctctcactcatcccaaattctgcatgtggatgtctttcttctgagaacacccgatgtgtgtggatcggaagctcagtgggcttattcgtatttaacctgggcaaacctggaagtggaagctgctttgtattacaaggatttccagagcctcagcatcctgctgggccggattcgtgtgccctgaggaaccgcactgcgattgcaaaaagggtggctgtgcttnctggnccttcnctcttttggcggggaagaattgncgttgttggagatcaa

SEQ ID NO: 334737 - DNA, 338 bp, Homo Sapiens
  misc_feature (21)..(21): n is a, c, g, or t
  misc_feature (56)..(145): n is a, c, g, or t
ttccatattttaggatttccntaagagaatttttccagtttataattattgttttnnnnnnnnnnnnnnnnnnnnnnnnnnnnnnnnnnnnnnnnnnnnnnnnnnnnnnnnnnnnnnnnnnnnnnnnnnnnnnnnnnnnnnnnnntgcacacacaccgccacccccactacagtcaccatcccacaccacagtgaaatgtttattaactgttaatgaagctacattgacatttgggtcatagtcacccaaagtccatagttacattagggcttactcttggccagtcacccgaagtccatagttacattagggctccctgttggccagtcacctgaaa

SEQ ID NO: 334738 - DNA, 763 bp, Homo Sapiens
  misc_feature (30)..(30): n is a, c, g, or t
  misc_feature (32)..(32): n is a, c, g, or t
  misc_feature (310)..(310): n is a, c, g, or t
  misc_feature (360)..(360): n is a, c, g, or t
  misc_feature (402)..(402): n is a, c, g, or t
  misc_feature (525)..(525): n is a, c, g, or t
ctcccaaagtgctgggattacaggcgtgcncnctcgcggccaataggaagatttcatatttaagaagtctcaacttctagcatctctagaaaacccacaggacttggctatacctggtggccattcctgcttgagactagattgccagagctgagtagcggttgacccttttaggtgggtactgaggtctccatttgcagtctccaccaggtctgctttgcctttgctattgccagtatttgccctggcatctggcctggatcttatgctgaccctaatattcagacttctcaagtctgaaacctttaanggaaaagaaaataaggaatgtaaatggtaccttgtcttttttaaaaaaantcattttactgtctctacaaaaataaaatcattcttattaangtcaaataattgggtgaaggttaatgttagaacatggtagcattcattaactttgtcactgattggcattatacatatggggtgagccattgtttcttaataaaaatgggggtgagaccttgnctaggattggttacggaccatgattgatggccagaactcatattttttactgtatttgtataagtagcagagaaatatagtaggtgcttcaagggttgcaagagtaaaatgccccttttctcaatgggagaaaagggagtattagatctagtaggaaattaagtaaaccaattactgtgattcaggctaggttaagataaatatcacgagtgaagtatgagcaaaggtcatgagggtt

SEQ ID NO: 334739 - DNA, 788 bp, Homo Sapiens
tcacacttgtttcaggtgacttaaaccttttcttatgctaagttttttgcttgtcctattcaactatctaaggacaaaaaagcccacccagcatccagttcctatgtatcattacagttcagggctatccttatcaagctcatagctcataggaggctctggagggaaaccatgcagagaaaggtcagagacgtctgacactcttttggaccccataggggaccgccctgaggatcctccgaatctcaacctctccaaagggggtgctctcggcagaggttttgaggtctagtactaagccccccttagaattttctctccggtttgcaatactgtttagccccagtatagtttggaatctggagtttcctgtttgaatgggaaagtgggatggcatttgcattgtatcccagcctttggttgctgctgttctaaagcagggggcctgggttaacatgtgacatgctccttgggtgctggtttgggccccagtgttctttggaatctggagaggtttggtcttgaaaaatcaagctccatggagactgctttacctgaaattttggttcacaggcctttgttggattatctattgagacaaagtaaatgccaacaagcttgtattgctgtctcacagctaaggttccaagctgttggttcttcgtttatgtgtgggtctacatgtctagatgtgtttatttgtatgtacacctattgtaatacattgtgtctaccaaattggcttacaagtaaaagagcactcataaataaagtaaataagtttaaaa

SEQ ID NO: 334740 - DNA, 497 bp, Homo Sapiens
  misc_feature (260)..(260): n is a, c, g, or t
accatcttttattataaacaccatcacatttcaagtttcctctttttgatcacaaatataggactttttcttctcctcttaagtatacagcatgaaacacagcgttggggctttccaggtttcttacagaaatttccttacgacaaacttagggttagcatccacagaccatgctctcggtcacatccttcgacatctggattgcccaagacggttgcacaggatgcagactccaaagaggatgaggttggtacataacngttttgaattccaggataacctgaaacagaggcccctccactgcccacattaaaaggctgcacaaccaggagggcgccactttctgagtgtgggcttagagctgctgctctcgggctctagcccacttcttgtttgaacacatggctcaaggttttccctacgggtgggaaaagatgaagatggacactggaggttaagaacccagcaggccgagcagtggcagcaatctccaccgg

SEQ ID NO: 334741 - DNA, 898 bp, Homo Sapiens
ttaagttaaggctgtaggtttattcacatatatacacatttatatgtaagtggtctatcccatgtgaattttttgatgctgggtaagccttgagctacgattaaaagctttgccacagtcattgcatttataaggcttctccccggtgtgaattctctggtgtataattaggtgtgaacgccacctaaatatcttctcacagtcttcacactgatgcagtttctttatagtattaacctttttacggctcacaaaggtggacccttccagggcattcccatattcgtaaaaccactgggccctagtgtgtattctctggtgttcaataagatatgagctccggctgaaggcttttccacactcactgcactcaatagggctttcacccctgcatgaattatctggtgttggaaaagggttgagttttgactgaaggctttcccacattcattacatttatagggcctctctccagtgtgaaccctttgatgtattgtaagctgtgtgctcatactgaaggcttttccgcattggaaggcattcgtagggcttctctcctttatggattctctgatggtaaataaggctgggactctgacctgaaggcttttccacagtcattacacacatagggtttctctccagtgtggattcgctgatgctgaataaggtgtgagccctgaacaaagcctttgccacactcatcacatttaaatggtttttctccagtgtgagttctctgatggcgaataagccgtgaactacaaccaaaggcttttgtacacttgttgcatttataaggcttctctccagtgtgaatcagctgatgctgactcaggcgagagatccacctaaaagctttcccacactcatcacacttaaatggtttctctacagc

SEQ ID NO: 334742 - DNA, 593 bp, Homo Sapiens
  misc_feature (565)..(565): n is a, c, g, or t
ggaataccattgtgtttattgatcaagcctggcttcgagtgtgacagagccattcttggttctccttggaagtaacaagaacactgggtaacatgtgaagtgcatggagactcacctgaatcccaccaaagtagtagctggacccagtagcctagcttattgtcttggcagtgcccctacccagtaccattagacctggctttgtcccttacataggacagactgggcttctccactcccgccaggctggccctacctccacctgtccttggaagctagtatgtaagtaagggaggagtcatcaagtttataagatgggtaggctgaggattgaggcaggaggggacttaatggctgagtccctggcttgttccagagccctggcccttgagcccctggactggtcagtgcatggacactctcccctcccagctcgggcggaagacttttcctgacttagctgctccatacacacaatctataaatatgtatttgctttaaaaattaaataaattagatcttgggccagcctgaggtcatctggccagccatggagtcctgtganatggacattgtcatgtgtcatatataga

SEQ ID NO: 334743 - DNA, 456 bp, Homo Sapiens
  misc_feature (170)..(170): n is a, c, g, or t
ggcacgagcgcacgagctgccgcaaccggggcgaatcaatgcggccgccaaggtgctttaaccaagagagcagatccagctgagcttagaacaatatttttgaagtatgcaagcattgagaaaaacggtgaatttttcatgtcccccaatgactttgtcacatcgatacnttgaacatttttggagaaagccagccttaatccaaagactgtggaacttttaagtggagtggtggatcagaccaaagatggattaatatcttttcaagaatttgttgcctttgaatctgtcctgtgtgcccctgatgctttgtttatggtagcctttcagctgtttgacaaagctggcaaaggagaagtaacttttgaggatgttaagcaagtttttggacagaccacaattcatcaacatattccatttaactgggattcagaatttgtgcaactacattttgga

SEQ ID NO: 334744 - DNA, 516 bp, Homo Sapiens
atactgacatttataaatgaacctttattaaagacacttcaatgccatttgttagacacttcaatattttacatggttttcaatgtacactgtaccaaaatttctataaataaataactttgtacataaaagtaatactccctctttcacattgcctctcagaagcagcaaattcacatattttgtggaagtaagattagtcagttaactgtcaagaacaaaattctaaatgtgcttaccttttgaacagtgatgacacctgacagtaattgttaactattttctcagtaactcccttcagcttttggccaaaggaacatttgaaggaccttgtttctatttaagttttacttaatgacacattggcactcataagatggttagctaccagtctcaaaagtggcaaattatacccagaacccaggtcaagggctgtcctttccagtcccagctcagtttcatctgtgcgaaggaatgggcatggacaggcctgctctgggtccttagtagaaataa

SEQ ID NO: 334745 - DNA, 761 bp, Homo Sapiens
  misc_feature (381)..(381): n is a, c, g, or t
atcattctgcaaacatttactgagcccgtattcatagaaattacctttccttattaccagatatacgcattgttacatatgaagtgcttctggtataaaaattcaaatcagtatgtgtgttttatttaattgcttggttaacctacacatattttgtgtgcaaaataattaaagggtacaaaagtaaaattatcgatgtttctgacaattactgatttctgtgaaattctttgatttccacctgcaaaagacaaaggctatttattgttactcaattatttcaataattgagtaagctgaagattccatgtcgctagttgggcaggtagctcacctcctgtgatctgggtgtggaaccactgggtttttggggatgaggtngagcccttcaagaccagctggcttatcttcacgtacagatgaggtgtgggggacatgggaaatagacttctcagaactgaacttctcagagtcagggatcagagcttgttcatctttgtgtcttcacaaaaagagtcattggtaaaggataaatgctcactaaatatttatttgcttaattggtatctaaacttggtttttataatatgtaatatgttccactacagtaaggagagtttctctttttgtagcagtaaattgcagaatgatttattcttttctaataaaaatcaagcaagggcccaatgcagcaactcttaacttcaggatttgagctcagctagggtgccagctacagcctcaaccacaattatttccaa

SEQ ID NO: 334746 - DNA, 899 bp, Homo Sapiens
ttttcacaaagaatcattttatagattttttttcctgtgtggattctctgatgttcttaccacccctattacttttataggatttatcaccaacatggattctgtgatgaactgtaagatttgatcgccaactgaagctcttaccacatatctcacatttataaggtttctccccagtgtgaactcgctgatgagactgtagttgtgaagaccgactgaagactttaccacacacatcacatttgtatggtttctctcctgtgtggacactctgattgaagttgaagacttgaggcctgactgaagtacttaccacactccccacatttatatggtttttctcctgtgtgcaccctctgatgcatgtcaaggttcaagctccacttgaagcccttcccacactcatcacatttgtatgggcttatctccagtgtggactttttgatgggcttgaagatgtgcactccgaccgaaactcttccccacattcttcacatttgaatggtttttctccactgtggactctctgatgggccaaaagatttgaggcctgcctgaagaccttcccacactcctcacaattatatggtttctctcctgtgtggatcctacagtgaattttaagatcatgctctacgactaaatcccttgccacactcttcacatttgtatggtttctcacccgtatggatcagctggtgaatctgaagtcgtgagctctgattgaaaccctgcccacactcctcacacttaaaaggtttctctatactgtgggccttctgatggatttgaagatacgaactttgactgaagcccttcccacatatctcacatttatagggtttctctcctgtgtggaccactagatgaacttgataatgggaattcctcctgaagct

SEQ ID NO: 334747 - DNA, 795 bp, Homo Sapiens
  misc_feature (86)..(86): n is a, c, g, or t
  misc_feature (100)..(100): n is a, c, g, or t
  misc_feature (291)..(291): n is a, c, g, or t
  misc_feature (387)..(387): n is a, c, g, or t
ttatgctacttggggattcagcagaacttatctgactgatggaagtgaccaatttgaaccactgaccccagaatatcccagcaggngcaataatcagcanagaccctgctacttttgtggctgtcttggcatcctcacagaggcctggttcaaccctgagctgtacacaggctggtttaaatgtttccccgcagattttggaagcaacgtgctgggtcactcgtaatataaccacatgcttcagtgtagccctcctacattgcttgcctacatctgaaaacactgaatcangaaagagaatatagctcctttccacttgacttaaagaacagtcaatccttccagtagactaaaggctgggtcatgggaacaatttcccaaacacanctgacttgattttgtgtaaactgctggaaagagaagctttaggaagctgtggctggggctcagaatcgagtgcctccaaaggagcaccgaatgacagattgatggagctcatcagagaggcacagagaccacaggccattggaatggggccttatttggatggactcatggcccaaaaaggaaagggacactgccaacagcttcccctttagcctgtgggttccattaggaagccggaacatgtcactgggagaaagtgctatgaccacccaatatgtcacaggtgcctctaggtggaagaaagggaaagggcgtgtttacaagaagaagagcacaagtcaacaatgagctatggatgcatgatgtcatcctctaggactaagcatccttagtacttttaaagcactt

SEQ ID NO: 334748 - DNA, 574 bp, Homo Sapiens
  misc_feature (56)..(56): n is a, c, g, or t
  misc_feature (60)..(60): n is a, c, g, or t
ttttttctctgggcaacaaagcttgatgttttcactgctttagtttcctgtttgcnggtnggaggggatacggtctgtgactctggacttgctctgggggaacagttgtcactgcccccggggagaggggcagcttgggctggagaagcacagccagagacagagcccctcgagagggatccttggctgcttcattgtcttccccccaagcaagccctgctctccaacaggcacctctggggtcttggtatggtccccgctcacctccttccagagtcctgagtggtgtgggtgtgggtggcacaggatctggggcatgggaggggttcagaagcttcccagagccccgtgtcctggcagactcagctggtgggctggggtgttaaccccagtcctggcgtaggtttacagactctcaaggtacgttggccctggtctcctgggagagaggggtgagggatgtcccctaccaaagcacaaggtgggatcaggctgcctcctgggttgggtgtcgggggagctgtccggcagcctggcagggagatgcaagggctaaagtaaaattttgtcaagt

SEQ ID NO: 334749 - DNA, 658 bp, Homo Sapiens
acaaaaacaaatttatctttaattatatcaagatttgtacatataaagacgggttgagtctcaggattcaccgagctccagaaattggcatcctcaagccccaatagctaataaaaaaggtaagatagtaacctatcttacctggccctaaaaactggcatcctcgagccctgacagcggcccatagattggcagacaactgctgagggttctggtgctgtaatatcagttctgttacagttctttctccaagggaacggagctgctcgcatggctcttacacgaccttcttcctccaccagttgacagtttacaagtgtcaccagtttcctttgcattggacggctcagtgcactctggttcaagctagctacacctttacctccacttagtggttttaagtagagtgccaaatcctcaacgcatttctttgcaacctcatagtggtttaattctcacctagattacttaacttaattgactgatgatctggtacctgggctccaactaactggagaagtgcgaagttgacaggaagtacatcaatatctgtgttgatggcagtctggtcaaaaggacaagcttttcgatgaagtttattcaagcaggtcttgcaaacagtgtgtgaacaacctaaactgatgggtttgtgcacatt

SEQ ID NO: 334750 - DNA, 490 bp, Homo Sapiens
  misc_feature (340)..(340): n is a, c, g, or t
  misc_feature (383)..(383): n is a, c, g, or t
  misc_feature (403)..(403): n is a, c, g, or t
tttttttctttccactagccagcttaatagccatggagccccacaagctcccacagtgccactagttacgctccctggagctgtagagccaggacatcacgacagtccagaggttcaaagacaaggctattgtacaccctggtagattctggacttcttttagcctgcagatgtcatagatcaagcaacctctagaacacgtcatttcaggcaaaacagtaggaagacatacagacatcatgaacaaggttatttatttagattaaaacttttgaaattaccagaggattaacttgaagccccagtatttgatgaaagatggaaggaagataactgagtnggttaaagcacaagttttggatccacatgctggctggcctctncacgagctctgagatcttgnagcaaagtcacttcacagctccccaccttagcttacctgtctctagaatgggggtgataacgacaccacctgtcacatagggttgtc

SEQ ID NO: 334751 - DNA, 496 bp, Homo Sapiens
  misc_feature (202)..(202): n is a, c, g, or t
caaattccagatctttttatgtgccttttagagaggagcccctgaactaagtgggccccattcttatgtcaactattgcagaccagagatttctgagtctccttgtcagccgtctcacgtagcaaccattgtctggaacgccctatttgtgtgtcaaggaagctcaacgtgatggacttgcaaactctcacacctcccaccnagcacctgcagccccttatctcccctgctgtggtcatcagcaccaccacacccccattcgcccaagctaaaaaccacactagtaaatgtttgttgaataaatgaatggacacagataacttctgataacaatggtgaatctaagataattaacaatcctggatagcatagaagagatggtcatgattgccaaatagattttcggacaataattgcaatagaagctcaaggtgagggaagggagttaaaatggtgcactcacttactctggacccggctcttcacaatatcatat

SEQ ID NO: 334752 - DNA, 578 bp, Homo Sapiens
ttcagattttacccatgtttatttcaaaaacagggacgaagagccttcttgtcgtcagtcacgggctgataggagtctacttttagctaggaacggccaacggaagataattgtgccattttaaatgccacataatgttcttaatcagcaaccaagtgtagaagggagtctgtaaagggcctgaggtcctgattcaatttcttcagcttcccaagcccgctcccaaagagcaggcaggccacccaaatcctgcagcttgtgaaaccggctctggccccagaagggatttatgagcgcttcacttcaaggaataccacccaggctggctggctgcaaatgcgggctgcctattagttctccttcatttcccaggaagtgtgagtgagagagctccccacctcccgataggcgacaatcccagcctcttgacatctctcgcgctgagcaaacttttcactggaggatcccagctgttcgccacctccccgcttgcttgccggcagtctggtgtacaaggcagaaggggcgagacacacagagaagaaccaaggggcttttggaggcttgcttttgcctga

SEQ ID NO: 334753 - DNA, 129 bp, Homo Sapiens
tgcaggagccactgcgcctggcctgttgacctgaatttaagttaactaattctgttttatactgtctatccaatgagttacagattctaggtactgtatttcaggtttaaatttttaaaatagtttcca

SEQ ID NO: 334754 - DNA, 451 bp, Homo Sapiens
gaccacctgaggtctaggtccccaaagcagatggctccatagaaagccccactaacccctgtctccacattgggcagtggaagggttctggaaaggaagctctatggctaggagctgccaatgcctcttgagtgtgacatcacaggttagaggccctgctgagctgctagcacagtgcagtggagaaatgttgcgctccgtcaggaagctgggctcttgccatgccagtagcttgcttacgaccttgggcaagtcactttttcctctctggggtcctgtgtccaaaaggcttaatgagccctttctaatggttctttgattgctttatgagttaggggctgtgaccctagccccagtgccctacaggaaggtgctgacctggacgcccgcaggaccacctgctaaatcaggcccacttggggagcaagccctgaagtgctttattaccttg

SEQ ID NO: 334755 - DNA, 722 bp, Homo Sapiens
tcttcgaattcctatggttctagttatataggagaatatccttatttaggaaatgcattctattatagtgcttaaggttgaagcatcatgatgtttgcaacgtattttcaagtgttcactaaaaaagcagatgcagcccttctgactaaatgggaaaaactctgaacgtaggcactgtatagacaggtatgccatcaactaccaattccgcatttttatcggtttaggtttttttaacgaaggttggaaaaaagctgggaacagcagacaccaagccagaacagtctgtgtgggttcgtgttgctttgttatcagctgctcttcacccatggaggcttacgtggtcacaagccctggtgctgtgttccgccaggcctggcacccactgagcacacaaacagtcactcaccactgaattgtgacgtaggattaagaagctaccacttctggtcatctaacccctccatcagcaccgacggactgaatcgggggttctcaaactgaggcaataaccaggaaatgatgatgattaacatctgggatttggagtgaagtgactatcggttatgtaagtaatcttttcaaaaagcaagaagccatcttttctatcacaattcaaccggttaagatacagtttaactctgcgattccatgaagcctgtaagtctttattctggtttgtctcaccagataacagctcccactaatgacaaccagtttaa

SEQ ID NO: 334756 - DNA, 515 bp, Homo Sapiens
  misc_feature (117)..(120): n is a, c, g, or t
  misc_feature (425)..(425): n is a, c, g, or t
  misc_feature (436)..(436): n is a, c, g, or t
  misc_feature (443)..(443): n is a, c, g, or t
  misc_feature (495)..(495): n is a, c, g, or t
ttcattcatcagacattttaatgagacccaatctgatatgaccccttctttggggtagctcatcatccaaggagaaacaaacagttacaatgttacaatgcaacttgctaaatattnnnntaaccgcggtaattacataaagctgtgttcccccagctgctcccctgcttgtgctgagatcaggagagctgtaggaaggagccacaggggtaaaggatgacccactccagctgttggaatatgagatgagtcacatctggaaattctaatttggtgcagctgcccaaggcaaagtgggtaggccttgttcacatttaactcggtaaagctttatgaagcacctacccagtgggtgcccatgggaggtgggatcagattgagccacgctgcctgccacctctgtggaggggaggctgggcatgggntacaactttgnatgactntaggactctttcctctctgggattccagtttccctctttctaggcctccttngaatgggcctcagctcattt

SEQ ID NO: 334757 - DNA, 582 bp, Homo Sapiens
  misc_feature (424)..(424): n is a, c, g, or t
  misc_feature (532)..(532): n is a, c, g, or t
ctcagtccaaatgacatttattccattttctctgtgggacatccagctaaagaggaaaaagaacgtattttcaaattattctgtctcttagccatagttacctagggaaggagtgaaagccattgagagtccacagacagaactcgcagccctggcttcccctgcccctgtaggaggcggggaaggagtgagcttcaggcccaggagggtccacggccccctgcagccatcctgcagcttccagtcctcctcctggaccatccctgcactcagaccttctccccggcccaccttccttcctcctctgggatcagacttcggtactgtgtcctcagggacctttcctctgtggccggcacccagtgatccctggctcccagcacacccagctcagaggtcggcagcccctgcccacgagctccangccgccctgcatggccttatgctggaacgtctctggaatcttttccctttctttctgtgttggctgtgtcggggtggtctttgggaagcactatcatccaagggtccnctactccgtggctctctctctgcccttccaggctgagcagcgtgttatgt

SEQ ID NO: 334758 - DNA, 575 bp, Homo Sapiens
  misc_feature (386)..(412): n is a, c, g, or t
tactaagtatttaaaaagaagtactcagttgttaatcaaaataatatgatttggaaaaatgtaaattaaacctcagagtcctagagtcaaactggttttgaatttcctgttctttactagacatgtgatcttaggtgagttagttcaccactttgtgctttagtttccttatcaagtaaagttgtgataataatattccatatatgatagggttatgctaaagattgaatgaggcaatatatataaaatgcataatacagtgcataataataatgcacacagtggcaagttcctgtagttccagctacttgggtggctgagacaggaggattgcttgagcccgggagttcgaggctgtagtgtgccgtgattgtacccgtaactannnnnnnnnnnnnnnnnnnnnnnnnnnaggaagaccttgtttctctttttttaaaagcataatacattacctaccatatactaagctctcagtaagttaaaaattaaaacaaaaagttatgaatatttacctgtaaccaactttgtaagtgaaggtattaatacattggagtttatctcttgaattttaa

SEQ ID NO: 334759 - DNA, 254 bp, Homo Sapiens
gcaaagtgtcttggtttttctttatctgataatttctggattagaggttgccctatcttctgcaatgtgttcactctattgctgtgttatctactgcatgttggttgcttttatatcaaaccatttctgtcttatattcaattatgactccaaagcgtctaataggtttattcaatgaatggtcttaaagagaaagacaacttcagaagaccatgacgcaatctaccctcagatgaaaattttcaggatagcta

SEQ ID NO: 334760 - DNA, 473 bp, Homo Sapiens
  misc_feature (19)..(19): n is a, c, g, or t
  misc_feature (69)..(69): n is a, c, g, or t
  misc_feature (82)..(82): n is a, c, g, or t
  misc_feature (136)..(136): n is a, c, g, or t
  misc_feature (338)..(338): n is a, c, g, or t
  misc_feature (453)..(453): n is a, c, g, or t
taaaggggtaagttggggncttaaaggaaaaaaattatcctatccattagaaagcttccccccatcttnaccttggggaatngcagagggaatgggggctggggatgagtaagaatggggggcttgggcttaggcnaggacaggtacccagagtcctgtccggtcagcaggatgagaccaacaggggaactttgctcaaacagtcattccagctgtgatgagaccacttcctccctccagaaaaatacacgaagactcaaaggtttgcacagcaagaagggaaaggggtaactgcagcaccggcatgtactgccctcacccaccctggcctggcccangccactagaagtgggcaacacaaagcaatcggtggccagctctagtttaccaactgacctggtcatctctcccgttgctcaaaacatgcagcatctccaaagcacttcttccccnattaccatgttcacacatcc

SEQ ID NO: 334761 - DNA, 310 bp, Homo Sapiens
aaagtagaaccaaaatacaacttgcaggggaactggatgcttctggaagagtttgataagtgttgtttgagtttataaagtaaattaccttttttactttccaggtaaaaaaatatacctttgggaggggaacaacacacactggagcctgtcggggagcggggccacaggagggagagcatcaggataaatagctaatgcatgtggtgcttaatacctcagtgatgggttgatggatgcagcaatccaccacgcacacatttccctgtgtaacaaatcctgcacggcatgcacatgtatcccggaactt

SEQ ID NO: 334762 - DNA, 388 bp, Homo Sapiens
cttaggtccactagggcccatctagggaagggaaaggagatttcagcggcttccccgaaaggaacgggactgtcgggatgcttcccggatgtctacagttgccccttcctgcagtgagattactgcttcctgtttccctccagctcttcccagcagcagtgagggagtataagagggatctgtagtcgctgcctggctctgtgggcggcccctttaagactcaggtgagctcagccagtctccgtgcgccaggcttgaatcaaaggtgtcagcaagctagatgtcaaaacatttcgagagagaggcagcttgcagaaaagcagaaaggttgaattcaggggtcagcaaactatggcatgtggccccgtgagctaggaatggtttttcc

SEQ ID NO: 334763 - DNA, 409 bp, Homo Sapiens
attctttcgaaaagaataaatgaatgaaaagaaaccacttttcattctttaagaactatcttttgtaattatttttatattgtaagtagttgttcataagtggggagccacagatcacaaataaatactagcaaccaaatttatattttactacttatcatactgttttcagtaatataaacactaaagtaacatgtagatcacaaaatctttaactaccaagaatgtatttcccaagcaagagactacatttgccatattaataggacagtcatggatttttaggtctctagtttcagaggaagcatgaccactttgcctcagtgacttggttgtttactggcatactgcagaccatggagggcaggagtggaaaggcagcagtgagccagctagtccattaaatgct

SEQ ID NO: 334764 - DNA, 493 bp, Homo Sapiens
ttctgagcctttttcttttccttttaaattgctctctgcggatttcctcagctacaaagcaagttgagtagagaaagcccgatttatgacttggctttttaaaccataatcacccttctgggcttctactggagaagggctgggggattttgtaggttgccagataaacacctgagaaaacgtgttctcagatcccccaaatccacggaggggccgtgatcccacgggtaagcagcagtcccatggaggcccatctggcgcacacacagcatggcgctgcaacgggagatggcatcactggtcattctctcattctctctcagggagcgtctgtgtttccaggagaaaatagcttagtaagagttactgtcttcacctccagctggggtaagaaggaaaaacattgccgagctgaggtattagcccagagttccatttccagatagtggagtttgcaccattttcagcctccagcaagactgcattaaaagat

SEQ ID NO: 334765 - DNA, 347 bp, Homo Sapiens
ccctaatccccataattacagcttccttaaaaagttgttgtgggattttgcgttgcataaatagccatgtgaattccacaagaagcaccagggaaagtttagagatttgcggcaatggaccgaagaacgggccaggaagtcctccaatttcctttggtctttccaggagattggactacacattgtaaagactgactgggtttcaactagtcaaaaagcactttcttctgttttcaatccctgttcgatttgtgcttctgtgcttgtaggagagatggccagggtggcagccctcatgcaggttgaagtatatgtagcctcagcctgatattcttggtgcgaaggta

SEQ ID NO: 334766 - DNA, 475 bp, Homo Sapiens
  misc_feature (416)..(416): n is a, c, g, or t
  misc_feature (438)..(438): n is a, c, g, or t
  misc_feature (450)..(450): n is a, c, g, or t
  misc_feature (457)..(457): n is a, c, g, or t
aaaaattcacctatattttaatgctttcatagttttattttttaaaatactgattcatttggaactttgtaacatttaatacaaggcaaaattatataaatcgcaaacatcagttaagtaaactgtaatgcacacccaacagaaagaactttaaagcctccaagagcttttgaagcttcttccaagtttttaatttcacagaaatacagcagaataaacattcctgcgtataagactttgaagaatttgaatcatgaaatattgtgtggtaagatggattgaagaggcagaaaggaaagttctaagggtttgttttctaacactgagaaatcatgtcagctggggaaaaaataccaattaattactggagtaccttactgcatacatttcaacctcattccccatttgggtaccanggtaaaatgggcacagtccccngattattatatntggaaangcaatccttttctaatcc

SEQ ID NO: 334767 - DNA, 453 bp, Homo Sapiens
gccacggggaaggcctgcttcctgtggtccccctgtgtggctggcagggagtggtacggcgctgggagtccagaatcactgaggacacggaaagcttcagcttctttgagaaaactcagattttgtaaatgcgcatccagttgacagcacttacggtggaatccgtggagttggacttgtgagaggccttgccctgagggggttcttggctggtgtctgtcctggaggtggatgccttgatggctgtgtctcccgtgctcccctcacccaggtcctcatcctcaggactgtgagacgccgttggacgtggaggagcctgaggagctctggctctgtgggtatgtcctgctggcatttgccagttgaaacctgaaggattggaaaatgtctgtataccaattccaattaacaacaggaataataagcccattgcatataagcagcacattcttt

SEQ ID NO: 334768 - DNA, 451 bp, Homo Sapiens
  misc_feature (428)..(428): n is a, c, g, or t
aaattatgaagtacaaaaactcccatattgggtttcttttctgttacatggaaaaaactttctttgtaaagtgaccacagccaggagtcaggcctcctgagtatgttaacaaaatgcaaaacactgctttccagctaaagaacagccacaaaagggacctgcatcttaagccaggtggcaatcccaattccatctggaggctgggaggcagcctgtctgttgggtgacaggaaacacctcaggaagggggtgcccagcctacatctgagcacatcggcttccttgacattgaccaggttgctggggcaaaaaccacttgctctccagccggctaagtcatggcttcaacccctgtatcactgcacagtggggtgagaaggtccacatttgccccaggtcctctcagcatggtgcagtgctctgctcanaagtcaccacctgagaatactac

SEQ ID NO: 334769 - DNA, 614 bp, Homo Sapiens
caattaaaccaaactggacaaatccttgtggagcaaatgggaaaagaaggccttcctactgaagaaataaaaaatgttctggagaaggtttcatcagaatggaagaatgtatctcaacatttggaagatctagaaagaaagattcagctacaggaagatataaatgcttatttcaagcagcttgatgagcttgaaaaggtcatcaagacaaaggaggagtgggtaaaacacacttccatttctgaatcttcccggcagtccttgccaagcttgaaggattcctgtcagcgggaattgacaaaatcttcttggccttcacccccaaaattgaaatggctcgttgcaaagctgctcggccctgatgtctcagccttctgccccagattttgtcccagcggggctttcgatagcttttctgggccgctaccaagctgtacaagaggctgtagaggatcgtcaacaacatctagagaatgaactgaagggccaacctggacatgcatatctggaaacactgaaaacactgaaagatgtgctaaatgattcagaaaataaggcccaggtgtctctgaatgtccttaatgatcttgccaaggtggagaaggccctgcaag

SEQ ID NO: 334770 - DNA, 769 bp, Homo Sapiens
  misc_feature (124)..(134): n is a, c, g, or t
  misc_feature (429)..(429): n is a, c, g, or t
  misc_feature (494)..(494): n is a, c, g, or t
cgcgtcccgtcagttaacccacggcccaaaacaccgaaaaagtttcaaaagggcccaaaccccccggggagtgattattcctgcggggataaaaaaagagggctatcctggaaaattcccacannnnnnnnnnnttcggtaccttaagtggtccctcaagataaccggcatgtagattctccgatggactcaatcatgggtacaattctaagagacttgtggcctaatgtgaagagccaagagaatatgggaacatttagccagtcctctgaggtagcttggcaatacagtggattaaagcatgcaggagagtccctgttatgaaagcccacaatatggaactcccgcatgtgatgcacacacactgctggcgtatggttttctgagtgtgtgctattaccgccttacaattggcctcaggtgcttacntgctgacaagctgtcaggttcctttgtgcatgggcctttccttggtctcaccccaatttgctgcngtgttgaggggaatacgtggatgtgacaacatagctgtgggttgcttccaagtactagtgagtcagtggccaacagactaatataatgggtcacaatcagaataaaaaagaggctgttagcctcggcagcagtcaagtaatcccaggacccatgaagggcaaggcataactacacggtagccagtgcagaagatacacggtgaatcaaagccaactgttgtgggaaacacctttggccacgcatcagttattgcgacccacactcatcagccatg

SEQ ID NO: 334771 - DNA, 525 bp, Homo Sapiens
  misc_feature (99)..(99): n is a, c, g, or t
  misc_feature (101)..(101): n is a, c, g, or t
  misc_feature (514)..(514): n is a, c, g, or t
cagagaaacacagcaaagctggagagaggacatgggaacagcgagcagctgttggtacccaccccaggcccaggccccagaaccttgagtacaatcaananggagaggagaggagtcagtgggggcaggggaagaaggcagaaaaaaataccaattaagtgtgaaatccagccagctattgggccacatagggtgagggactggaagcacagattgtgcatggagtgtaaacattttcccccgctgttccctgctctgagagcatgaggaggctcaagagaactctggtcaagccttctgcccctcttatgtctgtctacaagggtgtcttctgctccaagcccccaaaacagttgtaagagggggcttcaagtgggaggcgggggcttggcctgggtgctgagttaacggccagtgacttggcacttctgaccctccctgtgcactctgcagctgtgccagccctgccccacacccagcccaggcacccaagccctccctccagccttctccncgtgccgaaat

SEQ ID NO: 334772 - DNA, 487 bp, Homo Sapiens
acaagtctcaagttttttattttcagaacagagtctggttttatttttaaaaagagaaggaaaaaagtgataaatgctagtgaggtgccacttccctccttcttccaggctctaaccgccagctagctctctttcacaaaacccacggatgcagaatcaggacatgttaaaatggaacagtctttagagagggtctagtctttttaaaataagtaaggatttggggactaacagagaggaagcccctgacttgctgaattgttaggagcaggcggttctcgagattctgagcccaaggatccttttctgtgaaccatgcacgtgctggcactggcctcaggagacagtgccctgccttggctgtcaggtccacggagaaatctcaggttttgccccttcactagggatgccctaagaaagcaagggcaaaggaagcttttaggggtcatcgtgactgggggcaggggaagtgaagtgcaaagactca

SEQ ID NO: 334773 - DNA, 281 bp, Homo Sapiens
atgcgccaccacacccagcaaatttcttgtctttttgtaaaactcaattgaaagtattccatcttgacattctgacagttctgatgttgtgcaagcatgcaggcttcattcaactctgctgtcggacgtggccacaccctcctttgaaggaagatggggtacagcaggccaagatgctcggcagcctttcctttccagtcctcttgttgcaattaagtaaattcctttaatttttaaaaaattcagtttattgagagatgacatatatgggtactcgtgcc

SEQ ID NO: 334774 - DNA, 717 bp, Homo Sapiens
  misc_feature (610)..(610): n is a, c, g, or t
caaattcttatgtggcctaagtggttgtttgaggatctttattattaaaatgcttcttgtggtccctgtattgcaggaaacatagattactttgttggtaagacttaatatgcattttctactcagacttatattatctgtgaggtctttgcagtgctgtagatttttctcctttatagccaagaagactaaataatttaaggacaagtatttttaaataataatcacagaaaggaatgcttgctataggaaaatatgtctacaaatagaatcaccattcactgcaattagagaagccaccttcccaggggagaatgctgtcggccatgggctccgcatgcgtaaaatggttgcttgaaatacgcacacaaatcaatatgttctcctaatgagtacagatttgcgcacttttgaaaatacagctaaacctgtgattatttactagaaggcacggttttataattttttgattttatgatcacttttaatatgtcaaaaaaggtaacatttgatattttatctaaataggtatgctgcggtctttttcagcatttaatgaatctattatattgtaaaaggacagctcttacttaagtagttgacattcttnaaaattgctttataaggttgtaggaaactctaataaatatgtcatgttaattagacaacaccaaaataatgataacaataacatcaacattgacaatgtttattgat

SEQ ID NO: 334775 - DNA, 469 bp, Homo Sapiens
  misc_feature (447)..(447): n is a, c, g, or t
ttttcctgtctcatacaggcccatcttaagttttgatgttgaattaaaactacttctacccccttagttataaaaaaggccacaaggagcatttatgtggatatctggaagtgagatagttattcccattcccagggaaagaaaaaataaagctaagttacaaaaactaaatctatatgcaataaagttattatatacgtgctttgtttaagcagagtcctctggaatttatgtacagtacattagttttcagctatttatattccacagttagaccttaagattctctggttttaagacaattgttaaagatacttttaaagctctgagcagttacagtacggtaaagatgttagctttttgtttttcattagatgcaagaagatgcaggctcaaagtctggttggacagccaggctcaagcaatttggtaaatgtgtcggaaagnaaattagacattggaggatcaa

SEQ ID NO: 334776 - DNA, 608 bp, Homo Sapiens
  misc_feature (258)..(258): n is a, c, g, or t
  misc_feature (396)..(396): n is a, c, g, or t
  misc_feature (550)..(550): n is a, c, g, or t
  misc_feature (562)..(562): n is a, c, g, or t
accattttatttttgtcatcgctggacggtagggcttggcggggtcaggcaggggcaggatcagctgagctctccagccgggaggtgtcccagaggcctcagtcgtcttcggccttgatgaggtggccgctgaaggtgatgtaggtgtcgaagtcgttgctgtagatggcgtttctctcgctggcgcttgaaagagccgcacccagacgcggtccccgtagtccaggtccagcatcacactctggatctgcatgaatntgcgctcgctgggccttcaggatggtgatattaatgtagggtctgatctcaggcagggcgtgggggcggccggaggaagaggctgaggatacatgggcaggatccagggggtcctcagagtcacagcaccgttggcancgctggccacagctctgtcaaaggtgagctccaccatagggatctcacacatcaggagaaagagcaggagcgctgcccagacgggacccagggcggctgtccccatggtgaccctgtgtcctgtggcctccccaggcgactcacggaccctgancactgcaatgcnctctggctccttggcccatgtctgcaatactaacttgttgcatggc

SEQ ID NO: 334777 - DNA, 447 bp, Homo Sapiens
  misc_feature (241)..(241): n is a, c, g, or t
  misc_feature (267)..(267): n is a, c, g, or t
  misc_feature (272)..(272): n is a, c, g, or t
  misc_feature (346)..(346): n is a, c, g, or t
aactgggggccctgagagcttgggcaactttaatgagaaggaaaggaaaatacacagtgaccctgacccagaccccgaccctttacgtcaaaagcaaaagacgataattaacaaaatgcaatgtgcccggacgtggagtgagaggccagctgagctctgtcaatttgataatccctggtcgtgacccgcagcccaaagtgtgcaacaggagaagacgcactgtttacacaggccgcgcacnggtgggcttcgcgggacccggcgcanttcanggagcagcagcaggagtgggattcttcctggccagtggtttgcatgcagccagctccgctcaggccaatgcaancacatgcaggtcactgacacattggagcccaggccctgaaggtgctgggggatgtttcacggtgggggaaacggtgtgggaagtgtccctcattcttttgt

SEQ ID NO: 334778 - DNA, 474 bp, Homo Sapiens
  misc_feature (95)..(95): n is a, c, g, or t
atattttgtgacctctcactgaaatatgagtgtttgatttttgttttctaattctaattttagcaaatttggaaagtagagaaaaatgcaaaganaacaagactatccccaaagaggcaaatgaatgttcaaattttgatgtattttttccagtttttaatatatatacgtagttaagatcatagaacttaacacagcttcaccttctgctctgtttgtttgaagttcacagtgcctcttaatccatagtcagaaaatagagtaacagttgcctgggtttgaagaaaaggagaattgggactgactgcttacagatgcccggtttctttttggggttatggagatgttctagaattaaatagaggtgatgggtgcacaactttgtgaatgtactaaaaactacctagttgaacactttgaaaatggtgaaatttttgttatgtgaaatgttatatgaattatatctcaatttaa

SEQ ID NO: 334779 - DNA, 960 bp, Homo Sapiens
  misc_feature (281)..(281): n is a, c, g, or t
agctgtgtgcaccgcaggcggcagccacggcgttcataggcacgtaccagaggcaagtgccttcactgtaaccgcgataacacaaggcccgcattagtgttttttcgctctcaagtcgagagttcgtgcacccagacgctatataatccacttgaacgtcccgaggaattgatttgagtgcgaaacagttcctcgaggagtgtattcaatcgacgctagattatcacagcatcgcatgggatttacatgtatgtacatatattcactgtaaaaatccaatnacttcagtctcacaggtattagaatgcagtacaccccagtatgcaatgatggttcaatattaccacaaggggggtgggtatctcacagaaacctgccattattgatcattatgataattataattgataatttctaaaaaatgctttcattttgctaagctacaatttcttacctaattggatttatatcctttctctctcaatattctgcccatgatttgtaattatcacaattcataattttaaaattctataggagattgtattttcaaaaagcctcctgcaaagaatatctgccatctgacatactcttttgtaatgtaactcgccacttaacccgtggaaagatgcagtgtgcgtctgaactaccttgcatctgtgtggagtctgtgactgcgatgatgccgcagacgtgctgtcgtgtgacttctgaggatacatcttaaggagtcaaatcctagtatcttctcttttgactgctcatcctagggaaactctgcttggaacatggtacccttgccatgagaggcccaacccatgtggagaagtcaactgtaggtgctctgagtccacggccccaggagagttctgcaacgtcagccagtgccaactgcccgtggtgtgagcgcacctgcctggactgaggcaggctttggatgactgagtcttggccaacctc

SEQ ID NO: 334780 - DNA, 463 bp, Homo Sapiens
tgccagccctttccctacaggaaaccccaacaccctggtgcatcctgtgaactccctgtttctatctccctcagcactgaacagtctgctttcccctggccatcagcttcttactgccttaggagcttcactcttggtcttacgcccaagggcaaatgtgtctgctaaagttaagggcgatttccaagcttcttcggcagagaccccagaattctagtaatgagggagacaggttatgccaagcctgcttctcccaggatgcactgggagcctgggaaccaggagggagggaggaggctcagctgaggagctcaggatttaattctatgcatcattaagtagtcctctgaaagtggtgtccccctatacatcatccatgcttagtaaacagcacgctgacattacattagtggctggaaatgaattttcttttttatagggaaattgagaatccgccaagaag

SEQ ID NO: 334781 - DNA, 414 bp, Homo Sapiens
ccctttggtaaggtcagtggaattaattggttaggaaagtcctcccatctgtccccaggcccttccaccagcaggtgaatgtttccttattgggagaacggacatttaaagatctcaggttttccaggaggtaactgtccattcagaaggcaggtgttgagaaaaagtagcagagtgaaaacggttgcagatgccacattttccttcatgttggctgccttctcttgctgcaggaaatgtatcagattttcacttcagggttcatgtggaaagcatcctcagtgttcgcctccatgaataggagagttctttagttttgccagggagcaaagtctgccacatcagtcgatgagtacttcctgcacgaggacatgaagctccattgtgtggaaagctgtttcgcgaacggtcggt

SEQ ID NO: 334782 - DNA, 514 bp, Homo Sapiens
  misc_feature (461)..(461): n is a, c, g, or t
gatccatgttttcagtttattgccatacagaaaacattttataaaataatatggtagacttctacttcaacatattcacgtaaaaacatcacagtgcaagaaagtgatcacaattaagcatgaagacatcaaaagccagccagtattttaactacagagcagaatattcttgctgtcccttcctagaaaatgttggcacattcattaactgctcaggttacaaaaatcacttcgtgtccacttcctgtccttcaatatattttcataactacactgtgttacattaatgctggtggacaaattagctcctataaaatctaaaaacctttcaggtggcacaatgatttaaaaccaactaggaaaaagctctcccagaatatttttgtatgtaatattctgtccattaccacaataacagagtaaaaagctgttttaccttaaaaataagctaaaggaagatnatttcatttttcctttaaaacatttcctagctttaaatagggggaaaggttaa

SEQ ID NO: 334783 - DNA, 744 bp, Homo Sapiens
gagaagaggggagaggtacatagattaatactcttttgttgaacttaacacagagctttataacctgtctatgcatgttttgcatggagattgaaactactctgtaaacatttgttgtggattaaaggtgatagcttttggcatcatcagacccttgctaattgattgttatgtgcatgatgctgtacccttggcaatgggttgtcagaccacacgtaggaccataagaatctttcctctggaagcacggtctagtagagaagttgaacgcataacccctcctaatgccaggattcatggaacctgggcagtgtcagaagtgtgtactaaagcctgatgctgtggaaaggcagaaggaggggtttcttctgactcatgaacagtgagagtttcaagtcagagttggcccctgaggcaggattccaagtgtgtggagcagtgttggctgaagctgagacgtgtgagacaacatgtggcttctggagctttagtggcaccgtcacatggagaggtgggagccaaagtaagggtccaggggctccacatgaaagaaggcatagcaaatcccattgttttcctgtttgtgttgggggggtggtgtgtgtgtgtataaaattagaaacgagaaaatcagctgtaattacatgtttttcctttttccacctgtatgataaactagtatatataagaattcatctcttttgatataaaatcccctcaagcgtaaaataaattatattttcc

SEQ ID NO: 334784 - DNA, 788 bp, Homo Sapiens
  misc_feature (698)..(698): n is a, c, g, or t
  misc_feature (755)..(755): n is a, c, g, or t
tacaaaagaaagagctttaattggacttacagttccatgtggcttggaatatcttacgtgaatggtagtaggcaaaaagagcttgtgcaggaaaactcccccctaaaataaccatcagatctcattaaacttactcactatcatgagaacagcacaggaaagacctgcccccataattcaatcacctcccaccaggtccttcccacaacacgtgggaattcaagatgagatttgggtagggacacagccaaaccatatcaatgcctctataaacccaccaggaacacttctagaaaatgttgaacacctccgaggccccacagaaccctcctctaccccacatcttcatggcaaggagctaccatggatccccctccgagtgtgcccagaccagttacaggactggttacagtggaaggcaactgagaggcatagagcaagagctgccctcccactaaagtcacacaccacagaaagaactcattcttcataagaagacttggagctacttgaaaaagggacagacactagctgccaaaaacctggctgaagtccacaacatcacatcccctcatctcagactcacacagggtgctctctacaccatcacactggtttacttcagagaactccacacacactaagattcccttgcttatttgtttgtctctcctttccagaataggaattccatgagncaggggctttgcatgtctatttaccgcagaatctcagagcttcttctacagtagatnctgaatacatatttgttgaatgaatgaatgtgt

SEQ ID NO: 334785 - DNA, 160 bp, Homo Sapiens
atacataatgtagagttttcaagggtaccttaaagaacatctataaatacatacacacacaaacacatttatacacccagtagtcagaatgattttaaaaatcacgttagctcaaaaagataattaacttttattattcattaaaaatgagctttctaaa

SEQ ID NO: 334786 - DNA, 1110 bp, Homo Sapiens
  misc_feature (601)..(601): n is a, c, g, or t
  misc_feature (1024)..(1024): n is a, c, g, or t
atatgattatttttaagctttataataacccttcaaagtaggtatgaatatcttccatttttatacatgaagcttaaaaagattaaaaatcaggtaacagtaagtggtagaaccaggatttgaactgaagtcaatctacttttaagtcccccttcccctttttgtgttacatcataagaagtcactaaaagtatcttttataattgccacctactatctgttcgaccttaaataaagcacatacttcgtggtttttgtttgaccatggaactaaattaccagtcctaaagccctatctaccccactccttttcctttactcacggaggattgaggttcaatcctctcctattaagtctgtgagtttttcgagggcagagaaagggtctagtaaatcttggtgtctatactggagtgcctattcttgcctgtcagtggcaaccctaggctttcaggctatagcatctgagcaatttttcacggcttgaaaatgcactcgggaacaaccaccatgatatctatatagcactttacaaagcattttcacgcattcattatttcatctgatcctcaccaaccctatgaggtgttaaatccctatnctatagaggccagtggaagcgaaaatgcctagcctagctgcatctggtctctggactctgcaacccgccagaaattgaatttaagtaaaatggaaccagggaggaaaggaaggaagagatcaaatgactcagagagggagctcagcatatagtcacccaaagtggcctcgagccagaagttaacagggaagtctgtttcccttccaaggtaatgagtgtttgtttggctatggcacagtgacctgccacatgggattgttctttttttcatgtcagcagtacctagagtctagccccaaaagtaggcagaaaagaggatataggaaaactctttgtacactgtatgtatacacaaactcaggagataacagggtataagagaatagatatcaccttcagagaagacttaagtttaggtcctantctgccactgtcttgctaaatcaaaagtgccctcttctgcattatcacagccccttgtgcttccttctacaatacttaccacatga

SEQ ID NO: 334787 - DNA, 786 bp, Homo Sapiens
taaaagctacaatgggtttaatatggctcataaaaccctttaaaaagtaggcaaatctgataggtcatgtacactgatcctaccccaccaaaacccttcaaaaatgctttctcactgagtttaggataaaatccaaaatcctttatgcagcttacaaaggccctacctgatctagtttccattttcctctacagaactaggcccttctctctttcctgttcttcactggccttttttctgttcttcaaaagtgcccagttccttcagaccttgtgggatttgaaattctgccctttttcctaataaaatttactgatgacatctccctactaactcttaccccgcttccaggtttcaaagaggctttaacaatccactaagttttattgggttctcctggtatatactcaccttaggttgatgccttacaatttcccctttgagtaatgctatacaatttattataggtagggttttaaaaaatctataaatgtctgcattctcctggcctgtaaactctatgacagcaggtctctcttatccctactgttcctcaagacaagtacaaagtactcaacacacttggatgaatgcttataattttcctattaagcataatacaaaagcgtaatagtggtccttcctcccaaagcttactttttaataatgagggctggtgaaaaagaaaaggaagagaaaaataatcataacaactaacatttattaaatacttatatgtcaggcaccaaacttaatcttaccaacatatccatgaggtagattcta

SEQ ID NO: 334788 - DNA, 852 bp, Homo Sapiens
gaagaattccatacgacataatctgtcattgaacaaatgtttccttaaagtgcctcgatctaaggatgaccctggaaaggggtcctactgggcaatagacaccaatccgaaggaagatgcgctgcctactcggccaaagaagagggcacgatctgtagaacgggtaacattgtataacactgatcaggatggtagtgatagcccacgcagtagccttaacaacagtctctcagaccagagtttggcatctgttaatttgaacagtgttggaagtgtgcatagttatacaccggtgacaagccatccagaatcagtctctcaatcattaactcctcagcagcaaccacagtacaaccttccagaaagagacaagcaactacttttctcagaatataattttgaagatcttagtgcctcatttcggagcctttataagtcagtttttgagcagtcacttagtcaacaaggtttgatgaacactccttctgaatcttcccagcagtcccacacttcatgtactatcagaatctccagcagtcagtggcactaccagacagcacaaagcactgccacagcatgcagtgcgtacacccggagaattggttcagggtaaggttacccgaggcccagcattcgacttcgatgcgatgttcgcgactgggtccaacagcgacccggaaagcggtacgcatctctataaaaaaagtttgtggcgggtccttgtggtattttgcacggcgttaaggtggaatgcgattggaccttggggtaggccgccctctcgatggcctcgttggggtggggatccggtctttggcggagggtgtcaaagggtgtgtccccattggcctc

SEQ ID NO: 334789 - DNA, 913 bp, Homo Sapiens
aaacttttgaggtttttatttttcaaagtaaagtaacaaacttttttcactgtttcctatgaatttctggtaaggatattttatgaattcatttaagtagccttttggcactaagataacaaggatcttttatattagcaaatactaagaactgcagatacagcaacaaattccagcacaactcatttataggtagtagcaaataaaactttccataaatcaatttgtgtcagcaatattttcttggggtagaccactattatagaggcagattcatctgttaaaaaaactagtaatcacctaacacagtaaggaatatacattctattttaaaatataaaaacatctgaactctgtcttgcattttataggcatgtgagtagtgatgctactgctgacacattattgattcactcacattaaacaaaataatttgttcacaggccaatgtgaagctggcaatcactgagtataatctaggctaattatgtcctagacagtacaaatctgcgtgacctggagattgtcagagaagaccaatagcataaactgattcccagactccaaagagacaacctgtatacagattaaacttaactgtaccgtgcatactcaagtctaagactgttcagggtttactttaaattatagcactgaggtgctaagtcagctcgctaactaattacagcagacatgatacagcctggctagctggtgtttatgggtaaattaggagttaggtctctgagcattttcagtagcaactggcccctccaactgactccatcagtcaccgtagagactcagcaagcctagctctgtaggagtcactgtaagaggcaaaatgaagcaacctcaaattaatgcaggtccaatgagagagtgcctgtattggtccatgtgctggaagaac

SEQ ID NO: 334790 - DNA, 955 bp, Homo Sapiens
  misc_feature (129)..(129): n is a, c, g, or t
ggctcgtggcacggacacgccttcggacccgtcatcacacaagaaagcggtgctcacgctaaccgcaggcgcggctcgacggagcggacggctcttaacgcgaaggggtcacgattggcacatctcccntatatacgcgcggataaatctcacaagagtccagcgcgcgcaacaacagcttctattttctccacctctctactcccactagtccccaagaactctgtgggtcaacccttctacaacgagtatattgaaacagcaattggggtatattccccatcttccagggcgtacttctacagaattgagcccttttaccttccacaacattggaacccttaattggtgccgaaaacaacacaccgcaacacacactcaacaagttgctgtgcctcttctagagaagtggccaacaaagtactctccttttgtaagccctttgaattctcttctccaaaactgtgtctacagtatttccaggcttctccagaagtgctgagggaagggagcactcagactccaacagtgccccccatacacttcctttctggggggttcatcgctttgcaaaggcaaaatgtaggcatcctgagcacagcccaggtcagaacaacttttctttttcaagaagacaaccccacaatggccaatcatcaggtgatcctgcaaaactgttttctctccacaggaagtggcagaaaaaccccttcatgatttacaccacaatgtcacactgacatcaggactccgattagctaatggaactgcagttaaagcaacgagttcacaccctccactgcacaattagaacatccttgccaggggtagcaaacaactgagcagttagggtgaagaggctatgcatggtgaagtcttttccttttataagagagcacatgccagccttgctggtagattcagaatagtacttcctatcggacaaaaaggaagg

SEQ ID NO: 334791 - DNA, 884 bp, Homo Sapiens
aaatgtagactcagacttatttataatgcaacagaatagatgatggtgcctgcaattgtggaccatcccaaatgttctcctacttctccccctttctggttcatttaggaaattattcaattcctggtcatcattgtgggctgctaaacttggtttactctctcccctcaccaaagggaagacagttagttgaccctggctgctgcagttcacattctgctagagcctgggggaaagctgttgtcatttgtctttaggtttattcataatgttgggtttacacatacgttttacatttttatgtagttaaatgtcttgtcctttatgggttctggcttgattgtgcttagaaaggtctttcctcctccaagattgtgaaaataatgtcatgtgttctttgctggcacttgtacgatttcatttttgcatttaaatcagaacttgtaagctggtggactgtgggacagatctggtcaacatatgggttttggttagcctgtcacggaattctgaaagagattatctgccagtgtttttacatacagacttctatcgctcatgaaaatgtagatgtaggacctggcgtgcagtgtcaaagcatcgtcagaaggatgatacgtcgctctttacggacacagcttcaatcagcgtcaattgtggcacgaagcttcagttgcagagttgtcggctctcctaaggtacaggtctactattctcggagatatgttccgtgcagagattccaagaaaaagcttatatgcgatgtcttgtgggatctgcggggtaacgcggacagccgacggacctctcgtgaagaccgcctatggtagccgcgggggtggcgagccgatccttctaagtgtccaagcgggtgtcactctaaa

SEQ ID NO: 334792 - DNA, 871 bp, Homo Sapiens
cgtacgtgttctccaaatgtggctatccaacgccgccgcacctttgggtgaacagccctctagcgccacaagaaaccaggcgtgctcgccacacacgcgtcccgcccaacggccactccacaccagcgacttggccgacttcgctccctagccggcgaacggaccccagcataagcggcccggttccagccctgtaacgacggctggcagcaaatacctacctacggatagctcggcgctaatacgacttttcttttctttttgtcgtctcaacatgtcatttgaccagtttacatgtgtgtacagaattaatgacaattctaaaaatttgcttgtctgtggatgcattgacataaagtaaaaataatgtgtccatatatgttaacaaactgtcatctgaggtaaagttaaagtaggtctagaaaggtactgcaacagtcattttctctttctcatctttattaaaaaaatatgtgtcagaacgcagaaattgaaatgaaccaaacccacagagtaaacatttgtttaaaagaaggtgcccagtacattacatgatggggtttcaggagacactgggatgagtacgagctatcaaaaaagtcttgcggcatgtaaagattgaagagctatggagaatggggacagaatgacaggtggtgtttccctggtttcaaaatttaaagtgacaaatttagtgctagtggaggatgaggaattaacagttgtacacatggattttctattgatctaaccagaaccgtgcagactccccatggtcttttggtattggcacctcagctcttgcttggaaatttcactgtactcctgggacaggatacggtgcttccaggctcaccaaacagtgcttgga

SEQ ID NO: 334793 - DNA, 905 bp, Homo Sapiens
  misc_feature (57)..(57): n is a, c, g, or t
ccgttggccaaacgggtaccatgcgccttggaacccctagagcgcagaacgctgaanccaccccgcgaccacgctcaagggtgaggggcctctagacgcaggtcgtggaggcttgccagagcactgtaacccgctgactaatacccataagaaatctcgcttatacacttttgttgttcgttttcttcctccaaattctagctgtaggactccgaatttctaggcaccattatcctagctaccggttttccttgtttcggctcaagttgcccatgggtacgtatcaattggtatcagtcagctcctcaatcaaactggtcctgcgtgccctgacgtcgcggcggttgagccaggaaagcatttaggtagaggacgatctctctaacacagcgtaacatgaggatttagcagtagtgttcttcacttgacactatttctctatctggagttacattctggttagtcaaaaaagaaagcactattaaaacaatcacaaaaagcagctggctcccatggaaagttaaaggtgtaaacttatatatgcataatactggcaaaagctagtttcctgggggtataaatacacatgtgcttctagaaataaggcttcgtgtcaaactctagatgggtggggtggagtacaggaccaccgagttgtagtctgggggcggggagcagcacgcgattttcctttccagctcagcgtggtcgtaggtgaacctgcgcttgccttcgctgacgtgcccacagctggaatggcagaaactgggcctgctgacatcagacagccccgactccttacttttactggttactctcaagtcaatcttgagcgaggccttgggtttgctgtcagtccaggtgaagcgcttcagcatgggagaggccaacagagtgctgtgtcg

SEQ ID NO: 334794 - DNA, 594 bp, Homo Sapiens
gttatatgggaataaggcacgtaactctcggagtgaatggctgagagcttgaatgtttctcaaccatgtgcattgctaatggaaggtctagtaccactcatgcacagcagagtaatactgcatcggaatcccacctctgttgcgcagtgggcattgccttcagtgtcttcccatttgagatattttcccactgtgtgtcacttagtactaagttccaaagtgcatacataatgggagaaggtggtacattatcactttttaaaataaagagcccaaagccttgagaaggagctagacctacaggactttcaagttctctaaagcaaatggtctccaatcatgggtctgccctatggaaacgacccagtgtcctaggccaaaccccctcccataccgcaattagtcttaatcggtttaccacaatattactcaaggctctgtgggactaggtttgttttttcatctataaaagggagggggtaaaattaaatactttctagaactccttcagttccattggagttttatgttacaaacccctaaaactgtgtagagttgggtgactatgtgggtgtattcatctctgtgccgaat

SEQ ID NO: 334795 - DNA, 542 bp, Homo Sapiens
cctaggtgtcctcacaatcatgcctgcggctctcctgtgggtctctctgctgtccagcatgctggggtccccgtgtgggcagccgtatccagctccagaattgcgtggcatctgcctcgggcttccactgaagacagctcagtcacccactgagagaggctagccttgagtgagcagtgggggtgggcatggggcaggggaggcggcaactagagtgacccaaagaggctcatttcctctctatttttagaagctcaaaaaaaattgctcctcagtgaagtttctcagaattaaaactttccttttctttgtggttttgtttctctcaagatgaggagaatttcaatgaagccagtgttctttttgatgcaaattcgctccgcttctcccaggaggtctggccaatgggctcagggcttctgggcccccagaaaacctcctcactggctttaaaaggtcatagtggttctcagcacaaatccagacccagatcctgaagtggctgctacccctggctgcatacactctgcaaccttgacttg

SEQ ID NO: 334796 - DNA, 382 bp, Homo Sapiens
atggcactctgaacactttcatcttccattggataagcaaagcctgcactagagtcagtgtctattcctatcaagaattcctattccatttgtagtcccccagggctgccagcatcagtctcacttgccagctatgttcagggccttcccaccaggaaatctttcccatagccagtttctgtctctcttactgagaaacagaacagttcttcctagcattttgtgccttggaattgccatccataaaccaagaagctcttgtttggtcagttgaaagttgtttatttggcactgtagaatccagcagtttctcacacagttccagagtcagtcctaggggaaaagaaattctctgcatgccttgagtagcatgatcctctat

SEQ ID NO: 334797 - DNA, 442 bp, Homo Sapiens
agctgagatgattgcagagtcataaactcttaagtctatttgccactggacatttgcagagatgatcatatttacttccctcctcccaccactcttcctctcagtttcctttttactttatttttttctccctttcctggtaaaagtattagtatgtttaacatagtgttaggtggcagataggctgggaagagctagtattgtaaaggaacactgatgtgtactggagcctactagctctcaatccattgccccagacttggggagagagagcacattctctatccagagaaataagaatatgcagtttatggttttcctgtggacattaactgactgtgaaggtaaggtattatccaaaggcagtgatatgcaggtgatagattcaccaggagatgatatgtgacttttcttgtattttgaagctctgcttcttttttag

SEQ ID NO: 334798 - DNA, 397 bp, Homo Sapiens
ttcaaccactgaggcagtgaaaccaacacagctggtttctcttaaacacatacatgttcatgctcattataaaaaggcacacaccagagagaacatatgaaagcacaatggtcttttatctcgagaataaaagagctggtatatttgtacatgtgtgaaagaaagtctgtctgtggttatttcctgaacattgtttgtaatcacaagagaagaaaactgcccagatgcccatcaggagggactggcttgatggcattatgaagtatccattccacggaatacctagcaccacgaaaaaggaatgatgtggtactttatgaactgatatagaatttctcccctaaaacaccactaaataaatgtgcagaacagtatatagtatactgctacttgtgtt

SEQ ID NO: 334799 - DNA, 396 bp, Homo Sapiens
caaaagtcagtgtttacttttcataggcctttcttggcacaaaggtgcaaggaggatggtctcgggctgctggcctggcttctgggccaggtgattcagaagatgcaggtgcagcccacagcgatggtctccatgactgcgcgctggggcaaggccctgtgcggggcggtggcgggcagaggcggcggcgcacaggaacctggctgaacaccggcacgctcaccatgctgcggtcctcctgcatggtgaaggggttcacacagcccagacacaggcaccgtgcctccggcaggtccacggggatacggctggggtcgtggttgatgctgtagccccagggagacaggctcctcttgttggacatccacagctgcaagttgacctcacactttctct

SEQ ID NO: 334800 - DNA, 362 bp, Homo Sapiens
ttattttttttggtgatttagctacccaagaagaaaagaagctggaattatagaggtgaataaggtaaagagtacttgatctaatatctgtgggcttaatttatacttgcattttcttcctagaaccatgggaaagttaaaaccagcttatagataatgctacagtctaaggtcgtctcctgtaggggatttgctacgtaggaaaaactaaagggaagaacgaactgcaggacatgagaggtactttcctatttccttaatttcctaagtgtgctgaaatacaaatacactaaatactagttcaataatgctcctcaactgtcagtgggcctcccctgggcctccctgagtgagcccgcaga

SEQ ID NO: 334801 - DNA, 541 bp, Homo Sapiens
cttcttcttagaaagaagatgaaccaggaagttccggagaagaattttgaggagcggagtatcccgggggaagtcaccctgaccaactttaagctgaagtttctcccaaaggacataaagaaggagctgctcacctgtcccacccctggctgtgacgcagcggccacatcaccggaaactacgcctcccaccgcagcctctctggttgccctcttgctgacaagagcctcagaaacctcatggctgcccactctgctgacctcaagtgccccacgcccggctgtgacagctttggccacatcacagggaactacgcttcacaccggagcttgtccggctgccctcgtgcaaagaaaagtggagtcaagtgtcacccaccaaggacgacaaggaggaccccgagctgatgaagtacgttggaccatgctggctctttcattgcattgcggaattgagattttcgtgtgttttataatgtaaaaaaactcctactagattcccttttcattaatacaacgggtcacctaactgaccaacgcca

SEQ ID NO: 334802 - DNA, 505 bp, Homo Sapiens
aaacagaggaaggatatgattccatttgaacgatgaactgaaactggaaggggtgactcctgattttgtatttgacagattgagtcacttctgttccatctagccaacatttgggctgtagaaagaagcccctgaattgattgtttatttcagagagatgggcatgattctcactactttgccctgtagtcgcttggaggacaaatggcttttggagcacatttggttcccaaactttctttagttttaataaaacaattattaaacagtgagaccctaatctattacctaataagagtaagtgaggaaaacgccactatcagctgaatgtgaattccttgtgggaaaggtttatgcaactttcggaggcccagtctgtacatctctgtgcccaaatgtggccatttccactttgtccagcagagccctttaatcttatgcttcaaggggaccccctctccgtgccttgctccggtctctgtttctgatatttcagatcctcttt

SEQ ID NO: 334803 - DNA, 305 bp, Homo Sapiens
ggtgctgtgcttttgaagcccagtgtgttttatgtattacagcacatcttggtttggacagaccacatagtggccagtggtgccatattggacagcactggtgtaagagggtccatctctcactcccacatcaatgtccaatggtttctcattcaactggaaagtgaaattggaaatcttgtgaaagatgaagaattatgaatgtggtacgttgaactgctgggcccacccacaagacatcaacaaatgaaggtgtggaagggttaaaccagttaacgttgaacaaaggacaatggatatgatga

SEQ ID NO: 334804 - DNA, 479 bp, Homo Sapiens
ggcttaagataataaacatttattattgcttctaagtcttagattcagctggagggttcttctgctttggctgggcttactcatgtgtcggcagtcatctgtgggttgggtgactctcctgatcttgactgggggtaggctgactgtgggctagtctaggatggcttcagctggtatctctggctctttcgcatgtctctcacctacacatctcataaccctccagctgatcagccatgttctcatggcactggcaaagagcaagagggcaggcctcctttaaagcttctgtttgcttcatgtttatcgacatctcattggctaaaacaagtcacatgtctggtcccagcatcagagtgagatgggactacaatgttataggcaaaaagagatggatacaggggagaccatgaatagggatcatcaaaacaatcagcctaacacaggacacattaaccaattttatctggaaaagaaag

SEQ ID NO: 334805 - DNA, 519 bp, Homo Sapiens
aaacttgagcctatgaagaaaaagaataaagacttttgaaatctcttatgctatccatgatggcatttttgtaaatccattcctgtttcactaaacaaaagtagaaaaaaatcatgaaaacccccaacacagtccatctggggcgtctcagtaagaatcgtgctcacccactccacagcatctttgaggatgtggccttaagtcagacgctgctcatctgttcctgataaatctcttgtaggctccaggactcttcctggccatcaaaaaatatggaacgcatgcaacgacactgccctcttatttattttagcaaatgaaaatctgccctcacaggtttatggtcaagatgtctaaaagatgtcttgtatttgtatttaagagtcaccttaacagtaggtgactcttaaatgagtactccaaataataggataagaaaggtgatcatgaaactcaagggatcctatctgagagggagaatgttgtctacaccagcaatcatgatagactctgtctggc

SEQ ID NO: 334806 - DNA, 542 bp, Homo Sapiens
agtttcaatagcatattttattttaatctaagaacaatgattaaattcaaaggtcagaaatataaaagattatccaaaaagtttaggatcataactgtttcttaaacaacattggcatgtacttgagctggttctgtggctccaaaggcttgatttttaccttgcacagtttaaataagcaagaagccttacgcgatgctccacaagcatcacaacatcacaaaatcattctacaaggcatgtctcaggggatttggggccatgaagatctttttccaaccaaaagtctgagccgagatagaatcacagcttgaagttcctgctctcagactgtcctccaaatggttccttaagacactgggtgccctgagctctggggcccaggtctgagggtggcagctggttatgcacgcagaccagttctgttggtcactgtgtgggcattccactcctatccttctctgccagtgccactcggatgaatttcccattggcaagttctcgtacccttgatgcattcagaaaagcagaaaggaaccgtg

SEQ ID NO: 334807 - DNA, 346 bp, Homo Sapiens
  misc_feature (156)..(156): n is a, c, g, or t
tttttcaggacgcagaggaattagtatttactgtttttaacattccttacatgggaatcacgtaaagaatcaggtaaacaggattcaatttgtgactcaaccattaatactttgtgacactggctaatttatttcacttctggatgtcggttatgnttttttttgagacaggatctcgctctgctgtcacccggcctggagttcagtggagggatctctgcaccgtcaacttcctgggctatcaagcgatcctcccacctcagcctccctggtagttgggaccacaggtgcccgccatcatgtccggctgatttgtaaaatttcttttgtagagatggtgaccttg

SEQ ID NO: 334808 - DNA, 485 bp, Homo Sapiens
gggctgctcttaagactcctgtatgtttttggtgatctgttcagtcttcctgatgacatcttcggtgctagggagagtggggcttggggccacatggggttctgctgtgtctggtaccaagccatcccctggccacaccatacttctttgccgtccctttcggcttgaccccatgccatctggctccatgtcgttgggagtgttgtcgtagtcactctcaggtgtgctgttctgcttctccagcctggatgcccttcggggctttcgtccctcgaccaggaaagtgtggaggggaaggaaggcagagatgaagaggaggtcacaagtgcactcctcccgatgtgcgcggggaagggctggagtctcatcctgctctcttcggggcggctcgcttctcccattgggagatatggtttctgacctgatccggtctcgtacatggacatgggcctactgccccgggcagacggacgtctctttaagga

SEQ ID NO: 334809 - DNA, 289 bp, Homo Sapiens
aagaaaggtgtttgaatttattcactgttaaagtttctagtttcagagaaacaaaataaccaacacttaacctgtagggcctggccaggtggctcactcacgcctgtaatcttagcactttgggaagtggaggcgagaggattgcttgagcgtaggagtttgatatcagtctgagcagcatagtgagactttgtcactgccaagaaatgaaagaaattagctgggcgtggtggtgtgcttctgtagtcccagaagctggggtaggaggtttgcctgagcccagtgttca

SEQ ID NO: 334810 - DNA, 489 bp, Homo Sapiens
gcacatcttaatgtatttttattttctaggtggagacgtttcggtaactgagaatcttttcaaggaggagaatccaaaaagccttctgctgctatctaaggctgcttagctccacagatccgtgaacagcacgcccagagtacagagaacgcggcaaaaccaacgcgaagaatccactccaggcagtctgagaaacccgggaggtggcgccacggctggagggcaggaggatggcggcgttccaaaaggcacccgctgtcacagacctcggtgtcctgctgtctgtcccagggatggagaggactgctccagggaagctgctggagcctgagtctgtcgggttcctctgcctgccccacctcttctacgggtgcctcttgctgcttctgtgtccccggccaactgaactcagtgggcttcgctgtacttggttccaaggtgctctggactccaggagagagtccgttttgccagtagactccgggcagc

SEQ ID NO: 334811 - DNA, 522 bp, Homo Sapiens
tgcatcaactgcattcatttttgctctaatctgtattatctcttttcttgctactaccatagctagcacctacccacatgtgatacctatgagcttggacactggcccacttagccctgtgctgctaatgccaacaccagcatggattacttgggttctagagggctttcccaccaatgctgctgctattacccatgccatgcttgctgctcaggggctagagaacccgcctatcccccaggccactgttgccatttccagaacccaagaaaaccacttggaggcccaagaatcagcctaacctagctgactaactgtgatgctagcataggccattctgaggcccaaagaaaggcataatcatcccaataataaggcccaaacactggcttccctagtatcccagtctccagcaaaactacataacagcctccagtaacaaccacactctaagctactgaggatatcacagataccactgattctgtttacagccaaagaaattataaagagactacacta

SEQ ID NO: 334812 - DNA, 479 bp, Homo Sapiens
gaattaactaactttatttaagatgacatgtggagagacagaccttcgctctgtctgggaagccgtgtgactgggggctgtccccgcccgggtcccgtggggagcccatcttctaccaacccatcccaggttcagcagggtctcttgcttttgttcggagcgcagaggaggccactgaggtgcccacgaaggggagagatgggaggcagaccatgttctcagtgaccactgtctctgctgtgtgatgaggggttgtcttggggaggaaagaatgcatgtgaccggcaaagctgcagaaactcagcttagaacaggtcacaatcatggtagcaaacactggggtggggaagtcggccctgactgagaggccaggatggatcccaggtacgtctctgaggggaaaggaacagggcccgtcacgagcaggaggtgctgctgaggaaaagcaagtttctgatgtgactcctgacttctcacaa

SEQ ID NO: 334813 - DNA, 476 bp, Homo Sapiens
tctcagatccagcattttattttacctcatcactcataaatttcccctagaactgttaagagcatccaaatacctgttattaatgagaatactaaacctgggctggctcagcaactgtaccactaatagacagtcccataacaatggacatatgatcaggaagaggtcttctcctccatggaaaatctgtaagtttttcatcacggaatcatgcattctaacagaggctggttccaggaagaagcaggcaaattctgaaatattctcccagggtgaactcccctgcaggtgatccatctgactcaatttcactgcagggaagatccatctccagaactctttcacatgccgaacattctaggtatgagacacgataatttactgcatgttctgataagctggctgacaattaaagctgaggttgctaagcagttctgagaacaattacagatgtggttttcatattttgtgacaat

SEQ ID NO: 334814 - DNA, 342 bp, Homo Sapiens
agcagtagtaataatttgtgtttaatttatacagttgctgaaacagagtgtaaccatgttgatttaaagaaaaacaggtgaaatacaaataagctagaaggagcaaaattcattaaacacctgtaacacgaagataattcaaacacataggtaaccagggacattgatcaatgataacgtagcaaagcaggagtacacaagggcagtgtgggtgggcaggctggatggatggctgcagggtctactgggcccaccaccaccccaagcatggccctcacatagcaccttgatggggtccacagccttcctggggtgccacacttatcactggcagacaccaga

SEQ ID NO: 334815 - DNA, 323 bp, Homo Sapiens
atgggccactatgctcagccttggctgaatcttaagaaactttttgaaccaaagtcactgacacttctgtctagttcagggcctcacatcaccatggctatctacctccataggagtcgatggtttttaggagaatagacagaactagctggcaaagccagttcttattctaattcacagttgtttacctcccagaggttccatccaatagagaattttcttacagtcctttaagaacatcaatgtattagaaatatctggatgcccctgtgatccttaagataaccatattgcctcctcaatgtcagagatcatcagcaaaa

SEQ ID NO: 334816 - DNA, 471 bp, Homo Sapiens
  misc_feature (334)..(375): n is a, c, g, or t
gtctgttttgcctgaacccatcaacagctgggagattaatcaaccacactgaaaatgtggcgggatttatgggggagggggttgaaatgtgggtgtttgaaacaaaagtgtataaacaaatgaattgttgataacttagttattgacctggagactggtagcttattaaagaaactccgtgttactcattcctggagttgggggtttctgtaggcactttatttctccactttcaagagcttggcttggcccaaatcttagactgtccaattctgcctctattaccaatttaaatctatggcttgaacctgtgcactgaaaatcaaatcctttnnnnnnnnnnnnnnnnnnnnnnnnnnnnnnnnnnnnnnnnnncacttattagaagccctagtcattttttggctttctgttttgttgctgtccattgaagactttgaacatgccgccttaataaatgtattaaaattg

SEQ ID NO: 334817 - DNA, 496 bp, Homo Sapiens
gaactgcatagggctccgtgggacttgctgcctgccagtacagagctgtgtccaaggctcccagcgccaccagggctagggagtcggtttctaagtggagcttcacggactccccgttccggtactgcttggcaccgtccacgctgagctccagcttgccctcgcaggccccagcctggacatccactcgcagggagttggccactgggtggtctccatggtagtagaaggccacaaagtagaaggagggtgccaggtgatggtccacaaacaccgagaccgaggtcagggtcctcttgggctctcgattcatgaacacgatctgccctcgggataggatcatgtagtagtaatgagaaaaggtggccccactgcccacggctcgcaagttcaggttcagagtgtccccaacacgaggaggtcgagaatccggccgctcaatagacagaaacccggggcctcctgaaggtgggtgctgccacagtgagcctggcta

SEQ ID NO: 334818 - DNA, 442 bp, Homo Sapiens
  misc_feature (66)..(66): n is a, c, g, or t
cggtgggtctccagctcacacacaaacagctatgcctgagcccagggttagaatctcccaccaacncactcaccgagtgcacctggtacaaggccagtgggctggctccaccagggtacggcaggaggggaaggggctctccccagcctggagaagtgctactccatgggagggggctgactgcattctggttctcagcctactgggctcccagatgtgtcctgggaaggactgtgtctgtgacatcactgcctgccaccgccccccctcccctgccgccgatcccaaccctgactccaaaatcaaggtcttcagcggcttttgattgctcttgggtaaggactgaatgctctcccatggtcctcaaagtgcagcagagtgcggcctgttctccacccccatcttggttctactgcctccctcccacgccgagccctatgca

SEQ ID NO: 334819 - DNA, 500 bp, Homo Sapiens
gaaagttctgagacatcttgtagagacctttccagctcacccccagggccttatggtcaagaaatgtatgcgtttcgatctgaggaaagattcaaatccccacccatccttcctccttatctacttcaagttattcttaacaaagacactaatatttcttgtgacccagccttactccctgagcccaaccatgttatgctgaaccatctctatgcattgtccattaaggacagtgtgatggtccttagcgcaacccatcgctacaagaagaagtatgttactactctgctatacaagcccatttgaagggatcccttcttgcctctaaggattcaggagaagcatctcccttgcatttctggactgaaccagtcttacctgagactggaaggctgatttgctttgaggctgatatgtgtgtttcagagcctctgagtaggatgctctgcttttgcatttgattgcagatgagagctttatgagttcacggaatttatttt

SEQ ID NO: 334820 - DNA, 533 bp, Homo Sapiens
aagtgctccatcagctgtgccaggagagaagcagctcttgggtccgtgtttctccttagaaggcaggagttgggcatctagctccagcactcatccctcttgaaactgctggtttgtttactttcattgcaactatatgcctggaagagatgaagagaaagctcaacaggcttcactaggattgtttgggtggggtggcagcagctcagatattttccctcctctgtttttcataggctttttgtaatcgtgttataatactttaatggaaaaaaataaatttattattttaaagctataaaaattataaatcagtcattatgatgtgtttttctctactgagccctctggtgtgttccctgttttattaacgtggatggagggtgtgtcagggaggttgggacagaggcagagaagagccagcccggcttcggggagttcgtggcctgtctggaaagagggtcttttacataccagcagtttgcagagccagacacagaacgatagagcaggaccttttaaactcctttttc

SEQ ID NO: 334821 - DNA, 397 bp, Homo Sapiens
aacagtatctccaacatacattttatttagtttaaaattccttaatacaagaaggtgttactccttaaccactgctgcagcctcaccggaccctcctgatgtggatgaagcaggcggggtggctgctggtcggctgtggaggcacctccaggcacagggcctagagggtgagaacactggtgacattaacgccatagctgtggcttgggacagggattgagaggcagctctcagggcacatgggcatcagctttcacaggatcctgttcccagtcaggctgcactgtttgttgttgtcccttgggcaaggggatcccaaacatctcacaatgacagcttcttctccaggatctcctttatcatgactggatctgctcggctttgagtcgctttccgg

SEQ ID NO: 334822 - DNA, 370 bp, Homo Sapiens
  misc_feature (119)..(159): n is a, c, g, or t
taattagccgtatctctcttttgaaattaagagttttggtcttaactgaaacagtcaaacaaacccactaattgaaaagagtaagtgccattcatttggctgtctggccaagtagcacnnnnnnnnnnnnnnnnnnnnnnnnnnnnnnnnnnnnnnnnnaggattgtgataggatgataaagtattacaaaatccatattcttcatacagaagactggcaagctgaaaattggtacctacacagggcccctacagcatggtatcgtctactcaggaggtaagtcacagacttccctttatttaatgtctttgctcagacctcacagtgagagctttggtaatctctcagcagagtgccacatatactggt

SEQ ID NO: 334823 - DNA, 502 bp, Homo Sapiens
atttccataggtttttggggaacaggtggtatttggcgacatgagccagttccttagtggtgatttgtgagcttttggtgcacccatcaccccagcaatatacactgtttatccctcatccccttccctccctttccctctgagtccccaaagtccattgtatcattcttttggctttgcatcttcacagcttagctcccaattatgagtgagaacatatgttgtttggttttccactactcagttactttacttaggataatagtctccaatcccacccaggttgctgtgaatgccattatttcattcctttttatggctgagtagtattccatcatatatacataccacagtttattttaatccactcattgattgatgggcatttgggctggttccacatttttgcaactgcgaattgtgctgctatatgcatataggccttgaagtatttctctatgcgtttgtaactatctagctgtctggagcatatgagtttgca

SEQ ID NO: 334824 - DNA, 322 bp, Homo Sapiens
  misc_feature (159)..(192): n is a, c, g, or t
ggctaccccacaggtagaatagcactccaggattgctggctagctatatttatacccactgctaattatatgctaaataagaggcaggttattcataaactaggaacaggaagttcctggaaccatataagataattcctgggttattgccgtgggatnnnnnnnnnnnnnnnnnnnnnnnnnnnnnnnnnncttatgcaaatgcattttaattcctattccgagctggttttggcaattctttgttattgttatgttctgttttgatcagcagggttttgacaggtgcttggaaaaatcctgctgatctcctccctcacag

SEQ ID NO: 334825 - DNA, 472 bp, Homo Sapiens
aatggagaaatgacctggatgcaaacataagaagttcagtctaatgatgcataattcctactagaccaatgcaaatctgcaacaccagcctcaggagagcctgtctgcctttctcggccacctctgctgttgtagatagtgcttttttcagccaacagctcttaggtggagcaacactcactttaaatcagctttcaaagagctactcatccaagggaggtcaactcaaaagggctcaaattgggcagctgggaaatctgcactagagacatgacaaaagaagtcaaaagggacacagtgggagaatgactgtcaaagaggctggagtctctggatgtttaaacctgtgtttgaaaagtcttacagatcacaaatacagtcagtaaggaagcacaaccccttggtggcaaactggattatcatctgaacacaccagacaatgattactgattacagagtggggaaagggaag

SEQ ID NO: 334826 - DNA, 426 bp, Homo Sapiens
cactttccccctttcccacatactatgacctcatgacctcccataagctctggtattgtctctagtttgcacatgtgttcccttttgcttgaacaagtctcctttctccaactttctaagtacttatctctgtatatctaatcctcatctgttcttcaaggcctagctcaaatgccatctataacataaaatcacccatcacagccacaggtgaaggaaattattctgcctcctttgaagacacacagaatgctgtcttgtagttttacaacacttgatactttctacctgaaattatagttatttctaccctagcgatctctttttaagtcaccataaatttcttgaaggcaatattcatgtcttaatcatttttatatccccatagcacctcttcctaaacaggacattctgaataagagggac

SEQ ID NO: 334827 - DNA, 478 bp, Homo Sapiens
gggaatagattctctgttctttgatttttgtgttagcttctatgcattacataagaatataacctctcccagacttgtcagactggcctcatgtaggagaaggatctcaccaatccatccagccaaaaattttaaggtgctctcttatctctgtgtttattcagactgctgtctcttttttgatggtcccctcgagcttaggatgtaccacattccatcaatacccccacaataccgtagagtaggagccagaatctctagatgtagctggagatgttgaggtgctgaatgggttttccatttccttctatcttcacagctgagcctgagcatttatgtcccactctctgtctgctctaagctaaggagaagatctgtggcaaaaacctgtactcaaattcaggttgcaccctctgatcctgaggagaagctcgtagaagtggtcctactgtacgtccacctttttgtttgctgtggt

SEQ ID NO: 334828 - DNA, 441 bp, Homo Sapiens
gcccttattgttcttgctttgtcccaagtagatgcaaatgttgtgcaaaccaacttgatcttaagatgttgttgagaacactggagtcacgtgtccatgggtccttcaggctggcttttgatgggagctgggatgcagatgatttacggagggttataatctgtgatgctggtctgaagtctgaatcttccaagttgctgactgcaggcagagctcatgtccggatcggacatggtgaagtaagcacctgagaaacgggtgcgattattcttttcttcctgcacctgcagggcgggctgcacgaaggcggcggcaggccgtgtgcattccccggaagctttcttaatgcaaagtgacagagcgcggcggtctggggctggagcgctgccccctccacgtgctccccaattccggcgcctggtggttctcccgcactccggc

SEQ ID NO: 334829 - DNA, 409 bp, Homo Sapiens
gggtagcggcatgggcagccagtacgcattttcaaaatcccaccaccaactgtgggccgccacttggaactcactccagtgtgcagccttcttcaaaattgctgccagccatggaggagatccctgaaaattatgaggaagatgattttgacaatgtgctcaaccacctcaatgatgggaaacacgaactcatggatgccagtgaactggtggcagagattaacaaactgcttcaagatgtccgccagagctaggagattttagcgaagcatttttgtttccatgtatatggaaatagggaacaacaacaacaacaaaaaaccctgaaagaaactgcattgccaaatagttgcatttatcataaatgtgtctgtgtatattgaatattaaatactgtattttcgtatgt

SEQ ID NO: 334830 - DNA, 446 bp, Homo Sapiens
  misc_feature (321)..(333): n is a, c, g, or t
aatacattgatcccagtgttacgggattctcttgattcctggcaccaaaatcagattgttttcacagttatgattcccagtgggagaaaaatgcctcaatatatttgtaaccttaagaagagtatttttttgttaatactaagatgttcaaacttagacatgattaggtcatacattctcaggggttcaaatttccttctaccattcaaatgttttatcaacagcaaacttcaggcgtttcactttttgttggagaaaaatagtagattttaatttgactcacagtttgaagcattctgtgatcccctggttacttagttnnnnnnnnnnnnngtacgagttagacatatgaaatggttatgaacgcttttgtgctgctgatttttaatgctgtaaagttttcctgtgtttagcttgttgaaatgttttgcatctgtcaattaagg

SEQ ID NO: 334831 - DNA, 718 bp, Homo Sapiens
acagtggaatgctatcccattgttcaaggaaacaacgcacatctgtgtgtgacagggaagaacctctcagttaaattaagtgaaaacgatacactgaagaactgtgtagttgctgatagcgaaacggatatagatgtatatatgtacacacgcgtatacgtgtacattccacgcatagaaaattcgtggaatgacacaataaaattggtgacaggtttgtttctgaggagggaaattcaagagaatgttttatcttttggggacacattttggattttttaaaatttgggtgccttttataaacctgttcaaatcacacacccgcacagaacttggtctctggaatccagcagacctcggggtctagttgtgactctgtcacacggctcaacattcacgtgcctcttgctttctttctgaagtggagacaggactaggatgtgtcttaagatcatggtggatgccgtggggaacaaggatgtaaagcccttgataccacgtgcattgcaaagacacaatcaacatttatgtcatcaattgctgaggacagagggccagggaatgacagaatcagggcctgatctcctgactctagtcaggaagaatcttctttgctttgacccccatcaaacaggaatatgtgatgcactggaaatggcagaggctgaagaaaccaacagcctgggaaccatcccacacaccagctgtgtgaccttgg

SEQ ID NO: 334832 - DNA, 536 bp, Homo Sapiens
caatgaaaaagaatagttttattcaatcactttttccacttctttcactctttcaggtaactagaaaagaacaaaggaataaaaaccaacctgataaacagggaaagcaaaaagacttagaataccactctctgaccttgggattggtgaaatccaggtatgaggagagacctggccaacacaccccttcaaagtcttccccttcctgattcttcacaaagaagccctgatctttggccttcacatatactgagtagtcaggatcaatcttgatgtggggatcactgatgaccacaagcttacgctttttgttcctgagcagctcttgcatcctcttggggttagggaatctgtttttgtcccaggtgaagtacctcttgccctcagtgtgctctatgtccagccacatggcatcataaggaatgtcatgcccatcaaaccctgcatccactgcttttacatccggctcaacttcatagttccaggtgcaactggtggtaatcccaagagagaggaggcggcatggcctgtgttcc

SEQ ID NO: 334833 - DNA, 725 bp, Homo Sapiens
  misc_feature (183)..(246): n is a, c, g, or t
gagagactcgcttgagattaaggagctatgggctgtagcgtcgttataccgatcgggtgtccgacactaagttcggcatcacatatcgagtacctccgcgggagcgggggaacaaccaggatgcctagtgaggggtgaccccggcccagttcggaacagacgcaggtcataactctggattcnnnnnnnnnnnnnnnnnnnnnnnnnnnnnnnnnnnnnnnnnnnnnnnnnnnnnnnnnnnnnnnnttatccttttatttgaacagtgcaattgtcaccttctctataagcccttcccttacatctcctccgcaggtttgtatatagcatatctcactgtagtgttattttacttcttatgtgtctgtctcccttgctaatttcaaactcctcagaggaagactgtaatttattcatctctgtttcctcaggacctagcagtgtttttgtatatgttaggcagcttaatacatgatcttcgcatgaactggtttaccccctgtacatgatggagagactagagttgccaccaagttacctatccgggggccagcctgtgggatcagatgggcaggattgggtgggcccccttaccatggtgtgccctggaaaactgctcatcttgctagattgaggatatagagctggcttcccacagaactttggaaccatcctgccagcaaggtcagactgtcaataaatgggaatttattgcatgcctgtgg

SEQ ID NO: 334834 - DNA, 583 bp, Homo Sapiens
aaaatctccgtcactttttactttattgattttcaatttgcttctttacctggatcagaaagataatttcaaattgtttggaggttgagtattttctgatagtgagaagttggtagacattctattaacagagatgattttaaaaatatttttggtaattaactggaccataagaaaacaatactaaacaagccaaattactcttagctaaggcttggaaatctggagaatgaggaagatgagaaggagagagtccttagattactggtagaagcatgacctactaactcttcttttagcacccgtggtggtaaggaagtcccgcctaaggacttctgccttggctagggaatgttccagtgttgggttatgagcctccatggcagagcacagcactgactctctgaccagctggaatttgctgcagaatgggtagggctgaaaggagaccactgtgaattagagttagaacatcaagactgatctgtattgcaaccagagtcagagtgataaaatggattcgtctctatttaaattctatccatctttcttcttgtccttcgctcgaggttgcggcagaggt

SEQ ID NO: 334835 - DNA, 311 bp, Homo Sapiens
  misc_feature (162)..(261): n is a, c, g, or t
agatgaggcctcactctgttacacaggttggagtgtggtggtgtgatcacagctcaccgcagcctcaaactcctgggctcaagtgatcctcctgcctccctagtagctgggactactggtgtgtgtaattaattcttccagttaattttttaaaaaaacttnnnnnnnnnnnnnnnnnnnnnnnnnnnnnnnnnnnnnnnnnnnnnnnnnnnnnnnnnnnnnnnnnnnnnnnnnnnnnnnnnnnnnnnnnnnnnnnnnnnnagcatgagctaccatgcctgacttcagttgagtttttagtacactttata

SEQ ID NO: 334836 - DNA, 510 bp, Homo Sapiens
acagtatctctcaaaattttttacagtcttactgaaatataatttacacacaattcacctattttaagtgtacaacttttaacaaatgtatttagctgtgcaacgttcatcacaatccagttttagaatactttcatcactccaaaagttctataatgtctatctgcagtcaatcccggttccaatacccaactgcaggcaaacattgatttactttctgtgtctttagttttaccttttctagaaatttcatacaatatgcagtcttatgtgtctggctgtttcatttagcacaatgtttttgaggttcatccataccatcacatgtatcagttcttccctttttttaaattggcaagcaatattcttttaagcacttccttactttcttgcaccacagtgttctaggatcatcctctgtttttcctgtcccagacctggaaccaaccaaccatttctctaggcatccctatttacccattgagtttttatttcaattccctttttcat

SEQ ID NO: 334837 - DNA, 507 bp, Homo Sapiens
agccccaaggcccagaagaaatttaagcgtcttatgctgcatcggataaagtgggatgaacagacatctaacacaaagggagatgatgatgaggagtctgatgaggaagctgtgaagaaaaccaacaaatgtgtactagtctgggagggtacagccaaagaccggagctttggagagatgaagtttaaacagtgtcctacagagaacatggctcgtgagcatttcaaaaagcatggggctgaacactactgggaccttgcgctgagtgaatctgtgttagagtccactgattgagactactgcaagcccttgcctctcctcccttgcctttgtctcttcagtcctctcacttattctatttcccaaccccctccaacttgtttgtgtgatctcagaactgtgccaagcagacactgggacaaagggagaatatcttgctcccctcctgagtcagcctggtgttgccctttattccccttatgtgcatatgattaaagagttattttt

SEQ ID NO: 334838 - DNA, 499 bp, Homo Sapiens
tgaagaattcaagttagttttattcaaaggtcttactgagaatcctagacccaggtcccagcccgggagcagccttagagagctcctgtttgactgcccggctcagtgtctcggcccactgcttggttacgggggccggggctcaggacctgcacagtcacatccatccagctggctccgaagttacattacagcagaatcacatcaaggtttgggcataagagcacttctggttacagattacagaagcataatcgctaaccttggccaacattttctcatgtgcacgaaaagccaaggaccagggtccttcaccttttaaggaatacagtgactcaggcaacagacgcggggccgtgtgttctttcctgttttgttttcaaagcgtctctctggagagctgcagtgtcacagagtaagggcccacagaaatgagcacacacttaggtttgctgctgacacgccctgcctctcctcatgtggttcatgtggccatcag

SEQ ID NO: 334839 - DNA, 488 bp, Homo Sapiens
  misc_feature (166)..(182): n is a, c, g, or t
gcagtcagacagctcttttattgactttgtctgcttggtgcgggggttgggggggtgtcgaggctctagaagcggccatgccacagaagtggtacacagaagcaggcacagcagctccgagggccttgaggtgcctgggccatacagcacactcgcgcgcgcgcgnnnnnnnnnnnnnnnnngtcaccttcctccaccctgggagccagcccccaggaggagtcttttcctctaaccaccctggggtcctctgacatgcctagtcctgctacttgcccagacctgatgccagcaggcctgggcgctgctctcttgctacctggcctggggaagggaggatgacaaggcctctggggtgatgagagtgcctggcagacagctgtgcccccagcaccggcaaggcatgctcgcatcaagcagcagcgggctgataacgcacacactacaagcgcagggtgttggggaggcagtctggcgcagcctcagcc

SEQ ID NO: 334840 - DNA, 368 bp, Homo Sapiens
gaaacctggggtgccggcctgtacagattctgtcctgggggctacacagtcctcttgctttgtgttaatggggacttccccttacgccctgcgtgtacccctccccagtttaggggtctctggggcagtggccatgttctcctccctgggggggctctgcacccccagtcctggggactccgtgcctggaaccctgcctcatctgttcctgccagacctgagggtcacccttccaccctggtgtcactcccccgctcagccaggccaggatggcggggtgggtcccttttgctgggctggactgtacatatgttaatagcgcaaacccgacgccacatttttataattgtgattaaactttattgtac

SEQ ID NO: 334841 - DNA, 365 bp, Homo Sapiens
attgctgaatcatattccattgtatggatgtactacatttcgtttattcattcctcagctgatggacatttgggctgtttccaccttttggcaattatggataacggtgcaatgaacagttgtgtacaagtgtttgagtggacatatggattagatgggcttttgggggtctgaaccctttgacacattcacaaatactgtgtggagatgtactttcaagcctggagatgcagagcattcatcagactgaccaaataagtaaagagccccagcctagataatgagtatgagttcctcaccggttctcaatgctgcctgctttttcacatgggccttcaagacacggctggggctcaggtagatgt

SEQ ID NO: 334842 - DNA, 544 bp, Homo Sapiens
  misc_feature (508)..(508): n is a, c, g, or t
gtgtgcaatttaatgaacacaattaattttaccaccattttacataaaaggaaactgaagtgcatttcttagggtcccactgtaagttgagggcttgagattccaagaaaagtcttatttcagagctcagtgtcttgcccaaaacgcagcctcactgctcaatcacattcttgaggtttgattggctgaacgcacgtgtaacatcaggttcatgtttccaagcaagaatcatgggttggggaaggcaagtgtttactgtggtccagctgaggactgtggtgtctgaaactctgtcacatgggaggccacaggccgcgggctggcttggctctcgtgaaaacactgcagcgggcagccagtccggaagcagcatctggcagggctccaggcttctgagtaaggaagacccagcttgcaaagaatagaggcagactgtgactggactgatagcacactatatcaccatatgcatggcaagggcagcagctaggtgaaagtgggcagaggntgggagggatgtggatctgatctttcagtttcctct

SEQ ID NO: 334843 - DNA, 393 bp, Homo Sapiens
  misc_feature (88)..(88): n is a, c, g, or t
tgggagataacctctaagccattagaatatcttgcctgataagagtgtttttgtttacctgtgggccttgggccatgcagtatcagcnttgaccttgcaaggtcaagctgaagagactaagttagccatgtgggcagtgaagcatgccaatgtgatcaatccctagtaaaagccctggacacctaggcatgggtgagctactctggttggtaatactctgtgcacacatcattgtagccacacatcattgctgggagaattaagcattatcctgaagactctgccaggagaggataattggaagttctcttggaccttaccttatgtgcctttcttcattgctgattttaatctgtatcctttcactgtaataaactgtaactatgagtgcaa

SEQ ID NO: 334844 - DNA, 410 bp, Homo Sapiens
gttaatattggatttacttatttctagagagaaagcataaaataatagaatctcaaggttgaatggcactttaagatgctagacgttttatgttcccattgatatgtggttgttcctaccaggtttcattaccaccaatagcaaccacattagtaatgacagaaaaccaaactgaactggtttaagatactccctttccagggatgggggaagactgaaattaaattgctggtttatatggcaagaaaatctgtatggtgctaacttcaaggtcggttgaatccagctcaaatgatggtaggaatcattggtcttcacattctactcccagcagctttggacgtatgtcatctttatagcttaggaaccccagtagagtttctctttcccaaaaggttagacaaagtctc

SEQ ID NO: 334845 - DNA, 450 bp, Homo Sapiens
cgattgttctatttttgttttgtgatttcagcttttattttagattcagggagtacatgcacaggtttgctacatgggtatatttcgtgatgcagaggtttgagatacaaatgatcccattacccaggtggtgagtgtagtgcccaacaattagtttttcaacccttgcccccctcactccctcccctctctagtagtccccagggtgtacttttgccatctttatgtccttgagtactcaatgcttagctcccacttataagtgagaacatgcctttcttggttttccgttccttcgttaattcacttaggataatggcctccagctgcatccatgttgctttctgcacagacgcccacctgttttggctcgcactccactctggtctcactctgcttcttcttgtacccccctcccttgatgctgtgtgtgggacacgccaaaatagt

SEQ ID NO: 334846 - DNA, 214 bp, Homo Sapiens
ttgggttttcgtttttgcttcttttgtttctaatgtgtgtatgcatgtgcgtgtaatgcactcagctgagaactatccatttttccagtggtctatttccctctttcagtgcatgagatcatatactatgagaatctgccaaatttaaggaatttggcatactgtctcctaaaaaaatcaaacatatagaaaatactttttagctgggcacagg

SEQ ID NO: 334847 - DNA, 274 bp, Homo Sapiens
tccggagtcccaagtttccttttcatcaaatctgacatgagagaagaaacatgggtgtggcttggcacagcggcctggtgttgatggacctccccgctccctccaagctctggatggctgcagtgttgtactagactttgttcaggctgttctcatctcagctattgccccttcctttcactttcacacttcatctcattcctgttgtcactttccccgaaacgcataaggtctccccagctcctgctgtgtaggctgggccgaaaccccacac

SEQ ID NO: 334848 - DNA, 468 bp, Homo Sapiens
caaaggcttatctttatcttgaacttcttttgagaagcgctccctttcaatagctgattctctctctattcgctcaatttcagccaatgcatccaattccacttcatcatatataggtccctgttgtgatatctgttgttgattctgtaccacagaagtctggggttgttttgcagcaactgaagtgttctgttgtaaaacaggcacttgatttgctggaaggaatgctgtttgttcttgctgcgacaaacattgagcagcatttagtgggcggtttatatcttgtggagtaatgggtgtttttgaagtctgtcctgggtactgcacattaaaaggaatatcattttctgaaacattgctattttccacaccagaaatcatatcctcttgctggtccatgtctgaagaccttacacgagaaagtcttaatgtaagtttagtagagtccttggatggagaactaattat

SEQ ID NO: 334849 - DNA, 394 bp, Homo Sapiens
  misc_feature (182)..(202): n is a, c, g, or t
ctgtgttttaagactttatcattaaaaaaagaagaaattagagaggagaggtgggggggacaggagggtgaaagaatctctccaaaatgtcggatccgggcgaccctccttccctgactgcccagccaccctgtcccttctctgtcctcgcggcgaggccctagctgccatcttctggggannnnnnnnnnnnnnnnnnnnncgggtcccaggcagaggtgaaggcagaagcggggctcagagcctggaggccttgccgggtgtccttgagagccccttgggtgggcactcaggcccccatgtcccagcagggccctagggaggtaggcgttgagcggagaggcctttggaggtgggatcctgaagccagaggaccaggcgggaaccagagcca

SEQ ID NO: 334850 - DNA, 450 bp, Homo Sapiens
aaaaactcctggtggttttgtacttttccaccttgtttaggtttcataggcgattggcttcaaggcaggtcctatctgcacttccctgtaactctcactttttttctttaatgtggcctgcatatgaatatatcaacactttttaaattaaaggctaatgagctcactgcacagcctgagtacgtttggtatttggccttcttggagatgctctgcatgtgtcaaatgttattttcagaaaactggctaaacttttaatgggacctgttgttaaatcaccctgtgtttcccccataaacacgaatgttaatttacatttttaacctaactgaatgagttgtttttcttaaattcctttgcagtttgaaggaacataccttgcaacaggaaagctttaagaaagaggacgaaaaggctttataatctttcttgaagagaccctgttgctaa

SEQ ID NO: 334851 - DNA, 577 bp, Homo Sapiens
aagaagctacagtccactgaaaaggaagtattatggtttttctgagaagaaaagttgctaaatactgcagcaaactcaggcttttcctgagaaaagccacaaacaaaatcatctctgaaattttttaagcaacaacttcctgaagcgtggaatttatggggccagtgagacactaaaatttcacaactctcacatacattatctatctaggactcagtgaagatgttcttcagatttttatttaagttaaattggtaaaatacaaaaagaaaatctggattgagtttcaaatcatcttaaatagcaatcctatgaacaattataactgcaatttcaaacactaagacttaaatatacaacttgatcatacaattatctcaaaacatatgatcaaaaactttggtcaagagcttctttcatgaattcttcaaggacagctatcacatttttggcttcaggcatttcttcatgttccactttaacaatcttcaaaagtatatctccactaccacagttctttaggaacatgtaacatttaaacaaagcataatgattcatttctgcctgtcggataaat

SEQ ID NO: 334852 - DNA, 508 bp, Homo Sapiens
gccagagaatagtggtgttttatttcattttgaaaaacagactcacacagattgattcttcaggtcccccgacttggacctggcacaggaagaagtccaaacaactctgcgtagttacattagtcgttttctggtgctgcagtcgctggatgcgggtagcagtgaaacattcccaagacaatcactaaacatgcagaatgccagccagaagcatgaatcactttcaggggtcttgctgcagggagcatgaggttgtattctgtgtgcattgacaactgtataggataagccagctgtgtccaagggagcaaagcaccccatattcttctgaacctaaaggggtttcctcctcaaagaagcatgttttcaatccctaaactttggggccagatacagctccaagtggcatttattgctctttggagagtcaaagccaagccaccatgagcacgaaagctgtctgagaccctcctcccctcctccccagcatggagagaataattgccat

SEQ ID NO: 334853 - DNA, 345 bp, Homo Sapiens
gatctcattcacttgtaaagtaatgtgggaaagtgtcacttcctctccattctaatactttttaacaagcttgtactatcaatacagtttctgtttatttatgcagtcttattaactcatttattcaagcaatatttattgaatacctactaagtgctaacaggctgctgtgctggtgctgaggatgtaatgataatagataattacgtggccccctgcctccgcccccgtgaaatttccagtccagccctcccagcgagtctgaaagtgcagttcattttgtaactgacatagctgaatgatcagtagtcaggaaaggggaggaaagctgcatgtaccatctgt

SEQ ID NO: 334854 - DNA, 532 bp, Homo Sapiens
gtcattcaaattttctttgctgggtttgaatctgcatttaggttgcgggcctggcaggttcaaacgttaggctagacgagcaaaatcacactcctaatccaatgaactcagacaaccccataccatgttggttgcactcctatagaacaaccatttctgaagaccagctctgcctaagtctgtaaccactggtggtggtagtactgagacaccatacaccttcgtggcatggtagaacagatgagaaagttcgatcttaaaagatgtccgctcaatggctcaaaatcactatgctccaaaccactaaacagccaagcacagcgaggatggtcatggattgaaggtgtgagatccagtggtgttttcctgctcatcatttgtcttgccaagtcgccgccctgctgaagtgtgtgtctccaaacaaagtcagaatgcaggtgagctaagtctttggtttctttggactataaataacgcttttttttcttcaaatatttctaagtataaacctgctatcttgaggtcctggtct

SEQ ID NO: 334855 - DNA, 450 bp, Homo Sapiens
gccaccctctgaacttaaccttctgtgttctcgctccactccttcaggctcagctcagctctgcaaaacccaatccactttccaaggaaacatttctggaaggcaacacggaattagttaatgtgatgagaggcagaacagagcagttatgatgcaggctctgcacataccacaacgtggatgaatctcacttaatgttgggtgagaagagccaggcccaaaagagcatctattgtgtgaatctactaactcgaagttcaagagcaggcaaaactaatctccggtgatggaagtctgaacagttacatctgctggtggtgttgcctggagacacgtttcagagaatagaaatgttctctgccttgatggtggtggtggttacggtggttgtaaacataatagacactcacaacactcacagagctatacacttaggattcgtcacctaaa

SEQ ID NO: 334856 - DNA, 496 bp, Homo Sapiens
agaatccaaggtttattttgaatcacaagtgacgctgggtgaatacaaaaaactgggaatgcttaaaagtaggacaacttgaaaaaagaaccaagtggaatgttgccaaggaacccaggtgtgctgtgacgtgtctgctgttcacatccgtttttctcatttccacgcgtactgataattagacagacgttccacacagcacaggacactaagattttgtaaaggaaagcaagcagtgtcactggtgatcaaggaaaactttttaatctactgataacctcattcagctggactggaatctggaagtggatttgttctggtttcttctctgaatactggggaaacataaattatgtaactgagcctcaaagggatgatatatttacttactatatagacaacaacaaaagacacagccaagagtagggcagaactcccttcacaaagccgcccgggcaaattcccatgatgtcagaccactggagtttccaggggc

SEQ ID NO: 334857 - DNA, 418 bp, Homo Sapiens
acatcccgaaagtgggggttgggagagcaggatagcagagactctccactggcaatgcagggctctcagtggagtgtcctggcagactgtgagggcagggaggaatctgttgtttgacagcagtgaagggggcaataccccttttattgtaattatccagtggctgacaaaggaaggttttcttgactcatgtgaacccaggaaatagggccttcgagtcctttgcctggcgtggcagggcagtggcacaggttctgcacaaggcaggaaaatgggacctgatgccactgcctgtcacatccgtgctaaagaaaggcacaatgctcaaggcccatcgcacgtgatgcccatttctgcaccattactacccacccctcctataccctgcaagactcatgggatggaccttttagggagt

SEQ ID NO: 334858 - DNA, 478 bp, Homo Sapiens
  misc_feature (401)..(401): n is a, c, g, or t
gcatggacacactatttttcattttagcttcttacatcttcctttcctgatgccacagcagcacatggattagaaggttctagtagattccagcaataaaattatatatgctactcagaaaatatatggctagcgagatagcatccctgttctctcctacgcagtttacgtattcatgaacagtgaaacctttagaagcaaacagatatcagataccaatgatcataccaagaaatgatacaggagactttcacagacttgattctaaacctaatcctaactgatgatagggtggttttcatcacctccatccacatcctcacacgtccaaaataggccagctcagcgccgtcacagtctaccatgggaatatgtccaggggaatccatggaaataagtgngctggaggcttgagtctgggcaccgactgtgtccctgtggagaaggccctccatcatcaggcttagctggaactcat

SEQ ID NO: 334859 - DNA, 477 bp, Homo Sapiens
taaaagagagttcaactgttactcttttctttcatcaaatcccctatcagttagaactgcaggccagttccaaagagtgtttgcttaagattcaaaagtgggtaagtaaaatggatcagtgggaaggataaggtgtccaacagaaagtgtggaggagaaagctcttggcctatacaagtgactcctgagagaaaccatgcaatttaacacttcagttaaagaaatacatgagaactgcttgtcatgaccagacaagataggaaaggggaaaccccagaaacgtgctcttcatctgtcagccttttggaccaagaagctgtcactatcacacataagcaccattcccttagagtggatccaggtgttgactataaccagatttactctttgcttactaggttttccattgtcaccattggatgaacctctggtttagccacagttgtgaaaataaatggaagttggttgattgtctag

SEQ ID NO: 334860 - DNA, 397 bp, Homo Sapiens
accacaaagcccatggtaacttctgcttgtaatggaacaaggaatgtggccccttcaggagaggtattttcgaactcttcatcttgtgaactgacaggttctggatcctggaacaacatgctgaaactgggtaataaatctcctaatggaataagtgactatccaaagatcagagtgacagttacccgagatcagccacgcagagtcctgccttcctttggttttactttgaactcagaaggctgtaatagaagaccaggtggccgtcgccatagcaaaggtaatccagagagttctttaatgtggaaacctcaggaacaggctgtaacagagatgatttctgaagagagtggcaagggtctgaggcgtccccattgtactgtggaggagggtgttc

SEQ ID NO: 334861 - DNA, 436 bp, Homo Sapiens
agactgcatagggctcggtgggttgtgtttaaaagctcccagggctgattgtaatgtgcagccaggctgagagcccctgcataaaccaacaacagcaaacaggggactatctgccgaaccaggggcaaagtgcgctgagtcatagaaaactggccactattcagctgtgttaaaagaaacaaaagtctgtttcctactgttcgacccaataccgcaggcttactgagaagaggcagttatccagttgagctgagttctgtgattttcccactgtcactgcattagtggaaaaggtgagacttgaaggacagttagaatctggattgggatctggatcataatattatatgcagtatgtcaaaaggatggaaggcttactagctgcacgacattatttcaccagcctaacaccagcacacacacataaggtgcaggc

SEQ ID NO: 334862 - DNA, 531 bp, Homo Sapiens
ttcttgctccatacttgttagtttttcattgttcatttggttttacaggtacctagccactcagaaagagggagccttggatagtagtcactgaaaaggactactatttcaaaccctcacttcaaccgtattcctcgttgtcaaacagctttctgcattagtctcatgtgagctggggtagctgagtgtgggtctgttctgttctggggcagtgacaagatccagattcctcaacctattaatacaaaggtgaggccacaatttcatggtgtcagtgacagcaagagggagttcctggagtagcagtgccatggggccaatgccattcatgatggcatggaggctgcagtatcatgctccttggaggaggcagcagtggtatcttgcttggtcctggagtttcatgtgatttagaatgcagatgtattatctttggctgtgtattctcagaatctgggtctttagacctcttgatgaaactgagctacccattccacttacattataataagttcatttttgtctttagtg

SEQ ID NO: 334863 - DNA, 514 bp, Homo Sapiens
ttggtacagtatagtaccattattttatgttgtgccagtgaatccagttgccagaaataagtctgaatgttttcatgcatctttttcttaaatgcaagagcttctactgactcttaacaagcatgcttacccaaattttgttgcatgcttttaagtagcattagctatgcacacttgacatttttaaatatccctttcctagtgtaccagccttcacaggataagaggactgggaataaagtcagatgtaatgtgacccctagaaaactgtagcaagcttcagaaataaatcttttgatctttccctatcttgattagatccaaagtcaaagcaaccatacttcacctagagaagacagtattggcaatcatgacacctgtaataaaaacttgactccaaagtcaaaacttaagcaagatacaaatgtgctgcctgcagttagtcctgcatgggaataaggactagttatttttttagtgctgcatttttttaaatgttggattgctgctattt

SEQ ID NO: 334864 - DNA, 565 bp, Homo Sapiens
ctggtagatcactcatctttattaaagaagtgtgctcatgataaaaaattgtctggtatgacagcaaatgcataactatatatatagaatttatcccttaacatattttagaggataaagcaacagagggacgatttaacagtaagcgggccacctgcaggattgtcctgattctctctcagtagttactccttgctctctgcagagacttaagttctctttgctccagtgcccagacctgccttctcttcaccctgtcatcatgcacggttgggccctggttggccttttctgggcctcctcacagcagaatgtgcatcatcattcctcaagggcctcgtgctttccttgtaagtcacacagtttttgtgatttacatgcaagtaagggggaggagaaacacaaacatcttccgtgtgaatctaaagcatggagtgctccttttagtccccatggtgaagtcggtgatgctggtgaaggtttgagctctggcgaaactttttccacactggccacactggtatggcttctctccagtgtggatcctctggtgcagcttaggggt

SEQ ID NO: 334865 - DNA, 469 bp, Homo Sapiens
cagaaaattttattagtgaattttagaacgtttaaatgcttaagaaaaattggattttctaaatttgttttcaatgcgtgaattgaatgaagtgaaaattaaacaaaatacatatagttttgagtattctatgtccaaaagtcccctctgacaattaaacaatcagtttacaaattcacacttcagaagagaaagtccataattactgaatcctaataacccttattagaatccaaaggaataagtgattttaaaagcacatagaaagacaaagattgaggttatctattctgaccaaaaacagtacataatttccttggttttaaagacaagtgaatcacaacttagtaggaatcacatttccatattaaccagctgggtagatgagacatgatgtttgattgagactaccacatagtctctcttcttcatttattttagtttttagagacaggatctcactctgtca

SEQ ID NO: 334866 - DNA, 503 bp, Homo Sapiens; identical to SEQ ID NO: 212757

SEQ ID NO: 334867 - DNA, 489 bp, Homo Sapiens
agaatctattaaattatatattgcctaaaacaggtgggcctgactctctctgatagactgtcaagtgtcattaagtcagcagcaagctactttgggcaaccttctggctgggtggatgttcgtaggtggggagctgttagctgtaccccttgactagaaaggggacccctccttttgttgctaatttggtaaagactgaaatgacgctccaagtgggggcagataagaagtttcttcagtggtttgagtagtcgtctttttcaggcacactcatctcagggttgagtactccaccctgccatttgcttagcagcagcagagaaattgtctggcactgaacacccagctgcctttgccttggtctgtttctgcctaaccctggtttactaatagggagatgcagatgcttcccatgttggctggttccacaccaggtactctaaaaggggggttccagtctggatggacagtctgacttagactttacag

SEQ ID NO: 334868 - DNA, 414 bp, Homo Sapiens
tcaaattcatggtcttttatttctttcaacaatttcatacattggtgatgattcatagtatttgcagaagttatattgctgcaagaaaaatcacattagatacctaaaacatgagaagaaagacataattctattctggaatgcagtatggtatagagaaaagagctttagaactaagcataccagggttccattctcaactcatgtttccaacagggtgactttgggcacgtcccttgacctttctgagtttcagattccttatctgcaaaaaaggaacaatacccccttcctacgcatagtgctattgggagattaacttagatggcttagttaaaagtccccagttcacttcacataataaatggcagttgcatcctctttcctgggatctttcggagaatatctatctgt

SEQ ID NO: 334869 - DNA, 459 bp, Homo Sapiens
ggtagggtgctttcttcccgcacagcagacaccagagtggaagctgacaagcactggcaggattttaaaaattgctgccactctcccacagacgcccattatgtctctggagcctcgcgattcgcagtgtaaaagcataatcaagagaaatcacggttcagctcagtcagggatgggcagaatagtccatttaactttatgttaaaaaaaggaaaataattggaccaaaatttgcttgaaatgggagtaggaaatggcttgttttcaatccatttcaaatgaaaaactcccattaaatcctcattggaaactatttagtttggaaacaagtttggtattccatagacagtgcacattaaaagttgcagcacagcacagtctgtgtaagaaccatccaacaacctgatgacctagttccacagggcttttcaaagaagggctggctgggcttaggcagtt

SEQ ID NO: 334870 - DNA, 417 bp, Homo Sapiens
gtttgtcgatagtaatcaccaccttcagcgctcctcccactgctggagagaccgcggactgggtgacaagtcttccaggctcccagaaagtttctgctgcaaagcgcagggtccgcctcccacttccaggagggaccaggagggaaccatcgcgaaaccccgaggctgccggggactctgactgaggcctttcctcctgtgtccctctcccccacgccggcctcccctcctttcaactctctgcgctttgaaaccgcggagttggggtagctaggccctccagcccggcgagcaggcctgcggccacaggcagcggggcggggtgtggacaggaacaaggaggtggggtggggcggaagcctcgggcagagcaggttctctgcggagtttcggcagccgggtttatccattttgatt

SEQ ID NO: 334871 - DNA, 746 bp, Homo Sapiens
aatcataaaggagaatggtttattgaaatagtcgcttaagttagaaatatgtcataatttcatataacgattgaatacagaatctaggcaatttaacaagcttagctttcatttttagcaaattacaatcaagcataagctgaccccatttaatagggccactacttactcatcaaagttaacttgagtcagggtggctgtaggccccatgaactcaaatgtaaattcaggctggtccaaatgtgggcagcatgataaaactgtaaggggggcagccatgtacagggtctggctcagtgccaggatcccccatctcagacaggcttcctggcttccctttctggccttttgggatgccagagctgttctgaaactgacagaatgctataaccacatccttgtgcctgattcaaaggttaaaaacaatgttatttaaaatcttacctcatcaaaatattttacgatgtatttgtaaatttctgtcaaggccacttcttcattaaattcattttcatgtttctaaaagaaagacttgttgagagattctgaaatgacgtaaagtaaccaaatataagcttatttctgctttctaatgataccttagattcctgagttaaaaattcttccatttctgaggatgacaatggaggcaaatccctgattgctttgtaataagattttacttcttctttgtaggttgggatatccttggcatagagaagcttattagttggtgcttcctgggg

SEQ ID NO: 334872 - DNA, 539 bp, Homo Sapiens
  misc_feature (349)..(357): n is a, c, g, or t
gttttaaaatttaagatttattcggaggggttgggggaaaagttttgcaccaaactgcttttcaaagactaggtttttaaaaactctaagcgaacaatttccacttcagattatacatattttaaaaatcagcattgattcgtgagcatatattttactataatgaagggaaatatggcataataaaattctgaaagcaatttttcccaattaaattatagtgttgaaacatctaatagaggaatatttaataggtaagttgacttgcttcttgccattatgttcctggatactgaggacattcgtgtgtatttttcaaattcaaacaatcaaaacatttatttattcnnnnnnnnnagtatacggataacaaaagtatatagcaacataataaaaatgcaagaaactagatctgttgatacagatcatctttctaactcttaatggtttgacaaaagatgtcatctctgaacagctttgctttaagcttccacatttctcagtttgctgtttggctacagatctcagtagtcagacag

SEQ ID NO: 334873 - DNA, 580 bp, Homo Sapiens
gagactgcatagggctcggcgtggggccatgttttccctgcaggtccccactgaccagtggggcaggtcggtaggacggcagggtcatagacttcaaggagtccttggtggaagattcggagagctgcctgtcagaagacagcccacctccttcagcaggctccttccaagacccagccgccaggttctctgtagaagagaacaaatgcttctttctgaagcccttgggggatggggaggaggacgggctgctatccttgatctcacccttggcttctggctgctccaggtaaacatggttcccattgatgcagacattagagcgggaaaggacatcattcttagaccgaagccaccaagaaaggaaagtccttccttcttgggaagggtaaagttgacctggttcagttgcttaagatccgtactcgctgttctcttgtgagacatgacatccgaggccgaggaggactcatcctcattgtcatcttcatcccactgggactgaaagtctccgggacgaagcagcactttttctggctttgaagtcggcaggacagacatggactgggaaagaggcgtc

SEQ ID NO: 334874 - DNA, 480 bp, Homo Sapiens
caagcaaaagaaatttattttctcacagttctgggggccagaagtccagaaccaaggtgtcagcagggccacactccctccaaaggctccaggggagaatccctctgtgtttttccctagcttctgctagctggccttccctggcattccttggcttatagttgtgccacgtcagtctccgtacccatcattacatgggctcctctgtgtatctcctctgtctctttgtgacctttcctcttacaaggacaccagtgattggatttcaggttcatcctaactcagtatgatttcatcttaactaatcacatttgcaaagattctatttccagataaggttgcattctgaatttctgggtggacatgaattttgggaggacactatacacccactgcactcatcaataacatcttcaactcgatgaggtggtgtcatggagggaagtgaaagagagagccatgaggggaactgagggctgc

SEQ ID NO: 334875 - DNA, 475 bp, Homo Sapiens
  misc_feature (85)..(104): n is a, c, g, or t
cactttttccagttggtttattgcatttcatgtacagtcatgcagttctccgttcacatgtgacctgtgaacacctatttcgacnnnnnnnnnnnnnnnnnnnncacaatttccacagtaaaattttaaatgtttcatacataccactacaatataaaccataaaagatatatttggtaataaaaacttaatagcacttttaagttataaattaacttttaccctggaagctgagatcttcccacaatgtggtgtcttttgccaagaagaggcaacaacattataatgtggaatcaacactgtggctgccctttgctgcacctatcgccgcctcctactatgaattaattcattcgccttctcccctaccccctggcaattagtgcagcagaaacacagaaacgagaggactgtgctgaggttaaccagtttgattccacattgaaggcacgagtgcatataatgttggtaaatc

SEQ ID NO: 334876 - DNA, 338 bp, Homo Sapiens
  misc_feature (124)..(136): n is a, c, g, or t
acctgtttcggtaatgcgaactcattagggctatgctcctactcagcttttgtgcaagcaactctagataaagtgctactcaaatatcccccaaatctgtcaccaacttaattcagacaccagnnnnnnnnnnnnncttagagaaacagaggtagtccaaagacatgttagggagccaattgtggtaaggtggaatttctcatgtgaatttaacagtttctttaaaagtgactgtaaaaatctacttcctcctcttcccaggcagctaataacctagctttattgttaatcagaacaccataataaatctaaaaatgtaggtttggcacggtggttca

SEQ ID NO: 334877 - DNA, 457 bp, Homo Sapiens
caaggcaaacaactgacagcgtttattgtcaacaacaatatctaagatttcaagtgaaaattagaattttgggaagcttgtacttgactgagagcactccaagacttttccacagagattgatgctgatattaattatggcggcttctggatattgaacaatgaaatgtgtcaacatttggaagatcttcataactcagtaaaccggtagttaacatgacaatgtaaaatcatgcatggacaaaagatctattcaaagaacagataaaccaacagacattaagagtacttagtcctgaggactggatgcttctctggaaatgagaataataacctcccttgtaagaacatgctagcagtgtctgacatgtcatagacatgtgtatagcttctgttcttagattacagaggtggtaaatgaagtatcaccatggctctacccatctaactttagtagg

SEQ ID NO: 334878 - DNA, 501 bp, Homo Sapiens
  misc_feature (121)..(121): n is a, c, g, or t
tgcccagggatggtgaggtcctggctggggcaccccaggggctggttcagattgaggggcagcagggctgagagccgcaacctggctgggttcctggcctgtgaaaagggagctgtgtgtntccttccttacctgcttgtaatagaaagctgctccttcgattgagctgtttccttcttttgccctgagctatgaggagtagattagatgaaaaaattatcaagcctcctcgtctagaataaatattcttgaaatggagcaagttataaataagcaagcagcaatatcctgtgttatgaatatataatttctatctttaatagctgactaggccccagggactgtctgaaaatggcctgtctggccctgatattttatatatttcttaaaaggcacccaaacttttgtttcttagcccttggacagttaagtcttagggggaaataatgagagttgaaagtctcattgagcaaatgcaccaagcgcaggtacttggtttac

SEQ ID NO: 334879 - DNA, 511 bp, Homo Sapiens
ttcagaagaaatgtttttattccaagggaacaggaaatatgtcgaaaagttctctctctaaaacactgatttcccatttatattcatgtgataattcagctcaaacctgtgatttcctttacggttttcagaatatccagttcctgtggatccagaggaggagtatgtgtgaaggagtcacccctaaatgccaccggaggaatgtggagatcgccactgatggaggtgcagtttttgaagtgtttaatattcgtagcatttatggagagtgagtctttaaattcaccaatacctattccgttacacactttgcggcaaggccttcgcacttcttacacttgcggacgccgtcttcctccatctcatagctgtcggccccacaggctcggacgcacgagccgtgatctgtcaccacataattacggggacacttcttcacgcaggtggcaccaaagcttgatttgccctcggggttcacatccatctggtacgttgtggggttgtagagcat

SEQ ID NO: 334880 - DNA, 392 bp, Homo Sapiens
ttcattcaaacttatttactaattatataaatttggccagattacttaatctcattttacctcagctttactatatgttaggtagacaaaataatagtttctacgtcacaaggttattttgagaattaaatgagttaatatgcataaaacactcagatcactgccaggcacataagatgtgggtcgagcgcagcagctcatacctgttatcccagtgctttgggaggctgaagtgggaggattgctagaggctgggaatacacaactagcctgggcaacataaagagaccttgtctctacaaaaatttttaaaaaaattagctgagcatggtggcgcgtgcctgtagtcccagctactcaggaagctgcagagggagcaccatttgagccca

SEQ ID NO: 334881 - DNA, 460 bp, Homo Sapiens; identical to SEQ ID NO: 236093

SEQ ID NO: 334882 - DNA, 445 bp, Homo Sapiens
acagtcatgtttcctcacaacccatcttttgtaccactactacttttaaatatatcctcatttgtccacaaactttctctattgccttgaaattgttttatagtgtgtagttttttacttgccaaatgtgtatttactcaataattatctttttacatacaaagagctgtataaggcattatgaggaatacagatatataaaaaaggaattaattattacagagttttcaatccagagaagatatcatcattccaaataactataatacaaagcagtaagaattgcttttgtctaaggctaagaatcactgtggacactgatgctgttaagcctggaatgtggtcggagaaactgtttgcagaagctttacataggattctagtgcacatttctggtttaaagtggtccgtagaaagtgatgggaggggtctgtaaggaagaaga

SEQ ID NO: 334883 - DNA, 310 bp, Homo Sapiens
gccatgatggatttatttaacagaaatccttaatccataatcattaatgcattcaagttcatacattttagtcttgaggtttgtgctttctggatcctgtttaagaaccccacggccaccctggccctggagattattcattttttctcctattaaacaaatggcaactaccttttgctttcaaatatttagtccatttggagtctacttttcctaggggctcagttaggaatccatattcctattcctccattttagggctggctttccaacatcatcttctgaacagtccccactgatatgtggtgcc

SEQ ID NO: 334884 - DNA, 445 bp, Homo Sapiens
ccaactcaaatatattaaacacaatggattcttgcatttaaaacaaatactattgattaaaaaaaataagaattattttacccagaggaaaaatatcttatagaatcctttgattttctgttttttacctgtcctggaacatttttatagactttagaagactattttattgaaaaagtagaagacaaactaaattaaataaatctgcttaagattctgggctcataagcaagaaatctgaaatttacgaagaaatgtatttatccagaaactctgggcaatctgaatgcctgggcaaaaagagatgagaattagaggagtgcctgaattacttgcacaagtgagctgtctgtagtccccaagtaagctatggcagcatgttattacagatattagaagccttacctaattcatttataaagagtagatacatggcaggaccagc

SEQ ID NO: 334885 - DNA, 388 bp, Homo Sapiens
atctgagtaaacagatctttattattatttaaaagaaaagtatttaaagagaaagtatttttttaaatatattctagggtttaaaatttattaaaagacaataatgaaaaggccagaaggaaagaaatgaaagtatactattgtaaggttctcatactgtatttgaaataaaagatcatctccacagtgacatgacccatatcactgaaactgaattcatattcactcattcattcattcatcaactgtattgagtactgtataaaagtcattaaccctctgtagaagttatgggcttcagcgagggtgtgttaacagattagactaagcaaacaggtggattatttgagtctaggtaaaatgcaagggttcactcttcttatgggac

SEQ ID NO: 334886 - DNA, 651 bp, Homo Sapiens
  misc_feature (552)..(552): n is a, c, g, or t
tggcttgacactttattctcctgagaggggaggacagcagagggagtcaggggagggagactggagagtggattctggatcgaggaagcgaggagccggcagaggttgctgacgttcccgggatctgaggacaggagcctgtgcttcttccacaggacaaggtgagagggctcagaggggacctgtagaaggtatacacaacctgaggtcctcacagatctgctgggcagtttctccggccacgaggccctgggtaactctagactgatacctcctcatgaaatttctgcagacgtcgcgccatcgtgacctccccgtcctacacacccgggtcgcagcattggaaacacttctctgggtgggcttatccaccatcttcttcagtttttggagctatcgtcagacaggtcctgtagtcacggcccagctcctgtgttttggtcaacaggtcaccctgggggccctcctggcaaggcacgggcaggatttctcctcatcacgcaggtgggctcttgccaggtcgtagtactcagggctcagacgagagaagancagacctgggttgcccaggagcatggctgcaaggaggcaggagggcccaggtagccatgggtggggcagccgctgaagatgccttttacaacctgtttt

SEQ ID NO: 334887 - DNA, 482 bp, Homo Sapiens
cacattttaggctaaagtatgaggtaaaaagcaaaagtcctctgaaagtcaaaatgtcttattgaaatgtttgaaatattggcaatgaaatttcctaccactatttaacaggataacctaaaaaatcaacagttgtctattaactcaaggctctgaaggcaagccacgatcaagctaaaattatgcaattttacacatgatatcaatattggttgtttcatataattctggatctctccccaaaccaccaacaatactggatataggttttgtcaaaaaggctttcttacctcatagaagaagggatgtccagccatatcaaagatgttaactttgatttctctgtctctgacgtgtacctttgtgactccatagtcaattccaattgttgtccggtatttagacacaaatcttttctcacagtatcgctttataatacagcttttccccacttcggcgttgtccatggagatgactttgat

SEQ ID NO: 334888 - DNA, 453 bp, Homo Sapiens
gttggtattgttggatatgggccatatgaactggctgagacttacactgtgtgtgccttgtgctgttagttgacactttagttcttctgtgccttgtgctgttaatcgacatcttagttcttccacatcctatttcttcagttgggttacaatattcttaaggcagggacctatcttaactgtcctctcacagcagggacttgtgccaagtaggaatatttgattaatggattcattagctaatcacactttgtagatgctttttgaggaacagaacttttgaatgcacgataaacttgggttctcgtctgaataccatggctttgaggttggttatatggagcctttcagtgtgaatccctaagcctcttgagatttcttgagaggcagatatgcctgcatagcctgccctgcctgatacttcacagaatgggctgctactttttacttatt

SEQ ID NO: 334889 - DNA, 427 bp, Homo Sapiens
tcagcgaaaatcctctggggttaaaattttaagtttgaaagaacttgacactacagaaatttttctaaaatattttgagtcactataaacctatcatctttccacaagatataccagatgactatttgcagtcttttctttgggcaagagttccatgattttgatactgtacctttggatccaccatgggttgcaactgtctttggttttgtttgtttgacttgaaccaccctctggtaagtaagtaagtgaattacagagcaggtccagctggctgctctgccccttgggtatccatagttacggttttctctgtggcccacccagggtgttttttgcatcgctggtgcagaaatgcataggtggatgagatatagctgctcttgtcctctggggactggtggtgctgcttaagaaataaggggtg

SEQ ID NO: 334890 - DNA, 512 bp, Homo Sapiens
gccaggttgcagacgcagaaggagctacagctgagagagggacggtgaggttcatgttcagtatgtttctgttgcttgctaaactgtatttttcttgcaaagtaaatagaaattaacatcctacatgccaaatccagtccactgtgggcagactgtgacaaatcctcaaggaacagatcattcccatgcagtagaaactattctagaacaaagttaaagcatctcacttcatttatcaggcatacctgaccctgaaatcatacctaaccaggagagtacagctgacatttcatctcacttccaaatttggttccaaagcacagtacctaaaaaagttcacaagtatgctttctcccaggataaacaataacagtgaaaatctattaatgtaatttgttgccataatagaaaaataagtggtaattttagcaggcgttgaaatacgtttcttaaaatttatacctgttcctgataaaatttctttattttgggtactttctttagcttgggtt

SEQ ID NO: 334891 - DNA, 531 bp, Homo Sapiens
tcatccccaggctggtagctccctgcagagaggggccatgtctgatccacctctgttcccagaatcacgtgctcactccctgacctctttcacctccttttcaaacatcaccttctctgggaggacttccctgcttgcctccttaaaatcacaggccccaggtccctgtgttttgctgtgttttcccctatacttagcaactagaaagggagaggaaagtatgtttgctagagatgaaagttcaaggagccaacctaactgagtggagggagtgactcacattctccatgaaggaggtgggagcaggggcaccctctgagagcccagcttgtccccagagggaagctggtgtggacactttgtaatccacagtgttgtttacttattgattgctctggtgtctgtcgccccttctggaatttgagctccaggtgtgggggagacagtttgatgtggtcactgcttcctgagacagtgggtgcactactagaatagtgcagacctcagactccacgccgagccctatgcagt

SEQ ID NO: 334892 - DNA, 409 bp, Homo Sapiens
agagagttgagtaaaaggtttattattagtgcagtcaacaccatggaacagcacatacaacacaaccagcaacctgcagagacactagtgcaaagggtagggaagcctttcactgagcttcctggctccatctgatggtaaggacaggacagtatgagccttggttaaggcaggtaggggaattgggagtggaagaaatgtagtaaccagagtaagtatagcagcgttttcaaattcctgagcacaatgtcccagagctggaaccctactcccctcaagctttccaccccaatcccagtggagccatgatccaactacccagacctgcagcaagctagcctggaataaaattctgagaggaagccattacatggtggggaggagcctttctatctccaaccacactccc

SEQ ID NO: 334893 - DNA, 414 bp, Homo Sapiens
atctttaagaacacaaaaacaatttttataaggcaggagttcccacccatgcttagtaccctgactgccaaatcacattccttcctcagagactctgactttaatatattctaggaaagggagacatgtcgtggggggagctacttgtccccttaaattttgggcagactgcctgctggtgccagaatgatgccaaagacatagaaaagtcccagcaggaggttgagcttggcagtcctctggggcagtttgttgaaggcctggcttcgaaactgtctctcaagggagaaggccatgggaatggtaagcagggggagtgccaggctgatggtgcagtgtgtggccaggatgctgaagaccaggtagggcaggaagagcagtgtgttgtagagaatgtaggagaacgtggggccg

SEQ ID NO: 334894 - DNA, 153 bp, Homo Sapiens
atgaactcagtaccaggcttggcaaaaagcgtgggactccttagaaccaggtatgattctcccaaacaacccttgctctgctctgaggctgtcgtactgatttgcaaagatctgagccgggggtggcagaagcctggtacccaggggatttgg

SEQ ID NO: 334895 - DNA, 559 bp, Homo Sapiens
ctatcttcaccttattcttctactatattctccctttaaaaaagataaattcacatcattctcccagtactaggatttctgctttctggaattcattttggttaggttttttatcctattcaacagactcttgaaagcctctgagagttcttactttcttatacatctcactcaaagctcttgatctaccagtatgtggtttgtatttaaaaccttggctttcagtggtgctctctcttttaccctccacctaaaaaagagagtgatatctccctccagtctcccctccccttaagactgctagaaaaggagtgattctgtacatgtaattgtaaagttagccactaaagttaaaaagattcttaatttgtagttttggtgcaattttatcagaagtacctttccattttgccagaatccttgaatcattctttaaaccaaagcatttttttatagtttctagctaggtttatagaaactagtggagctatgggcagtcagttaaaaacaggccatagatagcataatgaattataacacccctgtccaagtcctatag

SEQ ID NO: 334896 - DNA, 537 bp, Homo Sapiens; identical to SEQ ID NO: 61938

SEQ ID NO: 334897 - DNA, 314 bp, Homo Sapiens
aagagtccaccttttttagctgccttaagcactttttagaaaaatgaaaacaaaggaaaaggaaacaatcaagaattccctaaggacattacattttaaataatttaagacattgtatggctctgaatgtggttattttctcgctgtgcaggccagagctggaagtcagccacctgggcttagtcttcacagtcttagaaacaaagtgtgtgaccttcagcaaatctaacctttgtaccacttttctccaaggtcaaatgatggtgatatcattttcttaaactatcttagtgagtaaaaaggtttcactgaaa

SEQ ID NO: 334898 - DNA, 298 bp, Homo Sapiens
ctgacttatttgagcagcactgttctggcctgctaactttagggttagtttgggaccaggtcggaaatcacaattgcatgaattgcacattggaggccagggtggtgcacctctgggcaaatgaatttcctctcttagcattgatttccccagctgtaaaatgtggataataatagattgatgtcctctctaaattttgcagctgtaaacagtcccagccctgcaaactgaaagtttgttgctcttccctttaaaattactgtagggacccagcccacagggtcagtgggtctctccc

SEQ ID NO: 334899 - DNA, 356 bp, Homo Sapiens
ggattgttgtgctgtttgcacacacaccaatgatgtgatatgggcggtaggaaacagcatccttggcagtgttgttcttcacaggaattgccttttaagcaatttaaggcttacaaaatcaggttggtcagattataacaacagcatcctagcagcatcaagataaaacacacacatcagtttgtatttcttttcagcatcctctgacaaaacccactcaaaagtgaaatattctccataaccattatccatgcactgccccatgacacctttgtagaaaattttcagactaacaaagctgttaattatttccatccaagagaaaaagtattaaagtacttatttctggcacctca

SEQ ID NO: 334900 - DNA, 492 bp, Homo Sapiens
gaacatggagttagcttttattaaacacaaatgtaccagacactgtgccaggcacttcacatacagtatttcatttagtgcaacaatcctgcagtactggtcttaacctaatgttgcaaatggggaatctgagattcaacaaggttaattagcttgcccgtaatcataagcacataaatgtgattctcaaggattccaaggcccttgctcagtttactggccatgctgttttcttgcattttatgtaggaagaacaggacccaggcatctccctccaccattgacctccagagaagagatgacacagttggaagggctgtctaagacagacaggaaatggagttgggggccaaatctaagttaggggatctgagttaggggagcacttctcaggagtgaaaatgcacaggaaagtggtggctggagttggaagtgttagaggcctgagatctacggtcttgcgcctgctacagcacctgcaaggttctactg

SEQ ID NO: 334901 - DNA, 448 bp, Homo Sapiens
tctctatttgattttctttatttgatttgtaagaacacattcacaggagcccttcctcgcgtagcattaaaactaaattatggatattaagccattaattccattgaggctaatttgtttttaactttctgtgatatttagacgacacagaatcaaatgatctggaatcctaattgtgctggattagagttgaacacactttcatggtcagaaccgtgatacttctactgggtttatctccacaaaaagattcataacaaaggccaattgctgttcttcaaacccctagtcagccgtatcccaaaggacccgggcagatggtaaaggggactgcagagaagtcacctggcggccgagagggcattggcatgtgttccagcttcacttctgagtccaactggctctgtaaccttggaccgggcacttttctctctgggtccagtttctt

SEQ ID NO: 334902 - DNA, 447 bp, Homo Sapiens
  misc_feature (231)..(260): n is a, c, g, or t
  misc_feature (312)..(400): n is a, c, g, or t
tcagaaaaaaatcactttactcaggtgagatctatgtagttacagcaggacacggatgggactgggcatacagacgaatggggctgactcatctggcttcttcctgagcagggaatttgatgcttgtttctgcagaggtgccacttctagttgtggacttggacaattagtcttttggttcctgggattccccattggaatatgctgtattaaagcccacttagtgcttannnnnnnnnnnnnnnnnnnnnnnnnnnnnnaaatacaattgctttaggaagatgccttttttttgagacttaactctgtcannnnnnnnnnnnnnnnnnnnnnnnnnnnnnnnnnnnnnnnnnnnnnnnnnnnnnnnnnnnnnnnnnnnnnnnnnnnnnnnnnnnnnnnnacacaccatgcccagttattttgtatttttagtacagacagggtttc

SEQ ID NO: 334903 - DNA, 485 bp, Homo Sapiens
  misc_feature (323)..(376): n is a, c, g, or t
gagacaaagtttttcagtgttgcccaggttggccttgaactcctaggctcaagtaatcctcccacctcagcctccccagtagctggactacaggcatgcaccatcatacctggcttaaagagaacacggctattccagagagagttgttctataaagtaatggtatatatgtatatctggagtcagagctaagctctataatatcagtttaactagttaaggtggctttattatattggggcttgacttatccatcatctggcttctacttcacagtaaaattaagtggtcaccagaaccccagtgatgcggctggtattggnnnnnnnnnnnnnnnnnnnnnnnnnnnnnnnnnnnnnnnnnnnnnnnnnnnnnngaacataacaataaaagaaaagggacattcttttgagttaatgcttcaatttggccccccaaatactccacaaagattttgcaacaataatatctttacaatcaagtat

SEQ ID NO: 334904 - DNA, 435 bp, Homo Sapiens
taatgtcgatgttatttatttacatttttaaaaggtatgtatttgagaaacataaaaacacaacagaacatttcataggccactttacacaataaaataggcaatgataacaggtatttttgcataaacactgacgtaactaacgacggcggcatgggtgtagcagttataagaagacagaccataaagaaataagtccaaagagaaacgcgtacacgtatatcgctacggttactaattgtgtgcacctagccctgtagctgtggtcatctgaaatatcagggattttagacttgagggattttgatctttagggatttcaacattccacattatggtgcttgggattgtgtctttcaggattatgatccaaactcagctgggcctcacctccctgccccaggattgtggagtgagaacgttgcagcaggagag

SEQ ID NO: 334905 - DNA, 449 bp, Homo Sapiens
ccccaaaatgaactgttttaattttaaaaagtttaaaaacacaatgacaatgaagcactgatatgccttaggaacagtcccaaatcagtgctgacttaaagctaagtcctctctttccatgaaaaagaaagcagagaacaaagttcaatctacaatgggagggaacagaatgaaaacaaccaaaagggtgctttccagcagcctaggttattctttgttttcaggccacaccactggaaatgcttttcttcttatataagtcttttcctcacaacctttattttttaaaaactgccatctgctgaacaagagatgtccacatttccaccagcaggtgatccacttctgtgcacagtttttgcttcctcactgtgagtcctccttccccgaaagtgcaaagagagcaagctgatacctgcaggccccagagccccaggactattccagct

SEQ ID NO: 334906 - DNA, 413 bp, Homo Sapiens
actttatccatgtaagatttattaaacatgtaacttcgttggaaccaacaaagctactttcatgtttttatgttgttctttttagatatttagattaaccagataatcttaaattatcttagaaattagaaagtttctgcagtattgttacatttgttccaagtatacaagttgtttctatgcactaccttctcaatcctgtgaaagaagtctattaccaaagcaatttctaacacattgctcaaaagacacagtaacgttgtgaaaggcattttgttggatttagtcccattttagtatccccttaaaaagtttgactgatgactctggatattcagccaacagtgttgtgtcaaaaacttgcgtgaatttatctaaaaattcatagtcggtgctgaacctgaatttgtttg

SEQ ID NO: 334907 - DNA, 417 bp, Homo Sapiens
attaaatggttttttaagatcctaaagtctcccagtttcccctatatacataagaccatttaaaccacaacctggttaccaccgaccctttcgtgatgattcttggccaaacccctgaactacaagcacatccatttacgcctgaaaccagaattgtcctgagattcgagcaagacacaaggcggcaattgggtaccacagcttcatggaagtaagtggtgggaatttgcatattattttgttaaatgagggtccagttcttttgggccatggcaaactattgttgatcccagtgagggtacagatgagggcctggatttagggtgtgcggtaaggactgcccttcacagaagcaaaacaggcagctgcccctttcagcaggctcggagtctccctccaaggcagggtctgcccgag

SEQ ID NO: 334908 - DNA, 456 bp, Homo Sapiens
gtgtccctatcattaagcaagagcctttctcttttattcttcctgcttccctaagctgctcagggttctctgagtcttgccctctgatggcaagtcttatatataactaaacctatttttgtcacccatcaaaacacatcctcagtagactgtgtgaaggtgtgaaggtctgataatgacttgatgctttatctccatagacatgaaagccatgccctctgcctctagatagggtgatccaagagctcctgaaccttaggaggttcaaagaagctctactgtctgtgctcaggaggtagcctgccagcaagagccctcaggagttgcacacacagccaaagggtgttcacacagatctctgccggtctagccaggggaggccagagtctcgtcagtcaaggatgggcttccccttagctgtgtccacagctgctcaagctatactggtcagagtgg

SEQ ID NO: 334909 - DNA, 404 bp, Homo Sapiens
  misc_feature (156)..(156): n is a, c, g, or t
tgggagtgggtttcaggaggagccaagatgtttgattatactccactgcttcaaggagtgttatctccctgagcaacctgtggaatgccgctgagcggttatgctctcagggcataaagacatgaaggcaataaggagacgtttctcctcagaggnaccccatggcttcccatgaatgtctcatgcaggggaaaccaactcaactggcaccccagaaactgtctttcccacagcatataataatcatctctaaaagggcaaggataaagaaaggattctaaaagcagcagaagaaaagaatcaagtaacatgtaaacaaactccaattcatctggcaacagacttctcaacagaagccatacaggccaggaaggagttagatgacatttttaaagggctgaatg

SEQ ID NO: 334910 - DNA, 472 bp, Homo Sapiens
ctggcactcatgctctattctgtttaacttaattttgaacatgctttctctgccttactacagtcaagctcctagagggcagattctatatccaattcaattttgcattgcccaaatacagtattatgcacataaaaagggcttaaggaatgaagtatttactgtggaatattttctatacttgaatataaacaacaaaaatcccacaaagtgtgactaggtccatctaccagctcaatgaagaatggtatccccctgaaatcagaagtcactcgcacctcatttgggctgatactagactcagatctcaaggctactgcaaacgctcagctgtaacatttatatatcaagcatgtggtactgctcgaatggaggggggatggacatgagtcgtttaaacgggaccaagttcttagggtcacacaaataccccgagaaggaaaactaaagggatgtagggtggtagaataat

SEQ ID NO: 334911 - DNA, 488 bp, Homo Sapiens
tttccactgggaaccagggatgggtaagccttgggcttaggaaaaattagtaattagagcagcaatgccctagactcatttattccagggcccctttgtaagagaaccttttaactttatataaaactaggtaattctgcacttatgctgttcttcatacgtcaagacagcaaaatcctctcacctctctactttcatgtatactttgaatagataatgcattcaaatgactcaacactcaagtgccagagtggagagatgtccagtgaaaagcttcctccgcctctgtccctttcttgtctgggggagtccccattgcctgtttcttggtagccttcagagagtctgttcatatgagggacatgcatatttatcctccctcccccacctcttctacaaatggtgccacatcataccatgcggacacgcagcaagcacctcatccttcatttttgtggctacataaatgtttcgttgaacggaaaaaa

SEQ ID NO: 334912 - DNA, 492 bp, Homo Sapiens
taacaggagaggctacagctgactgggatgcagaccgggggctgggaccttaggaaatttgttctaatcttagaaggtatgccctggcttcctgctgcagcctgaaggacaagtgtcccagacctcaggacacacacgcacactcacactgtcacttgacatcttgcctgggaggcaggaatggcccctagtgaagggtacttgtgtgggcctccaggtggctgtaacataccccaggactccaggcaatcctggaaaggtggctcctggagaccaaccacccttcagactcagaggagctctctgtgaagtcaattttattattgaactaaccaacagtagagagtcagagtagtgcataacagggagattctgaacttaccttggagagtaacaaatcgtacatttacttgttggcttaggtgagtaaatccatctaaatcacccatgccagctatgaagagacacttctttcccactctttccctttgc

SEQ ID NO: 334913 - DNA, 361 bp, Homo Sapiens
ccattttcaacctaacgtactctagagttaaccaaaatgagtttgcagttacaaagtgattaccttcgtataaaaatcattccagctttggctaaaagtaaacagtaacctgcccaatatacaaatcctcattatgaattcactggctcctatctttaatgagtatataatccccatatgtattattctattctcacactgctataaagacatacctgagactggataatttataaacaaaagaagtttaattgactcacagttccacatggccggggaggctcagggaacttacaatcatgacagaaagcaaaggggaagtagacacatcctcacatggccgaagaaggagacagagagc

SEQ ID NO: 334914 - DNA, 424 bp, Homo Sapiens
  misc_feature (169)..(169): n is a, c, g, or t
  misc_feature (368)..(368): n is a, c, g, or t
  misc_feature (407)..(407): n is a, c, g, or t
gtctgaaaatgtttttatttttacttaagcacaaaaattgagacgtaacatatacatttgtacatagaggggaaaaaataccagaaaggagttcataaaaccccagccgctgccagtatcattcagtggctggggcctgcggctgtctcgggcccagagccggacgagntttttgtgggaaggcaccccagtccacacacccactcggcagcctcgagggacagggtgctggttttaagggtggactcctacgtgtcccatcacagtgacacaccccccagggtttagaaccagactccactgggtattaggggggccctccgagagatggcttatcagtccctgctgagggatgcggtttctacganttcgcctcggccctgccctttccttgaaagttttggatncttcttaatgggggaag

SEQ ID NO: 334915 - DNA, 461 bp, Homo Sapiens
gctttattgatcaattaataaaactgtagttgtaagcatagcatgtccctgaattctgtgaatcattctgacaagtgatcaaacctgagggggtagtggaaatcgccaaatttgtagccatctggccagaagtgagggtgggctgaggacccccaaacctgttgccagctggtggctggaagttggggattcttgtggaggatggtgccctcaacctgtgaaataaagtccaactccagggggttggtgccggaagtctctgcagcattccatactatagcatcaaatacatcccaaaaagtaaaagatacctggggcaggccaaagaaaggcaccaccccatcacacctgagtgaaggtgaccaaaacctgcacagacccagtcactgctacattggctggaggaagctgtggggccaaaagcatctccagggaggggcacaggtggcatccaacacacc

SEQ ID NO: 334916 - DNA, 121 bp, Homo Sapiens
aacctgtcattgtcacatttctctttcattagtgcttagtgagaatcatttgctctctacatgctcattacgtggacaacttgcaagttaagaatagtttttacatttttaaagggtcctt

SEQ ID NO: 334917 - DNA, 469 bp, Homo Sapiens
aataccctctccatgttatatatgttggaaattttcaaaaagttaaaagggggatctaacaaatagaaccataaagtatctaaactgttgttaaataaacggtaaagtccataatacgttagaattctttcatttttcaagatgtctacaagagagcagtaccttgattcacaagccctttgagatatcattgaaagtaggatgcagaactcagagctgcttgccttttgctacatttcccccgtaatgcattccccactctccttccatcaaaacaggcacttacctctgacaagctgggatatatttcaaagatgcatgctgaatccactgccctcaaatggcagagagaggatgcaaacacagccgggcaatgcagccatttcgcagccttcctactgtgtttgaactcagaaacagctttatctccatttcttgaccacatacctcacagcctgcagctgtgcag

SEQ ID NO: 334918 - DNA, 508 bp, Homo Sapiens
cccctataatactttgtgggttttttcttgctctttctctttcccttttccttcttccttatgtgatagagaatactgggtagagtcttttgtctttgcttctatagccctatccacttcttttggtaggcttaatattgggctgcgcagttcaaccaacaagccagtagatggtacttataggtaagagccagctgtagctcatgtggctgggtatattcttgatactcctttattcaccaaaggattcttgttgcctcaagaaatggctgacctatgtaatttacagtggtctgaactccctgctaggcactggaggggtggggaccataatgggtggggctggacctagcatgcccacctacaggtccccgcaatggcaggtacaagcaccagcaccaagggataatcaatgggtggccacacgcattcacaagtatgcctaggtttgaagctgtggaaccttttagctccaagttctctgcatgggtattggggcaactaaact

SEQ ID NO: 334919 - DNA, 285 bp, Homo Sapiens
gtatgagccacagctgtgcccagctgatgttttccatattgtcaaaaaataggtataggcaaatttttaagttaccaatatatggagcttataaacttcaaaaagatcacactgctcctggccaaacacatttcagttctttattcctgtagacctcataagggataggaatcttatgtccttgattcactgctagatgacctgggcttaacacagtgcagtacataagagtgatttgatgcaaaaatgaatgaatgcatatgtttgccctactatcccttatat

SEQ ID NO: 334920 - DNA, 458 bp, Homo Sapiens
aaggtcttttcatggtttctactaattcgttagtaccctaagtatatctgaaaaatatgtctattgagagaagattttggcattccagatggtatagtctatatatatttaaagttttgaatttgcttatatatactcagctgtctttttctagcatttttgcatttacctgttaattgaagtataccccaccacatataaaagttcctcttaaagacactggactcttcctgggggttctaaaataagccaaaaagtttgatgtataaaattttttattggcctctgatgttctgtttagatcactatcctataagtaaataaatttgaaatagattcaaaatgtcctctggttgaaatctaagagttggaatgttgaggaagtgtttgatacattcttgcatggaaaagaacagtttgaaataatgtgtaatacataatacattacatgtgttttg

SEQ ID NO: 334921 - DNA, 331 bp, Homo Sapiens
  misc_feature (13)..(13): n is a, c, g, or t
  misc_feature (30)..(30): n is a, c, g, or t
  misc_feature (52)..(52): n is a, c, g, or t
ggcttgttttggncgtcctgtgtcctgtcngaataaccggcgtgtcctaaancccacgtgaaatgtgcaatggattattggcaatattaccttgacagaatcatgggactttgggaagagggaggacagaggcctctgtcgcactaacgctctcgtggttgctcgactgttgtatctgtgatacattatccgactaaggactctgggctggcagggccttctgccgggaaagctagaaacactaggttcttcctgtacatacgtgtatatatgtgaacagtgagatggccgtttctgacttgtagagaaattttaataaacctggtttcgt

SEQ ID NO: 334922 - DNA, 472 bp, Homo Sapiens
tggctcttcagacctttcagccagtgctgtcagtgcccctgggagggaagggcatccctgaggcacccgaatggtccctcagggtgcagggagctagaagcctggccacagaggagcctcctaaggcagcagctgcagcaagcgcaccctctccccactctcccgcacgccagagcggcttccagagcagatgctgtttccatcctcctcgtcaaaaccattctcgctgctgagcttgacaatctgggcaaggcttgtggggcgcttgacaaacagaatctgccctgtgccgcctgggttccgtgggcctccagcatgtagcctgcaggcaggggcgctgcgggcaacccagttgtgctgccccagcccatgcctccgggtctgctgtgcatgaatgagtgctcacttgtcccgggtttaggacgtggtcaagtgaacagcagggtctaactgtgcttacttagcccagttc

SEQ ID NO: 334923 - DNA, 267 bp, Homo Sapiens
ggttgttatattttattggttttgacaaaggtatgacatgtatccaccattacagtatcattcagaatagtttcactgccttaaaaatcctctgtgctccacctattcatccaacccttcccatggaccactggtaaccactaccttttcactgtctccatggttttgccttttccagattaccatatagttggactcatacaatatgtaatcctttcagattggcttttccttagcaatatgcatttaaggttcctccattagcca

SEQ ID NO: 334924 - DNA, 134 bp, Homo Sapiens
tttttaactattagaaataattaattttattttagaaagctttaaagaaatggtatcgatttttattcttatagtgtacatatacatttacacctaattttgagtagcacactaaatgattcacattcgctggg

SEQ ID NO: 334925 - DNA, 378 bp, Homo Sapiens
ctctttggaggctggggatagtagcatcaacattctcactgattaatgaagtggtgttcacattggatttgtgaacagacccatcatatgcagacttctggtctactgaggagcatgtgtctctacatgtttacagtggtggagtttccttgcccctctgccaataaccacaaaatgatcagtaatgagaaataattaagtatctagaggaagaaaacaaagacatgaatttcatgatactctcatgctttgtattatcagtgacttcattgtttctcttggcaaatttttaatgcatctgtgcttggcccaggggtgcatactagggtaaagaaaaattttgtaatagcaacagtggtttggattttcagggtccaa

SEQ ID NO: 334926 - DNA, 516 bp, Homo Sapiens
agttgatctgaaagattatggcagaaattcaatattgggggaaaagaaacaagatgggggttaagaaattagaaacagcagagctcccacaggttggaaaggttggaaaggatttgagcaagagaacaaggagcctgctaatagcacccctgggtttacatcaaagagaagcaccctggagagaattaactcgggaggaggtgggggcatgggaaaccttttcatctccaagagcgggcaggaacagcagctggcctgaacttgaaggtacaccaggtagcttgcgtgggccaggagaaggtgattctcttctatgcctctctccaaagccctgcttctgatgctgctcctctacctgtattgaggggaagatacatccctaagaagttccctgaaccccattctttgttgtggctaactggtccccttggaatttttctactaattttcaattccccctctcacctggtgaaatcttgaatcttactgttcaataaaagttcttctaccgaaaaa

SEQ ID NO: 334927 - DNA, 523 bp, Homo Sapiens
  misc_feature (248)..(248): n is a, c, g, or t
  misc_feature (508)..(508): n is a, c, g, or t
gacagaagaggcctactcaaatcctttctgaggttccgagagaaatatggggacgtcttcacggtacacctgggaccgaggcccgtggtcatgctgtgtggagtagaggccatacgggaggccctggtggacaacgctgaggccttctctggccgtggaaaaatcgtcatcatggacccagtctaccagggatatggcatgctctttgccaatggaaaccgctggaaggtgcttcggcgattctctgntgaccaccatgagggacttcgggatgggaaagcggagtgtttgaggagcggattcaggacgaggctcagtgtctgatagaggaacttcggaaatccaagggagccctcgtggaccccaccttcctcttccattccattaccgccaacatcatctgctccatcatctttggaaaacgcttccactaccaagatcaagagttcctggaagacgcttgaacttgttcttgccagagtttctttacttcattcagctcttatantcccagccagctgtt

SEQ ID NO: 334928 - DNA, 495 bp, Homo Sapiens
  misc_feature (175)..(175): n is a, c, g, or t
cctgtaaaattttttaaagggccccaagggattttaaaaaaatggaaaatcctagtactgtgtccttaaaacccactaatgagattggatgtaaggagtaacaggtatttggtgttggacttaaagattatttatgtttgaaacaaagcaatccatttaacaagtatggccaagnaaagtagtgcccttctctttaacctctgttcccgtgttttgtagcaccgttgccctcccctcacttccatcatcagatatttctggagaagaggcctaggactctggggggaatttggtaaataacacccatgctgattgtctgaaacagtttctaatcagcaatgattgctgtaagatttttctgtggcagcttcaagacaaaaggactcaggtatggtgaagctgcctgatacttactgaaacaaaaaggaaggaaagttagaggatttcctggcagatttaaaataaatgggttagataatgaaagctaactcgtgc

SEQ ID NO: 334929 - DNA, 403 bp, Homo Sapiens
gcacgagatggcactctccgaatcctcctgaaggcatttcctctacagacatagtgttacaggaagtgaaatgcaaatgtgcaattttttttaaaggagcttttaaacaaagtaataataattggtgttgagaacatcagttgccttattctaagatttcataaggctgagtttgcacgcttggacttcagttctgctagcatgtaaagagtggtggactttaaaaccgtaagaggtatcattacaagtcacctgggaacagactcaaaggaacaggttctttggggcaacagaccaaagaaggattcaagttcttgtgctgtcccgtggagtgtgtcttgggtaccctttcactgggagttgctgctttgggtctggggacgtgtgtgttgactctttaaca

SEQ ID NO: 334930 - DNA, 500 bp, Homo Sapiens
  misc_feature (382)..(382): n is a, c, g, or t
  misc_feature (389)..(389): n is a, c, g, or t
  misc_feature (454)..(454): n is a, c, g, or t
  misc_feature (471)..(471): n is a, c, g, or t
  misc_feature (478)..(478): n is a, c, g, or t
tgggatagcaataaccttgtgaaaatgctcccccggctaatttgtatcaatgattatgaacaacatgctaaatcagtacttccaaagtctatatatgactattacaggtctggggcaaatgatgaagaaactttggctgataatattgcagcattttccagatggaagctgtatccaaggatgctccggaatgttgctgaaacagatctgtcgacttctgttttaggacagagggtcagcatgccaatatgtgtgggggctacggcatgcagcgcgttctaattgtgggacggcgagcttgccactgtgaggagcctgtcagtccctggggaacgggcatgatgttgagttcctggggccacctcctcaattgaaggaagtngcggaantgggtcctgaggcacttcgttggctgcaactgtatatctacaagggaccgaggagttcaccaagnagctagtgcgggcaggncggaggnagatggggcttacaagggccat

SEQ ID NO: 334931 - DNA, 597 bp, Homo Sapiens
  misc_feature (203)..(203): n is a, c, g, or t
aggacgggactaaagaggacgccgtcttaaaacctgacgtgccaccaaagccttcctttgttcctcaaaccccatctgtcagaccactgaacaaatacacatactaggcctcaagtgtgctattcccatgtggctttatcctgtccgtgttgttgagaggatgatgttgtaagggtaccttaaaacaagagactcgcttgtanttttaagagaacccaagtggccaaagaaactctttcctaactttggcaacatcagaacttggccacatgtagctactgcagcaaggcttctgtgtacttgcctgaaaacaaaggaaggtgctggtcattccatttcttttgtttgaagcttaaagaggtgtgtagctcacaggggctaccttaccagtataaagggctgataacagtactcagaagaatctgtgaacaaatacttgaaaatgggttcaatgtagactgccattatgtgtggtcttcccattaaatgtgaacattttaatatgtatgcattcaccttgcctcttgcacaaatgtcaaaaaaaagatggtaatatctcaaagaaatgaacttgtagattaccaagcagtttgctaa

SEQ ID NO: 334932 - DNA, 439 bp, Homo Sapiens
  misc_feature (375)..(375): n is a, c, g, or t
tgcagggctgctaatctcaaggagcttccagtgcagagggaataaatgctagactaaaatacagagtcttccaggtgggcatttcaaccaactcagtcaaggaacccatgacaaagaaagtcatttcaactcttacctcatcaagttgaataaagacagagaaaacagaaagagacattgttcttttcctgagtcttttgaatggaaattgtattatgttatagccatcataaaaccattttgggtagttttgacttgaactggggtgttcactttttcctttttgattggaatacaatttaaattctacttgatgacttgcagtcgtccaaggggctcctggatgccaagatgcccctttcctttttaagtctngtctcctttacagaggtttaaagtcttagtgggctaattccctaagggaaacctgatttaacac

SEQ ID NO: 334933 - DNA, 513 bp, Homo Sapiens
catgtggtagcgcatttaatattcacagcaacacaaatgggaagtaatattcttatcgccattttacaaataagaagaccaaggcccagaagggttgaatatcttgctcaagatcacacacattttgccaccccccattccaagtcccataggcaactcagactcagcatgtccatgatggtaacttatcttcctctccaaaccatttcctcacttgtgccctactctcagtggggacatctccaatccccagggcccaagctgggaaaccggaagccatttctgactcctccctctccctcacccacttccatccaaatggaacccaagtcctgtacattgtacttctccggtattgatcaatccccgctctcgtctccacgcccacggtgctgacccattgttaggtgcccggctgctgctcctgggtcatcactttcgcaggcccatctccaccatttccagcatcctacacactgcggctcaggtgtgctttctaaacctcacctcacc

SEQ ID NO: 334934 - DNA, 668 bp, Homo Sapiens
  misc_feature (17)..(17): n is a, c, g, or t
  misc_feature (44)..(44): n is a, c, g, or t
  misc_feature (107)..(107): n is a, c, g, or t
  misc_feature (124)..(124): n is a, c, g, or t
  misc_feature (353)..(353): n is a, c, g, or t
  misc_feature (389)..(389): n is a, c, g, or t
  misc_feature (575)..(575): n is a, c, g, or t
  misc_feature (587)..(587): n is a, c, g, or t
  misc_feature (625)..(625): n is a, c, g, or t
acgcaaacatggcagcnagaaggaccagcagaaagatgccgagnggaagggctgagcggcacgaccctgctgccgaagctgattccctccggtgcaggccgggagtngctggagcggcgccggnaccaatccggccctggagcaccttcgtggaccagcagcgcttctcacggccccgcaacctgggagagctgtgccagcgcctcgtacgcaacgtggagtactaccagagcaactatgtgttcgtgttcctgggcctcatcctgtactgtgtggtgacgtccccctatgttgctggtggctctggctagtctttttcggcgcctgttacattctctatctgcgcaccttgnagtccaacttgtgctctttggccgagaggtgagccnagcgcatcagtatgctctggctggaggcatctccttccccttcttctggctggctggtgcggctcggccgtcttctgggtgctgggagcaccctggtggtcatcggctcccacgctgccttccaccagattgagctgtggacgggaggagctgcagatgaacccgtgtgaggtgtcttctgggccntgcgctcccgcnagctgcccacccctgccatgcctgtcctgacggtctgntgctcgggccacagcgccgtcccatcacaagcccggggaggga

SEQ ID NO: 334935 - DNA, 606 bp, Homo Sapiens
  misc_feature (154)..(258): n is a, c, g, or t
  misc_feature (313)..(313): n is a, c, g, or t
aagggcctgctctgtagcctaggtagagtgcagtggatgatcagctcactgcaacctcaaactcctgggctcaagcaatcttcccacctcaacctcctgagtagctgggactacaggtgtgtgccaccatccccagctacttttataataaaannnnnnnnnnnnnnnnnnnnnnnnnnnnnnnnnnnnnnnnnnnnnnnnnnnnnnnnnnnnnnnnnnnnnnnnnnnnnnnnnnnnnnnnnnnnnnnnnnnnnnnnnatgagcaccacactcagccttaaatgaagattttgtaaaggaattggagcattcnaactaaactccgtttttgtgaggatggtcattttgttttaacctaacatggtttagagattattttatgaactctaagcattctgggttcctcagttttctcaaggaaagaggaactttaggcaagtagcagggacaagctaccccacaccaatgccaccaggcgacaatactatgaataagtcaggaggcctcctagaatgcagccaaataggaaactgttccaaacagaatcagtcttgcatacttctgctcagaaggctcctctcgctttggaaactggaatgaggatca

SEQ ID NO: 334936 - DNA, 418 bp, Homo Sapiens
  misc_feature (340)..(340): n is a, c, g, or t
  misc_feature (389)..(389): n is a, c, g, or t
  misc_feature (401)..(401): n is a, c, g, or t
gtgtgagccaccgtgcccggcctaaaactcattattgaattattcactggtgttggctttggggttacctgtctacatcctgtgacctacctaaaggaagccacagcacctggcctgggtttgtcttaactctgttggggtctcagttatctcatctagatatataatgggatgattggcttagatgatctcccagccccaacatcccagcccatcctatgggttttcgtcattgctggggcttgcctgcacccatccccttgggctcccatatccttcacctttggaccttctgctcctcattccaccccattccttagggaaactgggctgactgtgntcagctgctgggacgtgggatgacatgggtgcggttgggtgtgccgganttcaagtgcgtntaaaaatacatccaggg

SEQ ID NO: 334937 - DNA, 496 bp, Homo Sapiens
  misc_feature (27)..(27): n is a, c, g, or t
  misc_feature (39)..(39): n is a, c, g, or t
  misc_feature (56)..(56): n is a, c, g, or t
  misc_feature (107)..(107): n is a, c, g, or t
  misc_feature (141)..(141): n is a, c, g, or t
agcagccacggcccgggggttcccctnctgctccaaggnaggcaaccaagaacccngggcttaggcaaagggtgtgtggccgttggttttaaactgcaattaaaaantacttttggtaaaaatcctgtctggccccctcantgctctctcccatacttggccccaggaacctctgcactctgggataataaactctggcccataggggattccctcacctgctgaggtctcaataactgcgcaaggtgtttgggaaaggacaatggccctggttcccaccactaaccagctgtgtgacacatacagttaacctctctgggccccagtttacagtctgaaaggggataatgagagttccaaccttatgaaggtgttgcaagagttaaacgagataatgaaatgggcaaaaagctttgcccagtcctgccactcaagtgttcaagtaagtggtcgccaaaaataaaaaacttacattttgacctctggtggcacttct

SEQ ID NO: 334938 - DNA, 515 bp, Homo Sapiens
  misc_feature (278)..(278): n is a, c, g, or t
  misc_feature (336)..(336): n is a, c, g, or t
  misc_feature (378)..(378): n is a, c, g, or t
  misc_feature (384)..(466): n is a, c, g, or t
  misc_feature (477)..(477): n is a, c, g, or t
  misc_feature (486)..(486): n is a, c, g, or t
  misc_feature (498)..(498): n is a, c, g, or t
agtttttaaataatgtcacactgaacaacacatttaacagctgaataatttgtaatgaagactaagcaataggttaaaatataacattattaacagttgtggaaaatacagaaatttatcatatcattaaaccagtttttattaaaaaacaaaatgtgatgttaggtcagttcagggataaattaagccatacattatattgacttccacttacatgagattcctagcaatcatatttgctgcaatgattacccactgacttgcattcattataacangggtacaaataaaccaaatgggcccaaacaggcaacccaaaatatactggttttaggnggttaaacacattctttaaaatttaaaatggcttaaaagggnccctannnnnnnnnnnnnnnnnnnnnnnnnnnnnnnnnnnnnnnnnnnnnnnnnnnnnnnnnnnnnnnnnnnnnnnnnnnnnnnnnnnccggtggcctngttttcccnaatcctagggtnctggggggagggagggg

SEQ ID NO: 334939 - DNA, 407 bp, Homo Sapiens
  misc_feature (27)..(27): n is a, c, g, or t
  misc_feature (37)..(37): n is a, c, g, or t
  misc_feature (42)..(42): n is a, c, g, or t
  misc_feature (72)..(72): n is a, c, g, or t
  misc_feature (262)..(262): n is a, c, g, or t
  misc_feature (266)..(266): n is a, c, g, or t
aaaaacaagaaaagggaataatggaangccccaggcnatggntgggctcaatgctttggtaaattccaaganttttaaggaggcttgaataacaggaaagattgctttgagggacaatgagttttaagacccaggctgaagcaaacagaagtgaagacctcgtttctcggtctggcttcattttcacatccaattttcgcccagagtgctgtgaaatgcacctgtgggttctttcaacaggtcgccgctgattctacggctntctntcgctttcaaaatgcccttcgtacaaaaacgcctctggaaacagaggcacctccgcagggctggtatggaaattcttccacctggtgccttggcgcagccaactcttccagtcccctgcgcctcccgagccctccgcccgc

SEQ ID NO: 334940 - DNA, 498 bp, Homo Sapiens
  misc_feature (70)..(70): n is a, c, g, or t
  misc_feature (76)..(76): n is a, c, g, or t
  misc_feature (81)..(81): n is a, c, g, or t
  misc_feature (133)..(133): n is a, c, g, or t
tgaaaacagactttgttttagtcgaccttcagctgtcgtccctccttcccagccaaggctgtgactgggncctttncacanctggctcaccttctccgtagtcccgccccacctcccaggaagtagctaggtncatgtctctgtgctccagtttgtgggctcctcccaggcctgactgtcaccaatctcctcctcgtcctcctttaaaacagaaagtcctcaggaagaggtctgctggcctctgtgtggggagagatcaggaatgttcccagtttcaagagactttgtctccacctccagcagactcgcctcccgagccttcacctggttctgaagcctccatatccttgtccggcttgctatcttgcagcagctcgtggatggtccatagcttcatgttcagaagctcctgctgggctccagccagagtagtcacactgttcaaaaagggggtccagctggggcatcaaggttgttcaaggtgctgctctgtcgtgc

SEQ ID NO: 334941 - DNA, 505 bp, Homo Sapiens
  misc_feature (48)..(48): n is a, c, g, or t
  misc_feature (462)..(462): n is a, c, g, or t
tcgaactcctgacttcaggtgatccgcccaccttggcttcccagagtnttggaattacaggcatgagcaccgagaaatatttttaagtatttaaaaagcaaaacttcagacctcctctcccaatctggaaaattcatgccaatgacaaaaatgacatcatggctataaagaaaaggataacgagtagtctaattattcgtgaggaattccttaaagccagtccttgctaggtctcttaatccctcttacctccaacgataggggtaaaaagatactttaccattaggctgcataggtcaatgggctaaaaaccggtctaggggtttaggagtttggggtttatccttgggtccacccataccttgctttgacttcttacaagtcagtttctttgtatgctaatttctccatctgagggcgcggcggggcccgggcggctcactcccttcccgccgccatgtnttcctgcgcagggagggagcggagacgcgggaagggggcgggg

SEQ ID NO: 334942 - DNA, 549 bp, Homo Sapiens
  misc_feature (42)..(42): n is a, c, g, or t
  misc_feature (55)..(55): n is a, c, g, or t
  misc_feature (69)..(69): n is a, c, g, or t
  misc_feature (93)..(150): n is a, c, g, or t
  misc_feature (536)..(536): n is a, c, g, or t
tttttttatttgtggagtctcgctctgtcgcccaggatggangtgcaggtggcantgatctcggctcangtgcaacctctgcctcccggattnnnnnnnnnnnnnnnnnnnnnnnnnnnnnnnnnnnnnnnnnnnnnnnnnnnnnnnnnngctaatttctgtatttttagtagacacagggggttttaccatattggccaggctggcatcgaaccctcgacctcaggtgatcttcccacctcggtctcccaagtgctgggattaccagcatgagccacttttctcgaccaagcatgatactttcactacagttttacataaggaaaaacactgacaaaagttaaggaccgggacaaaagcagagacgcatagtgggaaactctgaggagcgtcccacagttgacacttctgtgtcccttcagggcggcaccatccttttcaggcacatttgatgtgttattcaccgaccgggggaagtttcacctggggggcttccacatctggggggtttttgatttacattgggcctggggttngacttcaatcatt

SEQ ID NO: 334943 - DNA, 423 bp, Homo Sapiens
  misc_feature (310)..(310): n is a, c, g, or t
  misc_feature (351)..(351): n is a, c, g, or t
  misc_feature (369)..(369): n is a, c, g, or t
cctattttatgtaaaaagtcctgtttctccccccaagaactggggtttccacagccagcgttaacaaataaataacttataactgcttgtcaccttctttcttcagtcgactgtaataatcttcctgacttggtaggtggccaccatgcatgtgggggtgtccatgcagccactgctgttccatggccagtctctgcagctcggccgactgggcatgcatggcctgcagctggtgggctgctgacatggggggtgggatggccccagggaggtcacgggggtagggggtgccgaaaactgggtgggcganattttcgtgctcgtgtggggggctgtccaagcagagggttnggggagagtgccagggcnggtagggggaagcgagccagggttggggacccgcagtcaggggggtcgaccagc

SEQ ID NO: 334944 - DNA, 462 bp, Homo Sapiens
  misc_feature (434)..(434): n is a, c, g, or t
ggatgtctgccctctactaacctgggaggggttaatgtcagagcctatggcattttgtggagctttctggagctatctggggcactctgacatatgaagtcggtgctgaggaccacctgacacattttgcctcggggtcccaggacatcgagtcctggaggcactttctcagtcattctagaaatgctgacatgttcttatcagttgaacctcccccttagcttacccccattaaaagggggtttgctaatttctttcatttctctcaacaacatattctggggagtgttctaaaaggttccctcgctgttcttgacattggggtccacactccaagatgggattgcactgctttttcaccagactcaggatgtctcttcagcctcccagacccagagacagatgttgctgttttgctcagccaactggcaatncaggggaaggaggagggcctcaaacagg

SEQ ID NO: 334945 - DNA, 331 bp, Homo Sapiens
  misc_feature (311)..(311): n is a, c, g, or t
agcacttttgcccggcacagcgcccttcaccatccccccgaccgccgggccccacccttttgcttctttccacccgggcctgaaccccttggagagggagagactggccctggcggcctccagctgcggcccgagatgagctaccctgacagactggcagccgagcgtatccacgcaggagccaatggcatcgctgaccagcgattcccctgggcccgactgcagatgttcaacgtgactttcgcaccattcaccagcattttcacatttcacttccacctttcacctttcaccaggcagggacccccttncaccaaggtttcaggcaggg

SEQ ID NO: 334946 - DNA, 263 bp, Homo Sapiens
  misc_feature (142)..(197): n is a, c, g, or t
tgtaagcaaagtttcatgttcaagtattaagtccacagaagacaatgagcaggaatagtaagggagaaatctgattgcaggctcttcaggttttgagtctccaagcctcgtggtatgcccgagcttgtgagaaatcgaaggnnnnnnnnnnnnnnnnnnnnnnnnnnnnnnnnnnnnnnnnnnnnnnnnnnnnnnnncatcagagtgaacagataacctgtttctgcttcctcttccctttttttcccaccctttttccgtca

SEQ ID NO: 334947 - DNA, 282 bp, Homo Sapiens
  misc_feature (28)..(28): n is a, c, g, or t
  misc_feature (62)..(62): n is a, c, g, or t
ggggaaatcccgaaaccgcaaaccccgnactgccaagcgaagaattgtccgtggatggtctnccaccgctcccacggcctcggtgcagacgtccctgctcggcgcgcacttcactgtcttcatcttgtttggggagcatccgtcatctgctttctgcacgcagctgtagcactccagggcctgcgctcctccgcgaagcagcagcagcagcagccagcctgcagtccagatcatggcctgggcacctgctgttcctggcggggtccatggctccgtcctgct

SEQ ID NO: 334948 - DNA, 343 bp, Homo Sapiens
  misc_feature (260)..(260): n is a, c, g, or t
  misc_feature (313)..(313): n is a, c, g, or t
tgcagtactttatagtttgtaaagtgcttttatgactattagctcatttgatcctctgggaggtaggcagggcaggtagttattccattttacagatgagaaaagtgaggttcagagaggatgaagtgacttcattagggtttcaaagggtcaagtgggtgaaataaagacctgagtttggggtcatttgacttctaatctaatcatctcctcttcatttaaggctgacttcatctgttctatgttgtcatatccagttngcccttttcaggggaatgcagttatcttgactttgtcaccacatttttggggntaccccggaaaataaaactgtgggtgggtt

SEQ ID NO: 334949 - DNA, 369 bp, Homo Sapiens
  misc_feature (78)..(78): n is a, c, g, or t
ggcctcccgacgctgctctgtgaacccgtggctaaaacttttctgggggtggcaagaccccaagagcagtcaacaccncaatccatgaaatccaaacattcaacaagagttcttttaagccaagaaacttcttgctatcttgccacatctacaaccaagccagacatgtgtaattgatggtggcactcaggcaggctactcctgaaacaggaccaaggctcctggcgtgtactgtggagctccactcctccccagatgccctgaagcccctctcctcttggtctcttacctgtttcctgctgaccatagttttcatcagaaccactttttcatcagctccctgtgcctccccagtgcctcatgcttctc

SEQ ID NO: 334950 - DNA, 304 bp, Homo Sapiens
  misc_feature (104)..(104): n is a, c, g, or t
  misc_feature (119)..(119): n is a, c, g, or t
  misc_feature (280)..(280): n is a, c, g, or t
  misc_feature (288)..(288): n is a, c, g, or t
cactttaatcaataaataatggcagacatcctcattttgtttagagaacaaaaggtaaatagtatcagtcttcaaatgcacaaatgtaacttcaaaaatgaaanttgggaaatgtaaanttgagattgaaagccaaaggaaaaaagaggtcagaaaatgtcattttcttacagtgccaggatataaaatagattaataatttaatggatacaaagttaatatattcttttaagggataaactaggatggaaaggagtagaacagaaagctgataccaganaccatgtntacatgtcattattat

SEQ ID NO: 334951 - DNA, 384 bp, Homo Sapiens
gttaaaacgtacatattgaattattattgctgaatttataaaattaactgaataagttattttgttgtcttaatgacaatgtaataactaggcaaacactgacaatcctagaattggtctgtgtatatttttctgattggaggggggcatttctgaataacattaaaatgcaaaattaataagcattacaaatactctcctgtggaattagcaatattttacaaaaaataaatgtgtgtctatataaaattttgtattctttattaggaaaaacagtagggtaatcatggatttggaaagtgccatagccttatttttctgtggaatgggcccaaaattatttagggaaattattaagtggttaatttccattgtggatccaaa

SEQ ID NO: 334952 - DNA, 364 bp, Homo Sapiens
  misc_feature (14)..(14): n is a, c, g, or t
  misc_feature (68)..(68): n is a, c, g, or t
  misc_feature (73)..(73): n is a, c, g, or t
  misc_feature (91)..(234): n is a, c, g, or t
tctctgggttcctngaacaacagctggggaaaaagagtcctcctgttttttaagaggactcatgtccncccangcctgccctggatggccnnnnnnnnnnnnnnnnnnnnnnnnnnnnnnnnnnnnnnnnnnnnnnnnnnnnnnnnnnnnnnnnnnnnnnnnnnnnnnnnnnnnnnnnnnnnnnnnnnnnnnnnnnnnnnnnnnnnnnnnnnnnnnnnnnnnnnnnnnnnnnnntctttcatgcaattagacaaaacaaacaaaacaaagcagtgaatgtttcaaaataggcgcagagttgctcacatgaataaataatgcataattttcacctgggcacatgcttcaacctggccctggctca

SEQ ID NO: 334953 - DNA, 308 bp, Homo Sapiens
  misc_feature (11)..(11): n is a, c, g, or t
  misc_feature (71)..(71): n is a, c, g, or t
  misc_feature (76)..(76): n is a, c, g, or t
tagtagagggngggtttcaccggtgctagccaggatggtctcgttctccagacctcgtgattctgcccgcntcggntttccaaaggtgctgggattacaggcatgatgcactgcgcctggcctctctatgtacttatactctacctaccttaaaagtaaagtcactagatgatctcatatattctcataaaaaccctgtaacctgccaatatgctgttccgatcttttggtaggatcagtcataattcttaaagatgtctgcggaacttgaaaaatatccagatgggactagcactctgccccctgga

SEQ ID NO: 334954 - DNA, 319 bp, Homo Sapiens
  misc_feature (293)..(293): n is a, c, g, or t
tatatttctcaaataatttttctaaaactctggcctatattctaaacacttgaccaacaccttagttattgaataggtaaccatttttaaagtacatgtggttcattttttaaaattcaatctctcaagaccgttagatatttaataatttaagctgataagggtatcaaaatgcacattaactttgatcatcatgatttaagttgtaactttgtgttattatataaatattagggttgtttataaatatattgcaggaaggtattccttgtttaaggctcttttttaaatgnggggggcctgtgggtttaggagttat

SEQ ID NO: 334955 - DNA, 309 bp, Homo Sapiens
cctggctttccacagtgttggcccacatgcttagctgggttaaaataattgttcaacctgtagggctaaacccctacagaggaagcggagtgctaaaaattataccattggactgagagaagaaattctttcacaccaagtccttctcttcttgttaaagcagaaaactaaaaggataattttagccccacttagcctttcagaagaaaaaggctgcagagcacaaaggtttcgtttcctgatgacaataaaaaaattctctccctagaagggcctaactcccaggaaagctcagaatagatcattctg

SEQ ID NO: 334956 - DNA, 334 bp, Homo Sapiens
  misc_feature (277)..(277): n is a, c, g, or t
cagtttctattttccccgggtgcaaggatgtaatctctcttggagctgtaaaatcctgggaggttggagggaactcccagctccctcagcatgtcctttgggctgctgctgcaagcaaggcattgaggcaaatatttttgctgtccttaccttggacagaagtagaggggagaaataaagtccatcatcacatgaaaagtcagtcacttgaaatcctgtacctaggaatacctttggctttggtaatttcgttgtgtttggggtacaaaaaaaaggntctatttgatagcacaacggggtgactatagtcaataagtaattgtacatttaaaaa

SEQ ID NO: 334957 - DNA, 502 bp, Homo Sapiens
  misc_feature (212)..(212): n is a, c, g, or t
  misc_feature (296)..(296): n is a, c, g, or t
  misc_feature (368)..(368): n is a, c, g, or t
  misc_feature (392)..(392): n is a, c, g, or t
  misc_feature (420)..(420): n is a, c, g, or t
  misc_feature (445)..(445): n is a, c, g, or t
tttttcttttagaaaatttgtgcctcttgtgatgagccttcgtaagcttgagggatgaagcaggacttcctttcccaggttcaatcttagccatcactcactgataaccctgaggcaggcactgtcccattcctagggccaagcagagacaaacaagccagcagtgaccatgggaggcacagcacagaggcccacaaatgggaggggcgctntggcagagaccctagaagcccccctaactgcagggacagaatgctgagttttagctgggcaggtggccgacagaaagcgcactntccggcctcccctgcaattagggcggctcatggctgagtccagcccatcctgctcaacccccacaaagtctnttaaataagggggcatgcctcttntgcccttttcctccttcctgccagtggnatgctttatggtggacagatggggnccaaacaggcatcacagtgaggtttaaagcccaagatgagggtgggcagagaccagt

SEQ ID NO: 334958 - DNA, 444 bp, Homo Sapiens
  misc_feature (12)..(12): n is a, c, g, or t
  misc_feature (39)..(39): n is a, c, g, or t
  misc_feature (50)..(50): n is a, c, g, or t
  misc_feature (371)..(371): n is a, c, g, or t
ggaaattttctnttcccaggaaacaagggctctctcgangctggccaatnaaaatcttctgtctgcaaaaattcctttccctcaattcagggcctaattaggaacaaaaactgtgcgggaaaacatcctccttcaaaagccttggtagccacccaagtgcttccctgggttccccttggaggtttggtaggtgccgtcttaactccggtgggtcagcatccgagtgtagccgctgacaatattcttcatcacctggtccctgtgctccaccccgaccttgccccactggccggtggtatccaaatagcgggacaggatgatgacgggcgtcagggagctcagcgtctgctcagggcaagcccgtggggacnccgcagcagctgctgaatctcactgggtgtcaggctgcccacaattgtctcaccaaggatgtcaccttggggt

SEQ ID NO: 334959 - DNA, 1000 bp, Homo Sapiens; identical to SEQ ID NO: 157227

SEQ ID NO: 334960 - DNA, 1000 bp, Homo Sapiens
ctggctagaaatttttattatttgcgaggcagtaagtgctcttgagagcaggcacagtgctgggaacactaggccccttcgggacaaaccagggccttaaggaaaggggcttcggctttggcttgagggaaggcacataactgggacaggccctggccgggagtattcagaagccaagtgggttgctggtgaccacaccaccccgctccaccaaggccttggagatgcttttgaagttgcggtagagctcttgctgccaggggtcagactgcagggcggccatgccctctcggatccgagctgcagcctcgatacaccaggtgtcacagagcattttctcatgctgggccgtggggtggccctcactcagggatcttgaggccctcgagagaaccaccaccatggcatagaggtcgatggccccgtctgccagccgctgcagcagaaactgttcattgacaatccccttcttgtgttttatcagcttggcctccaccacagtggcaaactgctccagagcccgtactgccagctcgccactccgactcaactccgggtggacaagtccgctgagactcaggccgctgcccagccctgcccgccgcctcagctgtttgcctgcctctcctagcaggaggccagcattcccaaagggattctttagagcactgccaagcccagagagctcctttcctttgtccatacagccctgcagagccacaaacagccgaagaatgtcatttgtcccctcaaagatccggaagatgcgaagatctcggagcacacgctctactccaggttccttcatgaagcccataccccccatgatttggatgcattcatctgtcaccttccaggctgcctccgagccaaagattttgctgatggcggcctctatctggaagtccgtggctccctggtccatgttagcactcaccatgtaagccatggactcagttacatactgcagcataaccatccgtgccagcttctcctggat

SEQ ID NO: 334961 - DNA, 1000 bp, Homo Sapiens
gacgggagaggctgccagcagcaattggtgagcagagcagcagatatttattctgaatgtccttactccacacactctcaccccaccccaccccctctccctgcttgtttagagcctgggttccaggagggccaggagctggaatcagcaggtgggatgtgccactcgtggtgtggacagagaagggaggatgaagtcagggctggacctggaaccactggctgggctgtcagtgctggtccagaatgaggggcacctgggcgctgtccacgcggggaggcagccgctcacctgtgtgcacattgaacatgggcagggtggagagtggccggggcacctcgcggctggccgccatctgccgcagctcctctgtgttcccgtggatggtgcagtggtggaccatctggatgtcggaggtagccaggtctctcttcagccttccctcccgccggcagcacatgacataggccagcagcaaggtgagaagcagggccaccagcaggggcaccaggagggtgaccagagcatccaccaagaagtcacggtctggggcctcagtgggtgggcagaagaacgggtcatgctccaggatcccatcacctggggtgggcacctcatctgcaggctccggcactgacttatccaccagggtcacattgcaccagtcaacgcggaagtggggtgccaaggtgtcgtagcaagacagaagtggaggctggccctgggcacagcgggcgtggctatcgggggatgccaccatcttcaggcaagtagaaaaaggtgaggcagaacccaccttaatgtataccccttcttttcggccctcaatgggaagggggacacggcccccacggtccaaggcagaggtgacgttgagcagctgaagctctccgggctcccagagtccccccaaggctgagaggaagcggctggcaggtgttgagggcagcacctcctccgcatcgtggctgcgcaccaggaactcggcttggtatggcag

SEQ ID NO: 334962 - DNA, 1000 bp, Homo Sapiens
catggtcaaacattttatttactgtaaactttagacctttgctcgggaaaacaactgaagctgctcctcaaatccctgcctaaaataccccgtgtgagcaaataagaggagtgggggaagagtccatgttcacagctgaaaggtccgagatactcaaaatcctcaagtccaagggtgtaggaaggaaaatctccttcagatacaaattaccagcagcaatatattacccctaatacttgaatagtgaggtagatacatggaaaagtcatgaaaatatagcagactcaggtcctctaggactaaagctctttagacataaacttacaaattccatgcaaagaggaactgaactgtacaaataacaaataatcactcaaataagttttctctctttttacagcttaaaaaaataaaaaaggcagaaggatgcccttccttctgcatatctctatacaatttttacaattttattctaagtttattaccctcaagttaaatagtctgtttagtgttctgttgggggggggggggtctttaaaagtagaaaaactgctttacagcagtgagtcatttgtactacaattcctcccttgtgaatcaatgttatcgctaggcacagtaccttgatggcccacaaagtcttccgtgcctgggaggtcttcacacagcagtttattttctttctcctgttccacgtgatatccactctgctcccctgtgttgccgttgctggagtagccattcccataggccttcaaagaagacctgcgcaggcacagaagctcctggaaggcaatcctgaaatctgggctccggcagtagataaggggattgaaaccagaattgacatagcctatccaatttaggaggatgtaaacttccttacggatgaggttatcctggatcacatgcacaatgttaacgatgaagaagggcagccagcagagggtgaaagtgcccatgatgatgcctaacgtcttgagggctttgtgctccttca

SEQ ID NO: 334963 - DNA, 1000 bp, Homo Sapiens
gtaactccagttttactttaagaggataatacagatttttgtagctggggaaggtgagtgggaaggtagaggttgtggaaaggctgggaaacatcagaatatatttatgacacaagacatttgaccaacccaagcaatgctttgtgcctgtgcctccagacacacacacacacacacacacgcacacacacacacacacaccatgtaaggcaccactggattatagcatggaggggacaaatgccccctgccctaaacctggccacagccagcccatccccctgtgggccctctgtccaagtcctgtggggagcgtggctttgctactcaatggcaactggatttcaagagtttcaggaagggtgggggagcaagatatcaaaggctcaagctcactccccttcgtccagacagacttttcattttttgtttgatgaagattaggaagaaaagagtgaggattaggcctaatttactgcctctgtcaaaagccagcgcagagtagaagggaagggagtaagtggattatgaaaagaaaacaaacggagggaaagtgggccgaggatgaactgcattcagtgatatttatttatctgattgcaaaaggaaaagaagggatctgttctaatggttcaccttcttatgaaccctggagctcccaaaaccctggcgaagtccttctgacactgctgtgaggtagatcggagccattccatggctaaagtgagagaggccactgcttgagagcagtaataagggaaccagagataaaaccccaaatcttggtcttttctaccctgctgctctcagcctgggccacagagcctggagaacactaaggtctcatcagggtttgggtggcagaaggaatggaaccaggggagctctctttgccctaagcactcactgactgcacaggcaagccgggtgatgggtgcccctaccaaagccagcctgctgctccacggcacctggacactaccactgagggaggagtgaa

SEQ ID NO: 334964 - DNA, 1000 bp, Homo Sapiens
aaagtttgaatatcgtacatgtacatttattaatgactgttgattaaaaagatgattttgaaggaaaaatgctgctgagaaagcacgcgcacaacttctgtagagttgtcatacagagagttaatcagaagttagggaaacaaaccaagctaaacaacccatttcttgacttctaattgccatacccacctctgcacaaggaattagtaaaattacagtacagatcaagttccccaaatcatttttaaaagaaacgatcaatactaaatattagcagctaaaacatcattgattcttgtggctttagaactttcacacactgagagctccataagaggaaaaaagcaaagaaaatcaacacaattgctcatcagaagatagctgtattttctagtatgtacaaaacaaagagtatctcatgttctatcatcttccttcctcaagtttttagggaatattaagtaaaaccaataatcagtgctaagacatgcatcactgtgacataatgaaattcaatcaggactgatcatgctgagactctgctgtttttttctttgggtctaaaaaacttgtatactctattttaagcatccaaatatgatgattccttttgggtttaatatatcactgtggaaataaatctcaaagtagcaattttttgcaacactgatcagaaatccaagtgtcacttaaaacttaaatatatacaaaatacagccacatacatattcatcttcagataatataagaaaggttaaataaaaatagataatacaatttcagatatagaaagtgccaattcaacataaatttatttttgtgtttattttacaaaaagactttagaacacatgaggaacactagatgatgagagtgagcagccttttcagcctttgtttctttcttctttaaatacagatgttgacagtaaagatggattagatgcagtccactttttcctcagttggctgatttttttcggaattataaaccatgaaac

SEQ ID NO: 334965 - DNA, 1000 bp, Homo Sapiens; identical to SEQ ID NO: 157333

SEQ ID NO: 334966 - DNA, 1000 bp, Homo Sapiens
ttttttttggaggcttattgtggcaagacgtttattactaacacaagggagaaataaccagctatggttccgcattcaaacagaaattcaggtgcttgcatctttcacgtattgttcaaaaatcacaagcatctgtggaaaaaactaaggtattacagacactacacggaggtcatgttcttacattcaagacactaaatacaaaccgaaggcaatgcaaaaatgtatactttaattttaaaacccaatttttgttctcaacttgaaaagggaacacttttttgtttcacaaacaagctggtcggttggaattctttttggaacagtagtcccgcgctaaacactggttcttgcctccccacccccattctctaaaataaacccagcaaactgggaggtgcatttgtgccgctgcaggcttctactgctcactccatgcagcacacttagaccaaggagaaacggctgctttccagctcaaagtcgactcattagaagaaaaggtgggagactgggggtgacacatcgctgatttgtccggggttgttatctgctgctggcctttgcctcaaaggccaggggcagaggccttgccaggcactgtgttctggggccctggcctcatgctgtgctcagcgggttggccacgcggcccaggaagtgcagggcagtggcgctttgatcatacacagcaaacaggaatgggcggttcagggtcacctccaagacctcaggcttgttaagctgttgggtagactctgtgggctctctctcatccgcttcaagctcaaaaaaaatgctgttcagcacctcccccaccctgatgcggtcattgctcaatttttgcaggttcagctcggtgtgcagaatggcgggcagctcagcctgggcgagcaggtcctgcaggtcataagatccttgcagcaccagttggggcatggtcaggtggatggtccggggagatagtttcttcatccagttgagggagttttgctggaaa

SEQ ID NO: 334967 - DNA, 1000 bp, Homo Sapiens
gtgaggagaggtggccaggccctttattaaacattcccgggaggctcatggcctggggactgcagctcatttggaaggcactgggttttgcgcccaagtggactgtttccaggaggtgccactggagggaaaagggctgcctggggccagggaggctgcctggttctgcctcccgggctgggtcagtggctttcctgtccccaggcctggaggaccttgcagggtctgtttgctcctgatccctcagggtgggcatgggacaggtgtgtgccagtgccagctgtgtgccagtgggcaggtcacagcttcttcttggggcagtgctgcagggccgccctcagggcctccgtcacgcggtccacattctcgcgggtggcattgcagcccagcaggccgatccgcagcaccttccccgtggagggcccaaggccacccatgatctcaatgtcgaagtggtctatgacgtagctgacgatgtctctccagtcatagccagcgggtacagccacagtggtgactgtgggaagccggagcgccgggtccttcacgaagagctgcagccccagtgcctgcaggcgcccatgcagatacgccgcggcctcgcggtgctggcgccagctgttctccaggccctgttccgcaatgagggccaggctctctctcaggctgtacaggctgatgacggggattgtgtgatggtacatcctgggctggtcgtcacagccccagaagttggccagccacttgatgtccaggtagaaggagaagggcttcgtcttgcgggagtacatcttctttttggccttgtcactgaaggagatgagcgaggtccctggaggggcgttcagggccttctgggagcccgagtacaggatgtcgatgccttgccggtccatgtaaaggggggtcccgcccagggatgccaccgaatccaccaggagcaggcacttgtacctgtggcagagttccccgaagccatcaaggggctgcagcacgccgg

SEQ ID NO: 334968 - DNA, 1000 bp, Homo Sapiens
tttttttttttttttttgtacttcaaatattgaatttttattcaaaattctttacaactttattacaatatagattttgtgttggatagttttgcccactgtaggctaatgtaagtgttctgagcatgtttaaggcaggctaggctaagctatgatgtttggtaggttaggtatattaaatacatttttgacttatgatcatattttcaacttatgatcatattttcaacttatgatgggtttatcaggatgcaaacccatcacataaatggaggggtgtctataaaacattgttagacctataattttgctgttgattattgggaggtggtatggcacagtggttaggggcagaggccttggagttggactacatgggttcaaatcccagcttggctgttttctgtgcagttctaatccagttctgccacaaacttgttgagtggccttaggtgagtcacataagcactctagatatagcttccttattgcaaaatgtctcaagctaagtttagtattctccctccaccccgaccctgcttctgttcctcttccaggctgccccatctcagtaaatggcccatcagccacccagaaggtcaagccagattcatccttcacatcgaatctaccttctaaacacatccacaatccattcccctttctccatccccactgtccccgctccagtccatgccatcaagacttttcatttgcactttgccgcagagctgttaaaatacttttacaaactacaaatttgattgagtcactctgaaaaggtgaatgtggcccttgacctctgcatggtttggtcctggtctgtctctctccactcagttcaggccatcctctcagtgctccagacaagctagccttgcattcctccagctagaaggagccccagggcctttgcacaactcctccctctccctggaatgctcttccccaattgtcttagcttgatggctcacccttcaggtctaggctcaaatgtcag

SEQ ID NO: 334969 - DNA, 1000 bp, Homo Sapiens
gtggtttgtgctttatttttaggctcaattcagctagaggcacacaacaaagcagaagacaggagtaggcctggacccaagtgaagcgcaggtggggtgtgaatcctaggcagctggcttctcaggcataggtggtgacatactggggccccatgttcccgaagtaggaacgttcccactcactcatgagctcaaagtgtacaggacggcgacagaaattgcaggcagccacagacacatcctggaggggcagccccaccgcagtccaagccagcagcagcttctccacaaaatcttccatcatctgagggctgtggtggggggagggtgccaagcgcaggagctcttcaccccgggggacagttgggtagttgatggcctgcacatagatgccatgcttggagagcaggagatcacagagcttgctgttgagtgctgcattgcccacccggatggggatgatgtggctggggcaggggatgacaggaaggcccctgtccatgagtagctggcgcatgtgcttgacattgcgctggtgggctcgcctcagggcttggccctcctctcccttgagcagccgcacagattctagagctccagagagcaccatggggggcagagaagtggtaaagatgaagcctgcagcataggagcgcaccatgtccaccaagtcacgggtgctggcaatgtagccgcccacacagccaaaggccttgccaagagttccagagatgatgtcaatcttatgcataattccatcacgctccccaatcccagcgccccgggacccatacagtcctacagcatggacctcatccacgaaggtcagggccccatactggtgggacacatcacacaactcctcgaggggacagatggcaccatccatggagtggacagtctcaaaggccacaattttgggtatcttagggttagacttctctagaagtttctttaggtggtcagggtcattgtgcctgaagacaaacttggctgctcc

SEQ ID NO: 334970 - DNA, 1000 bp, Homo Sapiens; identical to SEQ ID NO: 157231

SEQ ID NO: 334971 - DNA, 1000 bp, Homo Sapiens
tttttttttttttttttgaaggtttatagaatatttatttcttttttggttgcagctatctccttcccaacctaccactgctaagactgtttcataagatgcacttctctacactcagctaatgaggtgtttcaatcagcagttgttctttggatgaggagccgatattgttttaaagcctattattttcttgggtgggtattctggagcatggggagctgaaagtgttgcaaggaaactgctgtgtgaaatttgatcaggtccttggtattcatttttatgtttcaataactgatttattttttcccccttgtacttaagatttaacatgtgttgtatttccagcagttcaaatctaattgtgtcgaatttccaggattggaggaaaagttgctccctttcagccctcctactagaagcactggagctaggctggcgggcattggaccctagtaggtatagcaggctgtgaagagcgactgggtggaagcagccccagaagaacccgtgtgaacatactgtcctttggccgcctggcagttagccatggcccgcttcataaaagcctcctgggttgcctccttgtttgcagccttgccaccccaggcagccagtgcactggcctgcagggcccgtccataagagaaacttagtttccagggctttggtagagggcaaaggttgatagcattgaggttgagagtggcatcctcttcactcatgccaccagacaaaaagcagatgccaggaacagctgcaggaacagtacggtggagagctgttacggtggccatagctacttgttctggagtatacttcttggtgcaggcatgtccagcagtcaccatgttgggctttagcagggtgccctccaggtaaacatgatggtcattcagggccttgtagacagcagccaggaccttctcagtaacatactggcagtgttccaggtcatggtctccatcaggaattacctctggttcaacaataggtaccagtc

SEQ ID NO: 334972 - DNA, 1000 bp, Homo Sapiens; identical to SEQ ID NO: 157232

SEQ ID NO: 334973 - DNA, 1000 bp, Homo Sapiens; identical to SEQ ID NO: 157233

SEQ ID NO: 334974 - DNA, 1000 bp, Homo Sapiens
ttttttttttttgcggcaataaattcagtagctttatttttaaatttcaattaggttccttggatgaacaagaaacaagtgtgacattttatgtggaatctgaaaaccaccttagcatggctttacatcggatgcatcagttttccaaaaagccagagaactgtgttccttgaagcatttggggacttcgatagtgccatctatacactgagcatcctctgtatagctacacttcttttccttatttttgcagaagaaagaaactttatcaccatgtagcattccattcttaaatttttcctgaatctttactctctctccttggtacaccacagtggcttttttcacaggtaatttacaagatgctttacaacttggcatggcagaccagtttcccagtttggtacattctatttcttccgggccatccagagaatatccatcatggcagccaaatgtggctttatccttgtaataaagtgttggttttgcaggatagttcacaaatccattgtctggtcttgatgggaatgggcattttacttccctgcattctggtaatttagtccaatttccatgtgtcgtgcaggtaattgtatcatttccaaacatcgcatgttgtggcaaacattcaaaaactgctgtgtcccgatagagggaattgtttccagctgatggcttataaacacgaagtgttgcaaacgtaggtatggatggtggagggcagatgatgggagcacagacaggaagctccgggctccattttccttcctcagtgcacttggcagaatcagcgccattcagataaaacccagtgttacaagaaaaactgatcgtgttgggatattcaaaagtcgtatagcgtacggctccattttctaagattccagcaaaaggacatactctgggtgtacatttcagagtgttgatgggccacagtcctgtgagagggcagataaactttctcatccctcctcgggacacatagcccggcttgcag

SEQ ID NO: 334975 - DNA, 1000 bp, Homo Sapiens
tttttttttttttttttttttttttttttttttttttttttttttttttttttttttttttttttttaccaaaaacattatttaattacgtacttttacctatattttataattccaaacacaaggggcaaaaaaatcctccataaatggaagttctttaggtggttccaggtatctgcttcagtttataactatcttcacagtttacatttacagaaatataaatattatttcttaaaattcacatttaatacaaactttcaaagatatttaaacgtaggatagtagtaaggagaatcttaaatcttagaaacttgggggtatgacaagagcaattcctaaatccagatgatgattttaccattgctatgtataagctgccatttgtagcaggttttacatgggacattattgaacattttcgggggtgggggaaaaataagaatctattttatcatctttgattgcaaacatgggttcatgacatgtcacaaagctactttctctgagagcagttagtatctccaaaccaggctagaatttctaagggcagtcttgccttttggtggactattaagtattttttggtgatatttccatgtttgggggtgcattaggccattaagatgagcaccaaggcaaaaatggagaggtggcaaagctctagtaatactctcctgctcaaaatgcttttgatgcctgagaaagaagtaggtagttttgagccagtaaaatgcatacacatatataatagtcaaacattataatttaatgttttctatgtgaattcacaattgaaatattgtataatatgacaccaataaactgtgcaaaggtctttgaggtagagccttatttaaattctgcactcaaatacatatactttacataaatatgatcttctcagagttataaacaaagtttagaaatatggtaaaatctctagaattatcagaggtaatttagaggcaaagtggcctgcctgttcagtaactgatat

SEQ ID NO: 334976 - DNA, 1000 bp, Homo Sapiens
gtttgcttgtttttgttttgatttccccagataatcttagctctctaaacttcccgtggcataagataagtaaacgtttgtgtggctggcacagagtagtgctgtaaacaagcacaacttgacactgggccatatgaggatcatcacagatttaaaggcatacaacaccattcaaaacacagataggagccacaatgggaagcaaagtctgaaggtgccatgggagggttagatagggagggaagaagaaaaagaaaggagagaaagagaaaaaaaaagcccagcaaatagaattcaggaacatgttcatgacagactgtacatcaatagaggaaattccccaaggcactgcagaggagtagtgcagagttataacaggcagaagacatctgaaagggggcatgagctggggtggggaaatagggtttccaatgcttcactgggtgtggaaatagatgggcttgactttcccagaaaggatcttgggcacttgcacagagatgatctctgccatcatttccggaaagtccacgctcaccatgtgtgacttgattagcaggtcaaaagtgaactgatgcagctctctcgcaataggctgcacggagtccaggagcttggtgagctggtagaagcgtcttgagcaggatgtgggattttttcttttgcatgcaatgatacgatcgagttccttgatgtagttcattcgaagttcatcaaagaatttttgatttttcagcccatccactggaataatgctgaagagtagcagtgctttcatgcacaggaattcctggggggtgatttggagccatccaaactcttgagagaggtgcctcattcggacacactggctgtacatccgggacttgtgcatgcggtactcattgaaaaccagatcaggggcgaagtagagcatcctggagttgacattggtgaaggatcgccagcccatggcaaacaccatgagccccatccaggagtactgaatgacagccatctg

SEQ ID NO: 334977 - DNA, 1000 bp, Homo Sapiens
cttgttataaagagtttattataaaaaatcacattttttgaatgacatggacacatagtacctttccacatgtggtagctttgtctcctgattccaagagtcccactctatgtatgggggcttatgtaagtgtgcttatttttaatgccagcaaatttttaattggaaatcaatgtacacttctctttctaaggataagtcttttgccaagttagaaaatataagcttttaaatttcaaaaaagttagaatttccacatcttgaattttacaccaagagggaatttgtagagtttatactaattggaaaaacatttttctgaaagaacaagtctttagaaggataactctatgcttaagaaaatgattagctttctaattatgccattaactatgagatttatatcggatgtttccacatttacttaggtgggttaaggtagtcaataggcttgtgattaccctcccgagcaagtccgaaacaagccaaggttattgcaactgctgtgttcactgttcgagttacttcttctggtgtcttccccagggatgggttcacttccattatatctaatcctgagagtagccctgttttgtagatttcttctgtgatgtagagaccttctctgtatgtcagacctcccacgactggtgtgccagtagctggtgtgaaagatgggtccagtccgtcaacatcaaaacttagatgaattggccttttctttcttcctagtagatagctgagtgtttcttccatcaccttgccaattcctagtctgtccacttcagtcattgaaaagtatttaatgcctagagttttcaaaatgtagtgttccccagggtccacgtctctcaagccaatatacacaatatccttggcagatatacagggagtcacccaggagaatcctggcacatcgggaatctttccttttagttccttcaggaggaaagatacaggttgtccatgcaagtttccacttgtggttgtcagtggagtg

SEQ ID NO: 334978 - DNA, 1000 bp, Homo Sapiens
ttttttttttttttttttttagttctaaaatttttactatatttatttatttaacagctttactgagatataatttatgtactataaagttggttgacacatttaaaaattgtaataaaacataaaacttaacattttaaccactttaaaacatacaattcagtggcagtaattgcatttatgatgttgtataaccatgaccactatctagttccagaactttctcatcaccccaaatggaagccccatacatatggctgacacattttaaaagattaattttattttgtcccccaaatctggggggacaaaagtaacaaagaaaaatgagctcacaattaaataagcaaaaccttctgtaaaggtaaaaaaatttgccgggcacagtggctcacacctgtaatcccagtgctttgggaagctgaagtgggtggatcacttgaggtcaggagtttgagaccagcctggccaacatggtgaaaccctatctctacgaaaaatacaaaacatagccaggcgtggtggtgtatgcctgtaatccagctacttgggaggctgaggcaggagaatagcttgaacctgggagttagaggctgcagtgagccgagatcacaccactgcactccagcctgggtgacagagcgagactccatctcaaaaaaaaaaaaaaaaaaaattggaaagaaataacattatttctaacaacaatatatcaatcttttcacattcttatatagaatcagagaatctaatgaaatacattctattatggataaaccaaaatctcaagtacttgttttacaaaaaattaagtcttcaaaactcttttgaagtccactgggtgcagaacatcccccactgtgcctgaaaaccaaggaactagaactggagacagctgttgggaggacagcagcgataacagataggtgccctgtagcgatggcctccaacggctacctacacccagccctgggattcggaggatgcagaaggaacatct

SEQ ID NO: 334979 - DNA, 1000 bp, Homo Sapiens
ccagcttttcactgcagacatttattgtgggtcatcttccctaaggcaccagcagagggggaacgggccacagcagggctgcagccacggtctccagatgttgcccagcctgtccagctgcagaggaactgggctgagtgtccgctggtgttcccacaccgcctgctggactcgttccatcacctgatagaacacgggctctgaggctggtgtgaggatgtgggtctcagaagggtctcttgagaggtcaaagagcaaaggtggatcgtggtggactactttttccccaaagcacgggcagacctttcttccatagcaggcaccggctccctctggctggaacacaggcgtcacaaagtggactttccacattgttcctctgtcccgttgatgccacctggctgcgtgcagaaacctctcacaataatgcatcaggaactcgtggtctgagtgttgggctgtccccaggagcaagggcagaaggtcttggccgtcaatcactctgtcctggggcacctcgccgcccgccagccggaccacggtggggaacacgtccatcagactcgtgggctcgccaatcactcggccggccgggagcaccccgggccagcggaagatcccgggcacgcggatcccaccttcccatcctcccatgcccttcccacctttataaattccattccagccaccatactgggtgtttccaagttgattctctagggaaccgccgtgatccgacgtaaaataaatgagggtgctgttgctcaaaccctccacgtccaaagtgtcaaggatccgtcctaccatccagtccatctcctctacgttgtccccatacagcccgtggagactcttcccgaggaagttctccatagtgataagagggatgtgaacgtgtagaaaggaaacaaagaggaggaaaggcccatgcttattccttttgagaaaggacgcaacctcctgcagaataaggggtgtcgttctttggaagcacatgggc

SEQ ID NO: 334980 - DNA, 1000 bp, Homo Sapiens
tttatttttcgtttatttatttatttttagagataggttctcactctgttatccaggctggaatgcagtggcgtgatcatagctcactgcagcctccactcctgggcacaagtgtcctctcacctcagccttacaagtagctgggactatatgcatgggccaccacgccaggctatttgttttattattgagtagagatgggggtctccctgtgttgcccaggctgtgtcaaactcctggcctcaagcatcctcgcaccttgcccttccaaagtgctgggattacaggccaccctgccctgcctctccagtccctgactgtccccactggccagccccgaaagcccagcaacgagggagccaggctggggcaggaaacacacagcagcctcctctcgcgcccactttattagggggcaggtgtgggaggacctaggcctgctgtgcctgcagtagcgcccgcacctggcggatctgccagtcgacgctggagcgcgcagtgccgcccagggcaccatactgctccacactgtgcccgtagtcccacacgcagatcacgtcgcccgagaacagggggctgatggtctgcagctcctgcagtgacagctggttgagggcgacccccttggtctcggccatgaacacagctttcccggaggcctcgtgggcctggcggaatggcatccctttgcggaccaggtaataggcaaggtcagtggccagcatgtcggggctgagagcctgtcccatgttctcttggtgaatctgcagcgtagagatgacgccagtggccacctggagcacggcactcatagtgtctgacacttcaaacacagcttccttgtcctcctgtaagtctttgttgtaggtgctgggaagtcccttgagggtcatcaggagcccggcacaccgcccaaacacacgcccagccttgctccggatcagctccaaactgtcggggtttttcttctggggcatcaggctgcttcccgtgctgtagg

SEQ ID NO: 334981 - DNA, 1000 bp, Homo Sapiens
ttttttttttttttttttaactttatatatatctatttcaattttatattctgaatacaaaggctgtttattaagaatgttgagctacccaagtatcatgtataataaactatatagaaataggaaacacttctttgaataagctacatacataaaatatgatatctttaaagatatattaattaatttaagaaatttgcttagatgcctaccgaataaggcactgtgctaggagctatgtatgcagttgaataaggcacaaccctactcttaaggagcttacagactagcagaatttgtaagacaccgtgtaagatgtaagctggaagtgatttctaatgtaaacagcagcgaatactttttgcattgagcgttagtttagttgtctttgcaaaagcttctttcttttcgtaatatgcggcctcattcacaaacacggggtacacggtacagtctccgcccagtgggatcgtcttcccatcaagagttaaaaacatgggatccccaggatgcagtggtttccagtcttgatcctgcagattaggatggatgatagcagcaatttctccattttcatcccgggggtaatcaactttctctataattttatagacctcaatggcgcagggaggaaattcttttccttcattgaaatgatgtataaaatcaagagcatgtttaatcatttttctcatttgatccaagatatcagctctcagaaccccttgaggctgaggaccaacttctatacccacaggatacttggctatggaacgagtggtcgcatatttgagggaaggatgctcaatcagataaacgtagcagggtagtggagccagagaagtcttaatgtaatgaaacatctgaattaaaaagttattcctggaatcctcaagaataagagtgcaccccatgttagaggtggtgttgtgaaggtcaaaaataatgtcataggaatcttcactgtcttttggaccaaataaatgatttatttcttgag

SEQ ID NO: 334982 - DNA, 1000 bp, Homo Sapiens
ccaggaatgtctttattctttttaaaataaccagtaaccagatgcctcacccagagaaaaaaacaaaatggagtaaaataaatatcaagaaaaatcattttaaagcatgatccataagtaatagaaaaaattctcttaacatacatttttgattttaagctgtatacagaaaagatatgcgcacttaaagttttggaaacatcttgtctacagtgctattttaagcattctatacatatgaataaagaatactttttaaaaaattaaagcacaatataaaattacttgttcacaaggcatcaaatttgacattctaaaatgttgatactaaactaggaaaaataacgtttctattttcacaaatgacacaccatacatcttgagactacaatactactactctagctgtgttttaatctttgaaattcaaaaggcatctttggatatttaagtttaaggtgccacataggtgagtctgaaccggcactggatattaaagtatccttgttatcttcagactaagggcatggttgctgagtgaatacagaagagtgataaatgaaatataaatagagaacttcaaatattcaaatatcaaattcaaatataaatccatttcccttcagtatggtaatatgtatgtatgtgtatgtacatatatatgtgtgtatatatatatgtatgtgaatacacagaaatacacatttataaaatttctcattactaactcctgacttaaagctagctactaactgaaagcagtatttttgattccctccataatcacctctttctcctgtaaatacagcttctctttgaagctaatgaaagttcaagattgcaaaaaagacttgtggtagaggattcaaatgtggctacatattacttaaagcaggactttttctaattagcatgttttctgttcttgttgtaagagctgaaattatctctttgattatttcaatactacaagctgctattcccactgtcccacaatatg

SEQ ID NO: 334983 - DNA, 1000 bp, Homo Sapiens; identical to SEQ ID NO: 157462

SEQ ID NO: 334984 - DNA, 1000 bp, Homo Sapiens
gattttctgtgcttattttaatatctcatattgacattcaattcttattttaattaggaaacataatattgtaaactatggtgtacagtgtttcaatatttaattcatttaaaaaagatacctttttacgagtggtaatgaaaatacacgtgactaaaagcagagcactgataattttggggggaaaaaacttaaatttattaaggaaagaaagaaattgaaccaggccattgttttaatatgcacataattaactgtagaactttatattgtgaaatttaattaaacatgttctagccatttgggttttgaaatgctaggtaaaatactaagttaaagatgtgaggaatcaatattatccttctggcatttttgtttcagctacataataacttttttagtaggtgtgtaaaaaagctcctgatatttttgccttgatctaaaggaaaatatgttctataaagggtaaatctattaattagagacccacacaactttctttcttgctagtgtaatcgttaaattgatttttccagtccatcatgtaattgttccagcgatggaatcctgctttccactcccattctgcttcatcaatatttcctgtcatttccaagacttttggaaaaaatgatgtccagaatcgacattgttgagcacgtagtttcgtcattattcttgttgactctgtattcaaggttagatatttttgttcagtgcttttgaagacaggccagcttgtgctattgttctgagtctcatttggattcccatattttgcaaaatttgcccaccgtttcactatggatctactcaaaatttcctcggcttttgtgtaattatctcttctttccagaggtaaaccaaagacaaattcaatttcatagccatgcatcactcccatccattctggccacggaagtttggaggatcggtgttcaaaatagtagaaaaaggcattatttccccattctgagaacttcttggtgaactccaaggc

SEQ ID NO: 334985 - DNA, 1000 bp, Homo Sapiens
ttttttttttttttttttttttgacaatttgattttactttattgaatactatcacacacataatatttacagatgtaattaaacagaatttataagattaccatgtggaatatttttcaaagttaatctgaaactcttaatgaaaatcatcaatacatgtgtgttacaatacaataatagaatgtagaacttttcagccaatatcatgatggttcatttaataaaaactctcttttcaaaaagaggtaagtcggaggaaatataaaaaaaaattcagaaaaaatatttccatatctagtcataatcttccagcttttctatatggtcaatagttgatcatttttcgaagggcatcataacacttccatttgtctgggatgtagaatggttcaaaaatgtgaggaaatggtgtgtcataaccacatactcttgatataggagcctctaggttcaagaaacattcctcctgaactgtagagctgatttccgatgcaaagccgcctgtcaagggagcctcgtgactgattagcagtcgccctgttttgatcacagacttacaaattgtgtccacatcccaaggtattatagtcctcagatcaatgacttcacaagacactccaagcttttcttttgccatggaagctacctctcggatcacatgaacctgagtgccccaggcaactagagtaacatcactcccttcctgtatgacttcggcctgggacagtgggatgttgtatggttctatagggacttcttccgctgctgccctgtaaagtattttaggttcaaaaaatatacaaggatttttatcctctatgcatgacaaaagaagtcctttggcctggaaagggcttctgggtataaccaccttgattcctgggcaatgggcaaaaaatgcttcaggactctgagaatgatagagagccccatgaccaacacagccccaaggggaccggatagtgaggcttccacagttaaaaagatccccagagcgat

SEQ ID NO: 334986 - DNA, 1000 bp, Homo Sapiens
tttttttttttttttttttttggtataacaagaataacagctttatagtcacagatggtcagatgctgacaaacaagaaagagggtctatgtacattgagattcggttgttatgagaatgcatatgaaggcttaagaaacggtctatttataggcttcggtggagccataatccccaatttgctattggctcctgatgtcgcttgagaagtatgtgaggctgaactggatccaatgatgctggaggatttcgttttggaagatatctttctacatgtggcagaccccccctttgccttggaaccactggaagcagtttttctcctcttagacctttgggaggctggcatctttttcctcttcctttcatttctggttttacttgcaaagtagtgggaagatacgggtatttcctcgtcaagctcctcagcggcacttcttccggggcctctgctgctggacaggcttatccctggggaactgtcttcagctggcgatgtccattcagagtatttctgtaatactgaaatcacttccgcaccatatttttccagtttgtcttcagtaacaccatcaatttgaagcaaaacctcaggatcagaagataaagattctgcaagcttcttgagagtgacggtattaaaaatattgaagtaatggacaccaaaaactttccccagagatttgcagacttctgtaagttctccaagacattttttaaccatctcttccctctgagacacttttgctactaacgctttttgttttttcacactgctggaattttctgtttccataaagtctacctttaaattgccatttagtacagtttgggctttatttccgagcatcacataagcgatcgcctggtcattggcattgatatataagtcttcatccaaaatcttgtcaagtatcagctttttaaaaagtctttcggcattgtgtcgtgaataagcagatccttttccaaatatacctgactggatttttgcactctt

SEQ ID NO: 334987 - DNA, 1000 bp, Homo Sapiens
tagtgtcaatttgaaagcaagatattttctcaagtttgagtttggatgaccattttgttgattgtaaaataatacttgtagtgatcaaatccaaagatttaaaagattttcttttcccctttttttttttcttcgtaaagatgggggtctccctatgttgcccaggctggtcttgaactcctggcctcaagcactcctcccacctcagcttctcaaagtgttgggattacaggcatgagccaccgagctcagccaaagatgtttttcttgattagttaataaattacatttagttttaagatatgcaactgaagcaaaagtataccaatacggaatcgggcaaaacgatttttgcccgatacacaaacgctgaggtaaatttgaaactaatttcttttctcattgtgcaacataagtactaatgtgtggtttgaaattatattccagtcttataaactggaaaggttaagcgtcaataatttattgtcgcctttgcaaatgcttagatatattttttagttgtaattgtgtcctgcttatttttctcacattcttccgtactggcctgggaactctcctgttctttgatcagagatgtagtacaacgtcgtttcagtctgagataatcttctgaactggtgggagcagtcctagtggattcactgacagatataaattgtttttctcctgttgaaccagacaaaagagcttgggtatttatcaatgcaagttcttcgtcagctattgaattactttccaaaagagaaatttcattgaattttttaaatggagtcatctgaggagaattcagttcttttttctttatgggtgtttcgtatttggtgccacaactccttggtggctgaaatgccttctgtgcagccggagaaacaaatgtacaaatgggactaacaggtggaggtaaaggcagtctactcaagaaatccaaggctcttctctttttgcagttcttttggtcatcaatctctttctccccttt

SEQ ID NO: 334988 - DNA, 1000 bp, Homo Sapiens
tttttttttttttttttttaagctttctagaatttattttatcaaaacaccctcccctcccatctttatgacaccatttcattcttgccaaattcggtccacccccacacacacacccccaagctctaccaaatgcctactcaaagagctgttggacccctttgtgcggctatttacatcctccctcctaaaaaatattttcatcgcaaattcagtctgtcttaattctctcgggaaatttcaggcacaataattttttggcctttgctcagaagccactatcccagggaatcaaagaagaggtgcatccccagatgtagagaggggcctttttgtattgagtgggagcacaaaggctccagggctcctaagcttgggatttcctctgagaaagtgaaattggggcttgtggagaagagaagtagaaccaagaagcttattggcgagctcaggattcttcatccatgacatctagaatattgctcagaagaattttgaaagtgggacgctcatctgctttctcatgccaacaactgtacatgatggtatataccttctctgaagccagatgaggcctgtagagacgtaggccttgggcaatgtgttcagcagtctcactgttagtaaatctctcatatggcatcttccccagggagtaaatttcccacatcaaaaccccaaaagcccaaatgtcagatttgctgctgaacttgctatacatcaggacttccggtggggaccaccggactggaaatttggagcctactgagcttgtgtattcatcatccaggacatacctggacaggccgaaatcagatactttaacaactccttgatcgtttaccaaacagtttcgagctgccaggtctcggtgaaggaactgctttgactccaggtattccatggcttcacagacatccttgcacatctctagcagctgctgagtctggaagcggtggcgcatctccctcaggtagttcaggaggcagccattggccat

SEQ ID NO: 334989 - DNA, 1000 bp, Homo Sapiens; identical to SEQ ID NO: 157234

SEQ ID NO: 334990 - DNA, 1000 bp, Homo Sapiens
agaattctgaattttattagagaatatatctaaaatacaatatttattaagttatgatatattgtctgaatggaaatatactctgtatcacaactctaattataacaatttttacagataatacttcatttatatctctgtaattcaaaagtcattaaattacaacagaattcatatttaagataactttgctataaatatataataatttttaaagtttttctttaatataacatcttgaaatcatgaacatttattttttctggtttacattacatagaatcatgactattttacctgatttgccttaactagctcaatttatcttgtgctatggatttgcactcaaccattctactttcctatgttttaaaagcagcattttagtcaacaattgtgagtgctcatcaccctacatgctgtgaacaaagtcaaggtactttattcttatttcttatcctatattctgtgttacagaaaaactactaccataaacaaagcaccaaccagccacagcagttgtgtcaagcatgacaattggtctagtcttcacattttattagtaagtctatcaagtaagagatgaagggtctagaaaactagacacaaagcaaccagggtccaaatcaccaaggtagatctgtgcttagctaaagggaaacacccgaagattcattatttggatacagactatgggaccatcttatttgaaggaagctttgatttgcctgttcttcagtggctgagctgggcgccagttgtccaccatcagttcttcgggttcaccctccccattgaagttaagtttacggaatttcaacacctgctcgctgctgacgctgatgggttccttgagcacaatccaggtcacacattccagaagaggaggggtggtcagtgagcctgggtaggtccagtaatccagggattcaggaaggaggccacgaggatcgaagttagtgaagtcagcactcttgccctttgttttaatggaatccag

SEQ ID NO: 334991 - DNA, 1000 bp, Homo Sapiens
cctcgcccgggcttagcaccaatcatcgtcactctcgctgtagggttcgtgcaggcccttcctggagcccggcccgcggggcctggccagtccgtgcgccgggtagtagccgttggggagtcgccggccgtgccgagaaggcgaggcgcaggccgggcccgaggcccggggagtcctgggcgagcgcccggtggcgcccgaggacgcgtgtcgtacggggggtggcgcgtcgtaggccccggccatggcctcctcgccgcccccgctgcccgggccatcggcctcgtcgtagtcggagccccggtagtagccatggtgccggggacccgggggcccctcggacacgtgcgggccagatgccggccaccgggccccgccgtgtcgacaggccctgggggactcgctccgggccgggcctgggacccgcctctccatcctgggcgagcggccgctgctgtggccccccgtgggcggccgatctccggccagaggctcggccgtggggcctgggtacctccgagggccgctggtggccgcccggcccggcctggccaccgcctgctgctgctgctgctgctgctgctgctgctgcgggggccccgagccgccggccttacggatcacaggggaataggacacgtgtggccggggggtggagggggtctgggggagctggcggcggccccgccgcggagtgctggtaccagatgttgagggggctgggcttccacttacggaactactgccggtgcgccatgtgctctcggccctcgctgggcgagcgggaccagcgctggtcccgagcccgtgcccggccgtggtccggccgttcctgggcatagcggtccttgtcggggggcgggggatggtggtggtggtggtggtggtggtggtgctgtcgatgcttccgatccttgggccggccccgctcctggtcccgctccttcgacggcaggtccccggattgggtggtcatgctcaggtctgtccccaagcctgt

SEQ ID NO: 334992 - DNA, 1000 bp, Homo Sapiens
gccagtgtcacaggcctggagattttaatgtcctgcaggtgggagtggccctagggacaggcactgaccaggcctttttgaatgacattagaagctccatccaatcatgcctcttgctggtgaggggcagggcctgtccagctacttcctccgcactttttgaggtggttcctgaccaccctgcctcaggcatgcatctagctgctgagagggagggaggctgctgcggtgggctagcccttctccaccccagcaacttccccacccccattggtcatgccagctctaagcccatgctgatgctgtgtgggcatcacagccttggaggaataagggtctcctgggagccctggtgttggtcgaggctgcccagggaggacccgaggttcaggcatcccagggagctggccatgccgtctggggcctctcgtcctttcagtagctctgttgccatgatctccacttcctctggttccatttggcaggcatctccgagggcctggcctgttgccatgatgaagtttgcatcagctgccaaggtgcccaggccccctcgaaccagagccttttggatcagcagggctgtagctggtgctgagcacctggaagtattctccctggtgctcctgctgtggggtgtctcctcatgaagagaccctggtgtggagctctttctgtcctcaggcatggaggactccaccctggggcactggcagggggcaggaggtgcctggcctctgggcattgccctctgggtcagcagtcccttcagcatctccacacagggtttgctgtggggtcccagggacctgcagggttggccaagggctcgtcctctggtagcaggcgtctctgtctcttctgggaactccctttcatagtggacactggaaaacacatggctgttgctatggttgctgttcgcataggcgacattggcgttggcattgttggtattggcacgagccagggggttggtgcgtggatcttgtgggaagtc

SEQ ID NO: 334993 - DNA, 1000 bp, Homo Sapiens
tttttttttttttttttttttgtgtgattccatttatatgaaatgtccagaacagggaaaacctattttagacaacagagacacaaagtcgatcagcagttgccaggggaggaggaagacgggaggggaaatgattgcttcacggggtgatgacagaatgttccagaacgtgacagaggtggtgcctacacaactttctggatgtactaaatgccgctgattgttcactttcaagtgattgatttttaggttatttgaatttcatctcaattaaaaaacccaaacacgcaaactcgtcccgccagctcagccccgagcagacgcgcagcccgtggaggatgctgagccacccaggcttctccccgccccttcctggactcttctctcttttgcctttaatccactctgcgcagtcattgcctgtgttcatcctacctggccgacttctctctcaatatttccttggtgaaacatcctaagaggaagttacattagagaaaatcacatatttcatctcataggccgtaaacagggccatttaggaagccatgtgttaacgaggggagacggatgctctgtgccgtgtgcagggataacggtgccaggccaggcagttaccaatcacgcgtgtgtttagggctcaggaaagcgaaggagaagtgggcaagggtggcgggcccgctccacaccgcccagcgctccggacttcacttctggtcccgctcctgggcggccacgaagttcagcaagtcaatggcggtgaccaccccgaacaccatctgccgctgactggacttcccggtgctgtggtactggatctgctcgtgcaccaccagggcgaagtggtccatctccaggatgtgcgagagcctgcccagcgtgtccgtgaggcggatctgtttgaactgcttgtagatgactttgccaacttggtctgacggctgcaccttcccggcaagcagggacgagagcatgttcccaagcgtcaccattcccagga

SEQ ID NO: 334994 - DNA, 822 bp, Homo Sapiens
acaattttccccaataggtggcgcttctgaaacacagtatttgtttttatttttattttatttgagaaacccccaaatttgctctgatggcctttcttctccatttgtcatctctgggaaccttgagtctagatttagggctgaaagtctctctgctaggagctttccaaaatgcattgctttgattctgggaactgaataggaggagaacacctggactactctgagtcctgagttcaattcctcctcaactggtttccttgaaggtggctgtactggtcatcttctcgatccttgaggggctggtagagctggtcattgggcaacagagtctgcttgtctgaagctctcgactggcgaactccatcctgtccagcaatgaagtagaccccaacagcaaggacgaaaatgctgacgatttcagcaaagagaaagccagatatggtggctgcatttagttcaatgcagttctgacacattctgtaatacacttggagtggttttgacttgttctgtgatcctttacactgatacatccctcgagggtccttggcattacttcccagattccatttttttttatcttcagttaggaagccgatcatcttcccatctttaaaccatgtgatatttttggcttctgcatcacaagtcagaagtaccgaaccatcttcttgatagtcatacaccttaaccaagtggtttcctttgattgactgggccaaagtaccttgaagaagaatgatagccaggatgaggacagccaggcccttcccctgttccatgtcagtctctgtctccggcaaaagcgtggagcagccc

SEQ ID NO: 334995 - DNA, 1000 bp, Homo Sapiens
cttggatacagcactttaatgccagtgggcctttaggatagggaggagttgggagccaatctccatctccgtactcctaacccaacttccaccacgctggaggagacaccagggttccagctgtgagcctggtgcttgccttctgctacaagccccatcccgacctccttggagacttctagctcaagctctggaggaaatccaccagcaggtgctcagggaagccaaagtccatctgcagcagcaggaagccatctcgagtgataatctcagggttgatgatgtcgaagaggctcacgcctttgctgttcatgagggctgtaaacactacctcgagccgagacatgacctcagggatgcccacagcggtgatcattgactgcaggaagctctggatggactcggagctgctctcagtcaagttggaaacagtctttggtgtaatctggaaatccaagaggcttaagaagagctttttcttagaataggaggcctggacggtagtcacgatatcctcttcaaatgtgtaagctacagaatgttgctggtctgggcgtggaaagaggaatttcaccatcactgaagaattgaccacgactcccttgttttggcaggagatcttgggcatcttgaggcagtggacggtgacttgggcctggctggggaagccgccgacaacctcttggaagatttcctggttggtgttgaagccccaggtctccagcactgccttgaactcgtctcccatcaggctgagcatgaggcggccatcctggaaagctaccttggccagcgagtggaagactcgctcagagaaccagaagtacagcatgcgggagtcccccagcagtgtgggcgagaaggtggggagggggaggtcctctgagacattcttgtagatgaaatgacccttgtgatgggactccaggtaggaggctgtgatgacgggatcacctgtcagggaaatgtccaccccaatgtctccatctgaaaggatgct

SEQ ID NO: 334996 - DNA, 1000 bp, Homo Sapiens
agtgattagtttcatttactaaagagggttcactcttcagggagacagcagaactaaagggagaagcaatatgaaaacacttcaaggccataaacttacataaaggtaaatcttatcatcaataataagtatggaatataacacgtttgataagtgcgagtggagcaagtagacaaatcttcctctcctgcccttctctgctctggtaggttccagggcagagctaagctcagctcattttctgctcatccttgctgatttaattcaatgagtcgacctgcaaacacggctagggttccgatgatgcaaacaagcatgaagactccgaggagtatgtggtccatcaccattgcaacgtacttccactctgccgccgcattgttagactcctggtctgacttcatggtctctgcgatgtacttgatgccctcgatggcacttttcacctcggggtgtttgatcaggggagagtggaagcccatgggtggaggccctggctttccagaaatgtcagagatatcaatgtcttctgtaaaaatctttttgtcttgcttttctctggatggtcttttcattgtggagaaaaacatgatatttgggatagtgtcgataaaaaccttccgcacccagttgggcatgacatgggtgctgggtgagcggtggtgtgtgttgatgacgatgacagtgatgatgatggaggcaatgacgaacaccatggtgaacagcatgtattttccaatcaagggcacagcactggacgtggaggggatcagctccacgatgaccagaaggaacacagtcaaagacagtaagacagagatgctcagagtcatcttctcccctgagtctgtgggcaggtagaataccaggccagttaagaaggagaagagcaggcaggggatgatgacgttgacgatgaagtagaggggcaggcgctgcatgacgaagtggtaggtgatgtccaggtagggggtgtcggggcagcaggaataggtcacgg

SEQ ID NO: 334997 - DNA, 1000 bp, Homo Sapiens
ttttttttttttttttttttatgaaatttatttccaaattgaagaggcagtgtatataaaggtaacagagcttgtgataatttacagaaatgtttgctacaacatgcacattatgaagtatttcaaacatatacatattaggtttcatgctgaataaataatccccccaaattaatttttatttttacataaaaatataatattgcactcttaacaagaccagttattctgcatattttctctttagataaatgatgaaattcggtttttaaaaaaagatgagtagcaaccctattctaataggggactaatttaaagttctcagtaaaaaaatgaaagctagacaatagctgcaattttttgttaacaaagcaaatcacttcaacgtgaataggagtaatctcatctctgcacctccatggacctcaggattcacacctggcctgagcacacggtgatctaaatgcagcctaggtatcactacatgtgtatgcagtttaaggttaaagcatacatggccacgtgctttctctcgaatctatcttgacagcagagactttggaattatattttatatggtttttaagcagaatgttttagaaagtctggaagttacaaaagtagtactgtaaacaccatatgaattaaatttccataacaaatgcacaagttattcttaggcagggatacatatttttatcccatggtaacatattactgagcttatctgacagtgttttcaaagccaataaagcagcaccccaagtaaaaatatacagacagccatcatatgggagagacagacggctccaagatgtttaggaattctgtctttatggtatgtaagtttgctgtggaatacacgagattttattattcttcctagaattctcagatggtataggttagtagaaacagaatgaaatggtttcctaaaagaattattctgcctcctgtttaaagtaagcttttataattctgttttggggaagaaaattct

SEQ ID NO: 334998 - DNA, 1000 bp, Homo Sapiens
ccatggacaaaatcggcatttattcagaaggcatgatgccaggaagaaactccccaagtgggagacaatggctggcccccctgcaaggaaacaaggcttcagcccttccctactcccagacctgccgggaaggctgggagcacagttcatggagggtctctggggtgggcctgggtgtctgacctgtccctctgcccacaggtgaatgtgacctgcgtcctgaggatcccgagtatcaggagagctggcagaggaagtcatgcagaggcaaagccaggagccccgacagggagatccccagtgtgtcagagatgcaggtggccgccattgcaaactcccggtgctcatcactggtctccagggcgatgttgtggaaggtgttcacgtaggctgcgcctcccaggagcccctcatacagaatgatcaggaagacgaggtagatgcttggcagaaagccgaaccacacgtctgccagcaggaacaccaggttgaggcactgcagcagggccagggcccaggtgaaacggatgcgacagcagcggagagaagagcgggaggcaaagacgccagcctggtacagcatctggtaccagcggtattgctgagcgtgactcagggaagtgttccagaaaaagaggagttcaaaaagtccctggttaatgaaatactcggcaaagtaaactacgaccaagggaacaatgtaccacagcagacccttgaatactgtccacctttcccgaagggagaggctggagctggagcctggcttcgactccggggcctcggttcttatgaggggctgccgggctgcgctctctgcttcttcttcccctccagggtcctgggcctcaggagatgtgagcaacaagaaatagctggccagcagcagggcagggatacccagcatggacagcagggtctgctgaggggagaggccggcctgggtgaggcccaggtaggacagggcccccagcagcccagctcccccagtccctgagga

SEQ ID NO: 334999 - DNA, 1000 bp, Homo Sapiens
tttttttttgcataattaattttactttattgcagtctaatttttaaaaatgttatcccaaatatgatgtacatggtaattctcagttacttcaaatacgcttcactcaacaatggaaatggcatgaaagtgagggctacttattcatttttatgaagaatattacataaaatgagcgtatgtgaaaaaatcagaaaatacagacactgacaagttaatcagtttatatctttgcacattatcagttgtgaaaaatcccaagatataaagcttttttaatcatagtatctctcagagagggtgtgggccttgtaccttgcaccaaagcacattttcctcatggaaaaatttcccaactgagtcttcctcttcttttaaattttagttgatgtcagtcataggatcaaaaggatcatgaggcatgtccctgttaatgaccagcttttcggttctatgtagagtcgatgggcccactttccgctccaggtccctcaatacttgaaaattctgtgtcaataagcggtttcagaaatttctcaaccttggttaatctttgtttcagtttctgctgcatggactcatactcagccaagattcgggcaaacctggtttgcaggaggtctactgacccctccattcgagtaaccttctcttcaagatctttaggatcactgccagcatttgcaatgtttagatccagtagaccatctttcattaaaatctgcttccctttctcttccagcatagttttggcatctgggtactcagttagagcttccatgaggtcatcttttgagagacagaacaggtctgagtagccaatacttttaatattggccgttcttcgattgccagctttgctccctttaatgttaagaatgctgatctcaccgaagtagctgccatcgctcaataccacaaactgagtgactccatcatctgccaccacagcgagtttgccttccttgataatgtacatctctcgtccgatatccccttt

SEQ ID NO: 335000 - DNA, 1000 bp, Homo Sapiens
ttatgtttgggtcatttccacatgctttattccagcaatcaaaataattaaaaacatctcaaattattatacacatacaaaataggtacagagtcttttgcttcctcccacccctagggaaaaactgctttgtgctttgggaagttgtctctgaaacccggggacagaggacgcaggacagactaggagggagccgggaggatgggctgcagctgtggaggagggtttcagaggagagaggtcggagagcagaggcctgagaagccagaggcaggtggagagagggtggaaagtgagcagcgggctgggctggagcgcacacgctctcctcccatgttaaatagcacctttagaaaaattcacaagtccccatccacaaaaaaaaaaaaaaagaaagaaaaaatatcaaggaataaaaatagactttgaacaaaaaggaacatttgctggcctgggggggcatctcaatttctatagcaccagtgattccctccccaccccacccatcacatagatgtagcacctttggtataaaaatggggagccgcttccaccctgcccccatccccgcccccaggcagttgccccggtgacacatcaagacaagaacgaggtagtctttcagcaacacagttacacaaggaacagaacagaacagtctctcccgcccagcctgcggcacaagggatgacacgcgttccccaaatccgatgtttctgctttgtcgtggcccttcctgactctcctccgaacccagtgaggggctggtggctcccccggcatgaccccctcaaaaacgaaggggagatgttgcaagagccatgggagcgccagatggcaaggcttctttggcagtctgagaaccccaggtccccagggcctgggggtgctgggcgggcaggagcgggctgagggtgggggccacttgggtgtttgagcattgcctttgattgctgggcagacaatacattgtttcctgtgtcttctggggagacagatt

SEQ ID NO: 335001 - DNA, 1000 bp, Homo Sapiens; identical to SEQ ID NO: 157236

SEQ ID NO: 335002 - DNA, 1000 bp, Homo Sapiens; identical to SEQ ID NO: 157237

SEQ ID NO: 335003 - DNA, 1000 bp, Homo Sapiens
tttttttttacttatttattaacttatgaagataatattctaataccaacattaaagtgtttaaaataattagcaagcaagatacgtttctgatgttccatttgtcacccttacctcttcccagaaaatgttctcaggccaagttcaagatgaacaggttgaacttttaggagggttgacttttggtaatagataaagctttttgggaaggagaaaggtaatcacaaataagattgaaattggcttaagttttaggtgcacaaaaatattcaacatgccagagcatggtttaaaaaatatcaaatgggtcaaatgaactaggaaatattctgctacatcaagaaaatatttcatcttaaaatacacatttttctttttaccagaaaatactcttaaaataaattgccaccctgggggcagcccatagcaaaactcatttgaaatgtgttctgcatataagagctcattacaaatcaaggtttggcaaggaaaacatttcttataaacaaaattttaattgagtttttcttctcaattatttttaagtgcacggaaacaaagcactaaaatgagtgtcacgctcatgagaaatttctttagttttctctaaaatgcctttttcttttagatgaggaaggtgagtttcctaaaaattttttccaacaaatcttttaaatttaggattagatcaccaaattcctagcaaaacagaaaaagggatcttttgctttacagaaaaaaataatcattataaattgacacacattctaaacttttttagaaaatactaatgccaaatgtcaaactgttgccttggtacaagactgatatgaaatataagaatgtctttaaaattggcaaaatgggatgctcctgtaacagccaaccacgggagcataaaattcaaattataaattgtctttgtttcgtttaaagatagtgccatgtcctcctgatggggtaaccctgacttaaatgaatcttcttacctaagtttaat

SEQ ID NO: 335004 - DNA, 1000 bp, Homo Sapiens; identical to SEQ ID NO: 157238

SEQ ID NO: 335005 - DNA, 1000 bp, Homo Sapiens; identical to SEQ ID NO: 157239

SEQ ID NO: 335006 - DNA, 1000 bp, Homo Sapiens
atgctccagtctcttttaatgtttatagtcattccaaagtaacattctattttacactttcacatacattgttatgaatcattggtttttctcttttttccacttatcaccaatttatttcattcagccagatttggtgtcttcattttgtagaacggtgtaagtggtttccattccagcatgaatgtggtcggtcacatggcagtggagtaaccaaattccaggtgttcttggaaacatttctagggtttggtatgttccagggaaaatgtcaaagacatcagaactataaactcccctgtgcttgtattggaagctatggccgtgaaaatgtacagtgtgtaagtctatttcattgcccattcccatcagataccagttgacttcatctcccacgtgcattgtgaggccttgtaggtttccaaacattcttccattaatagcatgcattttattgctttctatgaattcctcatcatctttgtttactttctcggggtgatcagagtatgttttgatgttgtcatctaagtaccaagattcattctcatcaaaaactagaaacagaagggcaaattccagcttccttctgggattgaatactttcaagtaaggtcttcgacaaacaatcagggggccaattaatccactgtagaggtccttaacttgatccacagttgaataataagcccatggaatacaagcagaatcctctgttccagctccagatctttctgggattttccatacgtaagtgagagtttcacctggtaatgttggagtaactgtagaactctctgtttgtaccccatgggcatgtattgagtagggccttgtggccatgtttttaaagataattttgactttgtctccaacatctgcatgaagttgtggacctagaattcccagatgttcttcttcagcttttctctccactggaacacggaatgtgctatcagtatactgccgatacacaactttcttgtactttgagcctatg

SEQ ID NO: 335007 - DNA, 1000 bp, Homo Sapiens
tttttttttttttttttttttagtcttatttaataataaaatttattagcagatctcttgtaagacagttgaagaattcatacattttccagccccaaaaaggccacacagaatcacaaacattcaacgtgttccacgataatgatatgtatgagatgctcttccttataaactttattacgaagcaaataaaataatacattcataatatatgaacaaagaaatcatacattaagaatcctgttgtgatttgctcttaagagcaaagagctgcagaatctctaatataaaaaagaggacattttcaatgtgtccattttcctaagaaacgtgtgtatgaaatgcctccaagtttctcatactatatatacttgctttaaagaaggaaattatttctcatttcattttccaaatgagaaacattgcctaaattcatgacatccctaggattattcttagtctcaacttccacacagagatgtctgaaatagaaaactcttaagtatcagaattcagggatataagctttcacattcaaaagtgcagagaatcccaacattaacaaacaatggttccacaaaaatcaaaattacaacttagacatctctaaaataatagtaatgtcactttagagtttacaaactacagaaataactgaattgtaacacatgcagagattatttcaagtgcttctaaatacctattagaaaaatgtgtatctatttgacaatattatgttctctggagaaagatatataaggattacagcagagacttcagtattgacaaagtaaaatttttaccttcaagttgcattctaaaattactatgaagtctcaacttcactgaattaatgaaaataaaatatattccacgacagatttttgtggcacaaatgaaaactttaaaaaatacatgaaacaaaaacaagatgagagatttcctgatacatataatactatttatattcccttatctcaatacttggaaactcaatgtc

SEQ ID NO: 335008 - DNA, 1000 bp, Homo Sapiens
caagcaaaaattaaactttatttctgcttaaacaataaatacacctgagttagttttccaaacctttcctcctgattaaatgcccttaaaacttaaatctcttgttatcttcagttgtgatctagtcccaagtggaaattacgtttagctttaaaaccatgaatttaaagctcaagcctgtagctggctgcctaggcagcttatgattagtttcacagaatagcacccactggctacacaggccccagttttttttcttttttgtctttttgagacagtctcgctctgtcgcccaggccggagtgcagtggtgtgatctcagctcactgcaacctccacctcctgggttcaagcaattctgcttcaacctcccagtagctgggatataggcacatgccaccacacccagctaattcttgtatttttagtagagacaaggtttcaccatgttggccaggttggtctcaaactcctgacctcaagtgatccacccgcctcagcctctcaaaatgctgggattacaggcatgagccaccatgcccggcctcccagttttcatgatgaggaagtgatggtagcttttcatctgcccagaagttaacttttgatggatttgccttctaaggcatcaaacatgtcttctaaggccttctccacacattggagaaactcccgggcattgcggcctgggtaggaagagacattgcagcctatccagttgtcatgaacagcatacccaacaccaaagccatcagagaccacaggggcaaagcccccaaggttcactgctgggctgctcagtgtgctcgtggacaggacattgtggtttatctgcccgtatgcagggtccaggtagagctcaggcaagatgatccctttggctgctgccagatgccgcagagcaaacaagtgtcggtcaaagccctggcccattgctgcttctttggtcagctggccatggtacttggagcactcaaccatcatctgctgaagctcacca

SEQ ID NO: 335009 - DNA, 674 bp, Homo Sapiens; identical to SEQ ID NO: 157241

SEQ ID NO: 335010 - DNA, 1000 bp, Homo Sapiens
ggaaaaaaaaaaaactgtttatgcacatcactggcattgccacaagctgaaaaagaaggcagagtgggttgggagtagggaagaatggcggagaagggtggggggttgtatctctaaatctgtgttgtggggccacatagggtggacaggggctgtgagttacagcctttaggtgctaccctcagcctgggcttccctccaggcctggcgcaccttgatcttcactttgaaagagtcgatcagaaagaccaccttggggatgccttccagggagggcagctgcccatcatctggcacctccaggtcgaacctctgcagcagccaggccatgatgaggaagagctcctggcgggccaggatctcacctatacaggagcgaggtcctgctccgaagggcaaatagcttactgacggtgagatgagctgggtccccgctggattcaagaaacgctcaggcatgaactgatccggctggtgccactccttctcattgtgatgcagcgcccacagattgatgataacttctgtgcccttgtccacagcaaactcaccgatgctggagtcaacgttggccttgtgggggatgagcataggggccacgggcctgaggcgaagcacctctcggatggtggcctccagcaggaggagacggttacggtcactgatagttggtgtgcggctgaaacccacattctggtcaatctcctcgtagagcttcttcttcacctgaggattgtgcagcaggaaggccagggtccatttaaccacagaggtggtggtctccacgccagccccaaagatgtcccctatggtggtgagaatgtggttatctgaaagcagctctgaatcttgatctgggccagcattgccattatctgagttcatcttggcttgcatcagtgtgtccagcatgttggtgatagagtcactccggaatttctccttgtaattttcaagtattttattcagcagatcatttcgtattttaacatggctcttt

SEQ ID NO: 335011 - DNA, 1000 bp, Homo Sapiens; identical to SEQ ID NO: 157242

SEQ ID NO: 335012 - DNA, 1000 bp, Homo Sapiens
ttttttttttttttttggaactaccacattgctttattgtacattagagcctctggctagggagcaggctggggactaggtaccccattctagcggggcacagcacaaagctcatagggggatggggtcaccaggaaagcaaagacaccatggtggctgggccggggctgtccagtgggcaccgagaagctgaagtgctgcagcagggaggtgaagaagaggaagagctccatgcgggccaggggctccccgaggcatgcacggcggcctgctgagaaaggcaggaaggcctccggcttcacaaagtggccctgggcatccaggaagtgttcggggtggaagcggaagggcttctcccagacggcctcatccttcagcaccgatgacaggttggtgatgagtgtcgttcccttagggatgcggaagccctgtacttcgatgtcacgggatgtcatatgggtcacacccagggggacgatgtccccaaagcgctgcacctcatgaatcacggcagtggtgtagggcatgtgagcctggtcacccatctctggtcgccgcacctgccctatcacgtcgtcgatctcctgttggacacggcgctgcacatccggatgtaggatcatgagcaggaggccccaggccagcgtggtcgaggtggtcaccatcccggcagagaacaggtcagccaccactatgcacaggttctcatcattgaagctgctctcagggttccccttggccttctccatctctgccaggaaggcctcagtcaggtctcgggggggctgggctgggtcccaggtcatcctgtgctcagttagcagctcatccagctgggtcaggaaagccttttggaagcgtaggaccttgccagccagcgctgggatatgcaggaggacggggacagcattcagcacctcgcgcagaaagcccgactcctccttcagtccctcctgagctaggtccagcagcctgaggaagcgagggtcgtcgtactcga

SEQ ID NO: 335013 - DNA, 1000 bp, Homo Sapiens; identical to SEQ ID NO: 157243

SEQ ID NO: 335014 - DNA, 1000 bp, Homo Sapiens; identical to SEQ ID NO: 157244

SEQ ID NO: 335015 - DNA, 1000 bp, Homo Sapiens
aaaatgctttatgatattttatttgatattattcagtaatacaggttttgtggcaaatatgcatttctaaaagtgcataatgaaacattttatttttctagctcttgaatttgtcatagaaataagccatagattgttactttctgatttactacttatagattcatattgaagatgccatgaagaggagataaatgagtttatatgacactatttactgattatgaaaatagagaaatacaaaaatattatctaataataacaaaaaatatatttcttttaaacataaacactaaaacagagagtagtcaaactgatttggcacacttaatatatattatcaacattatatttttcattcttgaataatgaagcattgcatactttgagctttgttcaaacattagttgctataatcatgaaggtgactattaaagaattccggggcccatatgtgcacagtaaaagagtggtaaccaggatctatcctatcatctcatttggttaggaacatagtttaaagagaaatgccattaaaagaggatgagtttgtacacccatctcacgcatgagtagtgaatggtatttagttagtaaatattctccctatcctctatccaacaccaaaaataagcaatttcagcgaaggggattttacttaataaagtccacaaactcaattttaggctttcttatcctgccatagcaaataatttttgactttcttcatttgtactttatggagctaactacattttcttagaaacagcattaaaattaaaggtaatttttattgataaaatgtttccttggatacattttcttgtatgttaaagagtactttgtttcaaaatgcttaatttcacttacaattagaaatcaaatatggagcacagcatagggcaatttggaaactgtcacactaattgccacacaaaaagttaatttttcacataagacaactggcagtgaacatccaattaactgccacacagttatt

SEQ ID NO: 335016 - DNA, 1000 bp, Homo Sapiens
ttttctttttttttttcactgtacaactgattttttaatggaaatatattaatatgacctgtataaattatgagattcaaaacagtggcgccactatactgctaaacctatgcatgaaggtagtgactaggatggaaatctgtcagtgctacaaaaatatgtatgaacaaaataattttcaccctttgataaagctacaagatataaaatttagaatacttatataatttcatactagatatgtgaaaaatatgccatgctagaaccatcttgttccaaagtttgaaacatattctgtcaaaaatactcttcgtacaatgtatgaacttatcaataactttctgggtataaagttgtttttatgtcatagtcagatgaagatccttctgaattatatgttgattagaattttgtttcaactggcacctcatatacccgattacgtaatcctccatttgtatttatggtaaaatcaatttttccatctttttcctgactgggattaaactttgaagtactgtaatctttcttcatcaaaatatgcaaaacagcatcatggattgttaagaaaaatattgagcttttcacttcaccatcaaaaaattcataccggttaagcttctcaatgaagtcatcatcagttccaacgatatacacatctaccttgatcctgataaattcttgcaaaatcgatttaaggcccctcactgaagaaacatcaagaaaggacactgctgaaaagtcgagaatgaggctgtggaggctgattttggggacctcaatgttgagaggaagatcatcattccagtcaatgtggaaaggcaggtctgtggtattgattggctggtccagtacttctatctgattgttgtccagctcttcgtcagaatcttttatggtgtcaacagtacatataaatccttttggtgtcacttgtagcaagccttgcttctgcagttttcggattttcctcaaagctttgttgcgcttgcgtagaatt

SEQ ID NO: 335017 - DNA, 1000 bp, Homo Sapiens
ttttttttattattagagtaacaatttattagcagacaaaacaaatgaaacctctaaatctcaacacacatacaggatcttacataataaacagcataaaacataagcttctagaagaaaagtatctgctattaaccaactccccctcctttccagtaggctgcaatacattaataactcatcctcatcccataagagggttaagcaatgatttacatggaattacatcaaggcacttgctttaattaaaaaatacagtataaaacatgttcctaaaagtcatcaaccttgaataattaaagaaaaaacaggcagtatacttttttggtgaatagacaagactgagaatttaagttcattcacctgtcaccctgatattgtcttggtttgtgtacaaagttccaaagaagacaaaaaaaggtagcctattacatagattggtatgttcatacacactcatttctgagaaacagaagccatggcagcaacaggactcaaaccataattttccaactgatttgtgttgaaaaggcaagggctatttgatcccatgtatcttattattttagggatgacgcatgagataagggaagagaacatctccaaaataagttgattaaagcttcagttgaaagacctttttggcttaagttgcttagctatagacttacaaacatagtatctacaataaaggcatttagtgtccttcattattccagtttttagacttcagtccattcttttccaattttcaacactgagataaaaaatacacaccagagaatccactatttactacaatgcttactttttaactgtacttaacatgtttactttaaaatttcagttgcaaaacttttttttaagtccttatcaggataaaaattaccttataaaaataaatctccccacctctgacatctaaattctccatccctgtaagttactaaattttttttaaaccttaaaaatttacctttaacgtatttcaatagtattt

SEQ ID NO: 335018 - DNA, 1000 bp, Homo Sapiens
tttttttttttttttttttttttttttttttttttttttttcagagcaaactttaggttttttattaggcttttgacagtactttctgagtatttgagcaattgatgggtttctctctgataccatcttgccacggtgccaaacagcacatatgcattttaaaaatgtaattcaagctctaaggagtatgagtttgtattcagaatgcaatttaaaatctacctacctatctacctctctatacgtatatacagtgactactttgaacagatccacataaaggagttggagtggagaacagtttcacaataaataatcgcttctctaaactgtacaaaatcctaccagcaaatcagccactttcatttcctcatgataggtcatcacttttatacctgtaataacttatgaaatacacacagaggatttaacatttggtcaaggccaatgctctgtcatacaccatcttaaatgtctctctacggggccctggacacccactcaaatgccgtttcctatctctctgtgactgggttggggagatgggcagccctcccctgcgcaggcgactttacatggtgggataacatctccacactcacagtaagctcggctcggtgggaagagcgcagctgaaagagattttgaactgtcagacggtataagttgttgccaatttatataaacaggaatttacataatttacaaagaatttgtgttcgtgacttattttgaagccattccccaaagatccacatttactcatgaaagcaaatattcaacctaatagccttgagctggggctgtctttacagtcggcttcctgcaaacaaggcctgggaactccactgtgtatcggcctggtgtctatacagaatacagagggtcagtcactgaacaggaacaagctctgtattgcagatactaactttctcattttcttgtcacaaacatcaaggatccttttttcttcttccttcattctttcgagatacattct

SEQ ID NO: 335019 - DNA, 1000 bp, Homo Sapiens
cccagagaccagaaatgtggcattttaattgaataacttcatacttgcttgataattgtatatttaacataaataatgtccacttgtcacatttatatttcttttaaacaatcaattagtatttaatgaattagtgtctgtacagtgaaaaataaggtagttgttaaaaaaacttaaatttttattggttttgcttacataataaaaaatcagtaactatagccactttaggcaaccaaaaaatcctcccagatatataattttttacattgttatattacacttttataaagttagctacagcatacccatgttttgctataaactgtattcctttggccatatgtaagctatcaatactaaaaggtgtttgaacatacatccacattagcagtggataataagggagaaaataggttaaaatcttttataaatcttttgagctgtaacatccatgttaacaataattttgtctgttgctatattaaagtccttaatactaggaaacatgttttgaagttgaacgatagcacctttttctatcttggttttgagtatgtaaagaaattataattgtttcttacttatcagtatgttaaagttttgaatcaaacattttttttaaaaagccactgaatgcaattttattataaataatgcaagtatgctttttgtgtgtagtttcaaaatttggcaagataattagagaacatgatactgacatggagaaggaaagggtatcaggatgtaaaaattcagtacatggtaataaaaataatctaaaatttaaatagaaattaaatatattaataaactgtgaaaatattagtgattcaaaattaatttaaaattgagagtctaaaatgacttctatgataacaggcctctgaaaaagtgattgggatgaaattaaagaacaagtttgtgggtgatttataaatagaatccatatggtgtgtgaattaattattattgctctttctttctggccacattgttg

SEQ ID NO: 335020 - DNA, 1000 bp, Homo Sapiens; identical to SEQ ID NO: 157245

SEQ ID NO: 335021 - DNA, 1000 bp, Homo Sapiens
ctcttcctagcacatgtttggtttagattgtagaacaagggttggcaggagagtggtgatagagctggaagtttaagctgatagttcaggggctaccacggtgacgcttttatagttggttaggttctggaacatgttgcagtccacttccacagtgagtctctggagccccacatgtgttggcgtgaactggaacttggcacacatggtgttttcaggccacactgaacggaatctgtagctcctctctctgtgaatgagcccccttcccaggatggagatcacacagtcctccatgggggcatctagggagttctggaggctgactgaggctgtgaggggttgatactgctctgctttctctggcatcttgatggcaaggtgtggtctacaaatggcaatgtcttcctgagcaaagcagctaaggttggattcagagtgtgttgccatggcggtgagtctaaggaaggtgttctcgggtgggtttcgctcaaaattggagaagaacaggccgatggttattatcttttccaggttggcactgagcgtgaggtgcagcttcttcctccagagcttggcagcaaggacaccgttgtagtgtacagcctggaccccaattgccagctgcactgccttctcctgctcactgtgattaaccagcgtcactgagatctgggcatcccctctcaggggtagggagctgggtgctttcaagagcaggtacagaggactggcagtctcgagactgggaggacggatgccgttgtctttctcacgttccattttctctttctcgactctctccagcacctctttttcctgaagagacccttcaggatacttgtagttctgagtgatgtcctcgcagcggtcactgcccacacccttggtgctgatgttgttgccaacatactttgtgttggagtcagtcaactccagtgtcccatcctcacagcacttccagaccacacatgaggcatttatggcagcaaaaaggtct

SEQ ID NO: 335022 - DNA, 1000 bp, Homo Sapiens; identical to SEQ ID NO: 157246

SEQ ID NO: 335023 - DNA, 1000 bp, Homo Sapiens; identical to SEQ ID NO: 157247

SEQ ID NO: 335024 - DNA, 1000 bp, Homo Sapiens; identical to SEQ ID NO: 157248

SEQ ID NO: 335025 - DNA, 1000 bp, Homo Sapiens
ataatcagtttaactttattttaagcttctattacattgtaattaataataatatactaagttaagccagtttaactgtctagcaaaatgcatttcattttaaaattggatattgggagacttggcaaatgctgtgagattacttagtaaagttaagtatgatgtatatatagaggggaccagctcaccctcataggttagtgctgaaggctcaggaacagtctcaaaggctcagaaatgtggttatatagaccagagcattccattctgattttgcccccagtatacttatcactgttcattttttgctaagaatcacagtctactgacctaaatcacaccctagacatatcagagggaaattctgaccataaatcagccttgcaaatacatagcaggcagccttctctgtagtagccttggaacataatacaaatgatgtcagcatcctctgtggttgggtcagaactagcactggctatttgcaaggctgagtccatattacccttcagcacctgagtgccaagctgaggtctcaaaatggtgatgtgaaggacaagagagaatcagtggctgcagtccttctatatatctggtcactagatccgccagcttcttcaacttgttgggcttattatatctctgaaaggggacctgaacctgcatcattctgcaaaggagatgattcctgagagatgggtgaaatataatcactaactaaagagataaattcttcactttacttcctagtattgcatcccagaaagggttaaagtaagggatattggctcctgctgatcaggccacagtgtgacacattctataaaatgcatcacaaaactacattattcaatagacttgagtgttgcacctgctttcttatctccttgtaggtggttaagtttcccacaaatgcaatttgttaatatggggccacctcttctaacaaggtaaatctaaaatttggcaggcatttgcttggctgcaggtgcaaaatgaa

SEQ ID NO: 335026 - DNA, 1000 bp, Homo Sapiens; identical to SEQ ID NO: 157249

SEQ ID NO: 335027 - DNA, 1000 bp, Homo Sapiens
tgtatgtgtcaatgttttatttaactcattactgaagaaaccagcaggaaaataaaagagctagttccatgaacatttgagaaatagagatgtatatagtcaatgggaaaagaatgccaaaataagattatcaagttaaacataacaggaaataaaaccatatcacctttggggttaactcctctaccgggctataaaacaaaacaacttattcatttctgtaagttagcctctaaactttaagaacttcacagggctataaaccatttgcacctgcatcatttgtggattgtgactatactgtgacagctatgttatagtttccaaagaggtcagataagggtcaagcaggattattagaaaatactccagcatagaaaaaagtagccattcttttgccttttctcagattgggatccatttttctttcatattaggatctcctgttttccatttgccctgggttgcaatctttggatgcttcctccaactgctctataacttatccttgcctccagccccctttactatcaggagattctgtgtagtcatagtgaaggggtcaggcagatggaaggagcagtaaacccttcacaatcttatgggggtggagggcaagaagggggatcctattgtgtggtgatatggcagactggagtgttttttctgttttcaccagtccaattttcttctgacctccttgatatttcaactatgtaagtaggactctagttttcagtcacggtatataatttcccctgttacatttttgttgtgttattttcagcaggaaattagtagagggagagagtaaactgagtgcattattagaattacaaagtttgtatctcctatctcagataaccatggattttcctcatatttccacagaaatattaaatgtatgtcctttagaagcctaatgtcatcatcattttctttcttggccatcacaaatttcaagaagacattgttattttatttcaaagctttcaacaat

SEQ ID NO: 335028 - DNA, 1000 bp, Homo Sapiens
atgaaccagaacaccagtttattaattcacaaagggaaacatacgtcagttggtcagcaactctctagaagattcaagatagaaggattaactataatcaaaatgttccatggtgaacacgaaaccagaaaaggacaacttagttggctgattggaatgacttatgcctttgagcctgctgcacccttctccacttcggggtatgctagttaaaggagacatgatacttatgtcctctggtctaggcaacttcaacttcttgcttggctctgaacactgctgaagacacactgttgaattcttcctcaaagtctctactagctgtagattgcaaacgaacggttctcttctttctgttagcattattattattatttttagaaagagtacaatatgtctgggtcaatgtcagcttttttagttacaatgatatgccaatcttgccttcgtgaaatcatgcctagtcagacctccataaccatacaagctcttagaatggcttattgcttccattatatgtgtgtatgcgtgtgtgtctacacacacgcatacacacacacactatatatttatattgtatattatatattttatatatatattatatatataaaataacttaactctctgaaagaaacttttcccccaaacttttcaggcaccttacttcatccctatgttctgaaaagcaagtctccactatggaagcaagtctgggtttgatagacatgtataactgtgtacagaagtataacagaatgatgctccccatctctcctttaacgaccatggagggtaaaagggagagagggagtaagaaagagaaaaactgatttggggattgggatttggaaaaggtaaaagattgaggaatagggtagaggaaaaggagtagtgtttttgatgagttttagcctctcagctactcctgtgttctttcttcatgagtgtggtactggccttgtgatagagtagaccaaagatcctgtactgtatacag

SEQ ID NO: 335029 - DNA, 1000 bp, Homo Sapiens
aaggaaatagctttctgaggtttctttaaaaaccatcctgaaatgcacacagctgatgaagccacgtgacagtgtataaagcagtttaaagatcttaataaacgaggccctcataggccccttgcttgggcccactgcatggtgaaccatgtgcagaaatgtcttcccagctgtgatggtttcacattgtcatcgtcgtccccccgggaggttggagcatcaggggcctggactcactggactctcccctctcagaggtgcggaactatatctgtgacgaatgtggacaaaccttcaagcagcggaagcaccttctcgtccaccaaatgcgacattcgggagccaagcctttgcagtaagtgtgagtcaggaccccctcccagggctgtggccctcgcaccttcttatctgcctctgtcccccaggtgtgaggtctgtgggttccagtgcaggcagcgggcatccctcaagtaccacatgaccaaacacaaggctgagactgagctggactttgcctgtgaccagtgtggccggcggtttgagaaggcccacaacctcaatgtacacatgtccatggtgcacccgctgacacagacccaggacaaggccctgcccctggaggcggaaccaccacctgggccaccgagcccctctgtgaccacagagggccaggcggtgaagcccgaacccacctgaggacggcagtgaggatgagcacctctagcagcctggactccgcagtggctgtgtcagcctcacccttcgtgtgcacccgcatgggagggtcggagggtgctgcccgcccttggtgctggaggcgggcttggtgtccggctcaagtagccttcctctgctctgggaccagtggtttattttcccgcaaacgctgagtgactcggggccggacagttcataaataattgattcctttccccactaaagcagtcgaggagatttgtaatccactttttagtgcaacaagagctccatgttatgcttg

SEQ ID NO: 335030 - DNA, 1000 bp, Homo Sapiens
ttttttttttttttttttttttaggtgcaaactgaagttttatttagaatgaaaaaatagacaacaaattacagattttaaagagctaaaaaattccacagatgtcacggagtccaggggaataacagcctggttggaggggcgctctccgcctcttctgtatttttggctctctctgagggtagtggttttaccagcatgctttatcaaaaactaaactatcagggagagtctacaaaaactcctgctagagtaaggtcagattccagaccctgtcgcacctctgaagaccttggtccagttccttccagggtggcttcacgccttgccatccctgcctccctgcggctgcccctgtgcccaggccccgccaacgccgtcaaggccccctcggccacgccgcgtccccgcccagcatctcggatgccattccttcccggtggcacctgcccaggctttgccgaaatcgaaggcaacaagagggggaggtgggcttaagagtgcctgcccggccgccacctgtcttggaggtggagggaatggccgaggggtggctcccccagctccccacctttgagcatctctcaggctgggaaagggcaaagggccacatgaagccagcaggcacttcagtgccacgtccccagagggacagtcctcccacccaggaacccctggctgcccagaaagcaccaccggcaaggccgcctccaccgcacccgtgagaggactcggcagctgtgaaggaactgggagattctgcagatgggccgaggtcagggcttccaggctaggaagaagtcttccagatgcctagcttcaccagtcccaggagaaggaaggaaggggcatgggcagaggcctggcaggggaggaggaagaggccaaccctgtacacaggaccacaggacagggtggaggactgtcccaggagtccctccacaacaggaggcctggtcccagtggcccctctctctaggggttccctgctgccaccatg

SEQ ID NO: 335031 - DNA, 1000 bp, Homo Sapiens
taatttaaatccaggagactttatttagcctccggaatggcccctccaaccccaaatccatgcaagaacacaaagccaaggggtaaactaaaaaaaagaagagattgttttattgtgacatttatgacattgaccccttgttgacaggaatgaccgagggtaatcttggcatattgcacatgctgtgatgaaggatgcactggtgatcctctggccactgaggctgtttcctggtcctcccagacctctatgcacgtgtgggccagtcaccgaaatttcattaccacttggtgtatacatttaacaagtctttggtcttaataagcaccattacaaaccctcacattaagggcattattattctagtttataaatgtttcaatgataaaaaatagcacgattacagtatacacacacttaatttacatgtaatgtattatactcataactgagataagctactgaactaactttggttgattgaaattaatgaagtattggaactgaatacttgtaatttggtttctaagttgtgtacatattacagtgcatttataaatctagtttgaaaatttactagcaccaaataggtaccataaatggacaacctagtacttgtatttggagaagcaaagtttacaaatttgcaaaaaatagagtagtccatcaattgaaagcacattcccgtacgtttgctggaaggatggcatgtcagcataaatggccaacccccaatggaaatacacgtcccagttttcaagaatcaacacatatgacaaggtagcttagctacacacatgagaagcctgagaaagtggttgttttgaactagggtagtcacctgtaccttgctttggtaatacaaagaatagtgcttatttatacaaatttacttggtgaaagattgtacctatgatatgatgattctgattgggggaaaatatagttctacctatctatatttgtttttcttttaattatttggtctctggatggtgaa

SEQ ID NO: 335032 - DNA, 1000 bp, Homo Sapiens
ttagtgctgtagacttttaattcatacctcctgctctctcacccgtggcagctgagttgggaacagtactgtaacaattgtaactgtaactccctgataagcctacaggcatggggtctggatgagtagacaggggatgtgatcagagctgactatgtttaaggtttcttctttcaccctccaaaaaacagcaaggggctcctgagatctcgacaaccccgtccaccttggccagacctcgtgctcctgcctggatctgaggctgggtccagggtctgcctacctttagatcgttttatctcagacctgcccaaagccagatgtagtggttctgggagttcagggacagacagtggttagcaatgagcacggtacctgccagtttgtcacaagcacagagggtgtgtttatacctgcacacttccagaaaacagatcccagaccctcagcagcccacctgcagacaaagaccaacttccttcattgtgagaggcaacctgaactcacacccaatatatggagctcttggcagtttatgagctttaaaaaaaagtgtccctggatccctggaaagttctgctccagaagctgtaccattttggcagtgatccctcaccccacgttcacattttagcctgtctgctcaaaacaaacaaaaaaaagtctttgaggggctgtggggcttgttggacagagtcccgctctgctcaccaactaccccagcttttccagagactgtgaacagagcaagacgctggccaactagagatggtttgttttccatctcaatttttccagcaatggtggaacattcattagatgctacaattaggttgcacattcattagattcttcacttggcccggtgtgctggctcacatctataaacccagcattctgggaggccaaggtgggaggactgcttgagcccaggagttgaagaacagcctgggcaatatcacaagacctcgtctctacaaaaattaaaaaaaattatccg

SEQ ID NO: 335033 - DNA, 1000 bp, Homo Sapiens
tgctggccggcctattattttttatttagagacgtggtcttgctatattgaccaggctggtctttaactcttggcctcaatcaatcctcctacctcagcctcccaaagtgctggaattacaggcgtgagccacagcgcctgtccacccttggcattttgtagacagcagcaatttccctcaaccccagaatatttggaatgttccagaagtcctcatttacagtcgatcccacctgtaccctataagtggtggtcctgggcttgaacttggacctgtctgaactctgagctcttaacccctgaggtgagaacctggggtgagctcttaacccatgggaccaacccctctagagtgaggagacacgtcatcatttttccttgcagtattacatctggaaaccgtgccgtgatgatctctctgcacccctcacaggcggctaacaacatcacaaacaaatcagccagaaccatcactcccgggtggggccccaagtaagccagttccccagggcccagggccctccagggtgaggtccccagcaggtgagattcagtgtggcaaggtctctgggagcaggtcccagcaggtaaagtccccgaccgccgacatcctcagtaggtgcagcctccagcagccaaggtccccagcaggtgaggtccccagcaggtgaggtccccaacaggcgaggtccccagcaggcgaggtccctagcaggcaagtcttctggaggggagaggctcctggcagccgtgaagcccagcgtgtgaggtcccaggtaagagagagggttggccacaaaggactccagcaggtgaggccccaggcagatgaggttcccggcagcccaggcaccatgccggcctctcaggtgaaccaagccgctatgctgcgcaccgtctggtacctggattcctgctgcagtttccagcaggccttgcagaaatccagtgcccagctgaaggagcgaggccgcagcgtctcccgccagcgaaagtagct

SEQ ID NO: 335034 - DNA, 1000 bp, Homo Sapiens
gatcacattgcatctaaaatatagtaattaacaagactttattcttaaataaaatgttgctttaataaaatactgcacatatatatttttcttttcaaagatgttatgagcaggatggttgttttgaatgataatgtatggtatactatataattagtagcaaaaacaaggactttcaaataaataggcttcagctttttttggggggtaggtgggtggggcagaaatactctgcatatcagatgagattgaaaaacaggcaaggagggcccggtgcggtggctcatgcctgtaatcctagcaccttgggaggccaaggcaggtggatcacttgaggtcaggagttcgagaccagcctggccaacatgatgaaatcccatctcttctaaaattctaaaaatataaaaattagcctggcatggtggtgcacgccggtagtcctagctactgaggaggctgagacatgagaatcgcttgaaccaggaggaagaggttgcagtgagccaagatcgtgccactccactccagcctgggtgataggtgcgccgtctcaaaaaaagaaaaaaaaagaaaagcaggcaaggaggagttggctagctggacatagtggcttgcacctgtatgccagctacgcgggacgctgtggtagggtgggaggactgcttgagcccaggaattcaagagcagcctgggcaacatagtgagaccctgtctcaaaaaaaaaaaaaaagagagaagatgttgacttttcctttaagaatgtgctcttggttggcttgggatagagaaaggagtcatatttaccctctaggaattaaaagtaacactggagtgacctgagagaggaatcctggccctccccttgtcattttgcccaagatttcagagcctaattgaaacatacaaaagcaccaccagagtcgccctctagccttctgaagatccagtggggtggatgtggagccagtggaagaatctggaaaaagcagagctgggctta

SEQ ID NO: 335035 - DNA, 1000 bp, Homo Sapiens; identical to SEQ ID NO: 157251

SEQ ID NO: 335036 - DNA, 1000 bp, Homo Sapiens; identical to SEQ ID NO: 157252

SEQ ID NO: 335037 - DNA, 1000 bp, Homo Sapiens
taccacattggaggcacaagtttattgagcacccggatatggaagatggcaccgggcacagagccgtgggactggcctgcaggccccgcaccctcaccgtgtgctgtcctgggggtgcctcacaagcacagcaccttggctccatcggctgcttgagagaggtagaaggtggcagtcccgccgtagtgctcctggatgtgccgcatggcgtggggagcagcggaggcctccagcagtgtcaccgtgcagccaccgaagccaccgcccgtcatgcggctgccataaaccccaggcacagcaagcgcagcctccaccagctggtccagctctgggcagctcacctcatagtcgtctctgagtgagcggtggctctccaccatgaggcggccaaaggctctgtagtcgccacgtctcagggcggccgctgcctgggccgtgcgccgaatctcccccaccacgtgccgggcccgccggaagccctctttgctcaccaggtccctggcagcctctagctcttccagttgtacctcccggaggctttccttgcccagcgcccgggccacttcttcacattggcgccgccgcacagggtactcgctggaggccagggagtggcggacattagagttggtgatgagcacggccagcttggggtccgagagtggcaccaggctggtctccaaggacctgcagtcaatgagcagcgcgtggcctttctgtcccataagtgagatgaactggtccatgatgccacagggcatccctgcgaagctgtgctcggcctgctgacacacctgggcgcgggcagctattgtgcccgagtctggacagagctgctggaggaaggtgtacgtggccacttccaaggatgctgagctggacaggccaccccccaggggcactgagctgaccaccactgcactgaagccagggaggggggcagctgggtagtactgaatcactcccttgacatagttggcccaccgaggagtcccaggct

SEQ ID NO: 335038 - DNA, 1000 bp, Homo Sapiens
ttttttttttttttttttttttttttacaaaagctttttattgattgaaatgaaagacattttctgaaatgctacaattaccatttcagggcttcagaaagactgagatactggcatttaacaagatacttagtggacaagagatcacaaaataaaacacaaaatgagacacggatgagttcatacgtaatggcttttatattaccttggatataattctttatatcactactgcatatttattacagtatttctaaacacaatttgaaaaaaagaaacaaagaaacaatcttggtacctcataatttagaccaaaagatatcagaacaaatagagccaccaaatatccatcttaaatactgtgtacatttaacagaaataatcatacatgacaaatgattcaaatttggatttaaaaggatcaaataattagccaggaaagcaaaatgtttttaacatattatatataacacttccatttgagaatcctagctgctaagatgacttgaaaatatggtctaggattcctaatattttaaacatattctcctatctacttaaataaaagtttgctgtatttgcataaaccaatattgaatttcagacacttgatggcttggctagacaactgtattctgaaaagcatacatgttataagctgtgtgacagtgataacaagaaaacaaaacacaaatctgcatctggtggagctgaaatcaggcctcttcaattcggcagatccacattctgaaggatgagggccactctgcttggaatgtacaccaaaagagaatagggacgcccattatgttcaaaagcctcagaaaaaaagtcagtgctgtggtccagtctctgatgccctccatattccgctgcatctgaatctagcacaattttgaatttccctggcaatgctgttccaactcggtagtcagtgtagctcttgcttggatggaagttgaaaatgaaaagaagacctgctctttcaaaagcaatgatc

SEQ ID NO: 335039 - DNA, 1000 bp, Homo Sapiens
cacggtgaccacttgagctctttattgttggaggacatttccatgcacatgggacgtgccgacatacgtggggacactggcacgcagttcacggcacagcccccactcccgccctggactcctctgctcacctctgcaccagggacaaggcaggtgcagggagaggaggcccaatctcgcagacagccacactgggggtggggggtaggtgggggctgctgttggctcccccgcccccagcctcagctgggcgtccagttctgggttgtccagcgacgcctctgggtgccagagtccagccctagctggggtcccagcagggttcagaaggggctctcagccaatctagggaggccaccagccaagggggtctccgcagatgaatcctggctgccaccacccctcccaaactgcagctccttgctgggagggccgtggccgggcgaagatgaggccctgtggttgctggtgttccgctcctcccatagcactttgcccaggcgccagcggtgccaacgccgccgcagctccgactgcacctccttgttgaggaagcagtagaggacagccaccagcaggccctggaaggagctgaggaagaggtcgaagaagagcttggcggagcgcagggtgccctgggcgtgctcgtccgtcacgaaggcaaagaccacttcgtggacgcccagcagagggatgagggtcagcgtggacttggccagccggaacttgtagtctgtgtggtgcatctgccgtgcccgcagcttggccacgagcagctgaacgatgcggacgaagatgaagaagttgatcaggatggccaggaagacggggaaccgcaggatccaccagaagcccatgttgtcattgctggtccagcactggacgttctcgaacagacacttgaccactgcccaggggacgacgaacagcatgggggcaccccagccgatgcccaggtagaggctgaagaagctcctctcggggagggtggccaggccca

SEQ ID NO: 335040 - DNA, 1000 bp, Homo Sapiens; identical to SEQ ID NO: 157254

SEQ ID NO: 335041 - DNA, 1000 bp, Homo Sapiens
atgtttatactaaattaaaactttattgaataaagaacactctccagaacacatgatctgatggactaggtctacattacatgcaatgaagctgaacatgaccgtagtttaacatggaatgtcaaacaaattagtaattttcattgtacaaaactgtttatgtagctgacatgcatgcaagaagaaaagtgtcatactcagcattttcaccaatcttctgtgatgagttttaaaaaaggcatttggagaaactggtagatgtcttcaacatatagttcaaataaattagttgtatgtgtactactgaatcctctttcaacctctcttgcattccaaataaaatcttagtgcaaacatcaaagttgctggtcactccaaaagactgctaaactcataatagaatacaagttctgaattactgtgtattaagtaggaaaacccaagaataccagttactgcaaaattcatttaggcacatttaatagtccactctaagcattttttctaagtctctcacattaatgactaaagcctgtttacagtactaaaattctatcattcaagcatcaatgattacatttcagaaaaaggaaattcatttcagtaatagcattactgctatatcctaaaaaaaggagagaaaataaagaatcataattaacaaaaccagtatccataataggatacacagggaaaaacattttaggagaaaaaaaaagtgtgctttacttgccacagcaggaattatataatgtaaacaccatattggcccacaccacaaaaatccatgagaaaggttcaaatttgaacaccatatgtgcattattttcaaatctgtgtttgtgagtttatactgtatctgcttgtaccaatacatgacaaacaaaacaaactcttcgacacacatataagtgattgttaaatattaagcatggcttgattccctgactttagctcaaaaaaaaaaaatgttaagtgacatcccaactgtcttaaaaat

SEQ ID NO: 335042 - DNA, 1000 bp, Homo Sapiens; identical to SEQ ID NO: 157255

SEQ ID NO: 335043 - DNA, 1000 bp, Homo Sapiens
tttttttttaaaaagagggtggtttgagtgtaacaatactgattcaaaactgaaatggaagacagtttctccctagaatactttagggtttttcagagtccttttccataaaaggaatataattgaaacacatctcagttaggtgagatgagattgctaaaatacatacagaactaaaaaaacagccaaaacaaagtcagtttaatctcttcaactcctattgatttccgttggttgcagtctttttttcctaaagcctattgcataactgcaaggaatttgctttcttccgctagggaggtcagcaaagaactcatgtccccgatagccatgttggtggtgctcatggacagcgctgggaatgggagggacgcccgaggcgtggtgaggcgggaggagctatgggaaaggttctgaatgatacttgggctcagggcccccgacatcaggctggagtggtccccatcgtctatgatggcatcgaagtcaatctgtaccccttccaggtcatggctgtcgaggctgtccactgtgcttgtcacctgattagcacctggggaaagtaactcagagtttttggcgctggtcccctgtagcaggcagctggcgtctgaaatagagaatgaaccagctttcgtgtcttgctgactgaagcccacggtttggtcatagaactgaccagagtaattctgcagattagagcacagcggatggggctgccctttcatctccatcttgataccattcaccctgcaggtctgacttgtgtcactgagctgtcctgactgcagagcaaggctgtccctcggcatagcctggcgcctgctgcccccaaagctggcacatggctggtagcccctgacaactgccaagcttgacggctggctgcccatgccgtgagcccctggcaggcagctctctggcccttggtagatgttgatgtgtgaggtagcactaatctgcccaagcatctgctgaccggggcggcctgcccccgggt

SEQ ID NO: 335044 - DNA, 1000 bp, Homo Sapiens
tttttttttttttttttttttccgatcaaaatgcttttattagaatactaataaatgcagattaaaaaaaaaaaaaacctcacacagaaaaagaggaaaacactcagaaatgtgattacagattaggcatattagaggaaaaagagttcttcagggtatacaaaatgtaaacatttgccctgggatttcccacagatggcacagtccacatggactcttttggaacaaaaaaatgtctattaagtctccaggatagcctctatgacatctgcaaacttgccacattaaaagttaaagttcctaaaactttctacgcaaaacacaaaatggctcccaatccaggcaactggcacatgtggaagcagaataccaaagcaaatccgtcttccaaccatcagcttcgactccctccagctactgtatttacatttaccttgacagagattacagagatatacacagtatataaaactcctacttgaggctggggtgggagatgaaatctttcttgcttatcaaatgctctggggagaggcatcaaatcagtcctttaaacttagggagagaggactaagaagacgccctcttttgttcagaaaatggagactcataaacttccatgggtgggcaggtacaaaccaggtgctgatctccatatatgtcatcaatccgggcaatcgttggccagaatttgttctctggtttcatgaaggggagtgggaatgctgccacctctctggaataaggccggtcccagtgggaagatgtaacgcaggtcagggagtgtggagacatcttcagcggattgaccctggggtcgatgcggccctcctcaatgtcagcaatttcctgccgaatgctgatcatggcatcacagaatctgtccagctctgccttgtcctccgactcagtgggctccaccatgagggtccctgccacaggccaggacatggtaggggcgtgaaatccataatcctggagtctcttggccacatccaca

SEQ ID NO: 335045 - DNA, 1000 bp, Homo Sapiens
ttttcccaaccctaaaattattttttattatacagataatatacaataatagtggaaaactagaaaatgctaaacagggaaaaagaaaataaaaccacccatatttgtaacatccagacacaacgagtgctcacatcctgataaatcactttccagattttcttctgtgcatagatgcatgtgggaaccatgctgtattctgccaaaatggttcaccgtgagatctggcagcgccccatgcagcatcgggagctttgtcttgtccccccgccaagtccatgtcattaccccttctgctttggctgggactgaaattgtgtgcctgtgttgtgaagacagggcttctgatacagaaaaaggaactaagacccctcccctatcaccctgtgttccttacccctccaacccccaactagattccaataggagagcccacaggctcttctctcaaggtccccaaacctcccaccctcagaggctgtggccagagtacctaatgctcactgtgctcagcaggtcctgaccacgaccctgactcagagctgagggcctccttcctgccactagaggccccacacggccattaggccgtacccacaggaagaggctggagcggaaagtgggaagcgaacctcgaaggaagagcagccaggcccggggcactgtcacttgccgtcccctctgcagctccaggtgtgtggtttgtgtggctgtggtcagagcagcaccttggccagagtccagggcctgtggtttcacatgcccaacccagctcagcagcaggatgaggaccacagaggcaaagagcagccagaagagacccaagacatagaagcccagggggaggaggcagcaaaagtcggggtggagaaaagggtcatttctggagctctccaaatgcccttggagcaccccacggagctttggtggctgatcaagttcagggatggtttttttggtggattctaagagtgatacgggttttgtggtagttaaaaat

SEQ ID NO: 335046 - DNA, 1000 bp, Homo Sapiens
tttttttttttttttttttgaatcagcaatgcagttttatttaaggcagaattagggaaaggctatgcccctccactccccctcctcctaccactcagtcctatcccaagtcaggcactggaacctgctgaaaaggctgatgaggggctgacaggagtggggcagggttcatggacctttacctcagagcagcttaccctgagctatacccacatctcaaggatttgggggcgtctagatctcatctaagggagacacaacttttctggtcctcagatggaaagctgggggaaggtaccagtatttacccttccataaaaactttggaggtctttaggaggatacccctcaggagggctaggagaggaatgacaaatacagaggatagaaggtcccgtggcctggttgtgccctcacacagggtatgggttgtccaggactgccactcccgctgccacaccaccatctgcatgctcgatggctttggttcgaagtagatgccccacgtgcttgttcatcacgagtgtcttttcctgcctgacatagaccccaaagatgcccagctctgaaatgcactggaccactcgggcagggctgccaggccgtagcaggcaattctcaaaaggctcaggttcgatcttctccatgaggatgtaggaggccctctcctcactgtccttcagctgtttcagggcctgtaccatttcctccccatataggttgttacctccaccctctctctggggctttagcacaaaccggctaggggcagcaagggcctcggcgatggcctggtccccttcttcacccacatccagtgagtagaggccagcaaaggtggcgcggaggcgggccacagcctcaggctggccagggagcaacatctccagcatgcccggcctgcttagctcctgctgcaccttcttagtcccagccagctgggtggcaatgtctgggcacttggcagcatgtgacctctccagcagtagacgtgcttccc

SEQ ID NO: 335047 - DNA, 1000 bp, Homo Sapiens
tcatttttaaaaaataaagtttattagatcataatgttgtctgaatttaccacctttggtcagaagtcaactcaaagcttccaatgtagtcagtctataattccttaatcaaagtcagcaatttatggacagcttcagcatctacagttgacctttcactagccaggcaaacttcccgaaataatcgtagtgactgattcatcttctcaaattctcttgcttttctatgtcccttttgaataacttcctctgggagattagcaagccttgctgcattaaagccatagcttttaggacaagctcccttaatgaatttatagaggaacgtaatagtctcctggctggggtcttcacattcattttctaccatgcatgccatatgtcctaggcgcacagcaacattttgagaataatcttctactaatgaatggtagtgagttgaaaataatgtacgacattttatagtctcagcaagttctttaacaactgcatttgctattgccgtcccatcaaatgttgcagtacctcttcctaattcatccacaagcaccagagaatgtgctgttgcatgcatgagtatgctggcagtttcacttaattcaacaaaaaatgtactttcacctgacattattctgtctgaggcaccaagtctagtaaacactctatcaattggtgtgagcctgcacacttcagcagggacgtaacaacccatctgggccattacagctaataagccagcctgtctcataagcgtagacttgccccccatatttggtccagtaacaagcacacaataggctttgccattttcctgctcctcttcctcacagcctattagaatgtcattaggaataaaatcatctccaaaaaaagtcttcgtaatgcaaggatggcgtgatcctttaagctctaagaaggggggggtatcttccggcaacagaattactgggcgacacataggaccatcaccccctcgactatagttagccaggcacagtaa

SEQ ID NO: 335048 - DNA, 1000 bp, Homo Sapiens
ttttttttttttttttttttttttttttttttttttgctggggaaagaggtttaatatcccggtacaccgtggtgagaagcctgggcaaagcatctgcacagacaggtgtgtgtggttgagcccaccaggtcccactttctctcatcccagtccctccctaaggtgctgcctagaattctgcacacacattcttactcccccaaagcacagggctttcttccagattgctttttgaaggaggcgtttaaaccagaagggcaaagatgctgacacagagtttggtttttattgttatgtgtttggctgggtgcagaactgccctcaccacccctggccaccctggcctcttgggaggaacaggcagagaggtggcttcagatggctcttggctgccactctaggcctcggggcttatacaatgagcagtgggctctaccttccaataggaagtgcaaactaattcgaagtcacacttcaccaggagggagagatggtcttggctgaaggcactttaatcagggagcaaacccagtgccggagtttgtcttctcgttactctgataaatctagacaccactctgttggagaaccagcactgccggcagctggggttagtgcactgactgagcgaggcatgaggcctgctcactggtagaacttcttgttagggctgttagcatggtcagctagcagctggcatggggtgaactgttttccataggcagcttcatatttcttgagccggtccactatcttctgggcgccatacagatccacaaagcggaaaggccctcccagacaaggcgggaagccaagcccaaagacggctccgatgtctccctctgcaggtgtggccaagatcccctcttgcaggcacatgactgcctcattcacaaatcttgtcaccaggcggaactggatgtcttcgtctgatgagacttcagacttaggaggcagcttcagactcgctaaaatactatccatgtcagaattcaaatc

SEQ ID NO: 335049 - DNA, 583 bp, Homo Sapiens
gtgatctcttagcagaatagatttattatttgattgcttgcagaataaagcctatccttgaaagctctgcatcatgggcagtgagctcagtggtatctggaggacagggcactggccactccagtcaccatcttctgccaggaagcctgcacctcaggggtgaattctttgccgaaatggattgccaaaacggtcaccagcacatttcccaggagcttgaagttctcaggatccacatgcagcttgtcacagtgcagttcactcagctgggcaaaggtgcccttgagatcatccaggtgctttatggcatctcccaaggaagtcagcaccttcttgccatgtgccttgactttggggttgcccatgatggcagaggcagaggacaggttgccaaagctgtcaaagaacctctgggtccatgggtagacaaccaggagccttcccagggtttctcctccagcatcttccacattcaccttgccccacaggcttgtgatagtagccttgtcctcctctgtgaaatgacccatggcgtctggactaggagcttattgataacctcagacgttccagaagcgagtgt

SEQ ID NO: 335050 - DNA, 1000 bp, Homo Sapiens; identical to SEQ ID NO: 157260

SEQ ID NO: 335051 - DNA, 1000 bp, Homo Sapiens
ttttttttttttttttttattttggaaaatgttaaaatttattaataatagttaacatcacatagttaattaaactagttatgtattgtacataatgacaacatcttcactagactgagtgctcaaggatttgagatgattcgctattcatcacaccccgaagattgagatccactgtatttacacaaagcaaagccatgtcagcaagggactgtcaacctgattctgagaacataaacattcaaaatttattttccagtgttcctttttggaaaccaacaacacatctttaatacctacacacacacacatctctacctttaaaaaaaaaaaaaaaagtgtaacttcacagatagtacctaatcttcaagcttaaaatttaagttaaaattaatctctattttgtgggcaccctttagtgaactaaaatctacatgaaaccttttggcttttgtgtagcaggaaatacccacgttttgggtcaattagtgcagatgggagcagcagaggagctacaccagacagcaaagcaagactagagcaaacgagaaggaccagcccctagcccctctgtgctcccgggaggacctgggctgttttcacctaattacacccaactttgcttaaaagtcgtataatcagacactattctcagcacaagtttgataaatatacaaaaaccaggttcaatttcatcgtgagtttctttccattctgatccttgtatccaattcaatagttacatccctctttatcatatagtatccaggtttaatgtctgtgcttgtttgtattttaggacagaggcgggctttcagattcagaatcaactgcactcttgaaaagtagggatggaagtttttaagccactctcatccctcccaatagtttgaaataaatgttgtgtataaaaaaaagaaaaacacaaaaacaggtcagcagaccaatgccagctcagcctagggaagcacatggacaattcttgtaaaacatttaaaat

SEQ ID NO: 335052 - DNA, 1000 bp, Homo Sapiens
ttttttttttgctggaattatgatgtgccattcaacctttaattacataagctgttttcaaaaatcacattcagcgtggagattttccagagatgctggagttggcagacggccaccacgtagctctccactttccacaaatggcctctgccagcttgggaagaacctccatgacctgtgtcctgagaagtcagagagcaagggccccacggccatggcagggtggagccgtgtagagggtggccaggtggccagctcgcggattccatccagagaggagactcaaggatcatgctaagtagggaacggggttcccacacgtcctcaggcattcaactcctgggccagggtccgtaacaaagggagacttcagccctcaaagcctctcactcctcaggtctgggcaggaggtccttctgccaagcagctcctcctgcccttcgcctgctttctgccaggagagacctctgtgtagagctggctatgaggtacctgcaccatttaacctattctcatttccatgtccccatccatgaatcatctgtgtgtgcccctatttccacatcatccccagggcttcaggtgggcaaggggctcagagtttacaggtagcctgagccactttggagctagtttttctgttcagggcttgacagataaagtttccagcttccagaagcttctggagattcacacccgtgtgaatgcccaagccctctagcatgtagaccaggtcttctgtggccaagtttcctgatgccccctgtgcgtagggacagcctccaagtcctgccacagaagagtccacgacactcactcccatctgcagggccatcaaggtgttggccagggcttgaccataggtgtcatggcagtggacagccagggcagccagaggcacttcctgcatgacagcagatagcatgtctttcatgatccctggggtgcccacaccaatggtgtcccccagggagatctcgtagcagcccattgagtagaa

SEQ ID NO: 335053 - DNA, 1000 bp, Homo Sapiens
aaatttttgggaatttattgatttgcatttaaaagggaactgctgacaaagattcactggtaataatttgaacaagttggaaaatacagtcaacattactgaaacactactaaaataattccaggacagaacaaaacttcttagatgctgtctttgatgtgaaaattgactgcttcttacttttctaacacacggtggtataattaacaatattcaatcacttctattctttcctgcatatataaaaattaaaataccaattaaaaaactaatatatcttctctttatttcttacagatatgagttcaatgtttcactcaatagtgctgtggtttaagagaattttttcatttacaagttaaacaacaatccgcccaaagggaactgatagtctataggctcatagtgcaaataaacagtttaggaatgcagcaactgacatttctaaagtacaaaacagataaaattcttagaagatacatgcaaaaagctctactaagcagatggccacagaactagaacattgataattttactggcgatgtcaataggactccagatgtttccaaactcaacttgaactctcatcttaggctttgtattttgcttttccagtttcactaatgacacaaacatgattcaaatccctgaagtattcattatagtcaagggcatatcctacaacaaacttgtctggaatttcaaatccaacaaagtctggcttatatccaacacttcgtggggtccttttcaccagcaagcttgcgaccttgaccatctttggattatactgcctgaccaaggaaagcaaagtctgcattgttttgccagtgtcaattatatcttccacaatcaagacattctttccagttaaagttgagagatcatctccaccaattacttttatgtcccctgttgactggtcattacaatagctcttcagtctgataaaatctacagtcataggaatggatctatcactatttctattcagtgcttt

SEQ ID NO: 335054 - DNA, 1000 bp, Homo Sapiens
ttttttttttttttttttttttttttttttttttttttttttttttttttttttttttttttttagaagaaataaaaatttgtctttatttaaaatgtggcaattgggaagtacagtacatgcttccctgtggcttgggggtgtgtagttggggccctaattcttgagccagtcaagagacacttgggatttagccctcaattgcagcactgaggcactggtgccgagaaacaatcctgagggggtccccaacccacctagtcactccttagtttgcagaggcactatctgcagagtcctgtgaaaggctgcagtgaagtcttgcatgagactccccatccagcggagttctccaagctgcagggtagagcgttgtgccaggagggtgtttgggctcatgaaacagtggagaggcgcagaggctcactgggaaaccttggcctcaccgggcctggattgggcatcggcagtgggcatgaagtgggggtgggattctttaggccagggtccaggacacttgggggatcgtaatgctgggggttttcggggaggaaccaagggctcacggagcctcctgtgctgcagtggctgggccataggtgcacatggctcaccgagccactgctggggaagggccggggctcaggtttgggccctgggctgcgtcctgtggtggggtagtgccaggctggccaggctgcagtgctcgaggcagacagtgactgatgaagaaggcctgcaggaagcggcgccgcaggccttcaggcaggtagtagtggatgaagtacatgagccccaggccctggccggggtaatagcggcggcggggccgagctgccagcagcgcatctgtgatggcatctacaactggggtgaggtcggacatggccaggcgtagcgagtgcaggaactgcccatgcaagtgctcgatgtagtccttgccgtaggcctgcagcagctcttgaggcaggttggccagcagcaattgcttgcgcttttc

SEQ ID NO: 335055 - DNA, 1000 bp, Homo Sapiens
ttttttttttttttttttttttttttttttttttttttttttttttttttttttttttaacttctgtatattttactaaaataaaaagcttttacaatagctggcctgtggcctcctccagcccaccccagtatggagtgatagggagggaagggcaaggggagcccacctactcaaggaagcgccctctccttcgaggggtgtccaggccgaggggtgtccaggccgggcttctgctcccgaggtgggtggaggcagggcaggaacggcacattctcccagcaacgccgacgtcatccaagaattaacccaagccagaggacgggcatcgccacccagcaacgccagtgtcaccgaagaattagcccaagccagaggacgggcattgccacccagcaacgccagtgtcaccgaagaattaacccaagccagaggacgggcatcaccacccagcaatgccagtgtcaccgaagaattaacccaagccagaggacgggcatcgccatgccttcatcttcggacactctcaaaaaagataagcttctgcccagaaacaccacaggttcaagctcatcactcagggagcctgctgccaatcagctgaaacctgcctggggaacagggacttgaccatggggcaaaacagaagaagcagaaacctgcccaaaggtcgctcaaaggcttcctctaggccagacgctggtaagagccaggcgccgtgctcccaggtgagtgtcggtgggacctgcgtactgcccacgcggcaccgaagcccctgcctgctctctgtgaagggttcagaagtatctgtggctgccaaagcctgaagagggcctcaggcctcccatttgcaggtccccaaaccaagccagaaaacaagactcccttgtcctgggctgggggcactgccctgtccgcagaccacgtatgtctagaattcccgtgctgggacatggttcagacacaaggacaactgtgtcccctgccatgacggcagtgc

SEQ ID NO: 335056 - DNA, 524 bp, Homo Sapiens
aatgtgcttgaattttattgcttttggagaggaatgaatttctattactcagaaacagcagtgaaaacagcttaacatttaaattgcaagtatctaatcaaatgataattaggaagggaagtatcctgaaacacagaattcactaaatcatggtatttcttttattctgcattgccttatgataattcttcaaaaagcagtggtagtgtgatgcggtatgacaaatgagaatacacgagtccaaagcgaatttgccagtcaaacctccataatcatgccccatgattactgaagatatcaattgtcatacagataatttgatctatagcctcgatgtgaatgatgcttttcatggaattttcttttatacccatgatgtctctttgcatgtgaatcagctccagtcatggaaagcatgagagccaagattaaagcaaaaacaaaaaacttcatagttggctgagtccttttactcaagaggagaatccagaagtcagtgaagctgaagtgaagtctcaagagat

SEQ ID NO: 335057 - DNA, 1000 bp, Homo Sapiens
ggcagttgagaaagctttattaactaacacaaaggaagtctgggcaatgttgcgagaccccgtctctgaaaaaaaaaaaaaaaatcaaatttgccaggtgtggtgttgtgagcctatggtcccagctactcaggaggctgaggtgggaggatcacttgagcccaaaaggtcaagactgcagtgaaccatgattgcaccactgcactccagcctgggtgacagagcgagagcttgtctacacatacacacacacacacacgcggatgacccttccaaagctgggagggagtcctccaataccttggcccccttccccactgcttgcaggaccctgatcactgcaggaaactggagctgcaatagtgcaagctcccagtgaaatgcaaacaggacaagaggacaaggcatagcttgggcatattccctgggcactcatgtccagacatgaccgctgagtgtcattgtgaacactggcagaaatgtatgtgggtggggaggtggctaacaaaggtgtcagttttggggggaagggaggaataaggcctcactgggtaatctctgaacctgtgaaccattaccagtccatatagtgcttttgtgccgatagaaaaatcactccttctggggaaaggcaggttggccaatgagaagtcccagccccatttgatctttttgccaggcactctcctgcagtgtacaacctgtacaactgtacctggtgaccttgaatgtgacatggactgggagctccgtgaggccagagacctatgttcatttagcctacataaaagacactcaataaatagctggtaaaataacaaatgaataaatacatatcatcaagggttggggtcagtagacagcagtgcccaagctggcatccgtcaggaagtgtgggcctttgtgttttgatgctacacatgtctatggagggccacttcttctgtaagtctgtgggcctcagcatacccaataggcagcaagtttcagtatttcccag

SEQ ID NO: 335058 - DNA, 1000 bp, Homo Sapiens
ggaaaaagaaacatggattacatgttaacataatattttgaatatatagggctcataagatatattattaaattataaacaaaataatcaggaacttagtgtggtgcctagtttgatatatgattactttttgaaatgcactaaattccacaaataatgaaagtattctttgtgtataatgttatgtttggttattatgtatggtcttcgtatccaaaggtatgacataacttgagtttgtttgctttgtatttattcagtaaataagccgtaactgttttaaaaagagggaaattaaaaaaaaaactggtccaattaccaattataaattttaataaagactaaacgaaaaggtttggctgttacatattctcaggccaaattgttgatgcatgtttggattaactagccctcaggctgcttccaatattatgggtaatcacaaaacgaccagctctaactcctcctctcaccagctggaagggagcacatcacatttgccatccatggttggcaaaactcaaggcatcaacaactggaaaagatctccaccttgggaatcattatacatattgtgatcctgcaatgggtcagaatccacaaaatacagttcccctgcatggatgtcagaaaagttagctagaaattcatcaggattgaagccaacccacacagtatacctatagtctatggtgcgtatggaatagcccatgatctttatatcttttaaactcggcttgtcagaattccactgagggatgtctgaaggccggggatactggctataggcaatcagttcacggggattaccagggaggtacggatcctcttccaagtcacggaatcgaaaatgcttcagaaggttcttgccttctctgcacagctcaacgtgaaatgaaggaacggggcagcgaggtggaacctgcagtcctgcaagtccagccagcgtgggaaaaagagacacaagttccacaaggtccatggattgcctgcctggctc

SEQ ID NO: 335059 - DNA, 1000 bp, Homo Sapiens
ttttttttttttaccaagatataaaagaaaataataaaatataaaaatatattgcaaagggggtgatgggagggcagcatgggcacagtgcagccccagctcgctgactgccggtggaggtgcaacccactggggctcagcacaggctcatggattgcccggggatgggggccctcttggcacagggacctccaggtacggcacagggtccgagaaggggcctggtcgggcccagtagtccagggctcgaactcggtaggagccagagacagcacctgtgtctgggctgaacacaaagaggttgaaggtcgatggcttcctgctgaccggggtgtacgccttaccgtcctgagagaactggatctcgtatgtccacaggcacttggagcccacgtgttcatccgaccagaccagaaccagctgcccttgggtcaggggcagggcgcggagccgcgtgacctgcccgggcggcttctcggggcgcgcacacacgtgcaccagcaaaagcgacggcagccgcagcgcggggcgcagggtcaggcggccgccggcgggtaaggggcggggcgccgcggccaccgggtcctcagccgcgcgcatgcgccggaactgctctgccgtggggaagacgggccggcccaggcgccgccactcgccgtcggggctgcagagcccgttgtccaggtagcgcgtgacgtagaccaggcccgggccggggggcaccccgcgcagccgcagggtcaccgcgacgctgcggttggggtgggcgcgggtgtcgtcgctcgcgtagatcagcaccgcggcgcgccaggcgtcggccgggccctgggggcggtgggcgctggccaggacgcccaccgtgtggttgctgtccaggacggtcccggcctgcgacacttcggcccagagctgctcctcatccagcagcgccagcagccccatggccgtgagcaccggcttgcgcaacagctgcacgtgcggcgggcgggtgttgttgacc

SEQ ID NO: 335060 - DNA, 1000 bp, Homo Sapiens; identical to SEQ ID NO: 157262

SEQ ID NO: 335061 - DNA, 1000 bp, Homo Sapiens; identical to SEQ ID NO: 157263

SEQ ID NO: 335062 - DNA, 1000 bp, Homo Sapiens
attgaagttttatttttttttctatacacgtgattgattaacaatataattaatgggatgtcattttataccctgacaagtttaaatgtaaataaattggcaccacctttaatcagactgatgtcctgacttgcacaggaaacacgcacctaacctcaccaacctcaagccctcctcaagtctccatgcaaagactgtgccagtcagagtggagctgtccccccgacgagcccccagaagcaccggccggccatggctgtcattttgagggcggaaaataactggatttctggttaattggtgacatcctcaagagctgtggccaagccatgtctcggccgcgtgatggggcagacatggtgggtcctgacggccttgtcttcaccaagtgctcctaactctcagcaaacttggggttcatgaccgtcgtggtggcgctcttgaaaaggggattatcattgttccactgggacttgagcttctccttctcaaagcgcctgtactcccggaggtcgctcaggtggatcagagccttccagatgaccagcaggagaatgccgatcagcacgatgcctgccacggtgcccccgacgatggcggcgatgttggggcctgccacacactctcggctctcatccacatagatgaggtagcggtccatcccgtcctgctgctccagcgtgtaggccacccagcagccctctgagtccctctccttgcaggtcctgcccttcacggggttgttcgacagctgcaggcccggacacgccgcgctgcagttcttcccaaaggggcccttttcgaacttcaggcactcggcgcaggagatgtacttgccacagggtgaggggcagccggggcactcctggcacagaggcagctggtagcctgaatggcactcgcatacgttgcagcggcaccggccacgaccactacactcaacacgccgcgggttcaggcagccctcagtggtcctctcgcactggcacgctgagccctc

SEQ ID NO: 335063 - DNA, 1000 bp, Homo Sapiens
tggtcttcaagacctgtgaacttcattccagtagctcagacaagattcctgatttgattcacctgttaaatacattttcttccccctttgatacagtttcttcatataaaacatcttatctaaagaaaatgtcccattaacactctcatggactctgtcttagtaactgaagattataatcacaggcgtgagccaccacacctgtcttagtagctgaaggttataattacaggcatgagcttccacacctgttccctgccactatttctaaggacttcttggatccatgactatccctccccgccccctatttatccctctaccatactgccattccctacagtaaggagtaatccatgggtgagacagggctcagtcattgccccatatctaattccaaggcttattctcaatgttaacacaataatacagaatagatatttcagctacttatggattcctcttccctaatatgtggatgcaaatgtgtgcaaagtgaagaaagaaataataactaaatgaagcttaagtgctacatcaggagagacgtaactattaacaaatgttggaaaacgggtttggagagaggatagaatgagactttcattgagaaaggtgatatggaatgacatctgctcttgccaaagccaggtctctcagatctcccaactaaaaacacaaacagtatcaatatcccagagaatcttaaccgcacatttgatgacacagtaagtcccagcatcttagaatgttgatactgaaagagaccttcaagactggctgctaaaatcccatcatttctcaaactagaaaacagctttaagaagaagaaagtgacttgccttaattaaagattatttagctgtaacactgaggccagagctccagttttctgctcatggaacaaatgttgataagtctttctttttttcttgggcatttgggggtggcttttaatgttggatgtatgtcaacaccaatggagccactgcttttctgg

SEQ ID NO: 335064 - DNA, 1000 bp, Homo Sapiens; identical to SEQ ID NO: 157264

SEQ ID NO: 335065 - DNA, 1000 bp, Homo Sapiens; identical to SEQ ID NO: 157265

SEQ ID NO: 335066 - DNA, 1000 bp, Homo Sapiens
tcatagtaaatggctttaattttttagcgaaatctcactactgcaaatgcattgttgtcctagctaatgaatgcatagagtattgcctgcaaaataataattgagattctatttttaagaagcttagaacagtacatggtgcatagcaaagactctgtgtatgtgaagccagattttaaaatatggtaacaagtgtctgaaaatatgtggctcaatttgtctcccggttacttttccctctccccctttaaaatgtagaggaaggagaagaagagataagaggtttgtgagtgaagacaagggccctttaaggcctgggaagactaacgccatagggatctccctctgccttaaaaggcacaggaatcttagtggggaaaaagaagtggtgataaatagccagtccgtgtgcctggaatatcaaagtcagtgcgtgccagggatcacactgcgggtcacgtgcactctgggtctctctctgcaaacctgccctgcctcagtctgggaatatgcaactgcctaagaagggtctggcttacacaggggccatgagacgtggcaggcatagctgggctgctactggtcatgaatcctggacacggcaggcaaggtgtggtgtccatatgcattattcgggtggggcaaagatcacagctctcactagactttcagaggactttgtaacccaaagaaccactcatctcaaggactgtggtaactcaggggctgagccatgccagtgtttattatgtgaaacaaggactggaacctcacaagaccaagtctgtccatttgaggatggcccaagatgcacacgggctgcttttatcttatgcgcaggttttaaaaaaatatgtttcatttaaatattccatactcttcaggaatgcccaggcagctgagctttcaggatgtcgcattgcagaggactccaatgctacatatggcagctggagaccctttcaaggcaggtggcagaacggaggccctctctatctgc

SEQ ID NO: 335067 - DNA, 1000 bp, Homo Sapiens
gaattcttcagaactgtcaacaattggacaacatacaggaataaaacacgtggaacaccaacatcctttaaacttacgccgcttatgtatttacacataaagttactgtatatataaaaaatattttcaaggactcatgggcttgggaatattcaaaagacattgacaaaactctcaatgaagtgcccctgaagtacctagacatctataactaacaaccacttttcttactatcattgaagtcaatagaaacacaaaggaatttttcagacaaagtatggcaagacaaaactctcaatgaagtgcccctgaagtacctagacatctataactaacaaccacttttcttactatcattgaagtcaatagaaacacaaaggaatttttcagacaaagtatggcaaacaacaatctcttgggtgacaacacaaccccaaaatctgttaactttggaaaggtgcgagagcatagaactccagtgcaaatggttacttccagataacggccacagttctctaaatgtagtctaagaaatgtagaagggggaaaccataaaggcaacatacctgaatctttcaagacaacacacaaactctgccatgtacacatttgccttttatattgggcagtgaggaaggggagttttttgttttgttttgttttgtttttaaagaggtaaactacaagaataatatccaggctacagtctaaagggtaaaatttaaatgtttcagtgagacagtagcattatggaaggtctaaggaacaggtacagtaagatgagtctaaataacagagtgccttaagtgcaggtgaactgcaaatacatagggactgatgccttccacttcctctgcaccactatggaagcttctggtaagctactctagacagctatgtgaaaagaaacaagagcagtactaataatgaaagccaagttacttttcaggtactaaaggaccctcttggactcagggcaaaaatacccctccaaatattt

SEQ ID NO: 335068 - DNA, 1000 bp, Homo Sapiens; identical to SEQ ID NO: 157267

SEQ ID NO: 335069 - DNA, 1000 bp, Homo Sapiens
cagggggcaaagttattttatttagatttttttaaaaacaaactttttttttttttttttttaagacggaatctcgctctgtcatcaggccggagtgcagtggcgcgatcttggctcactgtactctccgcctcccaggtttaagcgattctcctgtctcagcctcccgagtggctgggactacaggcgcccgccaccacgctcagctaacttttgtgtttttagtagagacggggtttcaccatgttggccaggatgctcgccatctagtgaccttgtgatccccccaccttggcctcccaaagtgctgggattacaggcgtgagccaccgcacccggccaaacttttttttttttttttaagttacaaaaacagacaaccatttatacttaggaagtttcacactctgggaattagccattgtgccaggttttgtgagcaaaaggcttaagacacctcagcctgattaggtggttgtgaggatctgggtcacattttccagagcagctctcaccctggccacagcaccagcctcttctctagaacttgctactcttaactcctttaatatcaaacttctttacccttcaaggtcccttcagcatggcccttgccctcctgtctcttctttctctgcctctcgctgtaactcactgctcacacttttacctctgcatctccacacaccaaaccttccaacaaaacaggcttctctctgcaggcaattcacatccctcacctccttcaaactctacctcgaaactcctcttttccagaaagcgctcggtctccctggttccagtccctcattacctggctcacgtaatgctctgggtatcagaggacctgggctatagtcctggtcctgccacctgttggctgttatggtcttatgtattttcttatttttaaattctcagttatcttgtttcaaagggatgtggctataatagaagctaagatgccctgaaaagtaaacatgttacaaagtgcaagcag

SEQ ID NO: 335070 - DNA, 1000 bp, Homo Sapiens
caatttacagaatttttattgtaaacagaagctcattactagttattacaaactgaatcaactgaaactcaagttagcaatgtgaaacacatttataggcttatttttgtataccataattggtaatttttgccccctcaatacttttaagaagactgttaaaattttcagcatttcaatgatctcttatttgtcaggtttagcaccatgacattctcattcccttaaaaaaacactcattcaaatctaggtagaacttccacctttcatcatcaaaattatcacacaaaatttattttgtttttttcacaatgcaaaaagaagacaaataagtatattttaaaatattatcagcagtccgttttgtgtggttttacatttttctgtctgcccattattaagaaatcttgcattgatttcatttgccccccttgtcattgcaacccgtctctagaatactgtggtaattgaaactagcatgtacctgcgccccctcccggggtcctatctttgtcacccacctcccccatggctactgcttgtcatatctgtgctcagtgcagggatgagcatacagcaggaagaggcgaagtcagcatttcatttacagaaaaatactatctggtggagacaatgagttgctgaagatttactgtggataaaaataagccggccaggcgtggtggctcacacctgtaatcccagcactttgggaggccaaggcaggcagatcacgaggtcaagagattgagaccatcctggccaacatggtgaaaccccgtctctactaaaaatacaaaaattagccgggaactgtggcacatgcctgtagtcccaggtactcgggaggctgaggcaggagaatcgcttgaacctgggaggcagaggttgcagtgagccgagagccgagattgtgccactgcactccagcctggcgacagaacaagactctgtctcaaaaaaataaattaattaattaaaaattagaaaagccataagt

SEQ ID NO: 335071 - DNA, 1000 bp, Homo Sapiens
ggccggaaaaattgttttcattatatgtttcataacttcagagtaattctaactcagcacatttgtagtgtaccattgccaagatcttgaggtaggaagcaggaaaacaaaatgcactgagacagggttcctactcacgaggagtttacagtctacagcttaatgtttcactaagcaaataggctgaaatgtgctttcagatgtttaccttaaattataaataagtagaatccagatagggcatacataaaagtctctataatagaacagatagaactttctgtggtgatgaaaatattctgtgtctgtgctgtccagtatggtaagcactagtcacacgtagccattgagaacttgacgtagccattgagaacttgaaacgtagtgcaactgagaaactacatttctcattttatttaattttaatttagccacatgtggctagtgcgtaccgaattgaacagtgcatctctagagtgtgtttttcaaactacctgaggaaaaagccccttattttaaatttctgatctgttatgaactaatatttttatagaatgcaatacaaattacgaaaatgaaaaaaagatatgcaaaatacctcctctgttttttaaaagattcatcaaacaaaattactgtgtcaaaatttctataaaaatttctaaacactctcaacttcatatttatgccatgtaacaatgacaaatagtttttacgtgtggcagtggtcatagactacactttctactaggtagaggtctcttgcctaatgtacctaaaaataaataatttcctaaatccaaccctttatgttaaaattactggtacaggtaatttttttttacaggtttaagaacaattcaataatgcagttactgatgtaacagttaacactctgtgtagcgagtcttgtctaggagagctgtaccttgacagtgcaatgtggacaacttcaaggtggattgagaaggcttatttgatccagtgaagccatttttgc

SEQ ID NO: 335072 - DNA, 1000 bp, Homo Sapiens
agctatccaataattatttattgaaagaaatgacgggatgaatcccagactccggagtaagccaccccctcacacacacacccctcccctgactctcaaaatccacagcctgccacagcagatttgctaaaaagcaaaggcaataataaccctggggtccgtccaactcatgccctgtacccaggccctaggagggcgagggcttagtaggtatcttcagggtcagagcctgagtcctcgccttgttggttctgaatctgactttgcttccggtacaaacaggccacctgagcactggtggtggcctgctccggctgcttgtcttcacggactcgaataaaccgagggaagcgaagggagatgcccttgtcactatccaccaggccccgcgcagcagggtagatgggagagagggagaggtcagcgcacttcacctcccacacagcgctggggtccagccagtggtcgggaatcacagcgccatctatccgcacgtaagggcgtgggctgggcagcaccagcgccttgaggctctggtgatgctcctccagctcctcatcactgaagccagttccaagcttgcatatggcctgcagctcctcactgtcctcgtcgtaggaggccagcaggaagcccccgtaccggccggcccgcttcccccggcccaggtaggcgccgatcaccaccaggtccagggtgtcacccacgccatcaaggtagtccttcttcagcttgagccagttgtgcgatctcttggcgatctcgtaggtggcatcaacatccagggtcttcaccatcagcccctcgcaggagtctttcactgactgctccaggaactcggcgatctgctcgatgtccttggtgtccagggaggtggcgaagacaaactcgccctctgtctccacaaagttctcccggagcagctgccggcgccgggaaaggggctcacgtaccagggactctccattgaggtagatgaggtcgaaggcgtacaaacaca

SEQ ID NO: 335073 - DNA, 1000 bp, Homo Sapiens
tttttttttttttttttttttttttttttttttgggcctataagtctcactcaattttattgaaaagtttaagactttaaaagttacaaagtagtattcgccctgcctatattaaccattaacaagcattgtactgttagtgcagctaaagtaattatatcagaaaaacatatcaattgtcattttgtccaccggacagtattgtaaggaaatgatgctgcaagaaaagcagacaaatatggacttcccaacatagggacgtgaagcaggtgtattaaaaataaggatgcatataaaactaagacacaaaatgaatccctgagctgagtttgcatccgaaaacatcacgttcacacttcatttgggtgaaaatgaacaaggacacttctcatgggcaaccacggggctttggcttcacacagatgtgatcaataacgacagtagcgggctccaagagtacattaatctcagaaaaaatagtggtatagtctccacagggatttgcttctcagataagtagaactatggcctgccatgaaattgagagctcatgaatatagatggttgagtgtatcagtcttcaaagcatttaaaacatacttttgtttttgttttatcagtgcaatttgtttttgaagacgccggaaaactatttcatttaacctgagcaattaaaacgtgtcaaatcacagctgtcacagttaggtttgataaaattaattgttagcatccttattactggcacagctgtgatatttctggatttgactatgcacctgctgcaggaaaacatgataaaatgtcatttagatctctaactacaagaccgttagactagagagctctttaaggcaaggacatgaaaactgcgtacttttatacctcgcttaagtcagtgacagatttaccaatgacaacacaattttaaaattccaacacatatattactttgtcctatgaagggcaaaaagtcaatatattttaaattttaaaaacagaa

SEQ ID NO: 335074 - DNA, 1000 bp, Homo Sapiens
aaggagtaagattcatttattctttacactgggtcttcattaaatctcatctgatctttcgctttgatgttttagactttatttcacatttcacgaagattttttcctgggttgggcgaagtagtaggtcatctgtgttttctgaacaaaatgtcattctttgctgggtttctcctgctttgactctgatcgtcttcagaacgaggcctgagtggcgcggccctgtgctccatgggatgatggtctggaccgtgtcccagacattggcccacactgcactgttttcccacttgaacttgatcatgatcagctcgccgatatccacatccagcgtgataagaaaggaatacgttttattactagcaattcctttgcccagagtgatgggaattttctgcattttctcttttgttccgagtagtgacatggtaaaagttgtttgtattggcgtctcagtttggttgatgaactggatctttaactggtaatgataaactttgaagggggactgggctcgcgttacgaggaagagcctcttgctcttgctccgcggctcctggcggacgtggtagcccagcgtgttgcagcggcccttcttgcagctcaggcacaggccctggctgaagctgttcatgtcaccacacgggtaggccatgctctgcgtgccggcgtgcagcaaggagtcgatgaaaaggtgcaccgatcgctcgtgggagcattttatggtctgggtgatggcattgaagccgtgctgggcaatatgtctgtagagctctaggaagtggcagccaggctggaaggagcccccgttgggatagaagtcatagtgtcctatgggctgtttgatgcccacgctcaggcccatgtgctcccgcgtaaaggtatgaatggcatccacaaaattggcatcatctggagaaagacgattgctgggggcacttccctcaaacaaaggtcccgcggcatccagccctgtgattctcccaatcttgtgcgttcc

SEQ ID NO: 335075 - DNA, 1000 bp, Homo Sapiens
gtggtaataaaatgttgtcaattttattaaaagctgattccatttcttcacacagttaagtacgtttctttcttgttttgttaaagcccatttcataagagtgagttggctctgtgagaccatcactgataaagacacatacagttagcaccacacatttataaatgcagatagccacaatgacctttccaatatgtacaagctccatttacacatccacacatgtatttacagctaataaataaaatgtaaagccagaacatccttgatatatataacaaagtttttcggagccagagttcccagtgctatgtgctgctttagtgaatcttttaagttaatgcaccctgggtcacaacccaaatccagaaatttaatgaattaataaaggggatgccaacaacaaatcatacatcattttatttttagagagaattcattccaagcctgatgatgttaatcacaacattggtcctactatttataggcacgatcatctctctcagagaaagggtcgaagttctggcacatcaggaacaatttctactccgacatgttccaatacatcccttgatcgactgttttcccttccgaattatgctgaaggacaacacacatgcagagctttctagtatgtgttcagatatcacatactttcacagtcgggttcccagctatagcctctgagatatttgacatctttatcatttcatatttatacgtagaagagcattctgaaaaataggagatctagtttataaatagttgttcactcactcttgattagttgttaaaaacaacaaataacaaccctcatggtactccatctggctcattgcacgcgatggtttacaagcactgcttaggaatccaccccaggaacctctccacccttttacttagtaaaaacggtccttgtctaaaatctgtagaagctcacacaatgcaaaatttgaactcaaacctatcttttcatgtcaaagccaggaacaaaagagac

SEQ ID NO: 335076 - DNA, 1000 bp, Homo Sapiens
gtgttgcaaagcctttaattagaatgtttgtattttttacatcatgcataacttcacatttgtgattaattagtaattatttcaatacttgtaagctcatctgcctcagatttaatcataatacatgaattaaattaatcaaattaaggaacagcaatttagaaagaaacacactttaagaaatcaaaattctcaattcaggcagtctgtttctatcatttggtattctactcctttaaaaatttcatattgcccaacaaaaagtggttatttttactgtttttggagatgactgaacagatgaaggcatcagatgccttcatcagctggtattttgcctaagatctatttaagataaccttttcttatattttttacttaatattgggcataatcgtatcattcaagattaagtctgggttatttctttgataagaactgaatgtggccgggcgcagtggctcacgcctgtaatcccagcactttgggaggccgaggtgggtggatcacaaggtcaggagatcgagaccatcctggctaacacggtgaaaccctgtctctactaaaaatacaaaaaattagccgggcgtggtggcgggcgcccgtaatcccagctactcgggaggctgaggcaggagaatggcgtgaacccgggaggtggaggttgcagtgagccgagattgcgccactgcactccagcctgggcgacagagcgagactgtctcaaaaaaaaaaaagaacggaatgtactggagatgtatttgataaccaaggttttaggtaaattttcaccagtattagttctatttgcaaactgaaaaatgttgtaggcttaatgtaaaataaccacattagtgaacattatatctcttagaagaaaggccatattttgctcctgcttctgtaaaaatattatttgtttgaaggggaaataatggtagtgtgacctttcacttaattcctactcccttaatgtgagagagacaaaatgagctgaaga

SEQ ID NO: 335077 - DNA, 1000 bp, Homo Sapiens; identical to SEQ ID NO: 157268

SEQ ID NO: 335078 - DNA, 1000 bp, Homo Sapiens
tttttttttttttttttttttttttttttttttttttgtgactaaatggagtttattccatcaaagcaaggttgatttaatttttaaaaatcgatatgtgttatgtataatatcacattatctcattaaaaagcatgtatctagcggcataactgtgtgtattaagacctaaaatatagtatcctgatactttactacacactttaaaggtgttaacttatttcatcatccccacaattttcatgaaataagaatgattattttctctcagctgcaaatacatggctgaaacacaaagtaactggctctagatcatgtagcaattaagtgacagagctgtgaatccagtttagataggcctgactggagcacttcattatattgtctttcaggagtctatacctgctctggtggtctctgtattggggttgctaaccagtgcaataaggtaagaaaaaaggtaaagcaattgggaagaagcaagtattgccatattttcagcttacatgactatgcatatacaaaatccagaggaatctacaaattactagatttaagaaataaacttattgaggttactaaacatcgtaagactacacacaaaacttaactgtatttctgtgtacaacaatagaaaagaaaaaatatttaaaatatattattaaaatcactaaaaccaccaaaacaagatatacaaggtttttaaactaaaaatctcaaaacatagcaattaagttagagaaatcctagttaaatgaagcgatacatgatgaacattgattagagattcagtagtaagttgccagttctgcataagttgattgatagactcaatgtggtcccagtagaaacctcatcaggattttgtagaaattgagaaactgtttctaatatttatatggaaatcttgacttgaagaagaacaaagctggactacagttacaactataaatgtacaataattaagatagtgtactgtttgacacaagcatcaacaaat

SEQ ID NO: 335079 - DNA, 1000 bp, Homo Sapiens
ttttttttagattttctaatttttttattcatgaggcccagtcaattctcttaagaatcatggccaggcatggtggctcatgcctgtaatccctgcactttgggaggctgaggtgggtgcatcacctgaggtcaggagtttgagaccggcctggccaacatgatgaaacctcatgtctactaaaaatgcaaaaaattagccgggcatggtggcgggcgcctgtaatcccagctacttcggaggctgaggcaggagaatctcttgaacctgggaggcggaggttgcagtgagccaagattgcaccactgcactccagcctgggtgacaagagcaaaactttgtctcaaaaaaaaaaaaaaaaaagaatcataggccgggcacagtggctcatgcctgtaatcccagcactttgggaggctgaggcgggtggatcacctgaggtcaggagttcgagaccagcctggctaacatggtgaaacccccgtctctactaaaaatacaagaaaaccagcctggtgtggtggcacgcacctgtaatcccagctgctcaggaggctgaggcaggagaatcgcttgaacctgggaggtggaggttgcagtgagctgagatcgtgccactgcactccagcctgggccacagagcaagatttggtctcaaaaaaaaaaaaaaaaaatcatagttcattaatccaggtacacaaatacttctatcccaatccagtctgcttgcgtttctctaggcttcccatatcctcaagacagaagcagagagaacaaggggacatatatccttgccgtggggttctgagggaaaatgagggccaaatcttctgttcaggagcacctgagagtgccacccaccaggggcggattatgcaacgactccgtacttcctcctctgaaatccatggtgtgtcatcagtacatgtcttcacccggattgactaacatgttcgttcctaacttacctctgctataatcgggtaggctccgtgggcac

SEQ ID NO: 335080 - DNA, 1000 bp, Homo Sapiens
ttttttttttttttttttttacaagatgttgcatcactttactttaattgcatgatttatcagaacaactattaacatacgaagtaccattcagttcagctgcaggtataggcagtgacaagtatctaattcttagaagaatcacttactcccacaatctgtccagacacattaatctaaggacaagtttataaatagcaaacgtgattttcacattgcagtgttctcaagaatgtatatacaagtgtgtagtcctgttgatgggatgtttccccgagttctttctattgatgcgttcatgctcttgaccctggtagagacagttctttctttccacagagcagattttcttttgtcatccaccatttacaatactctgtgaattagtattacttattacatttatgaaacggcaatatttggattgtaatagctcttcagtacaattccttgtgtcttctggtaagtctctgcactatcagagagcttttagttataatcattttcctgcaacaacagccaaactcaactattgagtttcagtgtgacacaccctctttgtagcttgctgggttaacccttggcttcaagtcctgatgatgtaatgagggtggggtgtattggcaatcagtacatttccttatcgcaatttacagtcattgaaaatcatgctgtcattaatcccagtctgacataccttttctaaaatgttcacagtgcagtgtttttgtggcctaacaaaatttttctcatatcattaaaaataaacatttttataaaaaatataacactttaaatgtttacgtcgacaaaaccagttagagtaacctacaccacatgcactatacagtagcaagcacaaaattccacagaatgaagcatcacaaagttctgctcagggtggctattccatctaggtgaaatagctgggattttcaattgcctttttcatttgtttctaaagtatgttttgcttaacataaaacacaccctaatgcaa

SEQ ID NO: 335081 - DNA, 1000 bp, Homo Sapiens; identical to SEQ ID NO: 157269

SEQ ID NO: 335082 - DNA, 1000 bp, Homo Sapiens
aatatggtacagctgcaaacgcctcatatctactaacattttgcagcctccaacaacaataaataagtgcttttattttctctgtttcataggtcaggaaactgaggcaccaagagggaaagtgctcgtgagatccaggcagggaattgaatcccagctgcctggctgtagagtctaggcgccctcagtggagccagtggacccaagatctgacatcagaggctgaaatccgagctgtgtggcatccctgtggtcactcgtcccaactgggtgttgatccaggacctgcaggctcacgagctctggaccctctgcagctgatgttttcttcttacaacaacggacatagaaaataataataacaaaaatagcagcagcagcaacagcagaaacatggaatgtctgccaatgactctgaagcaccagcactttcccagagggcacagggtgagtgctgtgattcccgctgtgttccatgtagcaggtgaacctctgctcctctccttggcaaatcctggtggccacccaggtctggtaggttccattcccatcaggcaggacatccccccactgctgggtgtcgtggctcaaagataccccatcctgacgccagctcagtgtgatattccagggatagaagccagaagccctgcatgtcacggtaatgttgccctctgaggcctcgctgcgggtgacattcaccatggggggcactgttctcctcaggactacgccggattttagatatcgccgtagttcctgcaggcagtctgcatgcatagcgtgatagtgtgtcttggtcttcatggcatcttccttcaagaaattcctgacgttcatggccaaggtctgagctctggaggactggggcattgtccattccttagtctccaggttttgggagaggaagagctccccatcgtagtagaaatgctgggagctcctggtgctgttgtcttcatggatctcacagaccctaatctcctggagggaatgcaag

SEQ ID NO: 335083 - DNA, 1000 bp, Homo Sapiens
ttttttttttttttttttttttatgtgaaaaaccaaatgctttaatgaggctatcaagaacaagtcgattatttcattggatacattaatatcgatccataatatacagtgctatggaccatacagaaattattgctgcatccaacagcaggtgactattattaacattacagtaccaagcatccgcaagagacagtcatttgtcattttttatcaagaaatagggctgttttatactgttattgacatcaactttttcccagtgcatttttcaaaaatattaataagttcattcctttgtgcttttaacttcctatgtattgtatttgttcttattgctttattgtttaaaaacaaccagaaagaattttgtcatcctatgtatgaccaggttgcttgtatgctttttggcaaagtcagaaggtttggtatttccattgccctactcagaggcagatggacaattttggcattttggtcactccatatagaggcccaaccccgagttacaattctgcacccgggaatcgggggagtggtgtggatcattttcttgttacaaacaacaagcccaaaccactgcctcttggcttagctagcccctgaaatgaatccacactctatttggcaaaaaagaaataaataaaaccacccccaagattgcagcattctcctgggcttgctcacctgccacctgcagaaattgtctcttaaggagaaggggagggggaggcaggcaatggcaaggttaggagttgtgacagtcagggcagtggtacaagatgccatactttctttcaacaaagctttctatatggttgcttaaccatggtcctgttcccgtggccgtaggttagtcaaccttgctttatttttaaaaaccctcaaaatcagctaaggaaaactaacatcatagcatcacgatcttcaacttttgcatccagcgccctcccccccatataaatatgaagagaaaaatagacaatgctatgattgtatc

SEQ ID NO: 335084 - DNA, 1000 bp, Homo Sapiens
ggaggtccccatcagcggtgcctttattatcataaacattgggagcaaataaatggtacagaaagggcaacaggcccagttcctcttcaggagaacttcagtgaataagcaagaaatcagggtgaggaagaaaaaggggagccatggcctgagcctggctggctgggcccataagtcaaccacacagcccagctgcagctggcttatccctccaaggcaccactggtccagctctgctaaccaggacacagatggcatcttggtatctctttcttgcctctatatgcttctcacgcctagtacagtgccttgcatgtagtaggtgctcaataaatgaagaaccagaggatacaagtgggccctccaagaaaccatgacagatgtaatttacaaggaagaaaactcttgtttaaggagggtaatttgctcaaggtcacatagctagcaagccacagagccaggattggaacccaggcagtctagttcctgagctgtgctcctcaccagtccgctctgctgccttccacatactcagtattctcatcagcacaaacacacactcacataaatggcacatacacataacccatgaaacactccccatgttcagacaacacacacgcatgaaaagccaatttatatacttcgcacatacatgagcacacaaatgaacgtctagtcactcattttctcagctgcacccagaacagggctgggctcatctagggcaaggagatctccgtggttccaactggccagcccagatatacccctcactgctgcacccccttacctggcctctaggaggcttccctccaggaagccaggttcaatgcaggaagtgtactgcagttgacaaagtcccggggatatgagttggacatgaagatgttgttcttagacacggtggtgatgcctgtgttgtcgcagatgatccggggcaatgagatctgggccagggcctgtcgctgctgcatgctgaacacaccctcgttctccc

SEQ ID NO: 335085 - DNA, 1000 bp, Homo Sapiens
ccacaaactacatgattttatttataaaattcagcacatcacttattattgcctatgtcaattgcaaacagtcctcagttacagctctcatttttcaaaataaaaatctttgaaaatgtcctcaaagtaaaatattactaaatatcttattaagttgatagcccatgggcactgacagttaacactatggaaaaagggttaatataaaacaatataaaactattacagacaatagcttatcaatattaccttcattccattactgggatttttcacgtagtaacttttattcgtgaaatgatttcatttacaaagctattattctttgctattacttcagcttttagctgttttaactttattgtgatgttttcttctgacatttcagtaaagggcatttgtttcaccttggacaggaactcctgaataattttttcaccttgctctctttccagatagcacttctttgctgctggttccatgatatcatatccttgcgattctccaatatactgaaactcctcaagttccagggctttctgtttagcacactctattacatgcttagggaaattagcaagctctgcaacatgaatcccaaaactttgatcacagacacctttcttcacctgataaagcatagttaaggtctcttcagtggtgagtgctgtgacatgtagattattaacagttggtatctgattggccaaggcagtaagttcatgaaaatgggttgcaaacatgcaaaaagcaccaatctttgttgcaatgtattctgatatagcccatgctaacccaaatccatcgtaggtagaagttcctcttcccaattcatctatgattattaatgaatctttggttgcagacctgaggatagaagcagtttccaacatttcagccatgaacgtggagactcctttcaattgactgtcaccagcccctactcgggctaagatgcagtccacaatggacacttctgctgactcacatggcacaaaac

SEQ ID NO: 335086 - DNA, 1000 bp, Homo Sapiens
aggtttcagttaatacatttattacagcaggtctttagtcattattgccattaaaaagttttcatgaaatttcacaaaatcttttaggctattagtattagctttctttttatggagtgacactttgttaatttatgaaatatttacagcatttacaaaaagtaagagaatgtctaataaaatttcttatacttacaaaattcatacattatactactgtatttgagatgtcttacttgggagaccaattaaactatgacataaaataatttacaaagatatatttaatctttcttaattcattgaaaacaaaaccatattagttataaatagtcctttacaaatcattgtaaaacacttcattgttttaactcgagccttagcttttacaaatatacttaataaatgaattagttcagatagcaaatagaactgtgcatttaaaatttcacttaatactataaaacaaaacaacctgaaaaagcaaacggcctggtacttcaagtaaaaatttgtagaaccagtttttatgcacgcgtggggtggggaggggaagccaacaccattgaaattgaaatgcataaacacaatacttcaagaatacgctcaacacatgtacatctggggcactgatttctaaggatgatgctctagcaatagctcatgcatccaagacggtagccctacattttggcagatgagctggactgactagagcaacatttgcgaaaacattcccctaagcagcaggatgctcccgacatccttggacagtgctctctttggggtttgccacaacccgaaaaccattccgaattttaggcaagctcatgaaagaatttagaaaataaaactggcaaatttaaaaaatgcaaatcatatttaactgggccctgtcagttttttaaaaatataaaaataggcttctctggaaaattaggggaaaacattttctacccctaaatttccaaataatgaaaaactcatctatacagctatt

SEQ ID NO: 335087 - DNA, 1000 bp, Homo Sapiens
gatgttatttctatgtgccttctaccttaaggcttaaaactaacaataacagagacataaatattaattcttgaagttggctaacaagtcttttaaaagccttgtcccttctccctgggcccccaactccaaaaaaagagaaaaaaatggtttgtttgtgtcttacttttttttttttttttttttcctgattagggaacgtgtttggttttcccgtcatgcttaaggaagtcctatcaagagcttcatatacattgatcaaaaattgttgaaacaaaattgggttctccttgtgtggttttgtttttatttttgtttttaacaaacactagtttcctcttagagaataactattctgactgtaccaaatgagatttgagagaggtataagtaaactaagaacgttgttgaaagcgtcacatgatgattcaaaatgacgctgtgggtagcatactgcatatacccaaatttgatcaaactgcagttttttgtagctttttacaaaaatcttaaatacaggtaaatatgtaaacgctgtgctctcagagagcaagtacttagtcatgccacattgtgtccctttcggggagacaaattcaagtaaaatatcacaggtcagtttcaaaaccatccgctggaagtactatccggctgaggggcaaacaccactttgcacatctctgagttctcttgatggagcgggaattcacatcctgctaatacgctttcttttcttttctgagagacataacctctgcctgtggacagcctttcgtactttttctcaaattgcctgaatggagcttcatccttgtccatctgcatgcaaactaagaatgggtactgagaaaactgcactgtggagataaactccaagcctgcttctgtttctgtactggtttccaggccagctttcacaaaagaggagtccactgtgatgtcagtggttattaccacagtcaccctatttttcactcgggttttagactcacgataccac

SEQ ID NO: 335088 - DNA, 1000 bp, Homo Sapiens; identical to SEQ ID NO: 157271

SEQ ID NO: 335089 - DNA, 1000 bp, Homo Sapiens
ttttttttttttttttttttttttttttcaagataggttttaattaatatatggattttattttctggtgctcaagacaatgtaatgctaaactgagaaatgggaatagtcagagtttttttaggtacagtttaattcttaatataaaaatgaaagagatttataagaaacattctaataaatacatcaccatgatttttaaaaataataccattgtccagagttcttgataaagtattgttatagagagtatagagagtttttagggatttttttttatttttgaagtgaaactgtatgtacatacttatagcatgacaccaggcctataagtaaggtattttaaagtaaagctttcaaggaaagtacaaatcaggtattgaaattaaattgaagacatagctttactctcttctttgatcataactaaaataatattttagacaaaagctaaaacaaaaagaggatattatacagattgctgcttcttttccaaacacttctcaatatcatcaagcacctgaacggcagcctttggaattcgagtcccaggaccaaatacattggaaacaccaacttcaaacagaaattcataatcctgaggtggtatcacccctccacacatgacaagaatatctggccgtccaagggagttaagttctttgatgagttcaggaactagggttttatgaccagcagcgagggtgcttacgcccacagcatgcacatccgcatccacagcctgctgggccacttcacgaggagtctggaaaagagggcctatgtccacatcaaaaccaagatcagcaaatcctgtagcaataacttttgctcctctgtcatggccatcttgtcccatttttgctacaagaagacgaggtctgcgaccttcacgttccatgaatttatgaaccctcttgatagcagatgttatctctttactttctccaaattcctggcgatatgctccactcaccattcgatcattcgctttatgttc

SEQ ID NO: 335090 - DNA, 1000 bp, Homo Sapiens
gaagagtgagttctctgtgactgcacttatcttttattgcccaataaacattgggaagacatagcaggccagaaaggcctgtccccagacattgtttcttgaggccaccctccttttaccccaaagatccaggggcttccttcaggagccctgtggaccagtctgtgcaacacccactcaggactgcccgacaactgccctgctgatcccccatcgcagcacaggagacacacttgtcacacatacatccaacagtagggaggggtttccccaacttccctccaggctcctggcacggggctggcatccggttgtacctggccatccccaggagccagcctggtcactgaggcactcgcacctccaggcggcactcacaccgtgcctcgccctgtaagttggtggccctgcagacatagatgcccccgtcaaaggggcagggctttctaatctccagagtcaacactccctgcttgctgaacatgcggaagcgggcgtcttctcccaggtccaggccattcttgaaccaggaaatcttgggcttggggctaccccggacagcacagcagagcatagcagtgtagcccgcgatgaccgagcggttcaccaggggctgggtgaagcttggggcctcggagaagtccagggccttatagttgggtggctcataggtgatgcctggtctggggataaagacgggctccttggtggtggccgctctgtcactaaagccaaccatattctggctgaagacgcggaagtagtagccattgccaatgatgagctctggcaccacgcagtgggtgcggcggtaatgctccaagacggtgaaccactccatggtcttcttgtcggctttctgcactgtgtacccccagagttccgtgttgccgacatcctggggtggcttccactccagagccacattaagaccccaggcgtcagtcacccggagatcctggggaggacttggcttgtcaacaacctgcagcaccagcgt

SEQ ID NO: 335091 - DNA, 1000 bp, Homo Sapiens
tcggcttcaaggaaaattgctttattctgcttcctcccaaggagctgttacacaggctccagcatggggctttgctggcacctccagggctgagcagatcaagatgtggcaaagctactcctcattcaagcccttcgtgccaatgtcacggctcttggcccgcagcttgttgacctgggactcggcgatgtccgcccgctcctctgcctcatccagctcgtgctgcaccttgcggaacttggacaggttggtgttggcttgctcctccgcctcctcggcctggcgcttgtaggccttgacctttagctgcagcttgtctaccaggtcctgcagccgcagcaggtttttcctgtcctcctccgtctggtaggtgagctccttgatgcgccgctcgctcttcctcatgcccttcaccgactctgcgttgcgcttctgctcggcctccagctcattctccagctcccgcacccgcgcttccagcttctgcagctgcttcttgccgcccttgagggcgatctgctcggcttcgtccagccggtgctgcaggtccttaatggtctgttccatgttcttcttcatgcgctccaggtgggcgctggtgtcctgctccttcttcagctcctctgccatcatggcggcatccgtgatggccttcttggccttctcctcagcattcctgcactcctgcactgcctcctccacttcagtctggagctgggacaggtcagcatccatcttcttcttctggttgatgaggctggtgttctgggaatgcagcagctgcacccgctcactagtctcaatcagctcctgctccgccagcttccgggaccgctctgtctgctccaccacggcacgcaactcctccagctcagcctgcagcaggttgttgcgccgctccacgatggcgatgttctccttcaggtcgtcgttggcacggactgcatcgtccagctgaatctgggtgtccttcaacaagctctggaggctcttgacttgc

SEQ ID NO: 335092 - DNA, 1000 bp, Homo Sapiens
tagcaaaccaacattcctttaatatctctatatcatagtgacacaaatgaggaattactttacatattgccagtttatttctttgaaccagtttaacaatatcaacataattgattactaaactgacatgatatgtactcaatggagacttttctttccattctcctgtttagtgcagaggaggttctttggtgccttcctaacaacagctcatctatggaagttatactttttataccattcaaactcagtgctaaggatttaaaataaatgctgccagctgaagacacatttttctcctcctttccttcctcccttccttccatcattctcctgtatgtaaactcacggtacctagttggttaaggatgagtgttgctataaagataacacagcacgaaagagcctatctttgtttccaaagtgatgaaagtattctagggagatttccagttaatgacttctcatttgggagataatcagtactttctctttaaaaatgtattttcagtaactcactggaaataatgggttcttatttcgggcaagaaatgtattgtcaatttttgcctggacatcactttcagacccgtgaaataaagcccaggccgaggctggctggaatctggatggtttctagtgcgagggaagatgggttgaaaggaaaggtgacaggaaagatgtgtttagcatccatgagcagctggggagagtctttcctgtctcgtaaacgcatctgtatagtacgaatgaacgacacagagactctttcttcaaactcattaactggagtatacaaattcaacactttcacaatctgggcagtagttaaagcattgcacatagaacaaatggcttctgcatcatcatctgttttctttttcacttgcaaaagttgagcagcctgaatgagaggttccagggtttctttagccccactattcatcagattcttgtcacgcagccattcttccagttgactgacattgtacctgatctg

SEQ ID NO: 335093 - DNA, 1000 bp, Homo Sapiens; identical to SEQ ID NO: 157272

SEQ ID NO: 335094 - DNA, 1000 bp, Homo Sapiens
ttttttttttttttttttaagtggaaagaaaacagtactttaatcccacactttgggtggtggtggagggcaggtcatttccctccaatccccccaggtcagaccccaccagcaggccgtggggcctcctcccaggcctgggttatcctgtgatgtctgtccagctctgggccctggaatctgccctggaattagcggaaaacaaggcccagtggtggcgaatctatcaccaagagccggccacccagcgggggtaatatttgaggaagatcttcttggccaggtccacagtgtctcctcgcggctggctggggtacctctgcttgctgagaacgaaggcctgctccagttggaagacatttttgtcaaactggtgctgttggaaagggatgccctgggccacactgtcaaccagcgcctccaggaaaagccgccagcgaggggtgtagtagttggccaccaaccccgccagctgcttgttggcatagtccaggatgttgccttctggcccccacaaggtcagctggtagcggctgttctgctcgtagaaatcggcctcggcctcactgactgccgctgctcgggcctgctctagccagctgcccagcaagaagcggctgtcactagccagcacctcgtccagtgccggcagcagctcataggccaggacgcctccagccctcaacagggaggccagctccttgctcaggtaggcgcttcttgcctcctcatagtacaagctgaccagctcctgcactgcctgccgagtgaggtccagcaggtcgtagcggaaggcggggctggtggccagggagggagcagatgtgagcagcagccgccaggcctcaaacacatcagatcggttgtaccagatgctggtattcatctgtagggacggccgcctgaccagcgggctacgattgtggcccctgcaggcctccccggagcagttgtacacactccggagcagtagcctccacgctgcccctgcgtccgggtg

SEQ ID NO: 335095 - DNA, 1000 bp, Homo Sapiens; identical to SEQ ID NO: 157273

SEQ ID NO: 335096 - DNA, 1000 bp, Homo Sapiens
atttctcagttaaaagtttcctgacctcccactttctttgcagttgttctgaacacttacatataccagatacacgccaaaagtagaagaaaaaaagttaaagaaaaggcagcattaaatttaggcaaggcttcgaagagttgatcatctggcaacatggcaaaccggatgggttcattataaaacaggaagtgcagcattacaacatggggggaaagggcaaggacagggaaggggtcactagtgaagagcccatgttaagttgattttaaaaaagaaagcaagcaagcttcacacgatcttcttaatgctattacgtttgaaactgccagcgcttctttgcttctgcacttggcttgcggatccgtggcgagttcgtccactgttacagtggccagtggtaggggagagttcaacgttctccttgtcgattcctggggaatgctgggaagttgcaagtgaggtcatggaattagaaaggttaaggttggcagtgatactaagctggctctgcagtgcaggagggtaaggagatgtgggagtcaggagggattcttcactggtttcttcatcaattccaggcaggtacgtgtcaatcaaggcatcaagaaacttaacaataagctcagcatagtctggaatttgtgtttgctttgaaaacggtcctgcaaaccgccacaagccattaaaaccaaaactttgcaggtaagatgtttggtattgtggtggggattcttcatggtacaccacactctgcacaattccatggattggatttaacaaatttggatcttggcacaatgataacagggtgttgatcttagagtccaacaaattatgcacaacaggaaagactttgggaaacacaacactggcctctgctaagtattcataaagaattcgttgatcaaactcatctgtggtatattttaccagtgtagctagaacagtaagaagcagcgcctggatcttcggatcagtaagtacttcttcatccaag

SEQ ID NO: 335097 - DNA, 1000 bp, Homo Sapiens; identical to SEQ ID NO: 157274

SEQ ID NO: 335098 - DNA, 1000 bp, Homo Sapiens
ttttttttttaggaaaacaatgtattttattaaagaaaaataagttaaaacccagtagacacacctacgagatgctttctttgtccctcatttcatgccacatctaactggcaattaaatctcttcctttctaggggaacactgtgaagaacatgttgcttttttcaaacagatttttggagaccaagctctaatgaggcctacaacattctgaaatcacttgctgtttttttatataaaaatgtgtacaaagttaatttattgcattaataaagctctttaaactataaaatgttataaagtgtatctacaacctcaactgtcactaaaaatatggtatagaacttgtgggatggcttactcctaaaaaggagaggacagacagtgcattgattggcctttacagagtgtcagtgagcggatcacattcacagccatctagtgtcacctcctgcttgccaaagaatgaggtttctttcctgaagaggctgggagaagtttagtgtcctgtggttgcctccagatctagtaatactgcttcccaagtcaactgtgcattcctgagttcacaggcgctacgttcaaagctgctgccaaacaaccgatggttggcaccatccggtgttcaacttggccttgccgatgcagcacccgtccagtggtaaaccgaccgacccttagacacagttcagtcaggatgccctgcgagagggctagaaatttagaagccgttcgcgctctgttcctttgtatcgctcttcagtggcacaacttttggctttatttactgatggccctatgtaactgagtaagacagggagaaatattaatccgtgagtggctcccagtaagaccatggccaaatacatcctgaagtagaatatctggaaaatttgagatttggcaaaagccaacaccacaatccctccaaattttgtaagtgtgattccactgaacacggagctgcccatgtgggcaagtgcctcttccgcgcgctcca

SEQ ID NO: 335099 - DNA, 1000 bp, Homo Sapiens
ttttttttttttttttttgagatggagtttcactcttgttgcctaggctggagtgcaatggcacgatcttggctcactgcaacctccacctcccaggttcaaacaattcttctacctcagcctcccaagtagctgggattacaggcacgcactaccacgcccagctaattttgtgtttttagtacagatagtgttggccaggctggtctcaaactcctgacctcaggtgatccacccacctcggcctcccaaagtgttgggattacaggcgtgagccaccgcgcctggcctggaaacaccttcataccatgttaatttctgagactggggctcaagttaaatttaggttaagggtttaggataagttagctaagatagcccagaactttcataatatgacagatctctaaaaataaatggctcttttaaggcagcatgccatcaaaaaaaagtacctctaatgggattctaattatttaggttaaacttttcctcatattttattttcacatggaatcctaaaaggttcgccccgataaggcagaacatcttaggttgtagaaaattatacatggtatctttactgggaatattagctgtgccacttattagctgtgaccttaggcaaattacttcacttatctggcctgtttcttcggcggtaataaaaaacaacagtacctatctcctacagtaggtgtgaggattaactgggctaatgagaaatgctcagacacacagtaggtgctcaattaacgcaggctgctactgtttatcactaaaaggaaaggcttgggacattattttaccagcagtcacaggtttatctgagatgcaacaaggcctgaaagggtgagtcgactccactctccagtgcctgaaagtttctttttgtgcttttgacagagcacttattttcttgatttgaaaaggcaaaagcgactctgtttttgtacttaattaggggtaaatcacattcaagtatcagactgaattaagt

SEQ ID NO: 335100 - DNA, 1000 bp, Homo Sapiens
cagtcataactattttatttaactacttccccaaggatgtggaccttacacttactttacagccagcctcagaaaacttcctagtggcaactaaggctagagcagctgtagagtggtctggagggggctcttccattctcacacgtgtgtgcatgaaccctttctcctatcctaaaggcccttcgggaagaagctctagctggtgatgagagcaaggtttgggggccgctacacttcggcagtgcagtgttgggaaggtgagaacacagttctaaagaacaagaattgttgagtctgaggaatatggggtctggacccccagcacatccccttcataggtctccatgggttgggagagcagggtcaccctcatttttgttgcaggattcacttgcagtgtgaatttcaattgtgctggcatcagaaccttcagacagcatgctcagggcttcgtcagaagtctgcccacccacttgagacaccttcccggaagcagggttttcatggggcatcagtggggatgggtgagccccctcagcagccgaggtggtcagtgattcccactggatctccttcctgggagactgaaaacccaggctgcatcctgtccagccgtagaaggccaaagacaagagaaatccctgggctggattcaggattcccataataaaccatgtggtcttggctgcagttctgacaggtttcaaagaacctccattgatatctgtttgcatctcaagatagaataaaaggctttcattgatgatattcgacaaccaacaaataattaaaaccagcatgattttgaaaaatcggatcttgatcacggctcccatcctcctctcgttctccgtgtaaatgccttgtcttcctttaagtaaagaggccactgcagtcactgtcttttggaacaggatggggttcgccacgagaaccagcagcaggggcaggtacatggtgacatagtgggggatggcgtggtccaggccccgctcacacc

SEQ ID NO: 335101 - DNA, 1000 bp, Homo Sapiens
gacatttgaaatataagctttattttaaatttaaagaagtattgaaaataaacattttttacaaattataatcaagcactcaaaacaatttaggaatgttaaacactaattcttaattcaaaataatgacatccatagaatacaaccctggtgttggccaatatgaagtttacttaatattagtattttatatacacttaaccattaatccttcctaaaattcaataacaatgatttcactttataagatgaagccttttatgcaatacccagagataactttttcaaatatgaaacacttataccagtgaggaaattataaaaacatatatcaattatactgaaggacttgatttagaggctgtctgtatatagatgcatttcaccttaggaagtacacatgcacatcaaaacacttcaactgaatatagatgccattacattatttagttacgttacaaagcaaacggcaggttcataaacgttgttctattatgtatcaactgaaaaaaatatattcaaaaaaaaagtttttgaagactcatgggagtggaatgtgcccacattaggaataaagcttttacaggaccacctgtctccagctggctcccagggaccactgaaaacagctggctaccctcagaaagacaagatggtcttgttaataatttcaatggactctcgaagctcatcctccttgatcaccagcggaggcgcaaacctgataatgtcgccatgggttggcttggccagaagtccattatctcgaagtcgtagacacaccttccaagcatcccaatctttggtttctttaatgacaatagcgtttaataatccttttcctcttacggcagttacaacatcagaaggtagcttcatgagttcatttctcaagataatgcccaatttgtctgcattttcagcaaggttttcttcttctaaaacctcaagggctgcgatggccactcggcagcctagtggattgccaccgtatgtggac

SEQ ID NO: 335102 - DNA, 1000 bp, Homo Sapiens
ttttttttttttttttttgacatacaaaattttattctttatttattattattatttatttcttatgtgcacaaaagaaaaagaatcaaaacgaaccgacgcactgaaagtggccgaggagaccagaaccgtccggggacatttagcaggttaggcctgggcctgggtccggggtctctgcccggccagccccacaggactgggatgggccggacctcggcgccctcgccgccctcgccgccccgttcgggccactggagcctggctgggcgccgggttcccttaaacgattctcttttctctttttccttctcaaataaaaagggctcgcaggggagagagatctgggcgaggactccaagccttttcggatttgttcaaggatttttatttattttcactttattgactttgtttctgttatttcgagtcgtcacgatccacgggtgaggagacatgcagggcgcatcgccactaccgaaagagcaactacggggcgggacggggcggcccggccttcggccgcccggggcgcgcggggcacgcccgcgagggggcgagcccgggggctggagctgccacctcggatctagcctgcggagacagggcggccgggccaggtctggggagagaggccgaggaaagagcagagacagacagacaagagcgacagagacggagagagacagagacagagggggagagaagcggagaggagagaggggcagagggagagaggggcagggaggaaaaagcgaaaacacggaattacagagaaagagccaacaaaacaggccagaggagtccacaggaccatgttcgtcattttgcatagagatttcttttctttcgtaatttttttttgtaacataaaaaatgcccccctcccccaggacgtgctgtgctttaatgggcgtgtagctgtgtcccccccttcccccccagcgagcggcgactctcacagcacagacagcggggcgtatctacaggcagggccggc

SEQ ID NO: 335103 - DNA, 1000 bp, Homo Sapiens
tttttttttttttttttttccaagtgatataatagttttatttgagacataaaaacacatgtgtttctattacatagtgtggggtttagggtcctggtttctaagacaagactttatttcaccctgtatcacagcttcctgggaaatgaattagggagcaagagacggcctggcaagaaaatcattattgttgctgggaagttgcaaagaaaggggagagtttattcaaattagtgtaacagagcccccaggatgaagagagtggtgcagggaaaaggtctaaattcctggtgttggtggggacactggcacatcccacagcaaggactcagccctcaacggcggcggctgggtcttgggaggggagtggtgggagggtaagggctcctcagctccctccctggactcccagttcagtcaccccttcccccggaagaattcaaagaggaagggcagggtctatgtcatggacactgctacttgttcgatgaagctggccaggtttatgtcccgttctgaaaggccggcacactcatgggtgctcagcgtgatgtggaccttgttgtacacgttaaaccattcaggatggtggtccagtttctcagcctgcagggccactcttgtcatgaacccaaaggccctgttgaagtctttgaaatgaaactgcttgaagatggcatcacggccttccagctcattccaccccacagccctcaggtttggcagcagctggtccctctcctcagcgctcagcctgtgtgctttgccagccatggcgcgggcggcagcaggtggccagcggagagggcaggcggcggccgggcgcgcaggctgccgtcccggggcggggccgcgctcgggccgccctccggtaatgattaacgtccccagccagggacgcgctcggcctgcttgcttccagcactttcctcgctgctcagagccatcctccgtgcttgtttcagggagctagggtgaagcatgagggctccaaatgccc

SEQ ID NO: 335104 - DNA, 1000 bp, Homo Sapiens
tttttttttttttttttttttttttttagacaaatgctcagttttattgatttaattttgacactagggaatctcacagcagaagtacaaatcatatgtacaagtatttatatcaatgaaaatttccattggtgattttttggcagaatattggtcttgactctgtggaataaatgacgacgtaaacgtagctgcacaggggtgttcctgtataatgcttgaatcaattgtgtgtgaaagcatcatgcaaatggctaattaaattgggtgatgactgaaaggttataaatccttcattccagctccacgagcagatccccttctccaactgtgtctccagcttgacagtgcacagatttcaccgtgccagttttcccagctgtcatactattctgcattttcatggcttcaatcacacaaatttcttgaccttctgctaccgcgtctccaggcttgacagagacggccaccaccactccgggcatcggggaacgcagaacactgcttgtgtcctcagtcactttttccagcataaatttgttcaattctgcggcaagtctggttaagatattcaccttgtacactgtaccaagaaactgaatgctcatgtttccacctgcttctcgagaaagacactggacagtcctctgagtgccatcaacgctgacagacaataagggcgaagccaggttccacgtgctggtcacatttagtttcgacccatcaacttccaccgagaacactgacccattgtttgatgctactacggtatgaactttatcatgcaattttactgagagctcccagttggctatgtctggtttaataacaggcattcttgaattttcttgaaaatgttgtgctcttaactggaatgccacaaacaatgatgatgctattgccaataactggttcttctcactcttggttagcatgtgtcctttgaagccatcaggatacacatcggagagaaatttagtgctgatgtctccttttacaa

SEQ ID NO: 335105 - DNA, 1000 bp, Homo Sapiens
ctgagcatgtgtgttttcctaaactggatgagaaacggcctgtgtccatctgtctacctgtgtacacatatgtacatgtgtggctgcaaatgttctcagtgatttcagagttcatggacccttttcaaaggtctcccagtggtaactatccaaaaatggatgagtaatgtaggctacagtttattcacagttggcttcagtttataaaaacaggctgggcgtggtggctcatgcctgtaatcccagcacttcaggaagctgaggcggtgatcacctgaggtcaggagttcgagaccagcctgcccaatatggtgaaaccccatctgtactgaaaatacaaaaattagcatgtgtggtggtgggcgcctgtagtcccagctactcaggaggctgaggcacgagaatcgcttgaacctgggaggtggaggttgcagtgagctgagatcgtgccacggcactccagcctgggtgacagagcaagactccatctcaaaaaaaaaaaaaaaaaaaaaattaaaatatccagaatgatcttcagtcattttcttgggcttcctaacctcttgtagcaaatagccacaggcagaacccaaatcctagtgggtgaagattgagggagccatagggtccccacgggaccagtgctcacaggatacagcaggttgaagacttgggtgctgggccgccattgcaaatttctgtgcctactttcttggctgccaccctctcctcctcctccttctcctccagagccttcactttggcctcatactcatcagccagcgccttccactctttcctattgttctgcagtcggtcgaacatgggcaggatctcttcgtggaaacgagagaactccttgtacacgaatgtgcacacgaagtcgatgaagcccacttgcagcttggggagctcggccgccttgttccggtccatcataggaatgggctgctgatccaagactgtcctttccaagtcaccttgctcccagaactcagca

SEQ ID NO: 335106 - DNA, 1000 bp, Homo Sapiens; identical to SEQ ID NO: 157275

SEQ ID NO: 335107 - DNA, 1000 bp, Homo Sapiens
agtctgaatgaaaaatttattttaaacacctcaagtaatctttacatttctacaaaatcataacatagtccttttccagaaacatttattcttaaaatctacttgtttcatagaaactttagtaataaccagaataattcatgacactttagcaaactcttagcagcaagcagaaagaacttattaaaatatcctttctttacacaattagattagtattttgcttcatgtcttcattgcttgttagctttgcttttacacaggaatcttcagactactctctgtaacactctacccctattccttttttaaccagtttctcaagaaggatatggagagctcataaaggaatatcctcaaatatcctaaatatccaacttttaaaataccttttttatccttaaaagctgataaacaatagatgtcacttaacaaatgtctcacagtatatggaaggagcttttttcccccccagagtgtttctaagcatttctatcaagagcaagtctgcatttcttatcgtttgcaaactgatgaaatttccaccttacagacaggcaggtaaatgctttcttttctaaaaagaagtcttgctaccacctcactgttcactttattttttatgcggtctaacctgggtttttcgtaagagctcctttatttcttatattttaaggaaagggataggcaaaaacttgtgtactcattattctgtttaatctctacactggccctcatatcccctgccagtcctgatccttctactttaagcagcttggtcaactgtaagtagggttctagagagcaggctaaaaggttaggatcaaatgggcatatccttttaaagaaatccatataatcatttaaagttcatatagttatgaattgaggctgagaagtgtcaactcaataccatgctgaaaccagctctgtgacattacagcgcaatacttttgttgtgaggataagacatgattccctttcagttctcaggggagta

SEQ ID NO: 335108 - DNA, 1000 bp, Homo Sapiens; identical to SEQ ID NO: 157276

SEQ ID NO: 335109 - DNA, 1000 bp, Homo Sapiens
gatcaatagatagtttatttatcacagcagtgattatattttacatcaaaaatgacaaattaaaaatgaaatatatcactatctatatacgtataacctactgatctcccatattttaatccattttatgacccagagactacattttaatagatactacaagatatatcataacattaattatttcttagaattttaaatatggcttatgtatcaggcttaacgagtcagctaaagtctttatcagctccctcaaaactgattccagggtaaattggaaagatttgaaatctgaatagcatataaaagcataatgtctatgttttccatagttaatttatttgctgttaggcagttcttcagccaacatcctctgtttctgaccaaagtagtgtatctcaagcaggaatagtaagacaagcagggtcatagatctttattgtttcatcccaagaacagtcagccacctgagtggggctctgaagactgaagtctaaaccacaagtaaactctgtatgatgctccactgtttcaagaagagagtcaggctttgaaaagttccagaatcttacagtaaaatcatacgagcaagaggccagcacagaagcatgaaatggtgaaaatttcaccctcctaatagcataggtatgaccaagaagttcaaacactggttgtcgtacattccttaagtcccagcctctcaaactacagtcaaccgccccggtcaccagcaaattctcattgtatttacaccagtcacaactcaagatttctgcctgatgtgcaggaatcacgattcttactcctgctgccttcacatcccatattctcagagtctgatcacctgaggctgaagcaaaacaaccagggatgtggggagaccagattgtgctataaataatactttcatggcctctaaaggtgcacagagactttccaacagttggatcccacaatttgacagtttgatcccatgagccagacaccacaagctgttcac

SEQ ID NO: 335110 - DNA, 1000 bp, Homo Sapiens; identical to SEQ ID NO: 157277

SEQ ID NO: 335111 - DNA, 1000 bp, Homo Sapiens
ttttttttttttttttttttacataagtaaatttaatcatagcatactacatagctcagctgtattagttatgtagacttttgatctaatctataattgtgacaaaactataccgagagaatgaagaagtggaaatatatgtggaacagagccttcctccatggtatgaaatagatttctttaaaaaataaaaaaaaaggaagtgaacaatataagcatattacttagaaacatggaggtatatacctgaaaaactcaagagttgaaagtggtcacctctggggagtgggaatcttgaatgggaggaatgggctggggcttttttgttataagccttgactttttaaattatgatcatgtgtaactgataaaaataaaagttagaataaaagcactagcacaatgtctgccataaagtaggcccttgataaagaatggacatttatctaattgtcccatctctccactgctgctgccccacttcttgcattcagcaatatagacatctgatccgttcctcaagattctattctcacccttcctaacaaagtatgacaggaaaaaaaaaaaaatcacggtttcaatggacacttttattgtttacttaatggatcatcaattttgtctcactacctacaaatggaatttcatcttgtttccatgctgagtagtgaaacagtgacaaagctaatcataataacctacatcaaaagagaactaagctaacactgctcactttctttttaacaggcaaaatataaatatatgcactctagaatgcacaatggtttagtcactaaaaaattcaaatgggatcttgaagaatgtatgcaaatccagggtgcagtgaagatgagctgagatgctgtgcaactgtttaagggttcctggcactgcatctcttggccactagctgaatcttgacatggaaggttttagctaatgccaagtggagatgcagaaaatgctaagttgacttaggggctgtgcacaggaacta

SEQ ID NO: 335112 - DNA, 1000 bp, Homo Sapiens
tttttttctagattccagaagatgcagtatttttcctaaggcaggagaaaaccctagttcatagacagccaggataaaaaccctggaagaccatgagccaaggtgaacgaagaggaattttctaaatcttggggacagagaattatgttacatcaaggcagccatgccaataaaatggaaggctatgaaagcaagcaaggcacaagaaaaccccccattccacagagagacacaagtgttctatttggtgaagagtttggtgcacagacagactgcatcctgtgaagaggtggcccttgtcaaggctactgccgccaggaggatctttgcatctttaggatgtgtcactagctcatcgaaactatttctgtaactctctgcaagagccaatttaagctggcgtctcagttccctctgcactcaaaagagaccaatttccaattcctcctcagagtccgtgagaccagatgctacagcaaatgttccagagaaatgaacctagaaaatgatcccggggtgctccttgcgggggaacacaggactcctcagctctatctctgtggctttaacatacatcagtttcagggtgagtgctaccattgccccccgagagtgtttctgatgggacatgctttcctgatagcacaggggatcttgggggacagaaggttcccagtaaggctagggggcacgtgacagattgagagtgtgatcatgtttccaggtgagaccctattgcatctggcagcccgaattgggcaacaattcctgcaaataagaagccactgctcttgttaggtaggtcatcgtcccataagccccactcggagcgctgtcataaaagaagtggcagattcctgtggcttggtctttctccagggtgtccatggcaccaattgacacctggtcctgcaagaacagctgactggccatctgcacgatctggtccacgtggatgatgcccccgatgctggtcatctccgtgtccgagagcagcgtc

SEQ ID NO: 335113 - DNA, 1000 bp, Homo Sapiens; identical to SEQ ID NO: 157278

SEQ ID NO: 335114 - DNA, 1000 bp, Homo Sapiens
ccctggcgtgtagcagattttatttcatatgcagtgcatgcagcactgaccgggccaggcgtggcgttcagaatggctcccttccaccccagctctgatctcagagtcctggccagtggggagagaggtaccgggctggtcttcaagagggtagcaggatcattagtgggcctgaggccagagcccagaggagctggaatgatcaaaacccttcttctggagagttctgcttcctgggaatccctggggttgaggtcctagcccagcacaagcacggcctcatcctcagttatagcagcagagtctccctcctcttcagggcccatgatgggaaaaggcccagggggccggtgctgaaagagagccgcccggttctgctgctcccctttctttacccagtgcccgtagagccggaaggcacagttgtcgatgaggtgccgcactgaccgcagcgcataagggtccctcaacagtgcattcttggtcagtggccgtacacgatgggtgcttagggccactcgtccagcagccagcactgtccacactgccacccggaaccgctggcggggggtgaggttccagggttggctgccttcacaacgctcaaagaaggggtgctgtagggcctgctcagctgtcaggcgtgcctcaggatccacctgcagcagcctggagatcaggtctttgacagtgctggaacggtcatcccactcgggggaactgaactggtactggccctccatgatcatgcgtaacatcaggatctgccgccggtgccagaagggtggcgagccagccaggagtgtgaacaagatcaccccacaggcccagaggtcgacctccttgccatagcctgggtgggtttcatccatggagcatttaaggatctctggcgctagataccctggggtcccacacaactctcgaagcttctcgccaggttccaagtggcaggagaacccgaaatctgaaagtcggatctgcatattgtcatctagga

SEQ ID NO: 335115 - DNA, 1000 bp, Homo Sapiens; identical to SEQ ID NO: 157279

SEQ ID NO: 335116 - DNA, 1000 bp, Homo Sapiens; identical to SEQ ID NO: 157280

SEQ ID NO: 335117 - DNA, 1000 bp, Homo Sapiens
aaaaccaaaatttactcaaatcaaagttaagtacagagtttatttttaacaaatgtcatagctatgtcaccttactacagaatccagcagtcagaaaataacacaaaaaatgccgaggtttggcgtagctggtagctggggacagtgtcttcgtttgattactgccagttatttccagcatgctaaatccctacccacgtcccagcctctaggtgagtcagtgcgtcactctgtctcccgtccaattaattatttctcatcactccctcaatccaagtaacaaaccttgaaacacgaacatagacaccaggcttattggggcgtgcacagccaagaccccaagaagtgactccttgtaaaatgtatttgtccttctcgaagcaaaccagaggacctccactgtcaccctggcaactgtcagtgcctccggccaaatgcccagcacagagttcggtggattggactcttccattcagaaactcatagcgattgcacactttattctcaatcacagggagctgggcttccttgagaaggccagctccaaaagtaccttgggtttctccccagccagtgatgaaacattcggtccggtcagcgaccacataatttggggatggcagacaagctgggattactttgtcagtgatgacggcaggactgcttagctttagcaaggcaatatcttttcgtgtgggctccaagaacagcctagacacttctatttcctgaacatgcggttcgagattcacttcttggtgtgcacccaggatgaccttgtaggatgaaggccttggggacttctccaagcagtgggcagcagtcaacacccactctggggatatcaaggtgcctccacagaagtgcattccaaaccttgttctaagactgacttgccagggccaggaatgtgggtgggccacacacccccccacaacccttccaggacatttcttcggctccacttgaggcttcccacaatcaaatgaaggggccgcac

SEQ ID NO: 335118 - DNA, 1000 bp, Homo Sapiens
tggtttaaatgacctttaatagaaactctccagtttctgacggtctgtccctctcttcagaggcatccaggacagggtgacccagtgtggtgtgtggacctgtcactcccctccccacaggcaagtagaagatcgagctgtgcacagatgcctcttctgtctcccaagaggttctctggagtcgctgtctccaggggactacggtttgctctcatgaccagccatggaggcagaagtcccagactcagggcagcccttggagtctgatccaggtgtctttaccccaaaacttgaagcagaagtccctggtgcaacacctgtgcctgggagaagctctggccatggcttctcacccagacagtctttctgggcaacttggggaagcccctgttctgctcaagtctcaccccatggaagaggtgggggaagggggccttggtttttcaggaagacaggttggagagcacgagtcactacaaagcagtaaaagtgaatggtgtctccaggggctgggtccagaacaccacggagagccccagccataaaggtgtgttccgcctctggcctgcaggaatctctttgaatctctttgattggtggctccaagagcaatgggaagtcaacagccaggaggctggactgggttccctgggaccccgaggtcccagaggctgctgggcagtggttgtcggcaaagaagaaaggtccaagagggtcaggcctggccaattagggatcgacgaaggagactgcgatgtagcgggtgcccctggtggtggggagcccctcatggtaatgcgtgagtcgtccagggtgcatgagggtccagcccttccttggggctcggatggaacagttgtagcgcaggaaccgacagcccccgccctcgtaatccaccccgactcggttcagggcgatgttgatggtgaaggtggaggcatcatggtgtggcatcagtgagggctgctcatcaggcttgtagcggacgacaaaggccagg

SEQ ID NO: 335119 - DNA, 1000 bp, Homo Sapiens
tttttttttttttttttaaacaataaaatcactttaatgtgctactcttcactttggaaggtcattacagtatcattcgacaaggaaagatgccgctggatggctgtgtcctgtgagtcactgggatgagctggctgctttcaccccaccggatccggggctcagacagttacaagcccgagtggctgggaggtttggagggaaccaggtttagctgtgatgaaagcacctggctgtgggctgggaggcaggagtgcagggcagcctgggctcccctggccccagactcaggtcggcaagtgcccagtggaggccacacaaccccagcaccaagcaatggagggtgtatggctcagtgtttccacatcctgaaaagtgacacatgaaccgtttcctaggaaagttctcttccaccgtgttctagctgagacccgggatccttccagtttcacgaagaacgtgcagaagatgaaaagagtgagggacgcggacctagctgtagctgcactcagccgcctccgcggtaaagtctgggtgaaggcctgggtgagtgcagataggagagcagctcctcttactgttctctggctgggctctcgctccatccctgagaaactagaggcgaacgcctccaggaagccagccaggggcaaccagaaagtccttttggtgaagtctgacatcccgcgttggtttctctggacctgggtaagaaccggccccaggggaaggactgttttgccagcaccaactctccagcccagctgttgttcccaagtactccggtctcggagacagagaagcagcaggctattctgagtgtagtgaacacagagccggtccgaatccggcccagccgaggtgcaaactccctagggtctgctcccacttggccagccatctgtccagcaggcctcagccccaaacacgggaaaacgcagagtgcgtctagtcactgggtatcacactgccccactcacagcccccatcaaggtgacat

SEQ ID NO: 335120 - DNA, 1000 bp, Homo Sapiens; identical to SEQ ID NO: 160900

SEQ ID NO: 335121 - DNA, 1000 bp, Homo Sapiens
gacagagagatcattttattactgttaatatatttggcttaaaatagataatgtggcttctgagaataattattttaagtaaataacatcaatataatttaaattgttggtttcttttttttaaaaaaaagtggaaaagtaaagcttctgtaaaagctattgatataaaatgattttaagtcaaccaagtaatttctgtttttgttgaggaagagaaaggaatgaaacgggagaaaaaggctattatacaatagaaaaatcttatctgcactcaagatgttccttagaaatagaaaataaactctgattcagacttgttttcacccgtttttctctctgcctccggttgcaaaaccaaactcttactacttctttctccagattcagttcttcagccatcctcatgatctcttgagaagaaggtttattctgttctccaaagtgtctctccagagcatctttagcagcaatgcttatagttgttcttcgttttcttttcctttcatttgctcccactttttcattgtacaaagctcctacttgctcagcttcctccagccatttggataatattgctttcagtttgcatgcatttttaaagctgagctgcagattttcaaatcggcagattgttgtttgactgaattcagagccatgcacagctgccagggcctccccaacatttgtctgggtgtatcctaatttaattcgtctcactttaaattcattggcaaacttttcaagttctctgatttctggagaatccatgtctattggctcttccaccaatttacttttccgcctgagttcctgcttgaaatcagcagctgtggggtcctctgccagaagaggctggtgtataggaggaaatccatgactcaaggtgtggtcaggaaatttataaagacaaggggttaaactacctgccatcactccataggttgatggctggtttccataatgacaggaaggaacagaataatgaagtcctgttgctgta

SEQ ID NO: 335122 - DNA, 1000 bp, Homo Sapiens
gagtatgtgtttcctttgtcaacagaagttagaacctcttatgaaaaggaaagaaaagggaaaaaaaggaaaggaaagcaaaagaaaagaaagggaaaggaaaggaagagatggaagggaagggaagggaaggggaaaggaaagaaaatgaaaggaaaggaaagggaaaaagaagggaaagaaaaaggggaaagggaaagaaaaaggaaaggaggaaaagagagagagtacgagagagcgagcgaacgagagagagagaaaaataaataattaagaatactagaatgaaaggaaagagagtgagagagaaaggaaatcccgcgctgctcccagtgcggccggccgcctcctcgcttcctccagtcagagatcatggcaagatgtgtctgttttcacggtgtgcgaataaacctcatgcggctgctgatcccctggcggagtcattcttttctctttttgtcttcgattacagaaccagacacgcaccacttccttctccaactggaggctgtctgccagcgaggagatctcctgcgcggcaggcttgggacacttgaggaaatgcgtctccagtacgcccttgacactcacctcgatggaggtccgcttcttgcgcttgcggccctgtgcagcgatcttgtcaatgctggtcgggctccctgtggacgaatccgcctcctccagccacttgttcagcaggggcttcagcttgcacatatttttgaagctcagctgcaaggcctcgaacctgcagatggtggtctgcgagaacacgttaccatacagtgtgcccagcgccaaccccacgtcggcctgcgtgaagcccaacttgattcttctttgtttgaattgtttggcgaactgttccaactcatcagaggttggcgtctcctcgtcggagtgatcctggcaatggtgcgagcccagttcgccgtgatccgggggctctcggagcaccgggtgcaggctctgtgcagaggcggcagctggaggtggggtg

SEQ ID NO: 335123 - DNA, 1000 bp, Homo Sapiens
gaagctgtacccaatttaattccataatcaatctatcaattacagtccgtccaccacctccctgtgggctgtcctgagctctgttgggttcctgggatggaatcagtgcatcataaagggcattctttaagcagagaaggggccaggccaccccattcaggaactgctgcgggaataaagtgctaacttgcccccaggctgtctatgggagaccctgggcccagtctgggatgtacagggctctgggaagggggcagtcctggcggcagaacccgcctgcaggggcactttgcttagaagaggactctcctagcgggagaggctgggaggggctgcatcaggccgtggagctggttgctgtggtcatcagtatggctgcttgttcaggaagcgggagaacatggtgaaggcagcgaggggcttgtcggtgggaaccatgtggccggcgcccttgatcgtgagaaaggcgatgtgggagaactccttcacgaagccggcaatctgctccccgctgtccccgtacttcactaaccagggccggcgctgcacctccatcttctggttgagggaatccacaaaccactcatcccccatgaaattgcaggccatgtctacatctccattatataataggatctggtatttctgtgagctaagcagcttcagatactgggagttcatgcttcggtagagacggcggtactgtaagtttaccagaaagttgcacatgtcccattgtggcagctgctccgggatgttgagggccttccgcacgtacgggttgttgaggtaggtggaagcagctgttgtgttggtgcagggggggtccatgcgcactttatcccctgagcgcagcagtgcctgatgccacatccgcttgagtggcaggcgagtgaagatgttgcccaaatcctggaccacaacagtgtccttctcatacctaaaatggctgggcacccctccagcacacggggcatagagattgtagatgttgaggcca

SEQ ID NO: 335124 - DNA, 1000 bp, Homo Sapiens
tttttttttgccaagctccagcaatttttattttcatgaatgagagttggggatcagctgttaggttctgtgcccaggacactgactgctgcctggcgcccactctctatacagtcattaacagcaactccctcataggaggctccagccagagtcaggggcaacctgtgagcagtcaggaattgcctagctgactctagtttttgccagtgacctagtgtatactggggaatgcagttcttgtgtagatggaccaagcagtggctcggcatctccttcagtcctaattgtgtagcagctgcttcctgggcccgctgttgaaacagctcctgagataagacacagccactagcctccagtgtctgtaaccaggaacctcccagcatcacagtcactctgaggccaggggggctcccgtcctgctcagggaaagcaactgagtcatacacgattcccaggactcctggatcttctgaagatggcaccaaatgtccaaatccctggacaggcagatgggctccttggtactgcagattcaccacagctacagacactgcagtgatggcactcagggcacgagccagaggggcagcctcagcagggagcagctcactgagcactgaagctggaatggcactaataacgtggtcagcctccagactgctgtcccttagagataccttccagcgcccttctgcctggaggctgagcccacagaccggctggcctctgagaacactgacccccctactagtcaggtgggtttcaagggcctgaggcaacatctctagacctccacgaagtgaccactggctccagcgctcagccaaggcctggcgaatgagtgctgagtctggctgtggggtccgccctgcccccagcagcaggcccagtaatatggaacgatgggtttgctcagcttggaagagactgggaaagcaggacctgatgctgagctcacggctgttgcctgcaaacactccacggcagagactgtcca

SEQ ID NO: 335125 - DNA, 1000 bp, Homo Sapiens
ttttttttttttttttttttttttttttgttaagaaactactctttattttagacaacctcataaaattattttcacatcccccccaacttcttgctcttaatcctcatcttttagttgaagaataaggcttaagagagagaaaggaaaaaccataatggctaaacttagcagcaccaacacggttctttcatcaaggcgtagctcatcatttctccaaactgacatgctacagaaatgtcttccaaaaagcgttaagttttcacagagtggggactatgatttccatgctcaaatagtgtaggaaatggtagattacgttagttttgtttactgtaacaggaattctcaggagtccttagacactctaatgtgggttgatctccagaaggagaaagggagtgtgtagtattttccaagctttttgagcaaacaatccttttctcatggaacacatcagaaacagtttggagtatgctggtaaatgtgttttggggatggaagtcagaaagcctgatctttttcatatggttcctcctattctctgctaaagccagcaacagagtaagttgactctagcatcaagaccactagtcatattaagaaagggcaggttggtcgagaatggaataggaagaactagctgcctcacttttcactttcgcgcctacattttcttcgctccctaagttatacaagatgtacatttcctctcttaagcaacttaatttgggtgctacttccctccttttgtgacagcaactaattcatcactacctgaggagacaaagtgggtgctgcagaagcaagactgtaggccagtgggatttgtctaataattgatgataagatgatagcacagagggcaacgtactgagagaggaaggcagccttaagaaatgatgcagaaatagccaagcaagatttttccaagcactggttaaatcaccagcaaaacaaagcatttatgtgagtacctcaggcctgggcacctctttgct

SEQ ID NO: 335126 - DNA, 1000 bp, Homo Sapiens
aaaattatacaccgatttattataagtgatataaaatacagtgaaaagaatttattgttaaaaactgtcagtgaaacatctgatacacatctggctatgaatggtagattcaaacgtgataaaactgccacttgaaatgcatcacagtaccagcaggcacgtggcaatcttacctccttacttctttgattacaatgatacgatattcactatatccctctgtggttgtccttttgttaaaatttgttctggttttcatagttccttttgtacttcaacaatcacattttggcaacttactctggtaattaaaagttggattcaaggaaaactatgaactcccacatttgttcattctcctttccatccctgaattctgtcttttgtaatgtagaccttgtgtgacccacacagcaaaatttaaaaaatgtacccacttcagatttccccacctatccaacctaatctgatatctcatcctgacagactgcagctgccaagaagaagattcctgtgctgctctcaggaaaatatgtcccacttgttttctaattcaataaagatactggtttaaatgtgaagccacacaagagaaagatgaagccaaagctggtccccctgaggaattgttttgaaataaggcattaggaccctccattcaattcatatttaatagaccaccatctcttctgccttcatcaggaaaaaaacaaaaacataaacaaaatagtatctgcctatgattaatagtatttaattacacgcacttttgtttgagtttacttccttgctttctgaaaaaaacataggtatttagacactagttcatgatgataaaattaaaatttagttttacaaacaaaaattgaaactgtcatttgtaggaaaaaaattcaaatttaaaattgttatttttcactattcttagatagcaagagaagtaagaatttctttactgtgatttatatcacaacagaatttttttccttgacaaaggacc

SEQ ID NO: 335127 - DNA, 1000 bp, Homo Sapiens
cggctgacagctattgaataagtgcatcataaatcttcaaagaaaaaaaacgcttactgtagaatctcaaattgaaaatttctgtgcagcattacaaaatattttatatttaatgagaaaaaagaagcttgcaggcagcacatgaagcatccacagcaggtattatgattgaaaactagtaaaataagtgtaagttgttgactgatgtaggtactaacagcatctgaattttagcactggccttgattacacaggagatggagaagtcgttacaattgagaaaacatatttaataaatcattgtcaatttttataatgtttcaagcccattctttgttgatagcctccacatttatatggttaagtcattgttgctgtgtttcttacctatgacattatttttatatcccttcatttgtggatcttaagatgttgcagaaggttcattcctgtaccccaatacagattcacttcctttagctgccttttctagcaccaatatgctttaaaaaaaaatgcgcaaacaacaagcagtgacagcggccaattcctcgaatgtccagattaataactgtagcatgctaaagaaaggtgtgtgtaaatagctggagatggtatatggtccagagtccagcataaaattatttcctttctgagcattccctccattcccctaacccgaatacatgcattagaatgtagcaaaacccttcggaaacctctcttagccaactgcaaacttatctgttgccacaagtgcaaaggggtaggatgtgaaccagtatatcacaaagctctttagccacttcagttggtgacagaacacaaaaggaaaaaattcctacgtatacacatcagtctgtctccactttttataaaactggaataaaacgggaaagtgccatctttattaatcctaattgaattttaaatgtccttttgacacaaaaaggtatatacatgacacagctacacaaccttttttcaactggacaacaag

SEQ ID NO: 335128 - DNA, 1000 bp, Homo Sapiens; identical to SEQ ID NO: 157281

SEQ ID NO: 335129 - DNA, 921 bp, Homo Sapiens
gtggtcacttgaattttatttctttaagattcacctactcgaagtcacataagcattttaaccatgtatattataccaagtaaaaattaatactaaaatgaggtaatggagaaaacaaaattagatttcttttgctttcaaataatcccacaccaaaacattttgtgaaaatgaagtgatttttaatttataaataaaagactctctaaatgattttcaggatgtatattacaagtttagttttaaatagacttaaatttataacaggtcttacaatgatttcaataaataggcactccagagcacaatgtgtacgtacaacaatcacgtgttgacctcttaatattccaaggggatcaaaatctttttcaaacacagaaagaaactgggctttgtgcaatgctaaccccaatagctattctcctttataaaccacaatattattgtcagtttcgtatacttttactttataaagaactcctacaggaagaactttctggaggttgtcccagatataaacagctacattttcagtcgtgctcaccacatctgcaaagtatggcacatccatatccagattcttatgatcaaggggctgcataatcgcctcctccatatattttttgagatcagccagattcataaccattcccgtagcagggtcaatctctccatgtactgtcaccacaactttataattgtgcccatggccatttggattgttgcatttcccaaacagtttcaagttttcttcatcacttagaaatttactgtacaatcggtggctcgcgctgaaggagatgcggcgggacacttgtgcctggcagcgacggccaccaccttccgtgctcatcttcccggcgctgtctgcggtgctcggccggcacctcctcccgccgcgcggccggtgcctcctcccac

SEQ ID NO: 335130 - DNA, 1000 bp, Homo Sapiens
cagagtctccaaaatctttatctttagaatccaaccttgttttaagaagtagtaaaatgaaggagcattgttagtagtcacctgacaaaagctgtccattattcttgacattaaaaattgaatgcaatgatttaaaaaacataatacattaacatttacataatatatttagaatcacatggtttccagtgattagatttcagtcatgcctggaaaggagaagacagtggctaggagcacattccttataaaggatacataaatggtatacttaggatgactaatattaagaatttaaacacggtgcatttttttcctcaaaggaagcaattttagtttctaaagagcatttacttctgacatctcgattcctgatttcagtggctgcagactgtgtacttctgtgccacacttaggacaagtaaagtacacgtcaaataagaaactactcttagcacagaaataacagaaaatatgctcacatcctatggtgtgaggcatggtgggccactctccacatagagcgcattctttgccactggtggctaatgtattgtcactattaggtgcaccagtaagaggaatacaccatgaagacagcttggctttcaacttctggacattgataagtggtaagagaaaaatcagaaattcagcaaaaccatgccagagaagttccctattcatgtattcaaagccaacttcacgtatgttttgaggcttgcaaaatacagaatgaatacctaggagacgttctgtcaaagttgcaaactttcccctctgaaggaaaatcaaaaaattaatcagcccacctaatttcaaaagtccaatcacaaaattcacacactgcttgactttcccaaatgatgctaaatgatggtttcgaaacaaatcatagcatcgttcttctaaccacctgccaccaattgtacaaacagcataccagattttttgatttttactgggtggctgatatctcaggttaggggaaaaatcattt

SEQ ID NO: 335131 - DNA, 1000 bp, Homo Sapiens
ttttttttttttttttttttttttacccacatcagttccatttattcttcgtacaaatattttacagttttatttttaaatcatttacacatattcatacaaagaaaaataaatttcaggatggaatcctgggaccatggtagtttaaaaaaaaaatctctctgatcattagctactaaagacaaggcaagaggcttagcagtcatttctgggggttagtgtatctccccatgcaggggacaactgagaagaatccaagctgctccctcatcttccttcgatctagatgggggaaggggattttccaatgctctcccctagaaacatttcaagaagtacagcaaaggcttatggtaacactgaacctatttgctagaaatctggcaagattgcactttctgaaccaattttctataacagttggctcaattcccattcacaggtgcttctaagaggatgagggattgccgcactcaccatacccccttcccacttgctctgtcctcccaccaacgttcctgaatacagcccttgatctcttctgatctagtccctccccgctcccacccagcctcatttcacaagcaaaccttcctcctatgccacacacccagacactctgtagcaattggccctggcagctcctgaggaccgctgcagtgatgacacaggactattgcatcagcatcgtgctcacagggaatcagagctcagccaggagaggtccaagaatgacagaaccatgagcactcctaccaaaactcagctctgctcagccaaatcaacaattcaacccaacaggccaactcctaacacatcccatccagacagacattagaggcgcacagcagatgaacctcctacttacactgcccaaggaagctggactatcaattcccagtaaaagtgggggaaaggacagacattacagatgtggtagaccctatcagaaatggcagctgatgataacagttaccctaaatcgtggggtcctacccaa

SEQ ID NO: 335132 - DNA, 1000 bp, Homo Sapiens
gtgttgaaatatttatttcaggatttaaatccacccccttctgagaacatcagattaaaagacctccagcaatccatgattctagtatactcatctctgactgctgtatataagatgtgatttgattaaagaagacagacaacaagtgcatttattaggaacaacattctgaataactcacgagtagttatcttgcacacttaacctaggccagaccacaggcacaggggcaaccacacaggaaaaggataccagggacagagtccatgtagtttgcttataccacaaaaggagttaaggcagtttaattcaaggatgcgttttctacgtctatgacataaacatgacattcaaaaataactcagcctttaaaatgtccccaataccaacaaatcaacaaagtagtcaagatgacagccactgtcaaggacagatgaacagtcacaaagcgatccaacatgacaccgctatagcaggtgctatcgagagcctcctatgcagttaacacagattgacggatgctatttgacggccaccagtctcgcattgtcttacttcacataaatgtattacacttgtccctaggagagcaaatgcatattatgtgagagaaaaataggactcattatctcgtaccacaaacaggggttacagaaaacacaaggctggacaaggccacactgagacaggttagtgacttttctggcaggcccctcataggcactgagatgaggcctaaaaatatgctggggtgagttccgtccttccttctgtggttaccacctggattaggcttcctgagctcggtcggtttttccctgtgatccagtcatggaaagtttcaactaggaattctaagggtgtccaggagctgaagtcagcctcaggcattgatttcctgttcatcggggtatccagggtaaccgggagcacagcgatggcggctgccccgggcggcatgccgctgttcttcccagccaggctctggcagagctggtga

SEQ ID NO: 335133 - DNA, 1000 bp, Homo Sapiens
gactcttaacaactaatttattttaaaatagacaaactattaattgtagaaaatagtaacatagcaattttaaatgtacagttttaaccaatacaaaaaagcaataaagcaataatatctgaagcattatttaagaaatctcaatacacgatctctgaagttcctaaaattctggcactaattctaatgtgaacttagtagcaaaagacccagaaatagtaagcccttgacctaaaaactaactgatttgtatgatattcatgcagaaacaatgatgaaatggagtcaagttttctagtgtcattgttatcaaaataactgtcaaaatagtaagtttgaaacttaaatgagcacaaaataaaattttgttttctaacaagaccagatttctttttaaaaataattctgagttagacaaagtgattttcctaaaagctagctgaagctaccttaaatatcccctattttaagttacagcatctctaaataagttaatcacacaagatagtttaaatacacctttaggtgtaggggaggggagaagcgcctctttttctaatgcagctgttttaatttgaagcttttgcacaaaatcagatagaaacattaatgcctaacccataatgacccttgattacttgtaattttggactagaaataatgtggctttgaacatgccagtgttagaccatactgacttaaaaaaataaaagataaatagacaattgccagttcaaaagatacatggaagacatgtaccattccagagaaaacacaaaccttcccaaattaaggagggcagaataattttgagatgcaattagacaaatctctatgaaaaaaaaattaaggctcctataattaacagtctgtttatggagtaaaattaatttgtatcttaattcttcaggacccagaaacattagaaagtgcacttgggatatactgtgttagggtcctctatacctaagatctggcagaacactttactttttcaagt

SEQ ID NO: 335134 - DNA, 1000 bp, Homo Sapiens
catacagtatgaattttaattatctattgacagctgttaacagcatagttacacttgtgggcctagagcagcactttcaccgtggttctcagcactcttgagagatagcaagagctcagggacctttgccaaagatggctggctcagcattttttcagtatggatcattccttggcctcaacgagattcagaaatctaattaaacttgggaccaacgtctgacagggtgtccaaacatcttggatctggtcttctgcttgggggaattaagcccagaacataccccagcagcaccagaagtcttattttctctacactaaagttcttaggacagcaaagaacccaaactcagtccaaagtaacctattcccaaacaccatcggtcagaagcagaggtaagttatggactgttccctttctggtttttgccttctggcctcggtctccagccaggtaggaacgagctctcttgaatgttcatccaactggaggaattatgctgggccctgccttggtctggtcaccagggcttgggaagtcagcaaaatcattctctccttcccctgaaagcttctctttcctaaagaaagtgaaaactcctgtatttgctagctcaggaagatgggctatctcaaagaatctcctttgatgcagaagcattccagaaatagtgtttttcaagatgggtatcttgggggaagaaacggaagaagctcccagaggattccttgccctttgctgtggacaattagtgttgtccatggggctgtgatggccacctgtgtgggtgtccctgggcccaccaagagctgaggcctggtctccaaagggtggactcatgtctgattgttgctcctcttccacagcagggcagcagcctaccccactgcttccaccgatgagccacaggagatcacctggcactttagggatggtgtggtgctgggacacgccaacagcctgacttcctcaacccgtggttcactccagactcagtgac

SEQ ID NO: 335135 - DNA, 1000 bp, Homo Sapiens
ttttttttttttttttttttttttttttttttttttattttataacaatatttaattattggacattttatgcaaaatagactttgatcagatagcatttgagctcgttgcaaatagtcaacatgcaaaaggaattaagaataatattcatgcaaggatacaacattactaactagactatttttaaaataaaaagcactacctaaaatcatcatattactactttacacacatgcatttctttaattatttttttacatagatttctcacatctattcttgcttcatgggtttcagttttataatttttgggattgaagacatagtgtctacattaagaaactgacatgtttactctgtatttactcactgccaaaagctttttgggaatcctggagaagatctatttgattatctgttttatgagtaacatcccctcaattaatcattgaagagcaagagacagcatcagacataaggacatttttacactggccatttgggacttaggatctattcactctggtccatactctctttggttactccctttttgtttatttggacttgattctggataatgggaaaggaagctggagagcaggaatggtgtttagacttcaggttccagctggctgtggtcaccatgtccatggaactgattgtcaagttatctcgtcttagggaccttccaataaacagaatcatcatagcagttctggtcagatggctgtccccagagaggcaactttagaattaaacctgtcatcagacctccaacaactgctgttccgatagaggaacccagtgcagctgcctgcatggccatagacgtgttggaggcgcccattgctactgccacaatgcctgcaaggcctcccactacaccaggtaagccgtggaggttatggaccccacatgtatcatggatcctcagtttagtagtaaaaagtggagtcaggaacttgtatccaagcacagagaccattcctgcaatgct

SEQ ID NO: 335136 - DNA, 1000 bp, Homo Sapiens
tttttttttttttatcctctctcttttatcttcttttattgcattttgggggcgaatagggggatattttaacccgggctccttgcctgttttcacagactctaagtcgtaaaactctgttacaaaggaaatgactgagaaaatgaattcgagtctttgaaatacaaccttacacaaaaatcactgtcttaaagcttcaagggcaggtggaaatataactatccccagttcttcttgttcaagggaattccccctcctttattacccatcccccaacttgagaacagggtgacacctgagctcactcgggcttagggagtctaaggggggaccacagtcatctcaagcagccctttcctagccttgggtccaggacagttgaggagaggcccagagattctaactacagttcagctggcaggagatgttttcagaaggctgtgttctcagcttgggcctgggggccaaagagctgctcagcaacggccttgccatcatacttgggcagcgtgcccccgaagtcagagggcaggatgttctcatcgatctcctggtagaaaccagaaaggtcatccccgtggacaaagaccctctcaagcagcttgctcttcaagaagggcttgaccacattgtaggtcgtggtgaagtaccatggctggtggatgaagtggatggctttgaaccgggctgggaaggaatcctggagcatgtccaccatcttcctgagatctgaagtccggagactagcagcctgctgcatggtaaagcccttgaagttctcaatgatgcagaagccattgatttgagtttcctcattctccagcagcttctccaggatgaagcaatatgcctgcaagatctcatcaaaggtgatttcttgactttgccagttctcaatgttgaagagcatgaccactcggccatacttgtcccgactagagaggacaccagggtagccagcttcaatggtgcagcggacagcctctggggacaggctgtc

SEQ ID NO: 335137 - DNA, 1000 bp, Homo Sapiens
tttttttttttttttttttttttttttttttttttttttttttttttttttttttttgcaattggcactgttattttattagtacgagtatactgaaacaataaacttgtactggtatacagacaatttatttaaaacaattttgttcaaattttgaatcaaacattgttttattataataatgaaataatttctacctagaaaacctgcaagcaccatcaaagaaagggaccataaaattcaataaacagactcgagtgtatcctacaaatagacacaccacgattagaaaatagaatatgaattcttccattttttaatatttgtttaaaaaagctagtgcaagtacaatattttacactggaattacagagagtatgcacgcatatggaaaaaagttctcctgtcacaataaaagctcttaactattatgtatgcacttaaaattttcttttcaataaggtgcaaaacatcattccttccctagttctcctctgtactggccatgtcagtctggtagtgccctcaacccaagttctggtgtctgttttcccttggcctgtgggaggcatatggtgggtaatgatctgatattaaaacatccagtagtacgagtctcagagatggctctggagccaggactccactggctggaaatgaagactgtctaatctgaaggtcaccacaaatactgacaggactatcttgaaacctcctttcggctgacactaatttgggtttagagttgagcagttcaggctggggagatgaggaaaccccgccaaaaagggcagtattcacagaactgaatgcacaggtatcaagttcaaatgcactaactaaaggatttaccccactcctgggccagaaaactgaaagagtaggtggttcctgtaagaaccagagaaaacctgtgcaccgagcttcttggtaactgctctgaagacaacagcttgagctagtgtcacctaatacttggtattctggaggacagtatgtt

SEQ ID NO: 335138 - DNA, 1000 bp, Homo Sapiens
tccttggtgtctgctctcgtccccaaccacatccaaataaacatctgaagtggcatgaaggggagtgcatacaaaaacacacaatgccagaagtgcttgaagcagaaatctacacttagtcccaggacagtatccaaagagaaaaacaagggtaatgtagagagtgccttggaaacatttaagtgtatctaataatgtcactttaaaaggtgacttttaaaaatagaccaggtaggacaaccaacccaatctgccatactgtttactatgaaaacttaaaaggattaagaaaatttcatctctttggaaatcttgaaaaaagttttttctccctatagtgattttaacttcctcactcccaccctcccccgacccaatttggccttcctttctcaaaactagcttgcattttctttcttcttaaaaaaaaaaatcacacagaattgcttttgtatcatgaaaagtaagcctccaaaatgatttatacttgctgtctgggcatcaaaaatttcaaaccagtttgtaagttagaaacttctgacagcttcttttcccaaattactctcaaaaggctgggctattttgtcatggtgtcttgggctaacatctatatttcattcctggaacattgctatcaaaatctaaagcctaattcccttcttcagagggttgctcgggatgcagccctgtgttctctggaaggtttctggtctccagttaaggtgcctaactgctggagagtgacctacagatgacagtgttaaaaaaaaatggtagtaaaaggaaggagggagaaaggtctacagtaacgctcttgccaaaacattcttttgcccagccaatctacttgaagagtggctctgtgatatactgcaagttaaaaaacaaaacaaaaacaaaaacttctcacagattggtagcaagcagttcagaccactttaacactgataaaagcaattcggtggctgaacttgatccagtgtcctttatgagtactcac

SEQ ID NO: 335139 - DNA, 1000 bp, Homo Sapiens
ccagaggcaccaaggagggtttattgtaagaactgtacaaaggagcccgcctgctggcctggcgtgggacctgttccccactggaccaggcaggaatgggcatccgtctgcaggggaggggccacaggcagggagaggccggacccggctcatctactcttcctctgcaacctgcacacagtccgaggagaatatccaatcaaacagatttctgaggctccaggggctgtgccagcccagggcccaggagggcaaggcagaggggcaatgtgccaggaaggggagactgcccccattagacgaaacttctgaaggaagagatggaaggagtggaggcctccttccatagaggagacataggcaggaggcagggagcagggctgaggccatgggtgtgacaacgagaaacaggaaggggaggagaggggagtgagagagagggctgttcaggcaggactgggaagcaggtgagagagcatggtggacaataaagacaactctggcccataggcatggcatgtagatgtgcacacacacacacgtgttcacacactcaagcacacatacatgtcttgttttgaaggttttgctgcttcctgaattttaatcaaacttttcatgagaaacaagaagaaaaagaagaggcacttaggccaacagaatgccctgagtacacaccttaccacatgcgttcacacgcatccacacactcacagcacaggtccactctcccaggcacgggaacactcccagggacaggcctgcacagtatgacacaccagccgtactccatggaccttgaaacagtccagggcacacatatatacacatatatacaaagatacccagacacgtgcataatgcaggctccagtacacagtggttcacacagtggttcacacacacacatacagtcacgcacttgaacacacacacagctatacacacaggcctataaaagcatacaagcagacacacagccacaggtacacacacaagt

SEQ ID NO: 335140 - DNA, 1000 bp, Homo Sapiens; identical to SEQ ID NO: 246387

SEQ ID NO: 335141 - DNA, 1000 bp, Homo Sapiens
gaaaagaaacaatttcttgttctttggactgctaaattacatatatgtgaacaactttagaaaacaaagcaaatgttcagtggtttttaattatttcactcttaaagagtactttttaaaaagtgcttttcttcaatacacattaaagcaaacataagaaggattgatcagtgctccagttggtggagaaaacagcctagagatacgttagcaccctgctaagcttttgggacccatcagaactatatttccataattgtaaaattgactgtaagctaaagtctgtttaatcatctgtgtatttccaatttgcctatgtaggtaaaggcagatagatagtgtacaatgcgtgttagtaatggccatagaatagtttggctagaatctgtatacagctaagacaaagaaggaaatgtcaaaggagacgattattttatgttaggaacacaccataaaacaatcagtctttccaggaaaattaaatagggattttgataaaagtctgaagctgaacatttatgaagtttcagaagcccacactcaggaatcctcaaaccctaccttttcaacttattttgagacataataattcagaaaatatttttaacaaagtgatcaatcctttacttcaaattttcttacattagatttgatcaaacttattaggaatttgaggtaatataccaaatgtctgactcatgattgtttgagtgtatgtgaaaaccaggctgtcctcaattaaaaagcaaagcaaactataactcaaaggattgtaccagaagggaatcaacatggttttataatagatgttaatgttaactgataacccacgctatatgatcaggtgaaacctttttagtgttaaatcttgcaaaaaccatttggccattaaataaaggaactaaaatggttttcttttctgagtgctgaaagattttgataagcctaccaaaaatgaaagtttttctctatagacattttttagtatactctataatcc

SEQ ID NO: 335142 - DNA, 1000 bp, Homo Sapiens
ttttttttttttttttttttttttttttttcaaaacatttgagaacctttcttaaagcggttacattcaagctacagaaatatcgaagaattaatgattgttcaccaagcagcatgctgtacatgaagctattacaaatgcttacaatcccactgaaatgccagtgtcttcatctcttcataaaggtgcctaacacgaggtatacagtatgttcagtacactggaatagcatgctcgattggaaacaaagcatctatctctgaaagctgtttggcgatgaaggagattcttcgtgttgtgttcaaagatgagtccctctcccttgtccagaaaaatgccacttgtatcaactttactgcctttgtcggcagaattggtacttaaccttattcttattttagcgggaaggcccgaaatcatattatgtagatttaacagtgttgattctccaaaattcagaaccacgataaagattctgtcgatgccatccagctctcttgtgtacacaacatagtggctgtcattcctcaaatggcaaaaccagcccctgttgaggagtagctcattggcatgaagtagacttaaatcttgatataacttcaaagccgatctgggctgagtcttttggacatcaacattcacagtgtggtaatctgaattggtaggtaaccaggtgttactagcttcagaaaaaccagcatttgaactattgtcccactgcattggtgactttgagcgaagggtattaatatcatagctttcattgagatttgcggctacaatatttcccattccaatttcttctccatagtaagttataggagttccagggagtgtgaaaagaagcatgttcatcacgttgacatactgattccccaaacgcgaagtcagccgtgaactgtctggtccaccaatcatccagttaggccattttccttctggcatgttttccatccaggatgtgataacctcatacacgctgttcccagaaacagtgtct

SEQ ID NO: 335143 - DNA, 1000 bp, Homo Sapiens
cagcccaatccctggatcatcctgcctgtaccttccttcacccaggacgcctctctctgggcccagagaagagggtctcaaggtaggggctgggagcagagtggggaagggaggagtcacaggggaagggaaagtggacgcatgactgacagaggacagagctcggaccttgaaatcagaaggcctggttcaaatcccagctgcacggctcagttcaaatcccagctatgtgaccttgggtacgttcaaagacaaatgatgactgctatagaacagtccctgtggagtttacaaagccctattttacatgtatctttggtcctcagtaaccatcctgtaatgtgggtattatcatcaatatacccattttacagaagaggaaatataggcctggaaaggtcaagggacttacccaaggtcacacagcaagcaccccacccgctcacccacctcctgcctttgcttctacccctgcctgtgctgggaagagggagggctcagatctaagtcttccagcacgggatccccagtgaaagtgtggcaacaggagggactgtgcaacaaaccccctaatgtgggccccatcggccatccccagccagaaaagccaggctaccctttgtggaaggtctcctggacacgccttccttccccacccacagccctggggcctcagctgctgctccaggaggatcctgagtccatgaggtgcccatgaacttctgcttttccttggaaggtggggatgtggaatggtgggggagggtctagggcctgggcccgcccctcacacaggcatggccacttcgtcgtattcatcccgaccttcctcctcatcaaaggttgccttggcatcatcagcatccagacactgaagctccacgttcctgaagatgagcggcagcaggacgcgccgcagcggcacagtgaggatgaggacgaagggcagggccagggaggccggcgtggacttcaccacccacagcactgccaggcagat

SEQ ID NO: 335144 - DNA, 1000 bp, Homo Sapiens
gaggggaaaacagctttcttttaaaaaaaaaatggggaggaggacggacaggaaaagtggcaggaaccagggagaccaaagtttctaaaacaatattcaaggattataaaccacactgacacccggaatctacctgagacagactcacgtcagacatcaatcacatggcttctgattcttagtctgcctttttctggatgtgactgagtggactcccttctgcggctccagtaggtacagatggctgtatcacactggcttcaaatgcataaattaacagcaaactaatggttttcttccagctagcctataattacacatgtacacatttatccacctgggcaaaatttacaactggctgatttcccttcaacaccacaggacgagactaaaggaaggtgagtaagagtccagccatggtaaatctacagcaaaaggtaggactcaggcaaaatatgcatggcaaaagacagccacggtcaccaggatgatgccattgacgttcaacactgtcctccacaaaggcttctcagaggtgtccgtcatcttcatcttcatggctttctcctcttcctcagtcatcttgggtgcaccgtgctgctctagcccacaaaataggtcataggctctcctgaagattccttttttcttctcaggaacttgtgtttctatttcaatggtctccttagggccttcttggatgttctcctcttccgcatccaggtcaatacgctcctctttgctgttgcgcaggctccaacacagacggtagagatgcacatccggaatgggtttggtgaggagggagatgaccacgatggtgatgaaagaaatggcgaagaggataatggcaaagtacaagtagtgcaccccacagataatcgtgggacagttgctgggctccatgcagctcccggttccataagcaaactcagtaatcatacgtgaaatcccaatcagaagtcctaggatcagtccccaaaaggctcctggctcattg

SEQ ID NO: 335145 - DNA, 1000 bp, Homo Sapiens
tttctttttaatgcaatgtatatttattgtaaacaataatatacaaaaaaaaaaaagagaaagaaaaagggaaaggtaagtttcacggagagaacaaaaggtttggggctgggagggaaacaagtgaaacaaacaaaacacgaacacaaaccaaagcttttacctaaagacaaaatatgatttaaatgccaggtttcttaagttacagaagtatctttttaaaaagatctgcttttatacagaaattgaaggatgccatattatgagtgctttaagattttattctactgacttctaaaactgttaatatatctttttttaaataaaaaaaaaagtttgctgtcttttttaaaaagcaatcctcaaactctctagccacagcagtaattaagattaaggtctgtcagtgggctgatcccctccaggtagcctccctcactccaagagaagatgtagagaaatatggatgacacatgcttgcattgtttttgtgtcaaaacacacacacacccacacacacacacaatataaggcagcccaaaggtctgtggcagaaaacactgcaaatgactcagtgatacactacatttgcaatctctcatttatacaaaaaaagaaacaagtttccagtttgttttcaacaaaaacaacaaagaaaaaagggatggacaaaaaggcatttatacaaatctagggtgaggaatacaaagaaacttgcttttaataataaaaaaagattaaagagataaataaaaaaaaactggttacagttaagaacataatttaacaacagatgaccataccctttgaggaaagctccaacaacctattttaaagaaggtaaaattggaaaaaaaaaaaaaaaagaatttttttttgttttaattaaaacctctccttacaaaataaataattttagcaagtggaatgtcttgaaggttaactgctggtgttctgagaggcacaggtgacagagcgagcaggcatctgccttccacat

SEQ ID NO: 335146 - DNA, 1000 bp, Homo Sapiens
catgatttaaaggtatttaatgaacaacaaaaacacttatttatatgattgcaatttgcatttttcagtaatctacatcatcctcagacctttcaagtttcctatgtgacttatatagtgagtttctgtgcttagtaccactggtgctcatttgtcaaaacagtttgctaaatattgacaatgcattccgcaaacataggcctgagaagacaaatatttccatgtattccaattacaagcgttcggccccttccttagagagtccatatctcagcactcatgctggggtgaccccttcacaagagtttgcaaactcaaatgcttactagctacgtagttccagttctggtgtggaaatgtgggctctgtatgttcagatcctccaactttttaaatgaaactagaatgctagagttttatgaaggaatctcctgatttttaagtttttgaaactttgtaaaaaaaaaaaaaactatatgtctgagccaaacaaaacaggttttctgcccagacgtgcccctctgtctgcaattttcagtctctgcctgcaggtcctttgagggaggcattcaggctgcccctaggagacaccttcttgaacaggtcctgagaactacaaggaagaagctccaggaaaggaaagttgcttggggcttctgctgtacttcatattgttgtggacatctggtggaggcaagcagcatgtaacctcatcattaattctctttgttttacactactcattatttggatattgccactagtttccaaaaacatgagagtttgcaatgtctattgtaaaactgttctctatcctcttagtagccatccagggtcatgttgttctctactctctcataagccacccaggttcatgcctttttgtttgtggttattaaaacctggccttcaagaatagccataccagttttccggggattgtgaaatcttctggaaaacagaggcactcatcaactaagacactgcacaaatttgaaat

SEQ ID NO: 335147 - DNA, 1000 bp, Homo Sapiens; identical to SEQ ID NO: 157283

SEQ ID NO: 335148 - DNA, 1000 bp, Homo Sapiens
ttttttttttttttttggtgtattacaattactttattcagatctattacacaaagagatggtattaagcaacactggcttgagtgatatcttgcaacacagaacaggttcacgatgtcggaaaaccaagaatgctcagggcctcagaaagctgagctctaaagaccctgcacagtcatgctgtcccaataggtttcatgttgtcatgaatgatgtcaaagaaaaaaatttttcaatgctacctattaaagcacagtaagactttatttaggaccatcatgacaggtacggggaccacagcaatggggacttgtagtaggggagagagactggactcagctctgaatacaccatggaaaactggggatttatagacagggaacagggtcaggggcagtggatggaagattaccaagaggaaatatcagggagcattcatctaaaccgacctaacaggattctagctgaaggcaggccagttgaccagacatcacctgggggatggtggaggctgaggagcctgatcagatactgaggttgaacagatatgggggggttaggtgttcttgctaaactgacctaatagacttcttgccaaaactagattttacaaggaagtgcccagattgggcctgggagaaggttgaggagcttggctaaagtttggccaagtggagaatctttgtccatgaagcctcagatggatgtgaggtccgtagaggtcagacagctatgatttaagaggttttgagcatttgcatcacacatcccattctctaggcattaaagagaaggcaacaaggctttagcttttagaagtatccatgtaatcaacacctttcctcccgggcatgtcggctccctatggccacgcactctccagcagcctctttatggacactttttgtcattttaagagaatagctcgatcgaatgagagccgatcctagtcccaataccatgcccttctcactccaatttcttactgtttcggggtttg

SEQ ID NO: 335149 - DNA, 1000 bp, Homo Sapiens
caacccagtcaaatttattagagcaaatgagttgaggggtattctgacaaagagaaatatacaaacatagagccttcctatgctttggataataatgaattactcattgacattctgaatgctctgccataggattggcctcttccacagccaacaaagttcagccagggttcaatcttcatcccatcataagggaatgcaagtccaagctcacatcaatcacaccaggctatattatttatttatttcccattgcaatacacacgtgcaattagccaatggcctttttcccaactacgcttccgttgggttcacaactttccctagaaagagaatactccttgtgcttctctccaaaatcaacaacatgaaagatctatcaatttggataatagggtgtaggaaagtgttttcaggctgatccgaaagttcaacttcagggacagctgcagcttcagttcccttttcaccaatgtgcagcacagccttatgggcagcattggaaagtttcagaccattgtcctctgtgagtccagaaaaatcagcattttcagaataggcatgctgaatgcccatcttcaaaagtgtggctccaaggtcatatgtggcagaaatggaaaactttggaacaaacaagtcaacccatcccttctgtagtaagcggttccacttcttcagtgttttagatgacatggcagcttccactgactccatctgtccctccttgggaagaacaaagagtgccagagcattcttgctgtagtccatttgcagaactgtgcagttcaattccatatccactaggtgatagtattgttccatctggtgcatcatgggcacttgaacagtggtggtcttgtctattaagaagctggaactgtcttctgtcttggatggatcaaaaggatttgcccactgggctttaaagtgaatatagttcactaagaccatagtggtgtttggcttgaggtcttgaattagacccacaactttccctttg

SEQ ID NO: 335150 - DNA, 1000 bp, Homo Sapiens; identical to SEQ ID NO: 157285

SEQ ID NO: 335151 - DNA, 1000 bp, Homo Sapiens
tatgtttctttggttttattattacaaacacaccatggctctgtcacaatagggaaatctaagctctacataccatttcttttctacctggacagggccccataaaagcctccaagccacgtgtagatgtgagacacatttgacagaacatttcaactcatagcttataatgatgccatttctccagctgtgcaagggctttacaaaaactgtgccaggacttcccatgaggctggattgcttgattcatgttttatgagccccacaatactgaagctccttttccagggacttggcataggcagtcaattccacatttgggataggtcctctctggaagtgaatgtcaggcagtgacatccaagtttctgcatgcagtgggttaacagccatgtttagggggaacatgatttaaaaagtacatctctctccctcctcccccacatgcacaaggctcacatctcattatggtgcggcccatgtacattaaagtgtgatacttggttttgaaaacattcaaacagtctctgtggaaatctgagagaaattggcggagagctgccgtggtgcattcctcctgtagtgcttcaagctaatgcttcatcctctctaataacttttgatagacaggggctagtcgcacagacctctgggaagccctggaaaacgctgatgcttgtttgaagatctcaagcgcagagtctgcaagttcatcccctctttcctgaggtctgttggctggaggctgcagaacattggtgatgacatggaccacgccatttgtggccatgatgtcaggctcggcaacaggctccttgttgacactcaccacattgtttttcaagctgacttccagcttgtcaccttggagagactttagccgcaccagggccccgatgcctccgctaaccaggatttcatcaccaatgtggtatttcaggatgttggcaagttccttggcatctcccaagagtctgctccgttctcttggtggcagggc

SEQ ID NO: 335152 - DNA, 1000 bp, Homo Sapiens
tttttttttttttttttgggattcgccagatgccccaggaagggtttatttaattcattccaacaaatgatcctataatgcatttatgcatttaaaagcacagagacacaagtcctcatatatgaagttgttatggttacagaaagaaaataaatatttgtgcacacagagatagcatgaaatcattctacagtgaaaataatagcctctggaaaaagctttgaaaatcagagatggtgccaccaccagacaacacaagtgctggggtacagggcagccctccatgcatctcatagcatttgcatggtttgtgagccccatttaatgacataaaatgagggcactgagggaggaaaagtgaacagacacacaacccgagagcacattgttatttgtttattttgtacaagtgatgtcataagcaaggattttgcctgtgttctagattatctccaataaataaataactatgtacaaatattttgagtttacaaaatagaagaggaaaacctttgtcttacaaaagttacatttctatgatacatttatttccatacactgaagcaggatttcattcctagcttagctgaaccaaagaccttgcagaccctgtgtggcagtgtctagagctgtgtacctagccttttctaccaaagagcaaagctacacaaagaaaattcctcagtttcttgaaaataagggcctgacttggcctgctacttataactgatctatatttcatgtattccagaaaattggaagcagtctggaatggttgtcctcaaattactgagcagacacaccccctgcagatcttgttaaatatagattctcatgaactggatggggtggagcctaggattctgcatttctaaccagctcccatgggcagggcagcttccaattcttgttcaggggccacattccaaaaggcctctctgaaatggtagaaattctctgaggacctgattaaggctaggccctaattgggcatcctcca

SEQ ID NO: 335153 - DNA, 1000 bp, Homo Sapiens
tttttttttttttggaaaatcctgaaaacaatttaattgctctaaaataatttacatgtggtatatcttccatcttgagattttaggaagtcagtattccccagtgaagacacatattacataaatgatcaactacctaaggatatctcatttgtatttaagattctttgggcacaactgcaagcggaaaggactctatcccatggacacagggtgtttctccccaccctgggcagctgggcttcagggaggatgaaaatggacccaggacgcaggtggcctctctttggttctcatctctttctgcagatcagcgttctgtttctcagatccatgtgctggaatgtggctgccccacagctcccaggcgtacacagattcccctttcagcagtcaacttgcctttcttttttttcttttctttttctttcttttgagacagagtcttgctctgttgcccaggcttgcgtgcagtggcatgatctcagctcactgcaacctccgcctcctaggttcaagtgattctcctgcctcagcctcccaagtagctgggattacaggcacgtgccaccacgcctggctaatttttttgtatttttagtagagacggggttgcttttctattcccaagtccaaaagcctatgaagagggccagcgcaatggctcatacctgtaatcctagcactttgggtggccaagacaggaggactgcttgaggcctcacgtcaagttcaacatcagcgtgggcaacaaagtgagaccctgtctctacataaaagtaaaatcaaaagtctctggagagaattgtgttggtccagctcgggttagttgtccattcaaccggtgatacaggcagagttggggagtcatggcttctgaagcccacagtatcgactgggagcaggtctcagagaagcaagaatcactgtgagcaaggagttgcttcaaattaatagccttacaaatctattagaatacatcgatggcagagagcttcta

SEQ ID NO: 335154 - DNA, 1000 bp, Homo Sapiens
tttagtgcaaaacaataaatttttatttgttcacagttaaacacaagcaactgccttgacattttagaacattctaagaaggacagcaaactcttttgattccaattcccattcactaagattgtaccattttatcctgcagttcatatttatggcatctgatgtggattgttgacatgcttttaggattgaggcgggaaagtttagaccttttgacaagagctgactttcttcaatttaactaaaagcagtccgttaaaaaaaatcagtttctttcactgatgggacccctttaaactgcaagtttgccacacatggttcattcatgattgagttataaaactagattatgtcttagcaaaatctgttcctccgtaatatatttgtggtccatagaagtcttctgaaaagtgattactgattcttcctagtgcaaaatgcgtggctgcctctttcataagccaaagtacttgctacacagagcagcaccataccctcctgtccaaacactgtaagaggtggggaaagggagggaagggttggtctgggggttctcagactctcagggtttccactgaaaggtccattccaatggttaaaccagcctacttatctcagaggatggataatgtggcgctgcgaagtggggaggaagctcctctgccatcattaactcgtttcatgaccagaagccatgggcacaggtgctcggctcttccaggcaggcttcccttgtagctacagctactcttccctcaggcgagcagataaggactgcaggacggcatggaagagacaggaacacgctcccctgggcacatcgaagagtcccggacaggcaaacaagccacatgggacaagggtcacagcagcagcctaggggccagtcctcgacctaaacttgttctttcacctacagacaaaagcttaatcaagtgcaatcaatgccttgggatctttgcagcaatctggggggcatgtgtcacagaactctggatgt

SEQ ID NO: 335155 - DNA, 1000 bp, Homo Sapiens
ttttttttttcacgattattccataggaagaaaatttatttcatgttgtgagtgcaaattttagtaacaattctgttgaagtcacttttctaggactctgtttccaaagcaattagttcagctattcaagatgaaacacattatttatcaagatgtgatattttgaaatgtcacaggagagaaacacatgacaaaaggcaacacatttgtttaatttcattagttacaagcgaacttctaggtaagtcatgattttcgatgtttataatatttctattaagatgtgcaggtctcaatgatagtgatgagtgggtatggctgtggagagattccaggtgagtccagcagggaccatctgtggggacccattaacgacacttcacaatcttaaaacaacaaagagcttttatttcatggtgtggtttatgagcattcagaagtaatgtcatctctgcttggagacttttctagcaggacattagggggctatcatcacaggtaacctggagagtacatctgtagataaagatcctgactattttaagtaaagaagaattattggggaaaagaagctttatgtccagtgatcaacagggctggaaagagctggcagtttcagaaaagaagaaacctctcttgacagctttagtatcataccgtggactggaaatggcaaaaatcatccctaaagacaagcgaagtgttttgaagtgactcttcatagtgaagtagcaactctaaatagccaaaatttgcaaccatcgtttactcttttatataaacacgaatctgtttttggcctgatataacagctgggtagatctagtaattaaatgaatgattcagatccaggcgagtatgtttacttaattgaatttttggctcagacatcataatcaaaagtgaaacaaaggaaaaatttcctgggtcatgtgtctaggcttcaaggactaggagtcagcagccctacaaaataggaaaaacagattctacttactta

SEQ ID NO: 335156 - DNA, 615 bp, Homo Sapiens
gcctttcacaggaatgttttattgtctctgcctggacttctaacatagcatatgaggtgaaaacagtgctttagtaaaaatggaatactcttggttacatgaaatcccatccctcgtccttcaggtccactggaggagaagtccctcattccttgggattggtgacgacagccgtggtggaataggagtaggggctcagcagggcggcaatggtgtagcggcgggggccggagtcgttggctgtgaataccacctctgcatgctcatggaatggggagatgccaagtgccttccagtaagatttggtgtctatttccactttgtatatcccttctacaaattcctcctcagttgtgagcccatgcagctctccagactcactggttttcccagaggcaaatggctcccaggtgtcatcagcagcctttctgaacacatgcacggccacattgatggcaggactgcctcggacagcatctagaactttgaccatcagaggacacttggattcaccggtgcccgtagggccagcctcagacacaaataccagtccagcaaggcagaggaggagcagacgatgagaagccatcctgccaagaatgagtggacttctgt

SEQ ID NO: 335157 - DNA, 1000 bp, Homo Sapiens
aaaataagagcactttaattcacatacaaataacagttcctcattaccaaatagcatcctttccttagacatatgggcttaggggaaaatgttaaaagggctgagtgaaaacagcaagacaaagacaggtgtgttctacctgagttggaagaaggctacactttgtattaggttacaattttgcaaatggtctttacagaaaaataccagcagatattctctgggaacctggacattactttgagttagagtgaggtcaggctttttggccctactctattgcctaagccttttataaatggctctgatacaagctgtggtaatcctctttctccatgaggagtggctgcttttcttcaggaagctgctttctcttgtgacgacacagcaagctcacaagccctgccagcagggcagtgaggacggcccctaccatcgccgccccaaggagccatgaccagatccgactcgcttgttccaaataggacttaatgtagtcttgaaaagagtctgggtctgaatcttgtagatagctatagtcatagcccagatctttggatgaaataaagaaatcaccatttctgtacagtggtataaaaggaaccatgtaggattcccggttatgtccaatgggtgcattggcttctggataaacttcttgaagaggacggtgccttcggagccactgctcaaaaatactgtcaacaaatgcatggtgaagaaggaagataggatcgttggcagatccctgtacctgggacattgttccattcatatagatgtgcaaggcattgtgcatgctgctttgagaggcatccgctatcccagtaagtggactagcaaatccttccagtgtatttctaaagctgaaattggcagctttatccatggaaccagattcatattgggtcaaactcaggcaaaattctacatcagctgaagaggggagccttggggttctggatttgtcatggtttccaggattacgccgtaaaggtcc

SEQ ID NO: 335158 - DNA, 1000 bp, Homo Sapiens
aatacaggacacaagaaaagctgtgctgactttagcctcttggtgccctagaatttttgtcttactgcaattaggctgggcacagtggctcacacctgtaatcccagcactttgagagactgaggcaggaggatcgcttgagcccaggagttgagaccagcctgggtaacatggcaagacctcatctctacaaataataaagaaatttagatggacgtggtggtgcatgcctatagcaccagctaatctggaagctgaggtgggaggatcacctgggaggtcgaggctgcaatgagccgtgatctcaccactgcactccatcctgggcaacagagtgagatcctgtctcgaaaaaaattaaaaaataaatagaataacaaagcagtctagtcccatggagagataggaaggatcctcaaatgtggaagaccctaacccagacaggactgtggctgtctaacaaacaccagtctcaaaaaaagcaagcttaagaatgaacttattatagtatcaatgcggtgattacaaattactcaatatttcctaaagaccatgagaactccagaacccattcttacacaggccctgtggaagaatccaagcaggaataattggattatttccagccagtgactttcaggaggaccacatatcttcaatgtcttcacattgtatctgaaaaatgtatctgaagcactcaaacaccaagtctactcaaatacgcttcccaagcagcttttctgtacatctctgctgcttccagacgatcagctgctgagattatgccacgacctacaatgatgatatcggaacctcgtttgccaataacttcttgtgggctattgtactgttggccaagattatctcctcctgcttccaactgaactcctggagtcaagtgaagaaattctggtttcatgcttactcgggagccagaaataaaaccaacaacaaattcagagtgctcctcagccattctaaccgctgctctagtgtagtc

SEQ ID NO: 335159 - DNA, 1000 bp, Homo Sapiens
aagcacaggtagtcagtgtggtttatttgacttccttcctgctgggcacaggaagctctcacagggctagggtttaagctggcttccacagagggcagtcacgtgcacgtgggcctgaggccagccccaggtcaggtcccgatccccggtcctcaggtgcttccactcaggcttgaggcaggagtctgacggcagcagctcccgagagcccttgccgatgcctggctccatccagagccagcccagcccagggaggctgcatggggccagcgctaggtggctgactcagcagcagccatggggctggagagccttcctgatgccagtggccagggcttgtggcgtggggctctctgcagtgcagcttacaggaaggccctgggcggccagcgcgcgagccgtagtggggccgatggctgcaaacttaatttgatcgatattgtcaccagataactcctgaatgtgcttgagactgtatgtgaggccagagggactaaaaaatgtgatgctggctggaaccccctgctgggaatagtagctgttcaggttcccttggattcctgggtgtgcaactgtctgatacacagttatgctttccatggcaatccctttgtccttgagcgcttttggcaggatttctcttttgaggtttccacagggaaatagaagaggcagtgctgaggactccctggaacaaatatattctgcaagcttttctgcatttccacaggtttctccttctgtatccaggccaattttactcactagagaagcagtagcatttccaaccacatacactgacttggcattccatttttctttcagagacctttcccagacttcagttttattgttttgctccaaacataactctgctgcttccactgctctggggctggtaaaaatgagtcccccgtaatcttcaggatgagaaagcttctcagagaaactgggaagagacaaaaactcaaacgataaaacagggatcaaagtggcttca

SEQ ID NO: 335160 - DNA, 1000 bp, Homo Sapiens
atagagagacagaaagacaattcttttatttttctttaaaaatccttgagtgaagagaactgagaatttttgtataaaaagggccttgggattgttgggtgagtgtgaggaccaggcagggataacagcattggaggggttggtggggaagaaatggggggttgggggccctggaagaggagagtggagggtgggcacagagcaggtggagggggagccatgtcctgcggggaggagcacagggcagcaagtaactcagccactcagtcatcccattcatcatcttcatcttcatcgccagcctggtcctccccttcgtcggaggagtggatggctctgcttctcttctgcatcacgtgcatcagggcccccaccagtccctctgagctctgaggtggtggctgcagcgctgagctctctggggccccaggggtcttgttcagctgaattccctgccggatttgatccaaaagcgctccccgacccccaccaggggccaggcccccggcaggcaccagagcaggagggagtgggggaggggctggtccattcccggagctgggcggcggtggcggtggtggcggtggtggtggcatgggtggcccaccagctccagggggtggagggggcagtggtccagaacgtccagtagctggagggggtggtggtggagggccccctcggcctgggggtgggggtccccggggtgttggtgggggtggggcaatccccaaaggtacagggggcagtggaccagaacgacccttgttaccccccacaatagggggccgggggagctggttccctcctcgagatggcggtgggggcggcggaagtggctcctggcgcctcatctcctgccgcacagcctccagcccaccctggtcctcaatgaagtcgtagataagtttagaggtctcggcgtcggtgagctgggcctcgctgattcctgccctggagaacagactccgcagatctgggtcgaggttgttcacgtcaa

SEQ ID NO: 335161 - DNA, 1000 bp, Homo Sapiens
tttttttttttttttttgaggttatacaggctgtccagtaagtggggaatagcacaaacccttcccgaccctattccagatacatgattaaaacagacagaaaatgatcctaattgcatattcaccatttaggcataacagttttgaatttgcttatcattgtgtttacaaattacatttttgatcaaaatcttccattgcattcacttgtcttccaaatcccatcttgacaaatcacaggtctgtcattctgtgactttaatagatccatgttctgtggtatgttcctcctgctccatggaagcccaaaggcagcacaagaagactctgctgaggactctctctttagaccctcacagaccagggtttgcagttttctgggacaccagtgacacacagggtggtgaacttgtccacgcaggcattgcggatcttctccggggtggcagggctgtctaggcggaagagttccttcacgttattacctgtgtgctgagctcgagctgcacggatggcatctttgatggcaaagaagatagaagcagccaggaagaggggcggctctccaacagccttcgatgcatagatggccttcttgttggggcagtcgcggagcagggacaccctgaactcaatggggatgctgccaaatgccgggatcttgtaggtgctagggccacgggtgtgcaggctcccctcgggggaatagtgtagctcctctagggtgaagaggccaaggccctggacaaatgccccttccacctgtccaatatcaatggcagggtttagactggagccaacatccatgacaatatctgtgcggaggttcttatgatctcctgttaggcagtcgatttctacttcagagcaagccaccccatagctgaagtagtggaagcggttccctgagttagtctcaaagctgtagcccagattgggtgttctataaaacccagtggcagacaagctcactgtgtccatgtaggcagctgtgacccag

SEQ ID NO: 335162 - DNA, 1000 bp, Homo Sapiens
tttttttttttttttttttttttcagactcgtacaactcaatgtttatttctgctattagggctttttccagcagtagttccccactgtttccaccatcgtggagacagaaatcgtcctaaaaaacacatgactagaacctggggtacagtggtgcaccaccattgctattatttgtttcttggttaagaatccagttcagcctttgttgaacccttttccctctaccccaatctagggtttgccttggtatcttgtcctcaaatttgtagctgacctaccacttctgcacctactctagcactcagctcccatctctgttgtaagaaggcaatcacagacatgacattgtgcacacaaccaggccaggtgaccttcactgaaacttgcttttaagccataacatacataattattactgaagtattacttatacaagggtttcattcatctatgaagatgttgcttttttttttgaattttgaaaaggaccaatctaaatttcctttatttaaatataaaattctataaaacaggtcactgaactaaaaaatcacattttttcatatgtcagttcatggccacacatagtacaagtcttacggtacatgtcatcttctaggttttcttctggtccatactcatgttgatgaacaatcgtctcccttttccacacgctgcttcttactgctcgccgcaattcttttacttttttatcaaatttcttctgtttcattttttctcggttttcctgtcggacttcctttgcttcttctaatgcttcttgactaccccaaacttcaagagacctcttcacaatctgtaactttaagtagagtttcatatcaccccattgtgaatgatgtggattcttcttcacaataaatttaagaggtggctctcttttttctaaatcacagtctttcagaagatattcttgttttgcctctgttttggttataagcttgtgtttatcatcagcatctctgcagttatcacaa

SEQ ID NO: 335163 - DNA, 1000 bp, Homo Sapiens; identical to SEQ ID NO: 157289

SEQ ID NO: 335164 - DNA, 1000 bp, Homo Sapiens; identical to SEQ ID NO: 308844

SEQ ID NO: 335165 - DNA, 1000 bp, Homo Sapiens; identical to SEQ ID NO: 157290

SEQ ID NO: 335166 - DNA, 1000 bp, Homo Sapiens
ttttttttttttttttttagaaacaacgtttattgtttattgttaaaatagtgagctctcatgagaaaagagtatgtaaaaagggccttcctacaccctgggctttctcacttatcccagcagactgggactgtcctcactgtgtaggagggaaagttctccacctgctcccagaaaattaggctactccagttttacttttgattatttgcaggcataaaaaaaaaaaatcaaaatccaacgattaacagtctatctcctcctaggcatatatgctcaatccacttggacacagaggtgggcctcaagtccatatccacatgtacagcccaggattagatggcaccctggaaatcaaatgggtattcctggctagggactgaagaagatctcagctcctggtgatctggttgaaaatatgcacagtgcctccagtgagaacctgagattctctctttaatgaggaatactttgactgtggtaggaccagcagttaactggtaggcagcattcttgccacaggtagtatctggtctggaagctacttgttccatttccaaatccttttaagatcccttaaattgataagaatgaattcaagtttcaaaatgacacactaagttatacacggtgcaggatgtcattaaggcaacagtctcaccaagtccatgcacagggctcggatctcaccattcccctccccttgccctccaagactgcttagttctgcttactactccttctcctcaacgacagcttccagcatccagaagtgaacttgagcagccttcagcctcacaagttgggggtggcccaattaaggaacttcatggcaacttcaaagccaaggaaacaggccgcattggctgggaaggctcggatcatcactgcattgaaccctttgtacaaggatgtgactccttcatcccggatcagctccctcagcacatctctgaaaccattaggatatttcccaggaggtgcagtctggaatcgagac

SEQ ID NO: 335167 - DNA, 1000 bp, Homo Sapiens; identical to SEQ ID NO: 157291

SEQ ID NO: 335168 - DNA, 1000 bp, Homo Sapiens; identical to SEQ ID NO: 157292

SEQ ID NO: 335169 - DNA, 1000 bp, Homo Sapiens
gcttgtatcacctgctgtttattgattgccgcgggctgcgctctcatgggcgacccatgtccccaagagcggcactacatagaggggttggaggaagacggtctgagagaagaggccgcgagagcccaggtgcacagaagccccggccccacgggcctcacgcgccccaggaggtgtgggcagggcccgccgcggagggaggctgcaggtgtgtcaggaggcacctggccggaggtcaccccctccttctggaccctcagcagagttgaggcgcctgcaccccaggggagccaggctgctatctaaaggagtgtgaggtgcggtcacttccgccactggccggtgtcggggtctgggacaccctgagaccctaagctctcctggctgctctctcaaaccctcattccatgtgagaaggtggaaaggaaaaaagggaagcaaaggaagacagacaccccgccctcagggtgctccccccatgatgggccagggctgcaggggagccagccgaggcaatgcctgcttaggacgagggagccgaggtgggcttctcctcccgcgacacggggatggctcgctcggcgtgggtggcatccaggccagtctggatcttggggccacagaaggtcagcatgccatcggcagacagggagcaagagagggccgactggtccacgttggacggcaggcggtagcggcggtggaactcacgggaaatgtagccgtggtcgtcctggcgctcgttgtgctttccgtggatctccacaaagtcgtcctgcaccttcacggtgaggtcctccggggagaagtgcttcacatcgaggaagatgacgaacttgtcccggtcggatcgaacctcagagatgccggagtccagcacggtgcggaagagggactggcggtagtaggggctgatggtggacgacaggaagggcagcaggtcatactcaaaaaggccctcgccgaaaaactggtcgaacagccggctggggtagaaggg

SEQ ID NO: 335170 - DNA, 1000 bp, Homo Sapiens
tctagaaagttctaataatgcagaacctacaaataagttaacctgacaggaaaaatgtgtgcatgtacgtgtgtgtgtgtgtgtctgtgtgagcgcagggagagaagtgatttgctgaaggtcaagggggccggagcaaggctatctcctttcccaggcctctagctaccttgacaggaggctgccccttggctttgcagaaatgactgaggaaggtcaggcgggagggaaggcaagccctctccatccccttgcctgtctaggcctgggggtctcaacacacctccccaggcttgttgacctcccaagggggcagagacaggtagtcctgctgcttcagggctttgaagagctgaatgacgggcacctggggcacagcctggcctgggggcttcttgacttgaaaagcctggtctaggttcttgatctcaggaccgggtcccggggaagaaggtttactccggagcgagagagggccgggccccaggccggggaggaagcaatagtcgcccacttgctgcaggacaaggaggccctcgggctgtggggatgttggggacacatctgccgggcgttcccctgggttcaggacagggcttttggcctcaggggggacaggattgttccttggtgacctgggggaccggccctcaattggagggagctccacatagccctcaaaccctgacttcacagggcctggggctccagggggtccactggccagcccaggacataagctgggggtctggtctgaggggaggcccagagagggaactagggagacagacgaggcccctgagtttggggtgaataccaggtctgcagaggagacataaccagaggccactccagggtcctcagtgtccccagagctcatgggtatagccacagggctgtccttttggtcctgtcctcccacccttggcccaagagcaggaggggcagggcctcccccggactccagggagggactccctgcagccccctggctcggcct

SEQ ID NO: 335171 - DNA, 1000 bp, Homo Sapiens
gaaagctcattcattttaatagttgagcacagttttaagaattccccgtagaattatctcccaggtcccccgctagaattattcacatacaaagcctgcaagtattcaaatttcacaaacacaattgcaaaagcagaagaactaagaaaaaccttcatagtcttaagattaaaaacaatgcttcatcattcttagagtacctgttaataaatgctaaatactaagtgctaaaaaaaaaaaaaaaaaaaaagctaggctggcagctggctcgtggtggctggcagctggtggcttgagagataaaaaggaaacttttataatgacaagcactcttatattcattttttatctcataactggataacacagggcagatctctctactttcataacttagttggttttgaagatagaaaaccttggagaaacactctcggagcaacaaatgaagctggttttaattatgcacataggttagaaagggccaatattctcagactccttataactgaggtaccctctccagttcatactttggtgtaaagaattgaaacaataaacagagcctgactcatagtaataacacaataaatatctgttgaatagatgaattgatacctgaggtgcagtgtgaacaggctggacctaagtgtctctaagcagaaaccatcctggtacatttcagaaaggctatattcgcacagcaggccttatttgtcagacctaccctcagtgccctgaggattctgggagacgaaaggaatagtagtatgacaaagaacaactgagttcttatttagttcatcctagtcccttgaataatccccctcagcatcaaaatttgtgaccagattttaaaagattcaataccatagataatcaaaacaacatcagtatgtgtatacctccttcaattatattctatacatatcaaactttaagaaatctggggcagggaatgaccaatatgagacccccttcccctctctctcccttttgc

SEQ ID NO: 335172 - DNA, 1000 bp, Homo Sapiens; identical to SEQ ID NO: 157294

SEQ ID NO: 335173 - DNA, 1000 bp, Homo Sapiens
attgttgaaaagtatttatttacactatagtcacaaaccatccattatatctgaacttcagttagtggttttgcgttagaatagatttattttttcacaactattaagagctaatgaccaaacaaatcagctccggtaacattatgtacattcttatctgaaatttgactacaaaggtaacacttttaagtcacaaaacaaagcatacaaaaatatactttctaaaaaaaattccaaatattaataggcataaatatacagccatactaaactcagggagtgatttttttctccataataaggcaacccatttacatgcagccttgtaacatttgtctacatcacacaaggcgaccaaggacacttccaacacaattgcatgcatcctagtttcagagaatatgtacatcccccttaaataagttaacctctgagatcataaatgctttacattttttcccaaagattcagaatttagagaacagtgtgggtacatcaaaaatacacaaaatctgagtggatatacactgaaaaaatagcctacatttctcaaacaactcgaaaaggagcagatattgctacgttcctcccatcacattgcacttctgttctctgagtatataatacatattgcttcaagggttgagacaactagatatgctctgattcaccattttagggccacagagtgtggcataaaggctatacttcactcactgtacaatgtcccccaaatcagtcccaagccataaagtgcacatcagttttgcttgtctttttgctgtccccacttgaagggatcagcatctcccaacctattgtagaaaacgtcttagatcaactctgacatccagggtcaaaaacctgtgatgggtcaaaataaggggaagtggggtagcaaaacctagtcaaacaaccctttaaagcagggtcagacctcagccctcttggccaggggatccccacaccacctccttctgagcctcccctttgccttggg

SEQ ID NO: 335174 - DNA, 1000 bp, Homo Sapiens
ttttttttttttttttttttggctgtttgcggatttaatggcagggcattgaggttgggaggggtcccagctgctgcgtctgcttttcttatagcagagaggctgcctacgggtggcacggggtggccatggagtgcagagttggtgggacaggggacatccagggggctcgagatgttgctggtgacaaggaatgtcaagtggcactgaggctggcgggcaaggccacaggcagattctctcacgtgggtgctcgcccctttcctcccccttgtccctccctcccaccctggccccactcaggagtgagacccagtggccaataagctctgggacagacgaatgggcgccctcctccttccttctgttgggctggagtgagtggaggaggtgactcagctcctgggctcaggcagggtctggaggggccaggatggtctcgagtgcttggcagctgaggaatgtagctgggctcgggtagtagcagcagcgaggggcgggccagggtggccagagcccggggccaggaatgtgcagctgaggtcaatggtcccggagtcctcccgactcggggtcgggcggcgggaaggagggtggccgtggcgggggtggaggtgggtgcccagggctcagagcttgtgggggttcacccacttgtaggtgccctcatactggaaacccactctcttcatcagctcgtctgcctccgtggggcctcggctgccataaatataggggatgggcttgggcttctccagctcaatctggtgcagcagtggggtgaaaatacgccaggcctcacggagctcgtcgctgcgcacgaagtgcatctggctcccgcagaagacgtccaggatgaggcgctcgtaggcgtcagggagcttcacgttcttgtatctgttgccgtaggtcaggtccagctccgactcctcggggttgaagaacatgcccggcttcttggtcatcatcttggtgtacacggcctcgttgggctgcacgc

SEQ ID NO: 335175 - DNA, 1000 bp, Homo Sapiens
ttttttttttttttttcccagtgtaagaaaacttgtttttatttttaaatactttggaaagctctttcagagcaatataaatgagtgcctgggaggaggaggttttgtgccagagccttgccccctcactcactcttgggggtcctgatgaactcttggaccctgtggaagataagagttagagacctcggcctcctggtcagtggagcccttggcctcatgcctggtgggctaagcgggcccagctggggtttgaggtaggggaggccttggcttggccccagcagctccagggccctgagttcctgccagaggctggagagcaggcagctgctgcttttcctggtccttggtaggggagggtcctcaggcttgcgtgccaaagcctgaaggattctgcttctgccagcgccagagatcctcacacatcctgtccagccctaaggctgctgtccaccccagctcctcttgggccaggctggggttggcgtaacaggctgccacatcaccttcccgccgtgccaccaccttgtacgggatcttcttcccagaggccttctccatagcctggaccatctgcagcactgaatagcctgtgcccgtgcccaggttgtagatccggcagccacactgttctttcagcttccttaaggctgcaatgtggcccttggccagatccacgacatggatgtaatcccggacacctgtgccatcctctgtgtcatagtcattgccaaagacattcagggcctcccgtcgcccgatcgccacctgggagacataaggcatgaggttgttgggtatgccctggggatcctcaccaatgcagccagaggcatgggcacctgtggggttgaaatagcgcagcagcactgcgttccaagtcttgtctgcctggcacaggtcccggatcatttcctcgatgaagaacttggacttgccgtaagggttggtacaaccacccgtggggtgggcctcatcaaggggcaggtactggggg

SEQ ID NO: 335176 - DNA, 1000 bp, Homo Sapiens
gaattcgggcaaattttatttaacaaaaaggtaacatgattcttccaaaataaaaatcactaccacctttaaagcttccattccagccctgcagatatgtatgcacgttactgtgctgtcagcccctcacacattccaggtggtccctgaaggtggggctttggcactgcagggatgcagggaaacctcaggtgaaaatgcacatcctaaattccttttccatttccacattccaatcagtgaaatgtggcatgacagggaggatctgtgaggtatgttcagggtagaatccctcaaagacacaggctttcatcatcatacatggtccagccatgaatctttgtttttttgcgggggtgggggcatgagtcttttttcaacaggtttggagggatgatcgtaggtcacagatgagccaataactggcctgtccacgaacgtcacagcacatagttctggatcatcactgctgcagggtgcccactccagttccagcacggtgatggtgtttggggccgaggtcatcaggatgtgctggggcacaaacaaggtcaactgagggccccgggctggccaatagcggccaaggttaaagccattaatccagacctggcccttggtccatccaggaaactggataaaggtgtcctggggcaagtctgggatcccactgggaatggagaagttccccatataaaaggccgggagcgtgtagttggatgagttgtgggcccaggcttcatcatggtggccactgtcacggtgtccccagccccccaggtggctgcgcactgcatcctcagtgtccagtggaaagatcgtccagtccgtgaggatattggaactgagagtcaggttagaaaccaaacccttaaaatcgttgatatatgcaccatagttcacacgtcccatgttctctaccagaaggtccagagtggctccagctttccctgttatgttcagagtgatcacattgtttcgctcaaggactccctggggg

SEQ ID NO: 335177 - DNA, 1000 bp, Homo Sapiens; identical to SEQ ID NO: 157296

SEQ ID NO: 335178 - DNA, 955 bp, Homo Sapiens; identical to SEQ ID NO: 157297

SEQ ID NO: 335179 - DNA, 1000 bp, Homo Sapiens
tttcaataggtaactctttttaataacacatgctgtctataagcttaatttctccagaaacacgatcatttcaataggcaactctttttaataacacatgctatctgtatgcatgtcacaaaatgtctccagcttttttcaatttttgccaaaatattatgtttttagaactcatttagaataagggaataaacaaaaagagaatgtgtcacatctaacaggtcacaaaacagatgcaaaactaatgtgcattgaaaatgagaaaaagaaaaaaatatacttaaaagctagactgaatggcaaatacaaataaagtacagcaaataaagctggcaaatacaccaacaccttaaagttttggaatgttttctagtgttaaaaaaggcagctatccacattcattatttcagagtggtttcagtcatctctggttgttacatggtgatttgtcgtttctatgtttgttggctgtggatttactgcccagactcacaatcctccacaactacggtccactggaattggaactcttctgtcgaggttctcttctgcagttttcattagtatagcaagccggcttccagatacccttcctttttgaatagcactcatcagctgcaaaaattcattgagttcaacctgtccatttttattcaaatcaacttcatttagaatttcatggagtgtattttcatccatttggacattgatactctctaatacacgctgaacatcaacaatggtaataaagcctttctggtctgcatcaaacttatgaaatctcttcttatacctgtcaatgtctgaaggcagtaggctaatttcagagcgatctgttaactgttctgatcgagatttatagcccatttcataatatagaaacttcctggctgtttcaagttgttcctgcttcttataatcatcccaattcagttccctgcccatcagttcaacaatcctgggtagggcttcctctgctgcctggacatttagaaaggcc

SEQ ID NO: 335180 - DNA, 1000 bp, Homo Sapiens
tttttttttttttttgttgttacattaaatttatttctcacctccattaaaagggtttttgctttggagttttgttaactttcgttctttggagtaataatatttctcttgtgtatggcgctgaatacatttgtcaataatacgtcaaaaaaaaaaacacttggcttcttaatacttggaaatacgtacatattccttactatgtaaaacactttatttattttgtaaaaatgtttaaatatgaataaaaatactgtaacccaaagtagttgcctacttttaaaaatgaaacttgtaaaaataagagggagcccaaaccacatagaaagtcttagtttattttggtagacttgctttttataggcattggtttaaagtgattcttttcagagacatcctttgagaagttaaaattgcagaggcttacgctttcttttatttcaaatatgcatagtgattaaccaggaataaggattctcccatgttctgcctgttaagagcaaacagatctggagaacggaagcccaccctgcctcccttttccatctgaagcagtgcggggaggctggctcctctctttgttcccagactccagggcaaggggcgaccatgctgtatatgctgtgccttgggggacccccagaggctgcgctctgtggcctgtgctcccccgacctgtgcacccgcaccccagtcggccacttgctctcacatcaggcaacgtcagcctgctgcagtgaaactcaaccacgattttcctttgcacacaaatccttcctacttccaccactccctagcagagttcccagtgccagagagcactgctggggtgggggtggggacaggaagcccagttattgctgtgttctattttagggggcacttcctcaagagtccccttgaaacccgttaccagcctggaagggaggatatcttgccttttacaaaatacggtcgatactcaatgcacagcctctaaaacaagggctactccagtgtt

SEQ ID NO: 335181 - DNA, 1000 bp, Homo Sapiens; identical to SEQ ID NO: 157299

SEQ ID NO: 335182 - DNA, 1000 bp, Homo Sapiens
ccagaagtctgtggtcttttaattgaagacacgattaatagaacacaagttgtttcgcaataccctgcataagaatatgactgaggtttgctgaaagccacttaaacaaaataaatgacatatacatttaatagaagctcactgctgctaacacacaatgaaaccctcatggatacaaagcagttttatacttttaaatagcctcttagtaccagcaagcacaacaaacaatagactttaaaaaatattttgaccgagtcaggagcaggattttatttctttgtttttaaaacagcattctgtcatttcagaaatatactgcaaaaaggaattgcttaacaggggtattgacaattactaatttgcttatcaggggtacttacaattactaattttctttcttttttttgagacgagtctcactctgccacccaggctggagtgcagtggtgcaatctcggctcactgcaacctccgcctcctgggttcaagcgattctcctgccttagcctcctgagtagctgggattacaggcacatgtcaccacccccggctaatttccgtatttccagtagagacagggtttcaccacgttggtcaggctggtctcgaactcctgaccttgtgatctgcctgcctcggcctcccaaagtgccgggactacaggcaagagccaccgcgcctggtccaattactgattttctcatgtcaagaataacttcattattagctgtttacaatttaccaaggttcaaactacctttttctccttcgttcttaaacctgtgccactgagatataggtcccaaaatgacgttcttatgttttaaaatacaaatctatagcaaaaacatttcattttaaaagatactatctttttattatgggaccttagttagtactacatataaaacaatcttttgagaaggtatatgtcctagcaacaaacatcagacacacagaccatatattcacactggagatgaaaagggcactgtta

SEQ ID NO: 335183 - DNA, 1000 bp, Homo Sapiens
gagttttaaaattctttatttaaaaatctctaactgtaatgtttcataaaaaatatacacgtttctatttacatattccattaattctattagtttgaattagattttaagtccaattttgaaaagcttcgagaatttcttctgaaattacttaaaattactgtatgcataaacttacaaaacacatatgctataccaaggcagagaaaagaaaaaaagtgaagtggctacaaaggtccctggggcatcacctgctcacctaggaaccaggagtactggatatgttccgttactggtaacctatctggatgtaaaggttcataagttacaatgctttttttgtttaaaaaaaaaaaaaagtctgtactttacaagccaaaagtgaaaatgccacacatcctctttacgctttcatgtacactaagtcactccatttggttgataccaactaagatacaatttctgagatcataatcttttcatgaaattaaagcagaaaactgtccaggaaaatcagacttcaaagttggtgcaacttagctgatctcatgaaaattctttggaatcttctgttggtctataaccaatcaaggactctttaccgctatcatccacaagtagatccactagcacatgtggtttatcataaccaaaggaggtgggggcttttattacggttatgagctcttgtccttctgtttttatttcacctttattatttgggggaaattctgagtcagataaggagctatgtgattccagacagctggaatcagtatcaaaaccatttctggagtgatcactctcagaacaatttctggagtgatacgagtttaaagcgatgctgccaggttcagactggttactacttaaaggtgaagaactctctctctctattggagtcagatggctgcccgggaccacgtcaggaatattttcttcagtagtcaccacttctgttatactagaaagttcttctgtatgttccacttttcctgga

SEQ ID NO: 335184 - DNA, 1000 bp, Homo Sapiens
ccttgtctttttttccttaaagacaggatcttgctctgttgcccaggctggagtgcagtggtgccatcatgactgactgcagcctcgaactcctgggctcaagcaatcctcctgcctcagcctcctgagtggctaggactacaggcgtatgccaccacatccagccaatttctaattttttgtagggatgtgtcttgctatgctgcccaggctggtctcaaactcctggcctcaagagatgctcccgccttggtctcctagggagctggggttataggcctgagccaccgtgccaggcctgatgcgctcttttccgtggttacgttctaccagtgtgacctccatcccttctccctcttcacttccttctttctttccttccttgcataaacattgaatgtacggatccctttttggtgtttttagacacttctcaggaaacgtacgcattgatttgcaccttgtgtgtccacctgtaaacatcaaattagtgcaggccaaattcagggtatcattcatagcaatcccaaagaaactaactcttaaagaggccaattagtaacgcacaggtaaaactttgctaagtatgattctctgcctgggacctcattcatccttctgttcctgacattgcctcatgggtttggctgccccgttttgaagttacccaaagattattctgccatggcctctgttttttagaaattcaagactgaaggctcagtagaagggggttagcttagaggattgagccaagggtaaaatgatttctgggtagcagcccagagttcttgaaggatgtttattaggcaacgtgaacgggagaatcagcagtcagaagcggctgagaaaggaaccacgcagacaatgtccagttgtatagggtagagtgtgtgtgttgtgtatttacgttagtgctggggctttccttgggactcctgaactgggaagttggaatgagatgaatgtaaacctacttttctttatactacatataggg

SEQ ID NO: 335185 - DNA, 1000 bp, Homo Sapiens
cagggctcagtctctttattaggcagcaggagggggggtagcccagctctgttgggagggaaacgacaccaagaggacccaatggaacagctccaacccaaagcttggaggcaacttgttggagaaggggcggtgcaggtagcacgcccaaccctcctgctagaatagtgtaggctgcaccatcactccccctcttcatcatcttcttccaggggtggccggttccgcttgaagaagccgaccttccacatggccaggaccaggatggtgagcagcagcaggccacccagcacacccaccagcacccaccagattggaatggccctctcctccaaggcccggagcagctgtgtccacacctgagcttcccctcggggcaggctgagcgggggcaccgcataggggagggaggacacgttgaaccatgcgtgcgactgcagcacaaactgatccagaggcctctggtagaggctgggcagccacaggaaggccagcaccgtgaccatggcccgctgcccgcgcgccatctcctgcaggtcacactgcaccacagtacagggcgccgagtcgcagcttacgagaactggatcctgaagcctcgagggctgctcgggctctggcaggaagatctgtctgcgatcccgcttgtgatgggccgggtgaatgggggaggggctggggatgggcagcccccagtccaccttgagagggttgacaggaggctgtgggaagcactgaaggcccccctggggctgtatatccaggatgtagagcaggtcggagggctgggactgtcccggaaggtggatgctgaggtgaagaccattcacagtcccagggccattgttgtggagctcataggtgtgctccactttgggtccccagctgtccaagctgttctgctccctctcaccttcttctgctgccaccaccagggaggctggaaaggagttccctcgcagctccacttgggcctctgcccggaccggcacgtccagca

SEQ ID NO: 335186 - DNA, 1000 bp, Homo Sapiens
tttttttttttttttttaagagacaagcggaagccaagtgccagcttttatttttggaacagaagcagaaaggaaatcttgctctgattccatggatgtgaccagggaggtgttggtcgatatttctgtgctgtggcatctttggtaaccaagttaccagagctggcagcggctggaggggttcaagagagcaccacgtgcacagcggaaatacctggcaaaggctggggtgctgctgaggggcccgtggactcggaggtgtggagggctgtgagtgtcgtgagagtcctgggggctgggcttcctacacatcacctgggcatagcttcgaaagaagatctgctgggggctgaggtccaggctgggcaggacagtctccccatggtgccgtaacagcctcttgctgtatgcctgcagcgcgatggctagccccccaacgtctgcagcattctctaagaatgtgagggagtcattgaaggaggttctgctaggtaatggaaaggcagcataatggcgcttcaggcacaggtgagcttcctggagggcatggttgtcacaggcgaggcagcccccaggcagtaagagctggtagaagatgtgcaacagctcgtgggccatgatgctgccagcagcgccaaagttcacggctctgggatagccagggtggaagaatgggggttggaggagtccagctggaaagactaccacatggtcagataccgaatagtaagcattgacgtcccaaggggacaccttccacctgtgttgggggtgaggctgcaagaagctctggacaattctagctcggagggaccggacacagctcaggacagactgcaggaagctcgatccaagctgtatatcgttgtattcttgtcgggccagctctggcttcagggcccattctgaagcccccatctccacctgcagttgagcaaccttgtcctgggccatgttctgggtctcctcattcatccagggaaggtttctgaggcgagtg

SEQ ID NO: 335187 - DNA, 1000 bp, Homo Sapiens
tttttttttttttttagctgagtcaacaagctttattgtcatcaggcaaggaagcatggggaagggactgaagcagggggctgaggctggagaggccggagactgtggggcagatggggcggctgctccctgcctcctgggtggccggccggggtagctgagtcctcagcgggtggtctggtggacctgctcgcgggaggagatgaccttgccatcctggacctcttccacaatggtacgcacctgacgggtggtcaccggttctttcttgtactgagtcaggtgggcatcctctccctccagcaggcggcggtaggtggcaatctcctgctccagccgcgtcttcacatccagcaggattttgtattcctggttctgctgctccatctcgcagcgaagctgggccagctgctcctccacgctgccaatcagcccctggatctgggacagctgcacgcagtagcggttctctgtctccgccaggttgccctccagggatgctttcatgctgagctgggactgcagctctatctccaaggcctgcatggtgcgccggagctccgagatctcactcttgccactctgcaccagctcactgttggtggccacctcgcggttcagttcctctgtcttgctgaagaaccaatcctcggcatccttgcggttcttctctgccatcttctcatactggtcacgcatctcgttgaggatgcggctcaggtccacgcctggggcagcgtccatctccacattgatctcaccacccacctggcctcgcagggcgttcatctcctcctcgtggttcttcttcaggtaggccagctcctccttgaggttctcaatctgcatctccaggtcggctctggccagggtcagctcatccagcaccctgcgcaggccattgatgtcggcctccacactcaggcgcagggcctgctctgtctcaaacttggtgcggaagtcatcagcagccagacgggcattgtcaatctgtagcagg

SEQ ID NO: 335188 - DNA, 1000 bp, Homo Sapiens
ttttttttttttttttttagaatgaaataatcagtttaatatttatagacttgagaaagaacttgaattaaaattcagtctggagtctgaattagcaccatctgaatacagaaagaattctatgtacatgcacaaattagtttaattaacatatataggtaaaatatatttgtttgttttacttgatatacttgttttgacagactcttcctggggttacacttatttttattagttggctgggcatgatacaggttgaacgcccctcagttccagggccttggcaaaattaacctccagtggcttgcctgtgcctttggtgagcttcagggatctgatgcaacctcggaacggaatactggttgttaggccaaactgcttgaggtcatctgggaagcctccaacaaacacagggtcatttgtgtcagctgatgtagatgctgggtttgggctttgggcttccacctggttcccatcgactgtgagctcaatgcggtgtttgatcttgttggcagtgactttatgccattgtccatcacacaaatgccctggaaccccagcatcatagacagcagtgaatctgcccgcaccattgtccacatgaaacatcaacttttcatcaatcatttcaatacccattccatccattttttgactactgatccccagaagaactccagtcgttgtagttgtgcggaattcaaattctacaagaaggtccaatcccactttgaatccaccaactgctttggcaaaaccggttccgtcaaaatatgttcccctctgagcatttgcaaaacatgtcccaacatggaagctggaggtgggttgttccagatcggcaggggcctctgccatgtggagattcctgacgcagccatcaatgctataggtcactggaccaattcttcgggtagtgtagttgatgggtaacccaccaacatacagcattcccacgacatccaggatgtcggcttttttgggactgatggttctgttg

SEQ ID NO: 335189 - DNA, 1000 bp, Homo Sapiens
tttttttttttttttgtatttaaaaatattttattttttttgaataggtgatacatatggtacaaaattcaaaaaaatacaaaaggagatacagtgaaaagtctcccaatcctgtacctatccaccctgtcaccctccccacaaaccaccattggttctaagaatttatcctgcagatgtaatcccataaattaatgtgaaatatgcacaagaatattcattacagcattatttatagcaaaagacaggaaacaatggaaacgtctgtcagtgagggactgattaaataaattatggtttatccattcaatggaatagtatacagctgtaaaatgaaatgaggcagctctaattgcaagtataaaaaaaaagcaaagtgcagaacagcatgcatagtatgctatttgtattttaaacaaaggaaatatgtatatatgcatacaatatctcaaggttggcaggaaggtggagattggagtgttgtgggggcagtgggaacagcagttacgaaggtgtagtgccagcaggatatatttgggggatggtaagttctccgatggtgaggtataaggcggagtggcaaggatgaggtgaacagacaaccgcttctctttccccattctttagacaaatagtgttatgttacatgctgttatgcaaccctcccttttccccttaatttgttttggatatctttcttaaggaatttagagccaccttttttaagggttccatagcaattaattgtttctaatctttagctattacaaatgatgcagtaataacttcttacgtatgtcattttatatctggtgaaaatatatctgaaggttaagttcctagaagtggaaactactggatcaaagagttagtgcttttataattttgaaggacattgccatattgtcctcttcaatatgtacttctgtcagctgttatgagagtacctatttcccacatgcttgccagctaggagtcttaacaagctttttgatctttg

SEQ ID NO: 335190 - DNA, 1000 bp, Homo Sapiens
ttttttttttttttttagttgctccttgagtttttattcattgttttagcaggaactattaacaaataaaggctttagtttcatacaaacaaactgacaaaaaagatcttatttctctagagggtagggaaagtataaaattctgaattttcatgtcgagtgtgagccaagttagaggaacttggccacctgcaaaccactccctccctccatgggaaggaatctgaggcttcctaggtgaccaggagccgggcttcttttgttgccttaatttcctttcacctgagagaaaatgaaagccagggtctttgtgctccaggccaaggcccagatgctggctgcctgctccccagatgagacttcctgggctgcctctcccagcaccatgtaccctagagagaggccaagtccccagtgttcccctggggcccatggaggcccctgcctgagcctgtggtcctgggagctggggagaaggtagagatgctgctgtcagaggtccaggctaaggacaagtggggcaggtagggcaggtgctgctggccatggatggaaaggcaggcaagttccaagaccttagcaggccaaggactgctcaggccccttgggagcagacccgctccccagacagtcacctggcaaaggcagaatctcctcatgacgtctcagaagcttgtccaacaccagaaggcaagccccgcctatttaacatgaggccataggaccagcctccctggatccgaaagggccactcactccctccaaatgcactcagcctgcaggggatacaagggaccagggaaagagaaagacttgagggcctctgtctaaggggctggccatctgtgctaggacaagttgctgcttctgctccaggaagcccagataggactggactggacttagaccacttaccccagaagtccaaaaacccaatctctgcatgtctctgagtggtcagggggctgggattctaaagctgctggtcagtccctaactc

SEQ ID NO: 335191 - DNA, 1000 bp, Homo Sapiens
cggtttaccagttggtacaataagattttttaatatgcagaaaacatgaataaattttgttttacacagtctgagagcaacaaatcttactgtaaaacacgagagcaatattatatacattcctttactgattttttaaaattgtgtcaatatcttcagtgaactcttaacaatctggggaactgttttcctcaattaccacttcagcaacgttcatacgaaatcaaggcttgccttcatgtcagtgtcaggatcaactttaactcgaagagtttgtgtttgtctctaacatcttcagagtgagctttagggatgcctgaaggatggacagtacaagcaagcagctacttccatgatacagtgggaagataaaaaggcccattcagtccagccgtgacctgtaaatccagcttgccctccccccaccccactggaaaaaaaatccaaaacctttttccaccagttttttacatgtcgcttctctaccaggagattctttgcgtcatctagatgaacacactggacttatatacagctggacatgaaagtaaccaatttaagtgccttttccttcaacaattttaacttcagttgcttaaggatgatcgagccaccgatgtcaacaaaatatcctttacctttaaatagtttttccttaattaagtttaaagaaaacctatttaacgagtgatattaccgggaaagttcacacagaaacagaaagaggcgaacgggagagcagggcactggcagcggggaggcggggcttggtaaatctaaagccaaagcttccaaagactacggcgaacgctccccagcccgggacgacttgctaacactagtgattttgagagtagtgctctgggcacaccattggtcacaccacacacagacgaaccaggacggtcttagtctcctaaagtgcaagatgccgtgacaacaggcaactaggctccacgcggtgtctaaaccagtctccatggcatgcactctcaagagc

SEQ ID NO: 335192 - DNA, 1000 bp, Homo Sapiens
gttgacacaaaatctttttattccccatttgccatcttttccacaaacctctcaggtacagatcggaagaaagtgcatataaaccaaggccacactgccttatttaaccaggcccaccgcctccgggacagcccctgggggagccccatcccgctaggtagaagggccaagtgctgagtgagccacccagacagcaggtgctctgggagggaggggcgacaaggggtaggggaaggcttcctggaggagggagaggcctggccctgagagacagggggccgtccctgaaaagggagagagaaggcacacttctccgggaaccaggccccagcacctgagcattggacccaggcggccaggaagaacacaggccaaggcgggggcctgaagcagatgggactgtgggagcttcagggaagcagcccttctcgcctcaggtctggagtctcagaggaccctcctaggcctcctgctcggctggctccagaggatgcagagggcagaccatgcctccctaggtcccaccgctgggactgcagagcttggctggcatcgccaagcggctggggcctctccagcagtgtcaggagctgggcgctcgctggccagcacagagtcgaactgcagcccccagaataatccagaaaggggcatctgggtggggctgcagtgtcgtgggctcctctcagaggccatccagggcttgctggactcggctgtccagggaggtggctgagtggatggagacgccgggggcaccgatgctggtttccaagcagtcaaagccacagctggtcagggcctgcttcgtggcctccacttctggctgctccagccctggcttgaggagtgtgatgccacagccaccaccgcctgcgccagtcagcttgctgtgaagtccgcgggccctggtcacctggcagagctggtccagagaggcgtggcccacgccgagggcattcagatggtgctggttcatgtcaatgagctcttccagcac

SEQ ID NO: 335193 - DNA, 1000 bp, Homo Sapiens; identical to SEQ ID NO: 157302

SEQ ID NO: 335194 - DNA, 1000 bp, Homo Sapiens; identical to SEQ ID NO: 157303

SEQ ID NO: 335195 - DNA, 1000 bp, Homo Sapiens
aagacagagtcttgctctgtcacccaggctggagtgcagtggcgcgatcttgactcactgcaacctccgcctcctaggttcaagtgattcttctgcttcagcctcctgagtagctgggattataggcgcctgccattacgccaggctaattttttgtatttttagtagagacggggtttcaccatgttggccaggtggtcttgaactcctggccttaagtgatctgcctgccttggcctcccaaagtgctgggattacaggcatgagccaccacgcccagccttctttatttttaagatggggtctcgctctactgtccaggctgcagctgagttttagctgaccaaactacttctctgttgtggcaaaggcctgtgcaaatggccatttaacactgttgttctgtcatcttccccatctcaacctgcttttgttgtttcctatcaagatacacttagcaaaacccccaaagacatccagagcttctgaggtacctctgtgtacctcagtttttctccctgtgctgtgagagccatgctgtctgccactctgtgggctcacaagtataacttactactgtaagtataagtagtactatgttccatacaatgagaagacttggaaataaatagaaaatgtgatcacggctcacacctagaaatttacataaagtgctcagacttcaacaagtggccctggggagggagaaggctgagaggtaggaagagatggtgttgggctgggctagagtctctgaaggtagggattttcattctgtcctttggcttcatctcttccactgaagcagcagcactggccgggggtaagggaatgagcttcgctgggctgagtcttcacatccaggcctcacagtgctcagcccggggcctgggtctcccccagtcccactctactgcttgttccccactccatcaaggtcccagaaagtctgtttgtcaatcagcaagggatcccagtcccaaagtgattttaagatcaa

SEQ ID NO: 335196 - DNA, 1000 bp, Homo Sapiens
tttttttttttaagttcaacagctatcattagtgttactgtattttatgtgtgacccaagacaattcttccaatgtggcccagggaagccaaaagattgaacagtcctggaagctaaattctctaacagctttcaaatcctatgactcttctacttctcaaggtgtgtggtcttccactggcttgagtcatctcttcccaggaaagggtggtgccgtccagccagcacatccccagtggtgttactggatgcagcaggacttggatgtagttgcaccccctgggctggggtttccccccggctgatttcctgcggctgctgacttggccgactgctgtttctgcttcttctcctcctgcaccttcatcttggcatcgtactcatcagcaagcgccttccactccttgcgattgttggtgatcccgtccaacattggggtgatctcctcgtggaaacgggagaattccttgtagacgaaggtgcaaacaaagtcaatgaagccgacttgaagcttagggagttcatctgctttgtttctgtccatcatgggaatgggattctgttgcagcaccgtgcgctccaggtcaccttgttcccagaattcagcagccaccagcagagctacctggctctgcacctcccagggtttggtgatggctgagagatcacaggcggtcatcatcatggccataacgatttccttccgtgtctgctccagcatcatgtactgtgtccactcctgttcactctcatatgtcttagactgatccacgatcttttggaacatcgtcctcttcttgaaatacagggcgaggtctgtggcaatgattgcaatgtccatcatgtggatggcatgctcatgctgtcgacgattgaggttttgaaagatattcaggctctcgtctctgagcagtgttttgccaaactccaagtggtgtctttccaagatagaggacccatggagcttggccagtgggttctgggatttcatctggtagag

SEQ ID NO: 335197 - DNA, 1000 bp, Homo Sapiens
ttttgttcagaaaggacacatccgagtagtttaaaagacaactttacatttatttttaaatgtgtgcaaatattttcaaatgtacatgatttgattttttaatttgttaaaactcatatacaatactggaatcttatcctataggttaaaaatataacaaaaggcagctttaatttcaagtgaaattttcattgataatacaaaactaaaattatgcttactattcacaaaatacatagaagagacagtattcccgcagtttgctgacttatgtcatcacaaatgaacccagaatttacaaactctagccttgttgtaaaacgtaactttggcatttccttcaaaaaagtgagcagtgcatatttcctttattgaacaaaggtattcattcattttctgcaagactattacattcactctttttttttttttttttttttttttgagacggagtcttgctctgtcgcccaggctggagtgcagtggcacgacctcggctcactgcaagctccgcctcccgggttcacgccattctcctgccttagcctcccaaatagctgggactacaggcgcccgccagccaccacgctaggctaatttctttttttctatttttagtagagacggggttttaccatgttagccaggatggtctcgatctcctgacctcgtgatccacccgcctcggcctcccaaagtgctgggattacaggcatgagccaccgcgcctggcctacattcactctttagcgagatgatttgttgtcaatataagcaagtagtgctgtgaaaatgaggcagcattataatcctagttatgctgtaaccagatttacaaccagaattcaggattaacccatttgtatgatcattaatcctattctttcagaaatagacacattgtttctggttgtatttcagaagaaaaacagagaagccattctatctttaggcaggggtgactgcaggacttgagtgtgcacaaattttggtaaatgca

SEQ ID NO: 335198 - DNA, 1000 bp, Homo Sapiens; identical to SEQ ID NO: 157304

SEQ ID NO: 335199 - DNA, 1000 bp, Homo Sapiens
aaaatgggtagaataatttgaatttatttttaaaatatactgtagcaaaagttcataagttctgtgtcccagcctggacactgaccattgaaaaatagatgcctttctgtgccagcagctgctgatgcgtgccatgctccttgactctcccattctgaaacaccactattaagtctgcattctggatggtggacaggcggtgagcaatcacaatgcaggtgcggccttctctggctttgtccagggcttcttggacaaccttttcactttcagtatccagagctgatgtagcttcatccaacaggaggatttgaggttgtctgatgagggctcgggcaatagcaatcctctgtttttgacctcctgagagctgagtccccttatctcccactcttgtttcatatttgtggggtaacgtctcgatgaaaggatgtatgttggcagctttggctgcactcacaatttcatcctgtgatacaacccggctgttgtctccataggcaatattctcggcaatgctgcagtcaaataggataggctcctgagacacgattccgagttgagctctgagccactggacattgagtttctttgcttcttgaccatcgagaagcactgtccccgccaaggggtcgtagaaccgctccaggagctggaccaccgtgctcttcccacagccactgctgcccaccagggctagtgtctggcctttcttcacctccaggctcagcccctgaagcactggcacgtttgctcgggtgggatagttgaacacgacttcattaaatgttatatttccttcaaatttatcaggcttcagcccctcttcactgtagctgtcaatcagaggttgtctttcaaacagcatgaataagtgggctgcagacagcttagctttagcatagtctggagcaaatgaactggcatgtcctagagccactgcaccaaatacaattgcagaaaacaccagaataacatctctgaagcgcatatgtccatt

SEQ ID NO: 335200 - DNA, 1000 bp, Homo Sapiens
ttttttttttttttttttaacaaaagtagcctagggatttatttttgttggtttgattttctaaagaaacatacttagttcttcttatattccactttataagccctacaactttgaacagatgctgtctagatccaagcaggtcacctacccaaataatgaaaatgcactaaaaatgaaagctcctccaggcctaaagcaatgggcgatgaaggctcagtgcagcctccgctggcactgtgcaactgtctcaggatgccataaaccagcgtcccagctaccagagtcggcaggagtccatgcctctgttcatcgtggaattgggtggacagttaaaagctttctggaattcttcagagttactaattgcaccattgaccctaaactgagggggactgtgagcaccaatttggacttgttctcgggcagcttctggtctgtaggaattgcacctcacatgagcataactcaggaagaagagctggttgttggtgaatgtgatgcctggtagaagaggctcctcaagtccctgccttctgtcatttatccatttcctgtaagccctaaaagcttcccgcaggcctccattatcagcaatattttctcccagggtcctcttccccttgacatttaagccagctttcttccaataatagttgctatactggttaatcatgcattttgttttttccttaaacttttcttctgattcagtagaccaccaaggatccaggtttccatttttatcatattttctaccattattatcaaatccatgtgtaaattcatgtccgacaattactcctatagcaccataactcagagatcgaggatattctgttccccaaaagaaaggcttctggagctctcctgctggaaatcggatctggttggtggatgcactgtagaaggcattgacagtcgtcggatttgtaaaccactctgtttttggaacggcttttcttagccagaagaaatcagactgtgctaaatacttgcg

SEQ ID NO: 335201 - DNA, 1000 bp, Homo Sapiens
cggcagctatccgggaggctgaggcacaagaatctcttgaacctcggaggtagaagttgcagtgagccaagatcgcaccactgcactccagcctgggcaacagagtgagattcggtctcaaaaacaaaacaaaagcaagaaaaaaatttgtttctaaagtcactgccttaacaccctgaagaagtaattcatcatgaaggttataccttcaaatcagaaaaacaaataaatgaaaatgtgtaaccttatatatcagcttctataacaaaatgataaagtcatgttttcttcctagtcatgtctcagtagatagccaaaggggttgttgatcttttctatttatttgtttgtttacctttctattattttttttcttttcagcctccacaacaagaagtttaaatattaaacaaaaacccaccagcactaccaccacctcaacaacagtgtagtctttggggacacttttactgtcgcccatgtcaattatgggattcattctgtatccagtcatcgaagtgaacaaacttcctttaaccaagtcaaagacactcaaatgtacaatttgtgccaagatcatagagactcataattttcaggtgtgacaacactcccaagaattttaagattttcctatgtgtcattgcaacaggagaattgaaaaagcaagagtacaaggggagttggaatagttcaggttaatatttactgagaaaaagtcatatatcgaagggaaaatgggagtaagtaagtctgactgccatagtcagacttactatgtgcatggagtagaggggaacttcataatgcatatgttttctggcctgtgaactggagtccctgggtgagtactggagttctaaagacacgtgagctaaccctgctcccctgtgtcttctgaacaagacatggcaaggcagcgatacacacatgtgctttcaggcaacacatgttttagggtaagtacttttggggtcacacactgttatttaatatctga

SEQ ID NO: 335202 - DNA, 1000 bp, Homo Sapiens; identical to SEQ ID NO: 157305

SEQ ID NO: 335203 - DNA, 1000 bp, Homo Sapiens; identical to SEQ ID NO: 157306

SEQ ID NO: 335204 - DNA, 1000 bp, Homo Sapiens
aaacataagcacatttattgtcaacctttatagtgttatgtcaaataggtctgacataagcttaaataaatatatactttaaaaattataaaatattttaagttataatttaaaattctcaataaaactcaaacacaaaccacactggtatttcacacagctaatttctaatgcagtttacataaatatttacaacacttaaacaatttcaaagaaaataacactgtattccatacatagcctgatcacagtagttgttctctcttatttcccagagtttttctgcccctttaaaagaacctctgctgttctgatccttatcacatctctgttttgactgttggctttgtcgttgccagtgttcagccagaacttctctgaaactttttttttcaacacatgctaagttaatggaagtgtaggagagttttgattctcacactcctcaaggctagagcagctttggcaattactgactgagaatttttcattgccagtgatcaactgaaaactggagattcctttggaattgttaaatctgcttataaataaacataaatgcttgctcacacaggcattcctctcttccagagcaccctaacatacagaagaaaacaaatagggaataactattagacatcttcattcgttaaaaatctaccagatgactcttttacatggtgagtttctattgtgaatttaaaatcttccataatatacaagaattatgtttacatatcacatctgacaaacatctttgtaggaatgcaaagcacatccatctttctgtattcttttccaacaaagacattcataaaattatacctttgtgtgtttgcatttatgcttttattagttcaaaacgtttggcctcatggaagtttttcatcgtggaaaccacatatttctgaaaaaatatctgacaatatacaaaccttccattcagtttttactctccaattctaccatgttttcaaaaaacaactgtagtaaaaacact

SEQ ID NO: 335205 - DNA, 981 bp, Homo Sapiens; identical to SEQ ID NO: 157307

SEQ ID NO: 335206 - DNA, 1000 bp, Homo Sapiens
ttttttttttttttttttttttttttttttttttttttttttttttttttttttttttttttttttttttttttttttttttttttttttttttttttttttttatgatcttaaacagactatttattagaaaagtagaactataaagggagacggttgtgccccttgctctcctcgcaactctctggcaacctggagaggtagtataagatagtatatacacttttcttacacatgccacacacatttctctgaacaatccaaaaagaaaagcaaaacaaggccttgatggcagtaggcattagaaatggaggtggggtaggaagagaaaatagtgcttgtctccagaattacttttttcacttctagccccttgctgtaacagctcacacttcctggcacaggttcaaaggccaagaggggtatgtaacatagtgtccaaagagggaaggtccttgggtgaaatgtgctatatgtgtacttgggtatggcttaggaaggccagagttgtgatccaagaagttgaaaggtgggaaagatttttctgaagcagtgaggctaatgggtggggaaaggggtggaggtggctcctttccatgctcatggggagacatagacatggacacgatgccaggcattgctgagaacacctcgcaggttccagattggggccacggtgtctggctgcacattgtaaccatcatccacagccttacaaacaatgttcagttccttttgtccagctggcacaggggctttcaactgccacagacgccatgcccaggccttcctggggcgctgttcctctccatccagcttagccacctgccaggttaggcccccatccagagacacatccacccggatcacagccctgccaccaccactccatgcatagcccttgatggtcacctcccctgattctacagtctctccatcccggggctctgtgatggccgactggacaggaagttcctgaatggatggagcagagtcaaaa

SEQ ID NO: 335207 - DNA, 1000 bp, Homo Sapiens
ttttttttagtgataaaataaattgttttaatggaaggctttctgagactgcaactttttcttctgctatcaaacagccagtttccctgccctggggtttcttagggagtgcacggctgagctcctggcccacaggaagctggcatgttactctgacacactacattcagcccctccagggatccagaggtgtgtcttaatgtcaggagactggagttagctggtagtcagtccaaggtatgctgtccccataagtgtccaggcctcgcgggagaggacaaggggcttcacttcccacttaggatgtttctccatgaggggagaggggacagatcacttttgaaattttgactctgacctttacaaagaaaactaatagacactttagtattatatacagggcagaggggagaggacacagaggggaaattgcacttaattacagtagtttatagtttacagccattggacaaatttacttctttaaaagaaatctcaagatcatttgggatgggggcaggggagggagtctgtggatatttacagtgtgtttggctcagttcaatagcacatgtccttctctcctcatttcagtaacagattcaagttttcgcatcagtttgttcgatgaaggatcacaacatagacagtacggctttcttgcttcctcttcggaggttccttgtctcccacctccaggacagacaggagtccttgacatcgtgggagaggcattgtggcaatactgcatagaagggaaactgggcttcgggctgcgctcctgagagtggattgtctgaggtgccagcaggacgtccgtcaggtaagcagggacctctcgcaggtgctggtcaggtcactgggcttttccatgacagctgcccagagggtgatggtgtggaaaacagggtccttgttgttgcgcacgaagtaagtggtgtgtgggcatcaccaggcttgtagaggacactgtttacttgaagacatgttggtgagtgta

SEQ ID NO: 335208 - DNA, 1000 bp, Homo Sapiens
agaatttatataaatttattaatttatttttagttgtaggaaacatcagaaaaaaagtaaacttgcccagcacttcatagctgtattttgggtttttatcaaattcagctccatttgacataagcaatgattatcttctcaaatacaccacccaccaatttcatagcatcattctttttccccaaagcaagaaatcatatgctgttctcagtgcactccaagccattcattcatttcacctacactctaaaggtacaaagcttcccttctttaaacacacaaggtggcacctatgaagcacgacagagatgaggactgaccattattggttaaggatcaattgcaaccatctgcagaagccaaaagataagattaaaactgccatttgcagtaggggcagccgtgggaccacctttgaatcccgcactcccaaacaggccatgtttcagagtaagaaaagtaatctagaatgccagcctgtctgcacgtcctctgaaaaatggcacatgtcatcctgatcaaagacaccagagggggcacgatacatattcaaatatctttactgactagcgagtctattatttttatttaagagaattttttaaagcactctggggctgattaatttatgcaaagtatttccttaataagaataaaatgaatttaacactgattctgttttcaagtttggaaatgactagggaatggttcaaaattttaccttatttcccacccacttctcaatgggtcttggatttgtgggctttcttaactcgcccttttttccccaagcatttccggtagccataagcacaacatttaaaggtgatgaaggccactgtcagcacgacggccaagaggaaaccaatcacgtccaaggaatggtactggtaccaggtgaggtcgtgggctgcggggcgcaggtgtggcgcgcccttgtgcctcatcacaaactccacccagaacacggccaggtccagcggctccaccgggcggtcct

SEQ ID NO: 335209 - DNA, 1000 bp, Homo Sapiens; identical to SEQ ID NO: 157308

SEQ ID NO: 335210 - DNA, 1000 bp, Homo Sapiens
cagtaggtaataggatattttatttcaaaacagtgaagaagctgctaagcataaaatttgtcaaatgctacaaaggtgatgaatatacaactgggaattccaagaaatttaaatttaattacattctttattatcttttcctcaaaagaaataaattagttccaccatttggctaatattatttcattaaagactgaatttagattttaggaaataaaatatggaatctgttataatgtcccaatttatactacagtattaatctcaatcctgatcattacataattatagcatttaccaatctgtgattttataaattaaccaaatttgttaaattaagaagaaattcatagacaccatttttttcctgttacaacatatggaaaagccatcaaaaaacttaacagaaccaaatcaaaaagaagtatattttatgctaaagttactttctgtccaggtcgaaacattgttccactttgattttttctcctctttggattttgaaagctttcatatagctcagcaaaattcttccagtcatcttcactaatggatggtcttgtgtgaccaagtgcagtcattaaatgtgactgactaatagccagtctggttttgattggtcctggttggttcatggattcgtcctctccactttggctccggtatctgcctttgataatactgatatctgccctcagttgatctctttgttcttgtgtaagttcttggcaaccctcttgtgaagctgtccttaacactggaggctgtgaaaacaactggtctttcccaggaactccaggcaaatcctgagtcatggagcttggtgcagagagacattgtgagctcaaatcagaagaggttccatttccaagttctgattcataagagcttccaaagtagagccggtacatattgaattttgattcatctggaaggatctcggacatctctaaagaaacaagggactgatctaagccacattctccatctccagctgaat

SEQ ID NO: 335211 - DNA, 1000 bp, Homo Sapiens
tttttctctaaattttttatatttatttattgcagaaaaatatacaaagatatttacaaaacaatcataaaaatatgaatgcatttagacaccggatctatttgcattttaccatgggtcctcaataaataaatagaatgttgttttttgtattttaagtttttttttgtttttcccctcagaggaaggatgaaaaaaagaattaactgactatggttttgcaggccagtttgatcccagtatttttatttctaaaggtgttcttatagttcctctgattgttaccattttaaaatagagaaagtccatagtgatgcctttcctttcagtggctgattggcacgacctcttgagaatgcatgcatgaaaaaaataaaaataaaaacattcttcgtcaaaaaaaaaaaaaaaaaaaacacaaacaactgttcagacttctatcagaatgcagaggtgtgaggatggtgccgctgcccgtctgggaatcactgtccacgggcctgtctcgctttctcttttaaaagtgcgccccacgccctgtttctttgaatttggattttgctcttctaatttccaagaaaatctttggcatatatttttatttttagttatccagctccagagtctctagactgtccattttctccttctctggaaacaatgacatctaggtctccggccctgctgagggggtggggggctccgcctgctagtgggacgcggacatggaccaggccccctccatcctccagaccgagaaggcgtagctgagccgctcgtgagccacatagctgcagcttgccatcttggagtccagctcgtcgctctggaggacctggtagaggaagtcgatgtacctggccgccagcttgagggtctgaatcttgctcagcttgtccgagggcagcgtggggatgatcttccgcagcgcggcgaacgcctcgttcagcgactgggtgcgctggcgctcccgcacgttggccatgacccgctgcgtctg

SEQ ID NO: 335212 - DNA, 1000 bp, Homo Sapiens
ctgggacagaatggctccccctacatgccttgtcttctgctactccgctgaactcctgtttatttctttgatgttcttctttcaatagattcaccttttataacttaaaatcgtttattttaaaggaaactttaaataaccaatggaaatgaaaaaccagccccacttgccataacagccccaactgttcggatttcattcgggcaggcggggtccacaagaggctctcttggcttaaagggcacgcagcttgggccagatcaggtgttaaggacacgtgagcaccaaattgagcctttctcagtgatgaggtcaaaaaatgaaagcgcgcaggaagggttctccccaggggattctggggtgtccccaagtcatccggggccccgcacgcttcgggccatgctgttctggtctccagccctcatggccgtggcaatggacagcgtccactcctcactcagtgtgttcgcatcctgaccttgaggtgggggtgagggggacattgagtctgttttagaattggaaacggctcacagagggtgggctgtgtccagggccacacagggggaggtccttcaggtctcacccctgaccatgactcccccaattaatttctttttttttttttttttttttgagacggagtcttgctctgtcacccaggctggagtgcagtggcgcaatcttggctcattgcaagctccactcccgggttcacgccattctcctgcctcagcctcatgagtagctgggaatacaggcacatgccaccatgcccggctaagtttttgtatttttagtaaataaggggttttgccatgttggccaggctgctctcgaactcctgacctcaggtgatcctcctgcctcagcttcccaaagtgctgggattacaggcatgagccacctcattgggcctcccccattcaatttcagtgacatgactgactccccacccacccatgccattgagatgcccttttcagaccctcagagcctc

SEQ ID NO: 335213 - DNA, 1000 bp, Homo Sapiens
aacttagaagagtattagtgatttatttaattagcccacagaaactagaaatcctctaccgaagtggaataagagagaacactggaacttccacagaacctacagaattttcaggatagcaacacatctttgaaaaataacagtgctgtaccactctattagattctttccattttttattaattgaagcacagagaaaagaggcaaaatgattaaagaaatttatgttttttagacagggtgttggctttacaccaacgaaaaagaaaacagatgaataagcttttgatcttcattttctttctcttattctcatggtaggctgagatgcttttaaatgtagatgttataagcctaaggcagcttgacttgcagcaacaagttttttaccctcctcggcaaagcaggtctccttatcgtcagccttgcagcacttctctacaaaagctgcgaaatcatccataacagctttcagttgctcttttgttgccttgggcttgtgtttcacgagctcaacaagtgcagtttgtttcttgatttgtctctccttctcagaaagtgtgcatatatctgcatggaaggtgaatgtttcagcattaaactctttgggaacgtatgtttcatcgacttccagagctgaaaagcatggtcgcctgttcaccaaggattctgtgcagcatttggtgactctgtcacttactggcgttttctcatgcaacacacataactggttcaggaccacggatagatagtcttctgcacagggcattctttttgcttcaggatgtttacaacatttgctgcccacttttcctaggtttcttgagacctctacaagagttggagttgacacttggggtactttcttggtgtaacgaactaatagcgcattctggaatttgtactctccaagctgctcaaaaagctcacaattttgtttgattaaattctgaggctcttccacaagaggtttaaattcatcgaacactttggcatagca

SEQ ID NO: 335214 - DNA, 1000 bp, Homo Sapiens
cacagtcctagctgactttatttaacaatttaaaaaaagatacttgatacagataaaatgacaatgagaaactacacaatacttcctatgttagggcaaatgtatataaacgggggcttttcaaaactaatccctaagataacaatggattttcattcaatttcataattagctgtaagatagcatatatatctgcctagtaaaaagactgcatttatacttccatatgctgaattgaccagtggaggggacaggcattataaagtcacaagatgagacaatctaaagtcaaataagttcacaggcagaaactggattcttcttctaactataatgattcaaaaagacctcctgtagtctgaatttgaccacagaaatagataggaaggtccttgagcagcctcttaagtactaagagcacatgtccttaaaaagttgccaaaagaaattcacttagttattcaatatgcatttattgagcacctactacataccaggcactagtaacacagataaagagtacactgataaagcttaattcagattaatctttaaaaatgctttctacttggcccctgggaccattgtatcttctgaagtcatcatagtagataagggagaaattttgccttaaaaaaatgcatccggttacagtgattaaaaacacacacacacacacacacaactaacatttgtggggtctaatggaatagtggggaaaagacaggatttggaataaggaaatccagtttaggcctattacttattagctgtgtgcccttaagttaaatttcacttatctggcctaactcttaattggtaaagtgataattggcctacagttgtagcatattagagccaaaaggaacagagatcatctagtcctgtgctttttgaagttcttcgttcaaatgaaaatattatgtagcagccccagtgtaaaactgatgaacgcagtcactttgacagcccctgagcatcactcactcccttccctccc

SEQ ID NO: 335215 - DNA, 753 bp, Homo Sapiens
tttttttttttttttttttttttttttttttttgttacgattatttattgttactattcactgctttattcccatggacccatgggttagagctccatacataaagtaggtgctcattaaatgttggctggactgagtcagcccctccatcttggcccttgagtcctcagaaaagcagtgccatccatgagaagcaacttgaattgtattttttattgaaaagaattcaggctagagttgggaggaggatgcaagagctactgggaagggggagctcagtctgaacctgggggatcaggggagtaggggactctccccttgtccactgatggggggtctggctgttactcctctcccttcagcacagaaagaacttggtcagtaaaaatgcctgtgtaagtgctcatggctgctgtgcttttgctgtacaagtccctgagtttctcatctacagcgggcaggtatgtcttctcgtacaggttctgggcggctgtctttgctgactcccagtaactggagagagattccttcacctgggtgaggaaggtcgggctaggcatctcatcttgctggggctgttgggtcccctggacctcaaatcccaataccaggaggacaagaaacagagctgggaggagtcgtgtgcccatagtgtccagagaccagactctggcaggctgtcctcaccagctccggacgggcacagagaggatttatagtggttgagacccacttccgctccacagccacaac

SEQ ID NO: 335216 - DNA, 1000 bp, Homo Sapiens
tttttttttttttttgctcctccaagaatgtatttatttacatgaaaacaccattttatacaaattgaagacacatcttaaaagaagggtttgtccaggcatgccttcctcatccccttatattgccacttccattttcatcttcttttgtatcataaatgaaacttcagactggttaaagaaaattgaatctgcctcttctccccacccaaaattacttcgattatttaatgtctgtagtcatccttcaaagaaaagtcttgcccggggttattttatttaatttatttatgtaatacagtgtagaaagcgatcatgtcataagcaatgattctgtacaatcatcctgcagaaaattgttttggagaattcttggtaattgaagaccagcagagcacccctccccacccgccccgtaaaagtgcttacaatgaacagggattcttttctttatcaaagacccaaagatacgtggacaaaaaaagaaaagcttgaagtctcaatgcctaatgtgtgcacataaaacaggcacgaagaaacaaacgtgtgtatcctcttaattcctatatcacaaatatagcagaagcagcaatctgtacagtaaaatgcagtcatggaaaaaaaatctctctaaagcatctgaaatacttaaaaatgtttaactttaaaatgcatagtgatcaggaaaggaatacttaggcaagagaagcagctgaactcccacgttcacatgaagcatcccccatcgattcttaaagcatatgtaaagtaggacttaattgggtcacaaaccacaagaataatatacaactggctaaggggctatgtgataaataatcaggagagaatctattcatgcactagtttgatacagctaaattctttacagtacacaaaacccattaataatgtagtatagagaccaaaatgtaaagagagatagaatacattactgatgtgtggattaattcaagttcaggcatctacttgtgttacagca

SEQ ID NO: 335217 - DNA, 1000 bp, Homo Sapiens
tttttttttttttttttcagatgtgcaagtctccactggtgttattacgttatcaggcacaaaccccctccagacacctgagcctcccccacaggctcccagtgaggagccatcacatgcccaggccagccgaggggccctcaggcatggggatctgggcaatggcagcaagctgggcggggggtgcagccaggatgacagcagatctgcagggcggggtcctcgccccgggccacctggctggggccgaaggtcacagctgcgtctaactgggccttgagcagctgaagctgtttcagggcttgcagcacctctggggtggccccggccacaccccccagcaggttgtagttctcaccagggtccttggacaggtcatagagcagcgggggctcatgagcagtcagagagctggaggcgtggcaggcagggtctgcagtggtatcactgtgggcagagccctgggtgaagaagtgagccttgtactttccagtccgcacagcaaaaaccccacggacctcgtctgggtaggacgggtagaagaagagagactgccgagggctcttgcctgtgcccagcagcagggggctgaggtcaaagccatccaaggtgacattgggcagtggggccccagccagggctgccagggtaggcagcaggtccagggagctggccagctcgtgggtcacgccgggagcgatatgacctggccagaaggccaaggcaggctctcggacaccgccctcgtaggtcgttccctttccacaccgcaagagaccggagcagccgcctcgggacatacgcatggtctcaggtccattgtctgcagtgaagatgaccagcgtctcttcaagcagccccaggtcccctatggctgtcatcagggtccccacagctgcatccagctccatcagggagtccccaaatggcccgcggcctgaacgctctgcaaagctctgcccactgaactgagggtagtgggtgtggtgagaggcatagt

SEQ ID NO: 335218 - DNA, 1000 bp, Homo Sapiens
ttttaatgtgagatggaagtagtttgtatttatttttacttctgttcacaaaccaaaaataggaagaggtgcaaagaataagaacattttacttaacacaagggttggctactctgcccatgaagataatagtgttcagaggaacttctcttataaaaaccaggaaaggcctgttggccttgaaagtcaccctgttggggtttagcgaacggccagcaatcacaacagcggtacttgcagctgcttcactgccttcttcatttacctcaagaaatgccttatggaatgcatctgagacatagaggtcatctcggccttctgcaacaatacctgggagtttggacttttcagggctgaacagatcgacaaggcccatgtcttgcagctgctccttcaaactgaagccgtcctcaatgcggaagcggggcatgtggaccaccagcatcatctcctccaattcatccagccactcttgcagcacctctggggtgagttccttctctaccttggccaggctcttctcaggcttgggcaagatgaggaccatggtgatgtcatcacctttgaagggcaactcaagcacctgggtgccttcagccacgcgccgataacggaacttgccttcctggtacatcatagatgctgaacacgactctccatcagccttgtagaacagttccttccttgtgttctcagggctgaactttgacttccacaggcccttgaagtaaatggtgttaaccagcaccagaacagtgagctcattgatggcttccgagggaatgacatcggtgattcggccttcggtcttattggacacccatttgttgatggccgctctggattgctctgcattttccttgaagtccaggggctggagcttggctccatataccaactcactgatgtcctggtaggtctcattgaaggtaagggatttgtctccaaaaaggcgattggctgatactaacttggaggatttgttggcttttcgatagag

SEQ ID NO: 335219 - DNA, 1000 bp, Homo Sapiens
acacaaatgtatggattttattgacaagtgatattttcttacagtaataaatataatgcagtcttcttaagagtcagtttggagttgagaaggcagtgtacccttgatggaaacagtcagactggtggtaccatcttcttcagaactgcatctaagaggctgtgtctggctgggaatcatacagctgtgggcaacaactcgatcagccccaaggcttccctccagaccaaaaggtgattcatggcccctggttaatatcaccctaggttctcccctgtcccagttttaacataatatttcataaaaatactagtgccataaaaagtcaatatttcaaatataaaaattattttatacaaatgtaattcataatcattcttttaaaatacagcattgtaatatatgtttgaaacattattaaaataaatatttcctagagaaaaaattttgcttcacaaaattataaaacagaagcatataaaactaattcatgattggtgcttcttcagtgtgtctctcattctctcttagtgtagacagcatgaagtacatacatctagcctgaaaacataccaccatcaacctatacatctaaatgcttggacttcatgtgtgtctacccacagtgcccatggcctatctacttacacaccctctacctggagcttctgtggaaagaagggctgtcctgtgacaatttgcactaacatacttttccagctaaactctagttcaaaggtctgtgagcttgtcactttctggagttgggaaaaggcatatcaacttcttcatcaagggaaccatcctgtcccctgtgaaagattataacagccctttcccaggtaagggatgtattgtgattatctgaaatattgagatttttggtagacctggacaatactaaccctgatttccaggatctggaagttctctttcctgactgctcactagatgttgaatggggcatattttgatgtgcagtcttgtggttcctgtggta

SEQ ID NO: 335220 - DNA, 1000 bp, Homo Sapiens
ctattgatgttattttattgtgtcgaatgaaaagccttgaaagaatggttgagaacagcaaattgctgctttcaaattaattcagcctaaaaatctattgatgttattttattgtgtcgtaaataaggagtaggtaaaacattttgtgctttaataagtgaggcacagcttaaaagttttaaacagcaatataaaaatacagtacagtgcataaataaataatatatctccacttctagtcgaattttgaaaccctcagtgtaaattataacttcacttgaatgggaggcacaaggtacatgtgctaatgttctgtaaatccagaaaatcatatcacataagattcaataaggaattaaagaaatcaaattaatcacacttgtgttaactaaataagaataggtcagatacctgtttccaagttatgctgggtatataaaaagcttctctgcaatcatagaaaagttttgaaaaggttcattgatgaaagcaccttgcatttcagatgaacttcaatattttggggcttttttatataagagctttaacaagtatatatgcacctgtatatttgaatagatattgatgaaaggggccatacaggcctcagagtagtgcaccatcagaaatattttaggggatacagtgtcttttaaatttgaatattcaagtatttaagttctacaaagttatatgatacctcctggatgtttcctagaagttctcatattcatagttagaaacaggcttttttaaaaaggaaatgccgagtttctcaaatcaaatttcacataacttagagctctatttctgtttttttttttaatttttttttttgttgctttgttttttgttgtttgtttttaacatagcaggacttctttggtgatattttttaatattggagaaaaccttaaagagccttaagattgctaactagaaattcaagagaggcttcacatacgtttttacgttgctgctcacttttcagggggaaggt

SEQ ID NO: 335221 - DNA, 1000 bp, Homo Sapiens
ttagaaaaaaaaacttctttaatgggaaattttacgattgaaatgatgtttcatcttatagaccacaaacaaatgtttttagacattgaaaagtggttaaagaccaactgcgcccagtcccccaagtgccattttctgagtgcagaatggagggtgacgtcttgagctgatgctgtgtccccagcatcaggttttctgttttccctcttctccctttattccttccttgtccattgccctcaaccttctttttctgtttgctctggcctggttcagtataacatatccatgaactctagtatgggcctacggacaatcatagctacaatcagactttctaagcaaatgggaatgtgatatacatataaccattagaaaccctatcatcacctcctagaggggaagtgaatttcttaatttttttagttgcaagagtcacttcttagccaactgactagagaatgcagaatgaacaggggaggaaggagctgatggcacagccttagaacagtaaccagaacacacccccatcaagtgtcacctccaggaaggcgccccacccccatcctccgttttctgggctcatatttaggtaaagctctaagactcctgagccaacttttatgtaactggctttcctaggctggggcttgaactaagtaaagaagccaaggagttcagatctagatagcagagaagtaagtctcattctaaaacattgcaactactgttagagtccaccccatgaagctgtttcagattgtgtatctttgactgaattctataagtatatattgttcagactaaaacaaatgttgctagctaggttggctgtgctgtctcagtaggacattgacagactccagctttcaccctctggagaccttggacctaagtgccacatgcattatgagacctggtccaggagctgtcctgccatggctagctcacggcttgacagcaatacttcttctccttctccgcccagcatagacttggt

SEQ ID NO: 335222 - DNA, 1000 bp, Homo Sapiens; identical to SEQ ID NO: 157311

SEQ ID NO: 335223 - DNA, 1000 bp, Homo Sapiens
tctgaacaatatctttatttagctcaggtagttgttcttacacatttttggatacctgggttagaattttccctattacattaaatcaatggttcttaagctcttatgcaagcatgcaagctcaatgcaggctagaatagaaggattgttgtgtacaaacattaaaaatagacattttattacaagagtgtagagaagggagaccaatagaaggtaattgaaatacccccccctcactccagccctagtcctggtgcctggatatgtgcactccctgtgcgctctggatccccgcagacacaagtccccagcccctccaggacagcaataagggtcttacaaggccagaaggcagccctgtttgttcctgcctgcaggaagggcagaggaatgtgatgttcccaggaactgtgtcctagacccatagggtcagattgctcagcctagttcaagcagtgagactacctctgtgccagtatcctgggctgtctcttcccttcactcttggcagctcccaattgtcaaagattggacagggtcctggtttggctagttctaacttgctgaagccagtcagcaccctcacagagccagctaggtactgggcccaggggcttccagagagttcttcagagcttctcagaggcctaaggacctcctaaccctagcaggcctcctggctcaagcacaacttgggaaggctccatcagcatctatgtggccctgttttacctgttgtctctggagggtgtgcagaggcaagtccagggtaggggcaggcaggatcccttaggcttgcccacagcccagatagcaaaactgcagccagatcagtgtctatgagtttcaggctgaatcttagaccacataggccagcctgctggtctggctgcccaaccagaccaggtagacagagtctaggcctcagggctctcaagcacctaagagcgcagctgcatttggaagtgctcacagcaggcatgcttcatggttagcccat

SEQ ID NO: 335224 - DNA, 1000 bp, Homo Sapiens; identical to SEQ ID NO: 157312

SEQ ID NO: 335225 - DNA, 1000 bp, Homo Sapiens
tcatgtccctcgccaggctgataggttcaacctggggatacggctgcagttcacaaagccccgagggtagatgttggctctgaagatgtcccttgaaaccgtggtgataccggtattgtcacatataattcgagacaaggaaattctgctcagggccttgcgctgtcttttggtgaaaacacctcgtttctgccaccagaacctgtctccgtctcgggctcttctgaactggttctcgaacagacaagccagaagaggccccactcgagcccccggcaaaagaggctcagcgatggccccaatccagatgtcaatgttgtcaggtgttccatacaaattcaggaacttccttgccaagtcctggtttttcagcacccggctaagctgtgccaaattccggggctgggagagcccacagaagcgcctccaagcattgtaccctggaaggccgtggtcccggcttcgttgcatgttgagagctgccaggtccagcccaatcctcctcacttgccgaaacagccggtcccggagctcatccactaacatggcatcctgacggttcagcttggcaggggtggccatgaggccccggaggatggggtcgatgcccccttcatacacgatccgccagctggcaaagaaggcagagctaagtgggacatgcgagttgggtgcggaggcccggtactgactgtccaagcggaacatgaagggctggagcattgtgtggccaaagcggaaggccagggtgaagacattggccacccgtgggtccacattggagcagtaccccctgtagtgccccagggttctcctggcccgggccttgcccagaaccaggggcagaaagtctcggtaggtgatgatctggaccatggcccccatgatcttccgagcctcattgtacagtttgtctccattccaccggggattcaggcgtctcagctcggtggccagccggttgtgctctcgcataaagagggtgtgcatggctgccagt

SEQ ID NO: 335226 - DNA, 1000 bp, Homo Sapiens
gagtgggatctcactttaatggagaggacgttatgacctccggggcatggctcttggccttgggcaagcccctggttttcatggacctgtcgatccacttgaggaaggcggtgaccttggtgtagatcccgtacttccccttacgggcacagccctctccccagctgacgatgcctgtcacgaagtaggtgtccttgaagcgggtgacgtgcgggcccccgctgtccccctggcaggcatcctcctgcttggtgtcgtagccggcacagaacatgttctgggtgatgatgaagctgctggacagcttgcagctgttgcggtccacgtagggcacctccagcatcttgagcctggtggactgccggcccttctcgtgggtgcgcccgaagccgctcacaatccccgtcttctgcgtcatcagcgtggactcggcccagtcacgctcggggaggcaggcaggcgccacgttcatgcggaaggtgatgggggtcttgagccggagcacggcgatgtcgaagtcataggtctcctttgtgaaccggttgtgcttgatgaccacctccacctcgtgcaccgcctcaccgccctcctcctgctccgtgttccggtcccctaccctcaccttgaatctcttggcttggtagagacagtgggctgccgttaggatgtagaactcgctcagaatggttccaccacagaaaccctcgttttcctcattgatgagcagggcctgccagggacactccccgtccttgcattcctggcctcccacgatcctggtgaggttgttgtcgcccctctcaggctgcgtctggttgaagtcaagcaggtcgaaggggttctcggtggggtccaggtcggctgcatcatatggcttccatgtgatgctgtcaggggcctccccgctgctgctggtggcctgggccactgacctcttcctgcgttccagggtctgtttcccacaggggtagggccctgtgggaatgcaggccttgccgtt

SEQ ID NO: 335227 - DNA, 1000 bp, Homo Sapiens
ccgctgagagtcacttttattgggaaccatagttttagaaacacaaaaataattctttcacgggattggttccaggagcccagaatatgagtggcccctactctccaaactgatcaatgaccttctgtatccacttcttcaggcggaacacatgtgtgtagaagccatatttcccatcccggtcacagccttcaccccatgagacgatgcccatttgataccagcggttgttaaaggggctcttcatgacaaagggtcccccactgtcaccttcacaggcatcccctcgtttcccttcatcaggcttgtaaccagcacagaacatgttgtcagtgatgcggatccgggtggagtccttgcagaccggccgctccacaatgggcaggttcaccacctgcaggacactgggctgccccttaccaacgttggctgtccacgtctccttcaggttgccccagcctgtcacccgccccttgtatccagcctggagcaagctggctgccgtctccctgtcgggcagacacacagggtgaatgtagtcactgaaggcaacaggcttcttcagcttcatcagggcaatgtcccggtccaggttctcccgccagttgtacctggggtggatgtagatcttttccaacatggatatcttttcaatgtttcgctcgtaccttgtgcgggagtgcttgccaatgcgcaccagaaggtcattctcggtgaagttcttgtcccagggcgggtacaggaggcagtgggcggcggtgaggacccagcggtcactgatgaggctggccccacacagcagctcctggggactcttccggaaaagcatcacctgccaaggtgacatgccgatctctgcatccgagccctccacaatgcgcccgtcgatgtaggattccaggagctctctttcggttttgtcctccagcgacttcttctcgaacagaggtcgcagcccacagtctgcctctcccgagccaaaggtcctcggattgaagaa

SEQ ID NO: 335228 - DNA, 1000 bp, Homo Sapiens; identical to SEQ ID NO: 157313

SEQ ID NO: 335229 - DNA, 1000 bp, Homo Sapiens
gcttgggatattttaatacatattcaagagaaaatgacaaatatatcttaatagaaaaggatacaaattaaaaatcagaaggcaagaccaccaggattaaagatgcaacttagatcaaatattgaccaaagtaaatgggttgaattttgaatatagcatagatcatacttagtgagaggctttcgaactaacgacttacatttaataataattagcatgtcacagaatatagtttatgattattagaaaaatgaagttaaatcaatacttgggagattgtttattaatgtgtgaattatgtctttttttaatattcataaatagttttaaaattttaaatgtgttttagaaagaaattggttactccttgggaaaaaaataagtgtgcattacaacgtctagtggaagagtttaaaggatagattttcatttatatttaggaaagaatgtttctcttgccttcctggatttgctccatagcaaaagacataaatacatattgtaattataaattgtgcattgtaattataagttgtaaattctactacaaaggtcagctatggttagattcagtgagttttaccttaaaatattggcttaaaacaattcaaatcaaatggataaaacaactttttgctttccaatggcattatgattttgggtggtatgggaagagaagttctcaaaccaatagtcttcaaggttgcagagagaagcttctgtctgccactttcctgatgtactgaatggcccttggtatatctttataaaaatgttaaaacccacagagctatttaaagataaaaaaaaccttacataactttatttttcaaagactaatatgtctcaggtacatttagctacagtacaaaggataagaaaatagcacctaggaattttttaggttgtagagaatctcaactgctttaccttttgtattttctctccacttctctagcaaagaagacagagtgctcccattcccacttcttcagcctat

SEQ ID NO: 335230 - DNA, 1000 bp, Homo Sapiens
tttttctagtcttaggaaacaaaaggtttattgaaatgcatgtagataaattatcatcagcataaaactgttatggagttttcaacatggggtcttttgctcttaaaatgaagtgaagctttgcaagtccattgtccaataggaaaaatattatatctctctgttcagataaagtcctttaaaaaagtaaatctcttttgaaacggtcttttaaacgtctccagcctgtttggctccccccaggtggtgttgctgtccttctccaattgtgagtctgttgaatgggattatcttcatagtggttttcttcatggaataccaccgggttttccaagtggcccaaataatgccattatcataaccattaggagtagatgcttttgagtaagtgccaccttggtaataaactccattgagatggccagcgtgacacttgttcatccaccaaccagatccatcctgttcagcacagttgccttcaaacttatcattgtcattgtcccaggtactgaactgcatgccattatgggatgtgaaaaacttgtcactaggatcatcgccaaaatcaaagccatcaaaggcatctccagcatccccaccagcgaagtaggcatatgttaggcggtacttgtcagcttcaggtcccaccttgaacatggcatagtctgcagtactggttctgccattccagtcttccagttccactcttaatgcatatgggatggcagactgtgtgcttatcaaatgaatcttctcatttcccagccaaaattctgttgtgccagtaggagacagatgtccaaatccttctttatattgaatccagtttttcttgaaatctacactgccatcaagtctcttctgaaacacagtccatccatttccagacccatcgatttcacagtagactaagaattgctggttagctttcagaggtttaataaagtaaagcccgctctgtttagctcccttattggcaatgtcttgacaatctttccca

SEQ ID NO: 335231 - DNA, 1000 bp, Homo Sapiens; identical to SEQ ID NO: 157314

SEQ ID NO: 335232 - DNA, 1000 bp, Homo Sapiens
ttttttttttttttttttcaagctgggaattaggcaaacctgcctcccgttttatttctaaataacatagttacaatgataagaagctacacgcctccctcataattagcgtccagggaaattccttgtggacaaaggacagacggaactggaagtcatccctctggggctcccctgagacaaacgcttatatgattgccccgttcccttactgtttacataaaaatgcggattcactgggccagactcaatcgtgtattcagtggaaggctgactgaaccaatgtacgccatacacatactgatcttgtgtctccctaagatgtataaaggcaaactgtatccccagccacctcaggcacctgttgtcaggacctcctgaggctgtcacaggtgcatccttaaccttggcaaaataaactgagactggtctcagatatttggggttcacaaaggcgtgagacggcagggtcctgaggtctgaggcgccgtgggcgaggaggagggtcctgaaatctgaggcgccgtgggcgaggaggagggccaagcacacgccagggtcaggtcctgggcaggtggaattgtgcagtccccctgcgtctgcaggtgctgtctgtctggcttgggcagggttgggggaggaccgaggccagagccatccttcctccaggcacttgcagggccaaccggagattctaggcctggcctgagtctgcgcaggtgctagtgggaccagaggcacttcttgggaatggattctggaggtgtcagacacttccctaacttttcacagcccggaggtgcccagttcatgaccgcccagttgcacacgttgagctggggctgcgcggggaccaaggcctcctggtgctgctggacgaccgaggtgatcctgctgagggcctcctggtactcggcgctggcaaagctgagggggaacctctcccctgggtcccgtcccaggtggaagatcaggggcagcttcgtgtggtcttccagat

SEQ ID NO: 335233 - DNA, 1000 bp, Homo Sapiens
ctttgctcacatttaatttttattttgattttttttaatgctgcacaacacaatatttatttcatttgtttcttttatttcattttatttgtttgctgctgctgttttatttatttttactgaaagtgagagggaacttttgtggccttttttcctttttctgtaggccgccttaagctttctaaatttggaacatctaagcaagctgaagggaaaagggggtttcgcaaaatcactcgggggaagggaaaggttgctttgttaatcatgccctatggtgggtgattaactgcttgtacaattacgtttcacttttaattaattgtgcttaaggctttaattaaatttgggggttcccttcttagagcagctcgtactgacgaaggtgcatgcgctgaatgatgtcacggcagtcgttgaacacacggcggatgttctcagtgtccacagcgcaggtgaaatgagggtagcagtagtgacgcccatctccactggcagtgctgatcctcagaaactcatctcgaatgaagtacttggcccgggtcacgcgtgggtcctctccgggctcgggagtagcatcctcaggagtagtgtagcgagcaaattctggaaagtagtcctcaatcttcgatttcccagcaaggactttctcagcgagcagatcttgcttgttgaggaacaggatcacagagatggtgcgcagccatctgttgttccagatgctcttgaagaggttcagagcctcctgcaggcggttggtctggttgtcctcccggatgaccatgttgtagctgctgctggccaccacgaagatgatggcagtcacatcgttgaagcactggatccacttgcggcgttcatcgcgctggccacccacgtcaaacatgtggaagttgactttgtccacctggaacttggtctcaaagattccagaagtcaggacacggcagcgaagcaggtcctgatcgctcggcacatagtcagcctgcttgatcacgtc

SEQ ID NO: 335234 - DNA, 575 bp, Homo Sapiens
gccgcccactcagactttattcaaagaccaggaagggccggtgcaaggaggggaggagggcccgttgggaggcccagcgggcaggaggaacggctaccgaggctccagcttaacggtatttggaggtcagcacggtgctcacagaagccaggaacttgtccagggaggcgtgcaccgcaggggtgaactcggcggggaggtgggcggccagggtcaccagcaggcagtggcttaggagcttgaagttgaccgggtccacccgaagcttgtgcgcgtgcaggtcgctcagggcggacagcgcgttgggcatgtcgtccacgtgcgccacggcgttggtcagcgcgtcggccaccttcttgccgtggcccttaacctgggcagagccgtggctcaggtcgaagtgcgggaagtaggtcttggtggtggggaaggacaggaacatcctctccagggcctccgcaccatactcgccagcgtgcgcgccgaccttaccccaggcggccttgacgttggtcttgtcggcaggagacagcaccatggtgggttctctctgagtctgtggggaccagaagagt

SEQ ID NO: 335235 - DNA, 626 bp, Homo Sapiens
gcaatgaaaataaatgttttttattaggcagaatccagatgctcaaggcccttcataatatcccccagtttagtagttggacttagggaacaaaggaacctttaatagaaattggacagcaagaaagcgagcttagtgatacttgtgggccagggcattagccacaccagccaccactttctgataggcagcctgcactggtggggtgaattctttgccaaagtgatgggccagcacacagaccagcacgttgcccaggagcctgaagttctcaggatccacgtgcagcttgtcacagtgcagctcactcagtgtggcaaaggtgcccttgaggttgtccaggtgagccaggccatcactaaaggcaccgagcactttcttgccatgagccttcaccttagggttgcccataacagcatcaggagtggacagatccccaaaggactcaaagaacctctgggtccaagggtagaccaccagcagcctgcccagggcctcaccaccaacttcatccacgttcaccttgccccacagggcagtaacggcagacttctcctcaggagtcagatgcaccatggtgtctgtttgaggttgctagtgaacacagttgtgtcagaagcaaatgt

SEQ ID NO: 335236 - DNA, 774 bp, Homo Sapiens
atcaggaagttgagctgaacattctttattaggcagaagccatacccttgaagtaggcattgtgttcccaagttcagaaaatagaatctagggaaatagggtcttcttatggttatcaggaaacagtccaggatctcaatggtacttgtgagccagggcattagccacaccagccaccaccttctgataggcagcctgcatttgtggggtgaattccttgccaaagttgcgggccagcacacacaccagcacattgcccaagagcctgaagttctcaggatccacgtgcagcttgtcacagtgcagctcactcagctgagaaaaagtgcccttgaggttgtccaggtgagccaggccatcactaaaggcacctagcaccttcttgccatgagccttcaccttagggttgcccataacagcatcaggagaggacagatccccaaaggactcaaagaacctctgggtccaagggtagaccaccagtaatctgcccagggcctcaccaccaactgcatccacgttcactttgccccacagggcattgacagcagtcttctcctcaggagtcagatgcaccatggtgtctgtttgaggttgctagtgaacactgttatgtcagaagaaagtgtaagcaacagtcgactctgccctgccttttatgctggtcctgtcctccctgctccagtgagcaggttggtttaagataagcagggtttcattagtttgtgagaatgaaaaatgaaccttcattccactattcccttaacttgccct

SEQ ID NO: 335237 - DNA, 1000 bp, Homo Sapiens; identical to SEQ ID NO: 157315

SEQ ID NO: 335238 - DNA, 1000 bp, Homo Sapiens
ggcagtgactattttattaacaattaatattacgatatcactatctacaggtctaagggtttttttttttcatttttagtagaaatatttaaaaagcaggtgcacaaatacattttcacagtgtgctgaatgtctttatttacaagatatcattctatagtgaatatgaacaaaacgaatgtgctggttgaaataactgcttgattaaaaatgtgctgtgaagatgaatcactaatctttctaatgcactctgataacacaataaacatggaaaaatactaatcccttaatagatcaaaatatagaatatagacacctaaatatttcaggggaatgaattttcattctgagttttctaaaaaagaaaaaagaaaaatgatttctccagcaaatgtttagcaaatattgggaaatgccaattcaaatgaaaaaacgaattgtgttcaaaccaaagtccattatgttgggatggaaactctcgggagatctcacataaagtgaattctgtggatcatctgatgatgtaaacattttcaaaaagatacaaaatcctttggaaaataacggatattggagcagtaaatatagttcaaatgccacaaaatatgcttgttataagcaattaaaaattattcttaaaaagacattaccgacccgggttctcttgtagcctgaaaggttcagctggttggttttactatactaccaagacaaatgatcctcagaagagttttctctccctttctcccttcacagcaaatattccaagatcattatttcagtaccttctcgtttcccctctaaatctatacataaaatgttttgcagaacgtacaacaacggtaggaatttcactaagatttacctgagcagacgcttaacatgcaaagggaatggcgacctaagaaggacaagcagatgtttacaatggcctcttgcgtttgtaaccaacttccagattattaccatctaacgcagtgtcctaaaatgtaacgatcac

SEQ ID NO: 335239 - DNA, 1000 bp, Homo Sapiens
tttttttttaacacttgtttggccgtttcctcagcatgtagctgattcagcagcaatcacaatagttaacatttattgagcacttactgtagaccaggcacttcagcattttacatatttttcatttacttccaaaacaattctatgaggtaggtactattagcatccatgttatagaagaggcaactgagacacagagaggctaagttacttgacaaaagtcatacagctagagccaggattcgaacccaggcagttggctcgagagttagtgctccaattactacactaatgcctatgacacctctatacctctccctgggcactccagccttccagcaggtccctgggagtagagacagagcccagggctgcaaagcctggtgagtgcccaaaggctgagttggccagacaggctgacagggctgggccacctgagacaggagaggggaaagtccccctgaactggtggaagaggtgccagccttccgtccctcccctgccctccccgctagggtctatggcgcctcttgaagggggtggcagctgccagtccctgcctcccttcccaccagcatgcttgctgcctccccagcaagaaaagcccagagtttaggtcatgagggggaggctttattgacaacggagaaggcagagttctaggcaagttcacacaacactgctccaagggtccaggcacgggtcaaacccgtcaggaccaagggcctcttcacctcagggacctcagtccctcccaccatcctgaaccttcccacaccttttccagcaacccaaagatatccacccccaagccaccttctggacaaagtgagtggcagccactgttgtggagccaggaccagagttgggtctgaggcctaatcatgtgtggtgggcacagtaccccctctcctcagcctctggggacaggcaggaggtaggcaggggcagcagccccagcccacagagccctcactgcacgaggccgatgtggcaaaag

SEQ ID NO: 335240 - DNA, 1000 bp, Homo Sapiens; identical to SEQ ID NO: 157316

SEQ ID NO: 335241 - DNA, 1000 bp, Homo Sapiens
tctagaatttaataaactcagttattataagcttatccaacctatttggattgccaggtatcatgattgcaaaaggcaggaatgggatgtgaatgggcagacagtaattcagttcttggtttcttttcctttgatttgtttacaatggaatatttgcatgttttctccaaggacgttgtaccttcttgctggccaagacatccaggtcacagcagattcgggcacgtgtggaagaaggttggatgatgtcatccacaaaccctcgcactgctgcagggaaagggttggcaaacttctcgatgtactctgcctgagcagcttccacattctcatgccctttgaagatgatctccacagcgccctttgctcccatgactgcaatctctgcggtgggccaggcatagttggtatcaccacaaaggtgcttagagctcatgacatcataggcacctccataggccttcctggtgatgactgtgactttgggtacagttgcctcagcaaatgcgtagagaagcttggcaccatgccggatgatgcccccgtattcctgtgctgtgccaggtagaaagccagggacatcaacaaaagtgatgagtggaatattgaatgcatcacagaatctgacaaaacgagcccctttcacagatgaattaatatccaagcatcctgaggccaccttaggttggttgccaacaattccaacagtcctcccattcattcttgcaaaaccaacaatgatgttcttggcataattgggcatgatctcaaaaaattcacgctcatcaacaacagagtgtatgatgtccaccatgttgtaggctttggttgattccaaagggacaattgtgtcaagctcaggaaccagacggtcactgggatcgtggcactcacggacggaagccgggtcctgactgctcaggggcaggtagttgaagaaatcccggagattacacaaggcatcaacatcattttcaaaagctctgtgggccacacctga

SEQ ID NO: 335242 - DNA, 1000 bp, Homo Sapiens
tttttttttttttttgattgagaacattcttaattttattttctttaattttataaaatacactttgtaagataagtttctaaaagtttatcctttatgtgtgttaaaattgcaattctatatcagaaatgaaggaaacactttcagttgattaactctctttgtgtgtgtatatatgtgtatgtatgcatgtgaggttttcagggaagggttggttatttgttatgttattaaatcaaaacaaaacacaaggtacggattacttcactgtcctttatcttgattggtttcttacaaaacattttccctctcctccttctatgcagcctggaagcttatcttgtatactggtttgaaaacaagtatcaagtgtctttttgtaaagctcttacatctccttaaatattgctgaaaccactttgggggaaaagaacaacacaactctttacaacaaaagaactgtagtacaaatctttccttcaattaaaaccaatcagactttttttttttttaacccaaagttaacaaaaacaggaaaagactgaaatctgggagctattcaggtctcaaactctttctgcctgtcctttttcctggaagcttaccaactgaatagctgatgactggtgcattctgttatgtgatctatatcaggagaaaataacctttatgttaaacctaactcttaacacaccaagataacattgctaagtaaaatcattttccattagctagaaagaacgatcagattactcaaattgagattcaaattcaccaaatctgtttctgcaaaggcagaatacttgtagaaaatcccaatagattcaactagccaatttttaatatcatttgtgatgcttaatgtccaattttcctagtttaaaaaacagtcataatcaaagaattattctccagacatttctgatgcaaccccaaataagtaataaacaaactggaatacatgaaatgtgcatcattctaaaacaaatcaagaccttca

SEQ ID NO: 335243 - DNA, 1000 bp, Homo Sapiens
ttttttttttttttttttgaatagtctatattagtttatttacgttttctacaatacgtggaacttttttcaatataaaaacaagtcagtgaatcctcatttaaaaaataaccatgtgacacataatacaaagataatttaaaaccagactcatgctgttttatgacagaaccaatttcaatggtaactaatcttcttaaacatatttaatcatgtagtttctggaagataggttaaatgatgaaaaaatgggcgaccatgaacacactctttaatttcatttccaaactggtgcttcattctgtagataatgtcttggatgtcctcttttgataagtacatgggtaattgtctggatagacgcactgcttctccctctaaataacttatcactttgcgaggtctacattcataaacttcctttgcatttctgtttaatatagcattaagaatttcttttaaatctgctactccatagaatgggagacaattagccattccttctatttccaagtaattttcagtaattgaaactcctggtatcaattttatcttgaaaccattcgctgtaagacgaggatcagacaggtaagttgatccactgtatctttggtcatctgctgtcattttatataaaacgtctaaataatgagatccattaaaaagactctctgttaacataattggcttttccagtggctctgcaggaagtttatgattctcaagaagtcttttaaatagcagggcttcttctactctatatggatttaataacattacctctgttttggatgtcattagccatgcatcaggaaacctgagattgtggatcaagcaaggttcatccttctcttctaagtcaactttgttttgtttcttaaaatttatttttaagtttttcatagaaaaggggatctgtaccattttaatattttgactccttcttttttcaatttgggactgaaggagttcatcaagttttggttgattagataatgag

SEQ ID NO: 335244 - DNA, 1000 bp, Homo Sapiens
acccaaaataaaccttattgctttattgatcattttataaggtaaaaaaatgtctaatgtggcagacaaaaattaaattgtgttgaatattgtcctactattcttatccaaattcatgaacaggcagctaccttatcctaaaaaatatccttggtaaagattctgagcctctcagttatctatcccacgtctgacaattactcatcatcacaaagttcttacaaatatttaaattcagtcccttttcattcagctctcactgggctattattttccctcctttcccatttccatccatttcccatttccctcctttcccattattccatctaaagaagcataagctaatgttttccaccataaagggtaacttaagcttcaaaaaaactctcaacatcgtaagtatgagaataaactaacagttaataacagacagtagatgaattcctctgcatctagtaagaataaactaaagaacagaataaagaaatcagctaactcaaaggtcaacaactggactttaatgaattaattttgttaaaagtgttttgaacagatatgcaagtaaaaacacacacattaagaaatgaacaaaaatgttcttgctctccataagtacttcttagaacagccatgattaagtcgaactttatatatagagtttaaaaaacaagtaacaaatttttgtagagttaaacttgagacacatacatttatatcctaatattggatatactctcttgacatttaatttgttattcctattggtaggtttgcctttttaaagttttaaagttttcctaggagaaagtataagaaaaaggtatccagattacttatcatttttgaacattacttaggaataacagttttcagatagctcaattgcgaaaaacaatgacaaaatactggagtgttagttttattttcaggatcacctttttgaaaaggatctttttcattttgtttaataaaaaataagtataagaaaaataatttt

SEQ ID NO: 335245 - DNA, 1000 bp, Homo Sapiens
tggggtttttcccattcccaggactgcctcctccacctctagccccaggggactctgtgctgcttggctctgctcattgctcaatccagccatcccagggtcagggatcaggtggaagctggcagtttcaatctatcctgtggatagagtgtgaaagcaacaaaacccaccaccgttaataccaacataggagctgagcttttaatggcccaatttgccttagtctccaggcagagctgggtaaagctagagcttctggctttgcttatatggagaagggggagcagttactgaggcagcttaattctgacacctcagagatgtggccagctttttggagcagattctccagaatggagaatggactagcaactgctgaagatgggcttgtctggcaagggaaactggaaactggggcccatgaacatccccaaggaaggtaggcccagtggaatttcccactctttgtttctaagctcttcgagtaaggatgacatcagggactcagctgttaattaaatgtgggcgggtgagcatggcttctagaggctccatgctctagatgctgggacccaggtgctagagcaaaagagcaggtggcttccagaggctgagagaaaggcctgtctctccataggccacattgggaaggggaggcacgggacctggggccccacactaggggtgagaccccaggcccaatctcaccctcattgggaacttggccttcaccgtccccctcccccagtgttgttttttcaggtctgatgactgcatcctgcattcctgtgactgtccctgcctacagcccaacccccagccctggtctggccttgatgcctagctaatttttaaaaacctgccccaaggttgggtgaaaccccatcatctgaatgcccaatctcaaaatgttcactatcaggaggtgataatcatagtaattaactagttacattaattgatgttattcacaacattaactagaatctgtacagcttct

SEQ ID NO: 335246 - DNA, 1000 bp, Homo Sapiens
gtactaggtcacctctcccccagctgccttagggggaggggcttggggactaaggggcttgctgtgagaataaggcacttgaggtgggggtggagggccagctgggggtgtgtcagctaagctggtcctcatactgcttacggaaacaatcaccagctgggaagaaatcccaacatctctcttggtacatcttccagacataagactcctgacccgtgtgttctgtctcatccttgtttatcaaatacatcaggaaaaacatgtaattggccaggttgtgctcctccagcgtgtgagtctcgaagccatgcggtgtcgtatcaaagtagtcactgccgattccacagatgaagcacttggtctccatatcctccttcacttgctcttgttggtctcggagctcaccaaaagcgtcgatgatcagaccctggatgatggccaacaggatgacgatgacgaagaagaagaaggtgatgtcgaagaccaccctgtagagctcgtattcgtcacccgcggggtcctcgatctcgtccccaatgcctccgccagcccggacacccacgtacatgtgaaacaggtaacacgtcatcatgtcatcacacttcatgtcaggttcatcctcatcctcgctcttgttgtagaacttgcggaagaagttgaaggccaccacggtgtacaggtagacgaccaccgccagaaggcccacggtcatcaccagctgtttcccattgtgggtgacagaggacaggatggtgcgcagcgtcttgacccccatggcgatgtccaggagatgggcagcaaagaagaagttgttgtagtgtcccaagagggacatcaccatataccagcccaggtacaggaaggagttgtctgtgaagatgaccccgaacttccagatctggtacttgacatcgatggacatgagccaggtcagcagccctggcggcgggttgggcttgcgctcattgtgggctgtgatctctagtgtggccaggtccat

SEQ ID NO: 335247 - DNA, 1000 bp, Homo Sapiens; identical to SEQ ID NO: 157320

SEQ ID NO: 335248 - DNA, 1000 bp, Homo Sapiens
tttttttttttttccaccgcatttctccttgactttactaaaagttaaataaacgtgccactcgccccggctggctacaagctgcagggggtgccgggtcaccccaggccttttcctgaatcccagggtagacgcggtacactgaaggccaggttctcagcagcaggcccagggatgtgggaccatgcttgtcctgggttcacaggctcctttgtccctcctggcagtgctcaggacctcagactcctcagggtggctgcgaactgccctcagccagccaggcccccaggcttctgagtgttagtcctgtccacacaggtagctcctgtgccctggggtcacctctttcttctcctgggcacctcagcttggccagttccccggccctgctcagctgctcgggccttgctgccttgtgagctcagctactcctgccccaaacaagggcagggtctgcagggcgctcgagacagaggagctgccccaccaggacctggacttggcacgggttgcgaggctcccacaggagtaaggacgacttcccagccccgaagtagccttcccagtagaggcaggaggccaggctggcctcagaggcatgatgctcttgggaacaaatacaggaaagctggaggtcatggggcctgggagagggaatcgctggggatgggaagccaggagagccctgcctgccttccctgttagcttcggcctccctgggctcaggcgttagagccccaggctctggcacagagtagccacccaggaaatgcctgtgtgagtaggtgatggggtcagtacaaatggcatgtgggtcactagctggaaggagttggggcaggaaggagtggcccggtgggtacattggtgacagaacaaggccacgctgatccagggcctctcagagctcagcaggtcacagctacacaggcctgtgtcctgagaagtgtggctgccagagtggtgtagcggtcccagggctctccataggcccaggctg

SEQ ID NO: 335249 - DNA, 1000 bp, Homo Sapiens; identical to SEQ ID NO: 157321

SEQ ID NO: 335250 - DNA, 578 bp, Homo Sapiens
ctcaaaatgaacagaagataatgtgaaacataatatttttattagctttatttcaggcaagcacatttaaccaaattgcaaattatatcactattagacagaaaatcctaccagataagacttctgaggtttggtacagtagtttgtcttgatggcttcatgtatgcagtcactatagtcagtattgcacttgccacacttacagcttaaagcaacaggataggaaaaatagggagcaacatggagtgggcatcctggtatttctacagtcctgtagatgaagtctctatatgtgcaaacatcctgggacagagcatatttgggaagaaacagtttgccattgatatcccgtgtcatacaatatccagcacagatggtggtgttgatggttaggcaataagcacactctctcctttcgatgtgcattgtatactcagttggaatacaaaaagacatcgcttgcccacatgcaaggccaaaaagcatggacatcagaaagagagcagtcatgcttactttgcattggtgagcagatgctgtggtgacccaaactaaaagctcttggttcattttatacc

SEQ ID NO: 335251 - DNA, 1000 bp, Homo Sapiens
tttatttttaccaattttaattaaaatattcacttatgaccaccttatacagttctttggaagattgtttcatagcacaagatcaaaaagagaaaatatatttcatgttagaagagaagggaaaaaatagcattcatatagaaccagataaaaaagaagaccaatgaagtaatatgttaatattttacttggaaaatacataaaaggctgataaatgataagagaatgctatttaaattaagcacagtgattggaatactatttatagagcagtataaaacatgttctccatatgccttctccatggacctctaagatgttagaagagacattagtaggtgaaatgtaaggataggtagttcctttttcagcgaattgagaggcagggaaacacagtggcaaacacaggcaatatccattgttgcttaagaaagtgaagattttccctctccaaagtttgacaaagatggtgatttttgttgtagccttgaacctgagactaaatagtatatgttgactaaataatatatttgattggtcttcaaactggaacattaatttgaaaaggttaatcaaaatttcattggtttataactacacataattttctttaattaataactgtggttttctttaaatctgttgacaaatatccatgaatggaaatgagtttatgttttaacattttagaaatgcccattcatgtattttaagtggacatttactatcaaacattattttcctttacacgtaaacaaagcatggtagttcacttatatcttcacatactcaacctttaaatcatgccaaagatcttcacactatccttaaatatcatggagtttagtgtcattcaccattttaaatagaactgaaaattaaaacccattgaaaagattctgaaagggtcttcccagctttgaaaagtatgcctagaactttaattctaacatatgcttgtattagaaagaaggtaataaagtgaaagaaaatacagtta

SEQ ID NO: 335252 - DNA, 1000 bp, Homo Sapiens; identical to SEQ ID NO: 157322

SEQ ID NO: 335253 - DNA, 1000 bp, Homo Sapiens
ttttttttttttttttttttaatattcagtatgaaaaacattgttttattacttgaaaaataatagaaattgtatataaaatacaaaatatacacttgcctagtgcaattggtctccattttacattttttacatgttttttccctatttaatggcacccaaaatgcggtttcattttcactgccctggtcaactaataccatttaacaacgtatttaagaacttcttcaaaagacagtaaaaacaatttgtaaaataactatgctttcttacatttacaaaacagaattttgataatatatgaatattttatatcacataattaccatgtaactactaatctgttatctatatcaaatcagagcacataacattttccaaatacactgttttaataaagagattagaaaacaggacagtaacagtttcttaaagcaatcttacaggaagtctaatttaatattctgttaggtgatgtactcacgtaggctcccagaagacccagaaactacatgaattgcggaaggctgatttaagatgccagttcttcaataaacagtgaactttgtaattagaatgatttttaagccaaaatactactccttactcttcagaaataaaatatagctatcctcttataatacagcaagaaacataattgttctggtaattgccagcttaactaaaaagacctccccttttcgttttgtccattaatttcttgctggtatcacttcctttggcaaaccacacaggtaatcgtctctttctctctgcagatgaagtctcagtattgatgcctacttcttccttgcttctcttagaacttgaacagatctcttcagaaccgggaaaacatctccttttgttgacatcacatgaaggttgaagtccgctgtcaggaccatgtttaaggatctcaattgccatgtggataaggtacgtgtcaatgttttcaggaactaacattctgattaggctaattttactcatatctgag

SEQ ID NO: 335254 - DNA, 576 bp, Homo Sapiens
gccgcccactcagactttattcaaagaccacgggggtacgggtgcaggaaggggaggaggggctggggggaggcccaaggggcaagaagcatggccaccgaggctccagcttaacggtatttggaggtcagcacggtgctcacagaagccaggaacttgtccagggaggcgtgcaccgcaggggtgaactcggcggggaggtgggcggccagggtcaccagcaggcagtggcttaggagcttgaagttgaccgggtccacccgaagcttgtgcgcgtgcaggtcgctcagggcggacagcgcgttgggcatgtcgtccacgtgcgccacggcgttggtcagcgcgtcggccaccttcttgccgtggcccttaacctgggcagagccgtggctcaggtcgaagtgcgggaagtaggtcttggtggtggggaaggacaggaacatcctctccagggcctccgcaccatactcgccagcgtgcgcgccgaccttaccccaggcggccttgacgttggtcttgtcggcaggagacagcaccatggtgggttctctctgagtctgtggggaccagaagagt

SEQ ID NO: 335255 - DNA, 584 bp, Homo Sapiens
gtgatctctcagcagaatagatttattatttgtattgcttgcagaataaagcctatccttgaaagctctgaatcatgggcagtgagctcagtggtatctggaggacagggcactggccactgcagtcaccatcttctgccaggaagcctgcacctcaggggtgaattctttgccgaaatggattgccaaaacggtcaccagcacatttcccaggagcttgaagttctcaggatccacatgcagcttgtcacagtgcagttcactcagctgggcaaaggtgcccttgagatcatccaggtgctttgtggcatctcccaaggaagtcagcaccttcttgccatgtgccttgactttggggttgcccatgatggcagaggcagaggacaggttgccaaagctgtcaaagaacctctgggtccatgggtagacaaccaggagccttcccagggtttctcctccagcatcttccacattcaccttgccccacaggcttgtgatagtagccttgtcctcctctgtgaaatgacccatggcgtctggactaggagcttattgataacctcagacgttccagaagcgagtgt

SEQ ID NO: 335256 - DNA, 1000 bp, Homo Sapiens
ttgagataataaactgttttatttattgaagagtaaaatagtacattaacaaaatcttatctgatagagagataataccagaagtcttcttactgtgattatcagctaagtgactggttgaaatcaggatataaatcactggatagtttttttctggaaagacttagaacacatcaataaggccctctaataaagaaattgaaatgagatcttgccctttggagaaagagaactgtgtaattcctgtagccagggcacttagtcaaagagaaacagagggttgtgacaatggtccagtgagcctggccccagaactcccttcaactagtctcttgcttgactttggggagaagactgggcattatttagaggctggagactaattcgacaatgggaagatgcaaaaattcatatcctgggttcaccctttgatgttgggccattaaatccagtttgtctttgcctctcttgtctaaaagatgctcagatattagtttcaccactttgagagacatggctgctgccgtcagtgagtgaaagattgtcttgctgcctgagatgggatgtgcctggccaacacccacttctctggttgtataagacagggacctaaaaagggaaaggatgggaggaggatcatcctgcagtgatcatgtagggcttcatgctataaatggttttgcatttccggagatgaaacaagtctcttcaccacagaactactgcagatcatagccctatggtctggctggttttgtcaatctggcagttcagggtcagtgcaaaggacatccccaacacctcaatcacacatacacagatggtgatgattccgatatacaggaaattggaatgaaaccacagtcttgctttcgcatagcaaccctccacttttcgatctgaggggcaagatgctggtgggccactggtccaatcactcgtgccatttataccacaacactgcagaaatgactggatggagtcccacgctgccttggtg

SEQ ID NO: 335257 - DNA, 1000 bp, Homo Sapiens
ttttttttttcaagtaaacaggggctttattggcttatagacctgggcagtccaggtgtagatctggttccagacaaggctgattcagagactccacgtggtcaaggctctgttgtttgtcaatcccttggctcctccacttccagtttggcttctgtcctcacagtctctctccatgtggcaaacaagatggctactggtggtcccaggttcacgtcctctcagcttggaaatccagcagcaagaagatgtctcactcccaaagtccataactcaatccttgggaagactgtagttggtcctgctaggaacacgtaactatccaactatcctccagatagggagctggggagatgggagatgggctcctctgacaggacaccctgtggttcacgtccactcttgtggcctgggtatattgggaatgcggggatgaagaaagaattcacagccccacaaggttcgtgtggaaaaggggaggagtttcccagaagagccataaaattaagaaagcactgcaagcaaacaaaaaccagtcatttaagttcttggcagtaacaacatatttatacctagtgcttcattttgctctggaaaaaaagcagatctgctctgctggggcaattctaatggcctttccagtgtgctttgagaaagtggagggactgcgtggtattgctgggcttcccatttcaggagacctgggcccagcagttctatgacatgatgatgagcactctggacccaaaccagacacctggccagtgtcctgattctgagactgaagagccctgtgaatgtgggcaatgccctcctgctttctgggggtcatgggtggggaattaaatagaagatcagcgcttccttctcagctcttgccttatgagttttttataacatcatttctcctttctgggtgttagttttctcatctatgtgaggtaagaaattatctccaagatctgtccaacttgaaataaaaatgaaaacaaaacacctc

SEQ ID NO: 335258 - DNA, 1000 bp, Homo Sapiens
ttttttttttttttttttttttttttttttttttttttttttttttttttttttttttttttttttttttttttttttttttttttttttttttttttttatcattcatattttattaccatggttttcccatcttctatctaagagtagcatgcaagatcttgtaaaatgctttattggaaccaagaaatgttgcgcttaaagcttacaaaacagagacagctaaagctttctttcataagcaacaattgtcttctccatccccacctcattggaactgacatgatgaaggatttgaaagtttcataacttaactcagcgaagctcagtagtacatttagtattggttatacaacatttgtttaataaatgcaatgaacaaagctacacaggaattagatattgaagcagaaaaggtggttttacagtccctgcattaacctctaattcttactaccctggccaagaaagcattttcacctcctgcgctttccttcctgtgtgcttgtggttggttctttcttctcaggctttctcattctgatgctgagatagttctgttcacttagcaacttgggacagtgacacagggtttgttctgtactttcttttccaccccaccccccaccgcaatcctcagtccccttcctaggaccattttctactcctagcattaagaggactcatcgttatatacttggagatggtccagttctgatagagtcccctggaagactcaattctacgtcaccctcatgatttcctgttaattccactacggctaatgttctaggaagacacccttatctctgggctcagatgggaacacctcccttagactatcctggactacctgctatttctcagccatgctttcattggtcccactgaattccctagatccccagcagttcccacactctgtatggtcctgcctcaaccattaattctacttatccatttatttaggaataattgtttttttttcccctctaaactg

SEQ ID NO: 335259 - DNA, 1000 bp, Homo Sapiens
tttttttttttttttttttttttttaccaaaaaatgggatcatttatttctatttaggaaaaatacatttttcttcacatatcttcttcaacttttcttgttttacatgtaaaatcagaatgttcactgtcataaataaatataaataaatattacaaaagaataagatttacaaatttgactatggacatctcgattcagaaataatatataatcttttcttatgttaatattgtagtatctctggatacttttaaagacattaagtcaaagaagacacctttcacaggctttttccaaactctatttgtgcaacaaaggaagattcagtctttcattctatattcctcccttatcaccatcaacacccctggttcaccagcatgttttacctttaaaatattttgccaacccgaaggaaagatgaaaatgccttacagccaaagattactttataatgtggttcatctctctttagcaattttgcttagaagagactgaattgggtttttatttgcttttgatatccaaataatgtttttcattttttatttcctttataagtggaaataacattacagatcttgtggaaaaaaatcactttccttctcttttcctcgtgatcccattctaaatacgaacaaatctctatgctttcttacacttttaggaaaggaatcactctcaattctgcaagttgttctattttcaagaggtgtaggtgtgctaagaatgtgattccaggactgccttttttctccttgctctgttgacattcctaacacatcttaaagacaatgaaagcatcctaaatgaagagcacaattgcatttattttatccaatatgcagataagtctaagaaactaggaacagtctgtatacttgtgtgtattttcttcttaactcttctttggctaagtcagcaagcccatggttactagcgtcccaagcaaacctgtcaacgtgaaacacgtgtgcccagatagaagacgggtagt

SEQ ID NO: 335260 - DNA, 1000 bp, Homo Sapiens
ttttttttttttttttgtcagagaattttgttgcaagctttatttagttatgactgataacactctatcaatcactattgttgataataatgtaacattatggtctgatcacaatttttagaacctagaagaaacattgattacattccagaaaagaaagttttgataacagtggtctcatggttgtcaaagttgagttcatctaattttagcttgtaggacttgattgcaggtggaattgaaacaagaatgcccaggtaagtttaatggcaaaagagtcaaagatcggaccaattactggctcaaggtaattaatgtacatttattatatgattacaggtctcccaagtactagaatgcagagtttcctggctatgggataagcacaacttggaccaaaatgccctgtattaatgaaatcaaacttacttatcccagaaaacactgtctgctattgtggaggatgcctggtcacactcagaggatgaaggggttcccataaatatagtatattataattatcttaaatatatttataaatacatatataaataataattaaaaaataacatttcgtgctttgccttcatcttgaggctcggcttcaagaagtattttaccaaaatgacctccctgattagcataaaaaactgttgcggcaggaaggcttaggtattattccctccattttgaaaatgataaaactgaggtcccagaaacttatgctatttgattaagagttcatcagcaacttaaaagtagaaggcaaacagttgaaatgaaatcatgaaatcctaggtctgtggcttcttgtttcaactgctattgtgcatatttcttagttttcttatgccttaatttgcccatctgtaatatgggtagagtctttttggtagccatagtcagtagctctggtcctcctaaaattgttatgaagaataataattaaaatgattggtactatgcaaaatatagggtgttctttaaataacaacattat

SEQ ID NO: 335261 - DNA, 1000 bp, Homo Sapiens
cgtatttatttaactttaatcaggccgggttttggtggctcacgcctgtaattcccagcactttgggagacggagatgggcggatcacttgaatccagcagttcgagaccagcctggccagcatggcaaaccccgtctctgctgaaaatacacaaattagctgggcgtggtggcgcgcgccactcccggggctgaataaagagaatcgcttgaacccagaaggtggaggttgcaatgagttaagattgcgccactgcactccagccttggcaacagagggagaccctttccctgtctcaaataaataaataaatagatagatagataatttaacattcatcagacactatttcaagctccagtttggagcctgtgtcccgcccaagtcctcaagccctcaccccacccacccttgggctgtcaggtcacgcctgcaggtgctcaataaataccttttgaaatgttttttgtttgtttgtttgtttttgtcccaagtgccagacactgtgttaaagtgcttaacctccatggcaagggtggtggcgtctccattttacagatgaggacactgagacccagagggtaatcacatggctgcgctaggaaacagcaggtccctaaagcccccaggttggctggtctcaggaactgtcccactccatcctgctgcctgcacgcgccccctccacatccagcaggccagtcacgtcatacatgccactcccagccaggccctggtgtgggcctagccagaggtctcccctttctggtcctcttcaaggagcccatacaggaagtggtggtgggagctgtgggccagaaaggtggctccgtgggcaaggcaacaggtccagaccaggtaggtgctgaggcccaggtaggctgcggccagcaaggctgcaaggccgaagtaggcagggtggggcaggctgggcagatagctgaccacgaagtagaggttgatggcgcagactagcaccatgatggaagaggtgacgac

SEQ ID NO: 335262 - DNA, 1000 bp, Homo Sapiens
ttttttttttttttttttttttttttttttttttaggcagtaaaaaaggttatgttttattaattgctggacaaccgtgggaaaacaaataagcaattgacaccaccaaattcttattacattcaagataaaagatttattcacaccacaaaaagataatcacaacaaaatatacactaacttaaaaaacaaaagattatagtgacataaaatgttatattctctttttaagtgggtaaaagtattttgtttgcttctacataaatttctattcatgagagaataacaaatattaaaatacagtgatagtttgcatttcttctatagaatgaacatagacataaccctgaagcttttagtttacagggagtttccatgaagccacaaactaaactaattatcaaacacattagttatttccagactcaaatagatacacattcaaccaataaactgagaaagaagcatttcatgttctctttcattttgctataaagcattttttcttttgactaaatgcaaagtgagaaattgtattttttctccttttaattgacctcagaagatgcactatctaattcatgagaaatacgaaatttcaggtgtttatcttcttccttacttttggggtctacaaccagcatatcttcatggctgtgaaattcatggctgtggaattcacggctgactttggaaagttcctgactatcaatcacatcggaatgctcattgctctcatcattggctttccgcttatataatctggactgcttgtggctgtgggtttcagcactctggtcatccagctgactcgtttcataactgtccttcccacggctgtcccaatcagaaggcgcgttcaggtcctgggcaacggggatggccttgtatgcaccattcaactcctcgctttccatgtgtgaggtgatgtcctcgtctgtagcatcagggtactggatgtcaggtctgcgaaacttcttagattttgacctcagtccat

SEQ ID NO: 335263 - DNA, 1000 bp, Homo Sapiens
tttttttttttttttttttttttatggtttgcattatatttcaatttattttgatagcaaatcatcatacttgtcattgtatgaagatattgtagctagaaaaagtagaaagtatcctagttgtcttcccagaagctcagtggttttgcttaggttaggtcatcagagatcattcccctgggtggctccaactctggtcaaagttaataaacatgcttcaggactacaggatattcttcaattcagcatcaatctctgaatcacagtaaagaggaggtgagtttatggaacagcagttggaggcaaagtctgagtgcttgttaaccagctttgccagttccgtgggtgtggcatcaggcaattttgcttttagtcgctctgccagttttttcttgtactcagtaaatgtattttctgaataatctgcacatagttcttgtcccttgtcaatgaaagaagatagttccttctttagtagagggcccttagcattaaaacaggtagttgagtcttcaacatcacagcattcaccaaggctttttagggttggctcaagtaccttactgaggaatacttccggaagatgagtccttctgcttagttcaaatgtatacttatccatgactttggtgtttcctggatcacacacatctttgtttgtgggcaactctacatctggaagctcggggagttgggcagctggcatgaagtaagtgcacacaaaaacgtccatggctgttttttcttgacaacagtcttcaaacttagaattctttgtggataaattgtcacagagttttactgtgtgttcaggcagctctttggccatgcaatcttcagaggcagactcacagcatttggagaggatgttagtaatatcttcagctagtggcaaaacatcctccagatcagcagtaggcactttttgggctaactttatgagattgctgagccttgatttcttctccccataagcagcatattgtgagcagactctatt

SEQ ID NO: 335264 - DNA, 1000 bp, Homo Sapiens
tttttttttttttttactttgacaacaaattatattttaaatgtttcatatttacttttatatttccatacaatcagaaacagtaaaaaaaatttggagagcacataaaaacatcttaaagttaaaaatataaagccttgtatttaaaaatgcagtcatttaaataatattataagaatctatttgtacataataaacaagtttcaaccagcaagaaattactaatattgactgtggagttttggctgttttaatagttctaactcattattccgtaattcaacacagcactaccaacacagctggcaatgacaagactgggagtatcaaactaggattgttagttcaattaaaatttcagataaacaataatgtacttatactaaaaaattatttgttgtttatctgaaatgaaaatttaactgggtacccaattgtttgtttgtttaatctaaaaaccctgattgaaatttatctaataaaacatcatttaatatctaaaataaaataaatttactataacatctttataactattcaatcaatgattcatcttctatttttccaaattcttgcacaaatatttgatgcttaaataaatacataaataataaataggttaataagttacacttgaaaataatttatgttatgatgaaaaaacttaaagtgcttccacatgtcctcacaacatcactgtgaggtaagatggtggctaatactttttccacttagaaataaaggagaaaccaaggcacagtggaacaaggacttgtggatcctggctagcagactagggttgccagatttaacagaaaaaaatccaggatttccagctaaatttgactttatggcaaaatttattgtcccatcatttttatgtgatgcttcaaatatcacattctagcaaacccattcaattcctgaaattaaagttcggatattctcttggcccttggcctcaattttgctatttgtatattctcccgtgcaatatcta

SEQ ID NO: 335265 - DNA, 1000 bp, Homo Sapiens; identical to SEQ ID NO: 157325

SEQ ID NO: 335266 - DNA, 924 bp, Homo Sapiens
gttcagagtctagtttattctcacacatccctaggaaccagtttaaaactcgaggtacaaatgaacatgctccccaccccactctgagttttttgcagaagcagcaggacatggctcctctgctaaaataaatacagttcacactccaggcaataaataaataaatacatacatacataaataaatagtctcaatgggataaaaatgagaacacaaccgcacaaggccaaatgggagctgcacatttcagaaattagataattaacaattcatctgatgccgcaggaaaaggtgaaatgcttctggtcctggaatgtgtgagagatgacccagaggtttcagaagttctgctgtttttgatgtcccgaggctctgtggtgagaaggcccagagaacgagctggacgttggactcaaaagatcgcgaggctcaaagtcgtctgttgagcctgcgcattctcaagggttttcagatagaacgtcagtttcctccggaattcattccagtcaccgtccttgatatggattggatgtcgcgtgggtgcggccgtggccaggggcagacatggcaggagatttttaagaatgctctcaattgctgatgcgttctgtaaactcttgacagccctgttgaatgcctccaggtttggccttcgaaggttattttccatcagaatgtcttggtcttccccattgaggttgttgaagtccagcaaaggcaaaggtggctgctttaagtgtgttataatttcatcgatcatgttagagcagttaacccagcttgtcttcaagggcgttgtctgggtcatgggagcttggagtccggggcggaccaggagttggagcaggagcaggacgggcaggcggctcatgtttggatcggcaggaggcactctgtcttgttctggtccttcgtggggctctg

SEQ ID NO: 335267 - DNA, 1000 bp, Homo Sapiens
gtttaagattttaataaaggtggggcaaagggttgaattggtcgaaaagtcctcaacgtcctgacgggactcccctgaagccaaggcagtttgagtccattcattattctgtcttggatcttaggcaaagccccgggccccttggagcagcaccagggttcccgacacccccaccgacagggtcgaacgtgcacaggctgggaccacgccggagttcattgagccctcgtgggggagggcagttccagggaccaggaagggattcccgtccagtgtcaggttatccacctcgggcagctcgtcaggctgcggcgccctgttcagtctgttgcagctgagatcgagcactctgagcttggctggcagtcctttaggcacctgttccagcccagcgaacgacagattgagggagttcagggcgctggaccacatgcatctcggagcgctagggtttacggtggcgcgcagcgagttgtggctgaggtctaggctgtggggctgcacacctgccgccgccagtgcggcgcacacgcctgtgggcgtctccattcctgtgttgcgcagcgctagattctggatggccgggaacttgtggggacagagagccgccatcagtccgcgttcgcccagtccaggattgtcagacaggtctaggctggtaagggccgggaaggcgcgaacctgttcgcaggaaaaggcaggcgagtgtgcttgggcaatgctcagtaccttgaggcctggcttgagccactgctgcagctcggcgagccaagaacgccctgtcgcccacgacacgttgcgtaggcgcaagctggaaagtgcaagtcctgtggcttccagaggcagcggaggcatggtgccggttatctttaggtcctcgagcgtcagttccttgaggcgggagtacgctagcacacgcagggcgcctaccagtagctgagcaggaacctgtgcggctcccactgtgagccgccgcacgcggagagccttgaccgtgtca

SEQ ID NO: 335268 - DNA, 1000 bp, Homo Sapiens
tttttttttttttttttttttttacaaaacaccaattttattataaatatcaagaacctacagggtgtttatgggccagcatatgccttcagttatgttgaaaatagctgatcatctttccgtacattctgaacatttctcagtttcagagtgctggccacaccaaagcatcagccctggctctaaactccgttacagtaaggaattacaaatcctgtgtttgtactccaggaagtctgcattatcacgaggagcttggaaaggaggtaacacactcaaggcaaatttcaagtaactcatcctggaggcagctgcctactctgcagctgtggttctccaccacagagagaagaaaagggagggagatggagtgcgcaggtctgagaaggctttcattctggagcatctgcaggagcctgcaccatggcccagtagcacccctttttctccatgagctgctggtgggttcccccctcccggatagcgcctccttccagaaagaggatgtggtcagcctgctccaccaggctgaggtgctgggtgatgagaagcactgagcgggagtaccgctcagggctttcgtacaggagctgctccacctgtaactggctgtttgcatccagggcactggtggcatcatccaggataagtacacacggtttccggatcaatgctcgggccaacgccactgcctgtcgctgaccccctgacagctggctcccagcctcgtctacctctgtgtcatagccctgagggagtccagagatgaaactatgggccccagactttactgcagcagctgtgatttcctccatagttggcttctgggtcaggccataggcaatattttcttgaagacttcttccaaatacctgtggctcttgtcccactgcagccacctgcctgtgcaggtagcggtgctcatattggggaaggggcttcccatccaacagcagctgtcccccggtgggctggtacagattctgcagcagggcagcca

SEQ ID NO: 335269 - DNA, 1000 bp, Homo Sapiens; identical to SEQ ID NO: 157327

SEQ ID NO: 335270 - DNA, 1000 bp, Homo Sapiens
gcttctattagattacattcatttcacatctgtgtgcaattctcccataaattggtctttaaaatatatatatatatttaaagatattagaaatatatatttaagtatatttaaaatatatatatttttaaagagacgggggtcttggtatgttgcccaggctggtcttgaactcctgggctcaagcaatcctcccgccttggcctcccaaagtgcattacatccatctttgtgccctaccctctggctggtaggttttcagaaatattatctaaggtagttgaatccgagctgcctgtctctctcacccacccccccctcacgtgtccactgctcacacacagcagccggaaatgacacattgaagtgagtcaccaatgcggctgtgagtcaccctgtaattggggaaagttctgtcctggtaggtcatgcagccccttgcatttctgctcctaaatctattgaacacattggaaaccactctgtcctcatctgagtctctgtccccccactccgtccttttgatcccctgaaggaggatgaaattgtatggtcaatttccatcaaggggaaaaagaggggcgcggggggcgcggggggcgcgagggtctcaggcggccacaaggtggcagtgtgggctccgtcacgctggatgtccggaggggtgtgtgccagtcaagtggctggacttcctgagatacggtgacacagaccacaaagaaacactaggagcgagtttaaataatattattttccttagtagttctctttctctctaacaagcactcaagggcaaggatatgataaatatttaggtacacccctccccaccaagagattggggggtgaagagctgggcacgcatctgacatttcttcctctattcctataaaaataaaaggaagcagaaatctgcttcaatgagtaaacaagtcacctacactccaaaataacccatgcacactgtttctggggagggagatggccaggccaggagagt

SEQ ID NO: 335271 - DNA, 1000 bp, Homo Sapiens
ttttttttttttttttttgagctggggtaggcactttagtagttctcctaacatctggcacagtcccttatggtaaatcttcaataataaatacttgatttagagattagactttacaggtaagatactcctgagagaggcaagaggaatctaacattcgactaagaaacaggaagcgggtggcagtaggccctggggtaccgctgctgggaggggccttccagattaaggcggacccaggcccgaggcaacaggcctagagagggaaaagaggcgttttgctccttcctggaggaataatgctgaatccttgcagcctctggacagatgtgagaaggcaccacctcaagaggggaggagcggggctgatcctggtcgggcggacctgagtcgggcagccgctctcccggaactggaagggaaagccaggcggctctcaggggctgttggtgtctgagccgggagggtcgaacgcccagggcactgcgccccgcaactgacgctcctgcaaggaaaagctctgggtgcgtatgcggcttgtcacctcctgggtgcgcagcgtgagcccgaaaatgtcttcgtggtagcgttgctgatcccgcagcacgccgatgacgtcgccggcctcgtccagctccatgtcgccctccgtcgccaggatgcgctgcacggtctgcaggacgttggttgccatggtaacatcgccgcagacaaacatgtggccccgctcgaggcacagcacgcggtgcacctccgcagccagctccgtcctcaggatgtcctgcacgtaggtcttggggttgtcaggttcccgggagaaggcggtgaggactcggccaaacaccccgcgctgctgggcgttctgcacctcgtcgcggtagagatggtcaagttgggagcatcggcagccgaacaccaaagtcatgggagtgggctgcagccctttgctctcaatgtcatgcagccgctcctgccagaatccccggaagggggcaatgcc

SEQ ID NO: 335272 - DNA, 1000 bp, Homo Sapiens
gtttagaacataatttaaaaaaataaaacagcaaaagtagcaaaaaatatatgacctttttaaaaacattttccttttttttcttttttgtttttaatatatagcaactgatgcctcccagccaccaggagcatcttacccgatgggtaaatctctggtaacgacccttttaaaaagacatgtaaatatatactcagatttatacactttgtgttttcttcatagctatatacagagcccccagtttggggctgggccccagggccacaacactgcccccaacctggccttcgcctcaccatcctctggtaccaggcatttggtcagcaaagcaaactagtatcggaattaataagccactggcaccacctatctggggcagaggtcaccttcaatcgaggcacgaagcactgacctccctactgctgtagccctgaggacaaggcacctgccaccagagtgcgaggggcttatgggtgaaggcaaaacagaccaaaccgacaggagaaagctcaggaagctctcacttgcatgcctgttcattggctcccactccctgccctccaggcagtgcctggtggcagggaggggtgttggtccaacatctgggaggggatgaagtggctggcagcaaagatctgcctctttgcacctctcaccagcaggtggagaggaggtggagggagaggtgagctgagtggggtgaaggcaggccacacaggaaggcccctggtaggcagccggctcctgccagcaggaaaggggacagggacggacaggtggtgggcccagcaggggctgtgggtgagggttacagctgacggtggagtctggggagggcgtgtgggtggcagtcagcggcgtttgagtccgccattggcaagctgggctgggtgtcggggcaggcagggctcctcgggcagcggctcatgagagaagacggaatcctcccctgaggagcacgtagagctccgggtgtcgggaaagctgggggagtact

SEQ ID NO: 335273 - DNA, 1000 bp, Homo Sapiens
tggtttacagaaagtttatttttacttatatcttgaatataatattgatggacaaatgaagtgtaccagttattctgtaatcaggttgcacaattaggcttggaatttcattttaaagaataaacaagtacaaaagttccatagcaaaagttcaatgaacaacacaaaataaatttaccaaatacaaagaacacattttattacattaaccactgtgcaaaggtgcacatgacataatatgaacaaaaataagttgttttataaatagttaaataaataatattttaaaaatatttaaatagataatggatcagtcagcatggtcctctgtaagggactagtgccttaagagctgaatacaatgttgattaatactcctaaaaacatttgaaaagatttaaatcgtgtcatggtcatagcagaaacatgagtctttgaaatggcagatcataaaaaggtgagctggcatacgaatcaatgaaaatcatttccatgttgaaccagttttcattccttacttcttaaactttcttgcaagtttgttgacaaagaaaaagatctcatgatttctgctctgacaacctcccaggcacaagggctgtatttcttctctttcagatagagagtgattctttggaagtatttcctcacagccagaatggagtcctccttcatcaggggagtctctgtcacccccaccccctgtatcacacaggcttccaggtcattcagctgctggtagagttcagtgtagaatttgtctaggagggtctcatcccaagcagcagatgagtcctttgtgctgaagagattgaagatctgctggatcatctcatggaggacagggatggtttcagccttttggaactggttgccaaactcctcctggggaaatccaaagtcatgtctgtccttcaagcaggagaaaagagagattctcctcatctgtgccaggagcatcaaggtcctcctgctacccaggctgtgggtttgaggcaga

SEQ ID NO: 335274 - DNA, 803 bp, Homo Sapiens
agctgttccaaacacagaagctttattgatgcaagtgagggaaaaagctgaggtacacatgtcgggttggaggggcaggatggccccaagtctctgtcctgatccaaggctgtgtcctgctaggattccccctcctcctgtttcctctccttctcgtgctgcttctccagtggctcacacttatcctttttccaatcggtgtacacgacatctgacttgggaatgcgcaagcagtcgagagcttcgtagaactctcccagttgctccttggtcgtctctggcttgtcagcatagacagacagcccccagttcttctcatcgttcacgtcaaaagcaagcatgtaggtcttggtgtccctgaggatcagcaagtgagcgaaatgctcttggcctcccacgtatctggagatggtcccattttcccgctggacattcaggtaggtggtgttatagatgcactggtcctgtcgggtctggtactctctgagaaagatcgtgtcctctgtcttgttgggggtgaagtaaaagaaggttgcttggatctcctgaaccgacttattgtactcctcgtttcgaaaggccgatgcgatataaaaccacttgccagtgatctggtccagggtggcgttggtgatgggcaccggtactaggttggcacacaatgggatctgggcttccagcagaggtaggaggctcaggactgtaagaacccaggacagcgccatactgagaccaggaggcacgtggagccaggcagtgctggtggctgcagggtgcagtcacctttataataaactatgggc

SEQ ID NO: 335275 - DNA, 1000 bp, Homo Sapiens
tttttttttttttttttggtggctacatttgagtacagaactttattaggaaaattataagtgcatatacattttttcattggtatgacttcaaagtagaaattgttgtttctcaaagagttgtttcttatttattttttaaagcacgctgcgtataggaattggccttctcctggaccattttcacattatctgggagatgcaattgaaacaatacaaaatacagtattcatcacatttaacactgaatcattcactgctcagagactgagagtccagcgaggttgcaaaataacaaattttctacatggttttatcagtggtctgcttaggggatttggaagtttctagggaatatttcccaggaatggggctccttcagaatgagtcagggaagctctgtagagggatcagagcactcaaattctcatccagctggaaaagggtgtagcacctgggaaaggcgatcaactcccagtcagggagcccacggtgataacaccagtcagacgatcacaccatggaagggtccaatgagatccaatggaaagacttagaacatctaaggttgggggaggtgcaaccttctgctattcagcccctctgctccaagcggaaccttttttctcaggaggtaatctctaataacaagcagagtgccctctggagcctcctcgctggtatctcagtgcctggacagagggggacacaccacagcacaaacacgtggcacagactcaatcccaacacacagccagtcaacgagcctctggccccttcctctgggtcctgatacagagctggcagcgagggcctctgaagaggttacagggagcccaagggagtgtcaggtagaggcagcaccaggtcccggagggacagatgagggatccctagtaaacagctcgtggacgcacttgactagcagttcgaaagcaaaaagagattcggattacaagagacttttcccttgcaaatggaagactgtatttaaatgcat

SEQ ID NO: 335276 - DNA, 1000 bp, Homo Sapiens
ggggggagggtatgtgaagggtgtttaaagccaatcgattttgtacatgtttgaagatgctgctgtgcttcctcagcccgatggagggggccgaggagagtagcctgtttcggggaggcggggcacggggactgggtcaggagaagccccagggggacgtggaaccgagagattttcgggatggaacctgatggaaacgtccgtggtcaggaggaggctgcaggatggtggcgccgggctgcagacttgcggcagttttgctcacttccgattgctggccatctctgggggggcgcccccgtgggcggggtcttgggtgggtagagcaatcaggggacggtgacgtttggcctccctgaacgcctcgagctccttggcgagcacgtgaccccggcgggcacgcaggagggcaggcaggcccctgcgcaggcgctgggtggactgcttccaggtgtcatattggaagaacttgcccacggggtatctggggaagttgtccggaagcacggtcggaggggtcgacacgtccctctcggacttggcgggggtagcacagtacgtctccaggagggccaggtcacagctgcggaaacagcactcctcaacgatgccacggctgcgacggctcacacggcttgcgggcctgctgaagtagaagccgcggtccccacagacgaactggagggtgtccaccagctccccgccgcacagggtctcactggggcggtaagcagcaatgcagcacgaggcgaaggccaagaaggtgagaagcaccagcatcgacttccccattgggattcccattggtgtctggaagccggcgacgctgccgcccacctccctgctgcgtgtcgcaaaccgaacagcgggcgttggccctcctgccggacactcctctgccagcgccgctctggccgagtcgcgggggccgaatgtgcgacggggcagagcggggggatggcttttttttttggggggggggggagaattcgtctgattg

SEQ ID NO: 335277 - DNA, 1000 bp, Homo Sapiens
ttttttttttttttttttttttttttttttttttttttttttttttttttttttttttttttttttttttttttttatctttatagtaagtttattgtatttttatttcagctcaggggagcaggggtggagagtgggcacaaatgcaaagtaagcaaatggggagccccagcagcaataggggggtcttcctggaagaggcaggctttaaagacaggaggagaaggaaatagggaaaaggagttgggactgagggaagtggtgaggaagggtaggaagagaggggatcctgagagaagtggatcaagaagatttgtaaccctgatttccctgtgtcctgaatggtctggaggagggtaagggagggtgtggggcaggcgcagagcctggcacaatcacctttgaggtcccttggagggttccctctcaggctagctaccccctctcccagcaaagctcgcttccaggaggttctgcacagggtcagtgactggtcactgggcattctctcctgcagtgcctgtgctcccagcttgcactctgattagaagagccaaaggctttgtcctctggtaacagattctgccaccagcgggggatgaaggagggattttagacagggaggccttcatccctgctcgtaaattctctgagatggacccttcccatgggtgctgtgcttctgtgaacccaaaagtacacattgagtacccaccactagccactggtgagagccgtgtggcatttgtccctgcattcaagaggcagcagtggaacttgggacaagggacctgggttagtcccgactccagcacttgctagtccggcacttggtaatcaatcatctagcctctctgagctctggttctggtctataaactggagatgatcatcttagttctgtcactgccagccttgtaggatttttctaagtctcaaatagacagaggatgtgagacatcccttgaggccgtgtacatggggctgtgtccagaggggc

SEQ ID NO: 335278 - DNA, 1000 bp, Homo Sapiens; identical to SEQ ID NO: 157329

SEQ ID NO: 335279 - DNA, 1000 bp, Homo Sapiens
ttttttttttttttttttttttttgtaattactaaagaaagatataccattttattatgacactctagccatacattttcaaaatatgcttattaaacagtaaatgtaagataatgattcaattagttacatttttagaagtcattaggattgatattcctctgccataagtgaattgaataataatttcaaatacaatcagaattaatttaataaaaaatatgcttttcaactaagacagatgtaacgaatggccagtcattattttctggtttcaaagtagcaggggaaattaattcagtgtctgtaagtttatttatcacacttggcctataagtgtgataaaaatacatgaggcaaaatacatgatgtaatcccaattctcatagttcattaactcttttaccaaaaagatctgacatggtatttggggcctttatgtaaactgaatataagctgcgtgatatttgaaaggttttgatattttgaatagacattttcatgatacacagacacagataaaagatgtaagtagacagcttgaggtttcagagtccctcctgcagtgtgtttagcagcgggtacaagataaatatccaaacaaaatcagattaagggattaacagaagtgactttgctatgagttggtgagtggggtcaatgggtggcttgaaagggattttagagctctgtttttatttttcctactttacatcagtgcattttgggcaaaataaaatgagtaatgtttacttttaggcctcagtaatataaaaaaaggcagattctaaggattgtggaaggtcatgtttttgaaagtgaaaggtaattcagctccggttattaggagaaactctgtctccatcttaactcatatttcagttgagcagtaacatttggttttgtgtcctctctttttttttttttactttaaaaaagcttggatttttttccccttgaaagaccccatcaaagatagttgaagaatgaggagagaagg

SEQ ID NO: 335280 - DNA, 1000 bp, Homo Sapiens
gggaagcactgatcaatttgtctttaatggggattggacacaacagtttccttccctggggaattggggaggcgtctccaaagctataaaggattggaaagaaagcctttgggaggaaagctactaggagctggaaatgggtttgcaggaaaggagtttagaatgggcttcccttcaggattagaaggggtgagtgtgggatgctaagtgtttgttctttatatctgtggaagagtgagcaggggaaattgggattaaaggaaggcaggggagattatagctggcatgaagtcaagctccatgtggcaggaacaggacaccggtgggggctgccagggatggcagagcaaggtgagtcatagattgccttttcactttaacagtctcctggcctgggcctttggggtcttggtgcccccactgtaaagccctttcaaagagggccagtgcacttcctctttagcagacacccaaactgaacaacaagatatgcccacgtacagtatataaaagaaatgtggtttttctgtatagcaagacacaacaaacagggtagaaccagcagaacattccctttccatccttggggaccctgcagtctgggaggccactaggatttcttgtctctttctgggaactgcctgacactaatttgtagtatttaaaaaagtatacaaagggatcccttcccaccatttactctgagagagtaaattcaacaggttgcctcttagggaggaattacaccggctccaattcctaccgaagacttggctgcccatttttgatctgagttgagggtaacttatttgtcaaaattaatttaacaggtttaaaactttggagatcaactgcagagggcaacaagcctgagggacaagttcttcccaccccaagttgtggctcctatcgaagaagccacgtgggacctcattatggcaactctttccaacctcatccactttaaccagcttccattatttcatccccaagggtgaag

SEQ ID NO: 335281 - DNA, 1000 bp, Homo Sapiens
ttttttacatcttctttcttaaatttctactggttgattatattttagaatgtacatcttcatacagattaataagtatacatactgggtatgcataatcaattctttttttcctataggaatatacaatcacaaaagcttggagaccactgatctacatgccagaagcctgttaacagattgagcagaaatgaatagcaccccttcccaaaggcttctgagtgtgcaaggcggtaccccagggaccaaactcgggggtttcgggagttgtaacaaatgctagagctatgcaaaaacctcatccatttattatgctctacagaaaagacacatgtttacatgattttctcgtttggatgtgaaatgcttcctgtttacaacataacagctcattgagtctttcacaggacagatgttctttatcagggcatctacaccatgcatagggccgctcttctcccgcagactcagttgcccctcagaccaggtgtggatccccacatggccattgcggcagagctctgctcctaagagagtctcagaccatcacgtgctctggtgctgaatgactgccctgtgtgacaaaacacagcctctttttttttttttcattcaccatgtgtggcacagtttgacttcattctaatactaatactaaatggtttttacttcttctttcacctgttttcttcctccagatacttactgaggcagaggagagtgggtggtgggaaaaaagagtgggttgggggtaaggagggaatcttttttttgacgcttttgctttaaaattcagagttggattggtcaggatttatgggctctttgccatgtaaatttttctcattctccaggttctagccctccaggttcattccctccaggttctagcttgccaggttctagcctgccgggttctagctctccatgttctagctctacaggttctagcccttccaggttctagccctccaggttctggctctccaggttctagccc

SEQ ID NO: 335282 - DNA, 1000 bp, Homo Sapiens
tttttttttttttttttttgtttgcaaaatgctttattgttaatgccaacatagaattcaaaaagttagtcattggcacctgcaactgacactctactatttgcaaaaggcttcccttcttccactcccagccaggcccatcagattataactatatccacaaaatgatataatcaatcattaaatgggccatttccaccttgatatccagatgtttttcttaaaggatgaatggcacttgagtgtattgaaatcaaccacgaatgacagggcccaccccagcctttctatatgatttcaggagttcttgggtcacagcaagaatctgatccttgtatacagagggaaactgaggtccagagagggaaagtgttgtcccaatgtcacacagcacgttaggactgaaacagtagccccatttcagactcccattccaacatttttcccatgcaggatgaactgacagttgttgctgctgataagtgtgggaccagccttggacctgtgcttcctggtggccctcatccactggaacatccctcctactgagctttgtggcactgagctgggcatcaagggccaggactctggacctctctttgccactaccatgctggtgaacttgagcaagtcatccagcctctctggatctcagtgctaatcttcattgatgaatagtgacggcaagattgaatgttctccacatttccccaaggcacctgtatgttgcagtcgtgtgggtggaagcaatcatcatagagtaatattatttgtaatgcctcattagtcaactaaacctgtgtaaatcactagctaccagcatacagatgggccatagcatagcccccttcatctcccaccctgaggcctgtagatttcaggagaagccccacctcaggggcggttcactttgccaaggaagaggatgttgttatccacaatgaacatcagaaagggcctgttgaacactagcctctgagagttcaggcgggccgacctg

SEQ ID NO: 335283 - DNA, 1000 bp, Homo Sapiens
ttttttttttttttttttagcccataacaagatctaacaaatttaatgattaacttgtaaaagacactacattaacagaagaccactggaaaagataaaagtggggagagtgggatacaacttatacacatgtactcattgacaattactctcaggtagaattttttctacaaaaatggtgatttatttaacatacaatggtagatatattggggatcatcaaatttttaaaaatttttgttgggcttactttacatattacaatactaacgtaagcttataaactcttccatttcagtgaaggaaagggatccaattaacacctgctagcagcttggctaagaacggacattaaaatcagacaaaacactgaaaatataaagtacttttctccaaatgtgtatacaaagttttggaacaaaatcactgcctgctccacaggacagacaatttgaatttcaaaaatgctccaggccgggaattgcataaccctgtgtaacaatacttataatacagcttaacaatattgtatcgaagactttttcatttgagatttttaaaaaactgaagtaaaagaaaaacagtagccaaggaactgcacaaccaaaaaatgaaaattatataaaatatttccaccactatttaaatgccaaatttaatcaagcaatagtaaaaaaacaaaacaacataataatacaaccttctgtttaaaataacagcactgttccacctctcttccattgaattttacatatgaacagactatatatactggttttttagagaaatgtccatttggtctgccacacctatcgggctcatcctaaatcctctcattgtcttcagaggacttgcaactccatgctgtttctgtatttccagccttccggggtaggtgcaatgtctcaagtataatacatttctcccttttcctttacacagtgcagagtatatgggcttaggttatgtagattctgtttcactccaggtcactgtcttt

SEQ ID NO: 335284 - DNA, 1000 bp, Homo Sapiens
gcaacacagagtaaaactttaatggagcaccagcagcatataaaacatatataggtagaaaaataaattcaaagtactgcaaagaatccaaaagtccgtgctctgtgtagcattgagctgaccacccttgagttgaggtcgattttcagatcagtccatccataatctggtagaatgttacatctaccagatgtaacatctccattcttattcctcattttaagtatttctgtttctcacaattttttttttttttttttttgagatggagtctcactttgtcacccaggctggagtgcagtgccgctatctcggctcactgcaacctcctcctcctcctcccgggttcatgcaattctcctgcctcaggcactcgagtagctgggattataggcatgcgccatcatgcctagctaatttttgtatttttagtagagactgggtttcaccatattggccaggctggtcttgaactcctgacctcaagtgatccgcctgcctcgacctctaaggtgctggtattacaggcgtgagccactgtgctcggccctgtttctcacaattaaaacatgatcttattttagtgatataaaaggctgaaaattacactctcagtggccaacttctgaaaacatcatgaaagcctttataaggcagtgagttcccaaatggagtatttttgccaagacagcctttaaaatgtagctctctggtggctaagtccagggtctgggagttctagatgtggggctggctcagatggtcttggcccttgtttgctgccctgatccctcactgaggcagatgtgagatggagtacgtcactgtgcccagccgagtgtgtttccttctcagagcctagctttggggcccctgcccaggcggggtcccgaggctgcagctgtcaccaggattctgcttgccgctctcagagtcttctgcaatgacacttagcttgtcaaaaacatcattctcatccgacaatggaaaggagaaaaac

SEQ ID NO: 335285 - DNA, 1000 bp, Homo Sapiens; identical to SEQ ID NO: 157331

SEQ ID NO: 335286 - DNA, 1000 bp, Homo Sapiens
ttttgcccctttcagatggaatggtttatttaaatcagatgtaaatagtagaaagagacagattacaagccccacgggtccattagcctcaaagacaggaagtctgcccatcctcccaggttttcctggtcccaatctcctctgagagctgaaggtttttgctggtgtcccctcactgctccagggacaccgtcagctcatggcatcgtgttgtagaccctgtagttgtccttctgcgtgatgtgcagcttccaggggaagaggcgcttctgggaggggaggccacgagcctgccgcaccatgagcgctacgtcctcatccgacagcagccgaaccagatccccctcagcgtcccggtaattcagagctatgtcctctctctggaactcccgccttgtgagctccagcaggtctttcaataggggagtgctgctgagatcttcctccaccgcgatgtccttgatggtgctgatggtgtcttcgtagtagtagcaacgcagccagttggtggggtcgtcctcctcagggaagtctttgaggatcttcacgaaggagagagggaagatgcccgtggctccccggacagtgccctccagccagtctttgttgatccgactgaggaggaagatcacatctccagctttgaaattcagctccagtttgctgtttccagtgaagtcaaatagagcctctgctctcggagctgccatgcggtcaacgctgttgccctgtggggacacgctcttgactttccgggtgcgcgggcggagccggcggagtgcctggggcacctgctctgagtcatagggcgactggtaaaagaagatccggacgtcctcatccatcagcacccagaccggcaggctgagcaggctcttcatgtaggcgttgagggcaggtatccgcatctcggcgatctcctgtttcacacccacgtagactttggctgggagtgtgggcagggtacaggccagggcactgctcttgctgtctggcccga

SEQ ID NO: 335287 - DNA, 1000 bp, Homo Sapiens
cagtatctcacactgtactttatttttcttcacaatattaactagacagacaaggaaagtttaatggcaatgtgactttttccaacaacacaaacaaagtgccattatagctaatggtggccaactggagacttactttaccttaaccatgtaaagtatccttaccgtattttttatgtgtacagtgttgcagaatatcagccacctcttaaaagtatcaatcttaaaaagagccatggaaggtaaaagtatgaaaatcttgataacaaaagctttcaatacaaaaacacttattgtacacttatttttatttaaaacaaaaataaccccagtaactcaaaacaaaagcaaaccttggttgaaaacttaagaaggtataataaacaaaaccaccaaaagaaagcttccccaaaagaaatgcaatccactgtcactcttgcaaattctaccttggagggaaaaacttaatgaaatgagctatctggagggcccacggcagattttccaaaaggtttaggtgcatggatttactcagtatctacactacagtcttatttattaatagtctcagaattttcttgattgagcgagcctttccatcctccaccagtgttcccatcttctgtgctcagcttggtatgcagaacaaccttgttgttgataggatgtttgcttgaagttatttttctggggcagtccagatgaaccggtacagtaccattcatgctccatctgattttctttgcatccagtgagatgcatatttcatgattgtccaaggtcatggttgtccaaagacatggaacagaatgattcactgggtaagactaaaggacttgtattatcactctccaattcagtttcacattgcttaattttataaaatttttttctgtattgtacataataaacatttagaaacagatgtccctaccaaccagaaggttgtcattaaatatcctgttagttaaaactgcacatttattgtttaaatacccat

SEQ ID NO: 335288 - DNA, 1000 bp, Homo Sapiens
ttttttttttttttttttcctgtgatcattatttattgagcatttagtaggctccaggcaccaaggacatacagtgaataaaccgacagggccctgtctccaaggagggaaaacagactaggaaaaaactgcaactcatggaaagcatttggggagggactggtgagctcacatagcttgaggcagggctatgcctaggcaaggcctaacccagaagatgatgctcacctcagggtgaagctgagactccctggaggagcatttccttttacttgtggacaaagggatcttccttggccaggggtatgggcatgaacaggagtttctgtgcctcaagagactgttctagcaggagttaaagccccagggaacactgcccttcaacccagagaggtgccttcttaggaggtgctgcccccattctactgcaggaacagccaacaatgctgcacacacccttgactctgtcacaaccaagatacttccacagggacaagcacggaacagaagctttattaggaacatctgcctgcccaatggactggtggctgcacatggctttctagggatgctgatgctgcacgccagcctggaagctgcagaggggaagggctaagggctgcttgtctcgttccacttggggctcagcaggtggccagcacatgtgtctgcgatgttggtcatgggggtaaagggggttcttgtggcatagatctggcttccaaaccctctttctctttgttcatccaccacccccaaggggaacatgtgtttccagctcctcacaaggccagctggcaggttgatgttttggcagtgcctgcctcaatgtctccagcagacactgcaacacacctgagatgggaaaaccacccccctgagctcggatcagagcacacagagccaccagcttggtggctcaacgcttaacactcagagttgaggagatgctcctgtgagggtcaacgagagcatccagccctcatgaggacacagcttc

SEQ ID NO: 335289 - DNA, 1000 bp, Homo Sapiens
taaggcagaaaccagcttgtattggttaccaggagtgaggaaaagccgggcattacaatccgttaactgtgagcttcagtgtctccaaggagaggagatgtatattttaaagacattctttctgtctgatttcaactaaggtttgggctatacgaccagacaaacagtgtgattattcccagcttttcgtttctaaagtgagcacgcgtctttgtcttcctgcacccctcactctggcgcaggcccagcgatgctctgagctcctgcgggcggggaagtaggtttttaaaggccacgtgagctgacattagtaccttctgtgtgaatgagaacaaaacatttgggactgaattttgggactgaatatactgcaatgtacacattcataagaaacgttctaataacaattagcgcacaaaactattggtataaacatttttccaaaaagagaaaactattgcatttcgttagaaatcgcgtcctgggccgaggctcgtctttcttctctgcagttggtttggggacagaactccagcacgcagctgtccaactgcagcggctacgtgtttccatggagacaaacttggtgtctcaagttcagggcttcgaaagtcccgaatatttgtttgtcccgagagaagagttttgactttgaagaggtccaggtgggactcgctgggggtggggtgctccgggattagttcagagggaggtgttctggaagactccgtggagcgggacgcaggcactgctgtttggacgacacgcgggatggctgctttctgaagttgtggctgtgacactgaccctgttggacaaactccttccacagccagtggcttgatggtgacggtgaacttggacagagtcccacatccttcctgctgctgataaaacttctggttttgattttttgaaagacactgctgtgtcctggcacgagcgagcccgtttctgtggcttgttctttttcgagctgcggatctgccgggacacagcg

SEQ ID NO: 335290 - DNA, 1000 bp, Homo Sapiens
aacttctgctttcctgaaatttaccactgcctttaaatactctagcttgtaggtcatcatggagattgggtctcaagcatgagctgcccaattctccttgcttggcgccctgcaaataaacatcctcctttctcctactgcaaaaaccacctttttgcagttttgctgttgaagtttgcctttactgtgcaggtgagcaaaccccagttcagttcacctgctacatttaaacagtatacagctctatttgcaaaaactatacaggaacatttgacctaacaaaaaccactgggtgacatctaccagaagtatcactgcagaggattactcgacaaaaagtgcaattttctatagaaagccgagtgtttcccttgggaaagtgttaatattttatttttaagtaactggggcaaaagactagattttctataactgcaatagaataggactagaaaggcatccctacaagtccccaaagtatatggatggaatatttttgatggttttataaatgacaattgtaatttagctctctgaagaaaatgtccaatcagattcaatcacacaaagcatttactattttcaatcacttgcccaataacaaaatgtttagtaagaaattattcagaacattaagttgtttatgaaataagtgactaagcaacatcaagaaatgctacaatagagcagcttactgtattctgcagtactctataccactacaaaaacagtcataaagagcttaacatactcagcataacgatcgtggtttactttttgcaagccatgtatctttcagttacattctcccagttgattacattccaaatagcttttagataatcaggcctgacatttttatactgaaggtagtaagcgtgctcccacacatcaatccccagcagtggaataaggcctgttgttccttgcagtggatcctgatttggacaagcagcaatttgtaagtgtccccgttccttattgaaaccaagccaacccc

SEQ ID NO: 335291 - DNA, 1000 bp, Homo Sapiens; identical to SEQ ID NO: 157332

SEQ ID NO: 335292 - DNA, 1000 bp, Homo Sapiens
tttaaactcggggctaagggacctttattgggctgggggaaggagatgggaggagggagctacagagggcccggccatgtgggctctgactcctacagatggccaggagctgggcagcccagccagtactgagcgatggagcgtgggtagggagggtccacagtgtccactcgccgtgtgcgaagattgactcggtagtacttgtctccagagaagaagaagacactctggatgggttcacaggtggcaggcacaagccagtccatcctgtagtcatcatagttgttggctcccaagttgctctcctcactggagaacaaggacagccacatggcgcgggatggccggcgggagttctggttgcggccacggctgtggcctcgttgtgaacggtagcctttgcggttgcgatgcctaaacctttgtttcttggccaaggaggggcggggtgccatgcctgagatgtagatgcggccagccatggctgcgtccacttgccctggcacaccgtgccagtcccggctaatgaactggggctgtctggtaccagcagaggttctgccccagaagagaagctcgaagatgtcctcccagctgtcccgctgcatcatggcaaagtgttcaaacacagccgacagggagctgccttcacactcctcctgactgggctggtgctggaactggtactcccagtactgtttccccttgaagaagtagacccgctcccggccactgtagctatgggcagggagggccaaggctgcatccacgttgtccgggatgccatcgaagccgtcagagatatttcgggggtaatcagggtccaggacaccatcctcaaagcgccagtactgactacccttgaagaggtaggtcttcccctgacagttgatgcgggtgaaggcggcatcgatggggccctcgatgccccagacatctcggatgagcttggggtacccaggcctcactgccttttcgtccagttcatagcagtactgcc

SEQ ID NO: 335293 - DNA, 1000 bp, Homo Sapiens
tttttcaacattcgcaagaaaaattcagtttattgagactcatattgaacatttggccatgactggaaactgttgagtcaataccatgtctcttgatatggaaagtcttcatgtatcacagaaaaattctggaatcatttttgggtaggtgtttggcttacgcaaaagcagaccggttacaaatataactaatattaagatgaaaccaaatggtagccagaaacgtagcaaagttttcttcgataggtcttcaccttcccagcattgtttatcactccactcactccaaattccgtcatctgagcaataaatattcactttgcttcttactacaaagcataattgtcgggtttcatttgttgttttcaaggtgtatgtttcattttcaactgtagcagtcaccaaggtagtatcatcttctctgatctcaatttcataatcaaaacaccttgctggaataggtcccaaaggtatgctccatttcagcttaatttcacatgaactctcccgagtaaaagtaagatagactggcggcaaaggtttaactatattttgaagctgaaaagtgaaataactggatctgataggcttgttctctgatgatccattaacacaaatatagaaatctttatagtctgatgcctccaaatagggaaatctgcatcctatattttgtccatcagccttgatgtaatcaacacactgtaatgcatgatccaagccctcataccagtaaaacaagttgtaattggtatcaagaagtacacctatgccaggtttccaagaacagagtaaatattgccaattgtaatatacgcaatccatatcctgaactttagtttctggaattccttgtggtgatatccaataagtagtttctgcccaggaactttgaacttctgatccatttgtgcattgccatggtaaaagcgtgtgtatcttcgcttcaatgcccttgttaagatcaaacccatctttgtaatgtagattcttagtaatg

SEQ ID NO: 335294 - DNA, 1000 bp, Homo Sapiens
attctaaaaatagtgtttattatttttaaaatgtgtcatgcaaaatacacagtcatggcagaaattctgtaaaatacagacaatcatacacattaaaagtcacccacaatcccacctctctcctttgacctggagacagtcattgtcaacattttggcgtatttccctttaggatttttgttttaatccatatatagaaagaaaaacacaaaattgggatcacagcatgcagtggttttgtagcctgctgtttcatgtcaggacatcattctttcttttttgagacagggttttgccatgtctcgcaggccggtctcgaactcttggacttcagtgatccactcgcttcgtcctcccaaagtgccaggattacaggcgtgagccaccatgcctggccaatgtcaggatatctttctatatcccaagcaagcctctctccttagcctccctgaatgacagtccctgctccgggcggctgggtggcgttctatccacagatgcaccatgttgcttaaccctcactgttggatatctagattgtttccagtttgctatggtgaacacagccataatgaaccatcttgaccttgcagctttgtcccatacgggtactgttgatcacagggtgacttgtggaaccttccattaaatatttattgaagacctatgggtcaggtgtggtggctcacacctgtaatcccagcactttgggaggccgaggcaggaggatcacctgaggtcaggagttcgaaaccagcctggccaacatggtgaaaccctgtctctactaaaaatacaaaagaaataaataattagctgggcatggtggtgcacacctgtgatcccagctaatcgggaggctgaggcaggagaattgcttgaacccgggaggtggaggttgcagtgacctcagattgcctcactgcactccagcctaggcaacagagcgagactccatctcaaaaaacaaacaaaaggccctatgcagtgcggggcccca

SEQ ID NO: 335295 - DNA, 1000 bp, Homo Sapiens; identical to SEQ ID NO: 157333

SEQ ID NO: 335296 - DNA, 1000 bp, Homo Sapiens
taaaaatatcagaacacgtttattatttttgatacattttttaaaagttgtgttttaaaaagttaatttagtatattctgaatccatacaaaagtaagctagtacttttataataacaattattctttcatttcaatttttattatgttttttatatagaacacagcacaaagtgcttttgaattaaagtttagaaaatatcgaaagcggccaggcgcggtggctcatgcctgtaatcgcagcactttgggaggccgaggcgggtggatcacgaggtcaggagatccagaccatcctggctaacatggtgaaaccccgtctctactaaaaatacaaaaaaattagccgggcgtgttggcaggtgcctgtagtcccatctactggtagtcccaactactcaggaggctgaggcaggaaaatggtgtcaacccaggaggcggagcttgcagtgagccgagattacgccactgcactccagcctgggagacagagccagactccatctcaaaaaaaaagaagatatcgaaatcttattttccaaatatttctcttcagtagtcttaaccactcttcccatgatcatttcatgcctttctagtaaattaatttttctccctagagaaagtaaaaactgatatagcatatatttcactctaaactggtttaaaagactagggttctgctctataaaataaaaggaaacaaactggggggaaaaggacgtatgtaaaaaaacacatatgtgaaagaagataggcagaaaatgaatcaaaatattaggagtggttatcagtaggtagcataattataagtgacttatttttcataactttctgcattttccaagctcttcttactgagcccattccatattacaaatattttaaaaaagaacagtgaccaccttacaaaccagaaattccaggcaacaccttattcctttaagtaatccaaactattttctatctcctaaatgcagtcttttcccctgactagatac

SEQ ID NO: 335297 - DNA, 1000 bp, Homo Sapiens
ttaacacttaaaaagcaggctttattcaaatgcaaaattgcatgttacagggtaacctttcagtaagaagccaggaagaggagctcatcatgggttggattagtaaaggactagttataaaagaagtggtggggttgagggaggcctgagatgaaatttaaagaatatgtagaatctaggtaagtggataaaaggtctgggggcaggggaaaggagagcatttcattgtgaatcaaggaatttctccacctgttttaactcttccatatgacatcaaagagatgtcacttgcagctagcatttcagtgatgttttcttactaataatatcgtgataaaagaaacattgactataagaaataggaatgggtctcataaaaggaaacagcaaaacccccaaactaaaaaacagcgcaggctatttctctcttctctccttttgcttggcactcatgagatgctaggtgtggaagtcagccaactgaaaaagagaggtggctgaagaaggtggggaggctgaagccagttaaataggatggtccaattcacagacggcgaggctacagtgcaaataggactctttcaacttgagcaggaccccattacttcactggagttagaaagaaaggagagcgtagactttttgaactttctataagagtgtacctccacagtatacagaagacgacgtgaaatttgatctgcaagaaaactgagtccatattcacatatgtatcaaatttgcacttcatttagaagtgtctgtcatcaagtacagcactgaattgaaactgaaaacaagagtcaagaaagagcaaagtcagccatctttatattccacatgaatcctttccctttatggtcttatttgtttctcctcagaaaagacaaaaagctgagctgtataaacacctgtgggctgggggttgagggataaatgaggggcgaaatggaagctgaaggaactgttggtcaggtagaaatcttcccagatgcactga

SEQ ID NO: 335298 - DNA, 1000 bp, Homo Sapiens; identical to SEQ ID NO: 157334

SEQ ID NO: 335299 - DNA, 1000 bp, Homo Sapiens
tttttttttttttttattagccaacaatgttttaatatactttatagacaataagtttttttacaatattttatttactcatctaccaataaaacttttctaggaattcaacaataaaccaacattaaaagctttctagcataaatcaccaatttccaagataaccacaggccatctttaaaatacattttttattattattattattattatttgaaaaggtttgtggttatgtttctttaaaaagctgtttaattatatatgatgacatttttataggtgaaatgatttgatgtctaggattttcttcaaaataaggtaagggtacagaagatacatgataggtcgtcagttgataactggtgagctggatgacaaatagacaagattgttttactccttattctaaatagtaaaaaatctatcaccatgtttgggcacaagctttctctgcaaggaaatattaaatatatttttcagcactttttctatttcttcctcactcagagtcttgaactctattagatctgtattgtccttataattgaatctcctatgggtgagggtgaagcccaccaaacagtgaaccccatctggggtctgcaaggaacaaaatgatttactagtaaacacagatgatggagatgtctgcaggtatgtattcatagactcaaaatcttcaattgttcgaggcttaagagtaaaggagtagatttttcggtatttgctgtcttctaggagatcagaatgaagaaattcttcatttggaatgtactgttcccttctgatttggtctagataccagaatccattctcttccgtcaaacggaagacacaaggcacctgaggctgatccttcccagaaattaactccagaggctgccacatctggtatgagcgtccaaacccagcatcgacaatgtagttcctgccatcaatggtcacctgcaggagaaggtgaatcatgccagtgctgtattttttggctggagtgctgtaa

SEQ ID NO: 335300 - DNA, 1000 bp, Homo Sapiens
ggcctgtaacagtttatttgcagccagagggcgaaggcacgcggggaggagctcagcctgaagacatgccagaggaccgggagccccgggggacgtcggggtggggtggggatgggcagagtctggggctcgtctgtgttatagcccagccctgaaataaatagtatatacagctagggggccgggcggagcggaggacatgggggtcccgccggggtcacaggtctgagcagcgatcctgcttgctgtagtggtcgaactggttcttccagtgcaccatgtaggagctccagcggtggaactcggccttccactggcgctccgcctcgtcgagcgtgtcggtggcgctgagcaatttggggaggaagcggttccagaaggcgcaggcctgggcgcgcagcccccgccgcacctccagcggccgcaggtccagactaacgtactgctgagcccccgccgtgtacgggggccattgtggggccttggggtctcggggctcattgggatcccctgtgcgggcaaagttggcccagtatcgcatcagtcgctgggcgaagattttctcctctgccgtgtagtttcgagaggggtccagggggatcccaaagatgaactcgatctcgtagccgtggggcacccccatccacaggggccaggagagcgtggaagcacggtgttcaaagacgtaggcgtagacccgggcaccctgggcagccagtcgcccagccagctgggccacggggcacacgacattgtggtcgcccaccacatcgctcagggcctccctcaggcgtgccgggtcctcgggatgcagccagtctgtgtaatgcaggaccacagcctcggctgccaggtcacttacctggggaaccccgacccgcaccccggccaggaactcggcccggctgatgagagactcgttgtctttgctgaagcctggggccccgtaaaccagaaaatacgagccctcatccttcaccacacccaccagcacctgcag

SEQ ID NO: 335301 - DNA, 1000 bp, Homo Sapiens
aatggttaagaaggaaggtttattggcttcaattccccagctgatgttcaacactttatttagttctcatttggattttaaacatttgcttgaaaaataattttacatcaatttccatttctttggaaagcccccaaatgtaatttattgataaaatctgtgatgagcagaattaatgatatttcccagctgttgctccagatcatgtagggtagaggaggctgaagactgccacaagggaaaacatctgtattgtctcaaaacatcagaatggtacggatacttttcccagagtgaagcaggtcaaatccttcatttattttttcaaaaggtaaaacatgggttattaatgcatccaatgaaaacttcttagccataaaatcagccacaagttttgggacacattctttacttttaaagccaccaagaatagctcccttccaggtacgtccagtcagtagcagcatagggttcattgagaggttttgggaatcaggaggtacccctacgatgacacttgtgccacatgcctcatgacaacataacagggaagccatcatggtgtcaagccgaccgatgacttcaaatgaaaaatccacacctccatcagtcatttcctttagcacctcctggatgggtttcttgtagtcttgagggttgatgcattcagtggcacccaactctttggcctttgcaaatttgtccttgttgatgtccaccgcaatgattctggctgccccagctgctttacagcccataatagcagataggccgacccctcccaggccaaacacagcacaggtagagcctggggtgaccttggcaacattgactgcagacccataaccagttgaaaatccacagccaatgagacagactttctctagaggcgaggctgcatcaattttggctactgcattttcatccaccactgtgtactgtgagaaggtgctgatgccaaggaagtggtggatgggcttcctcctgcaggtgaacctgc

SEQ ID NO: 335302 - DNA, 1000 bp, Homo Sapiens
tttatttgtgttacaaacaatccattatactcttttagtcatattaaaatatacaattaaattgctgttgactatagtctccctgttgtgctatcaaataccaggtcttattcattctttttaaaaatttccaacttttattaagttccagggtacatgtgcaggatgtgcaggtttgttacataggtaaacatgtaccatggtgctttgctgcacagatcatctcatcacccaggtatgaagcccagcatccattagctattcttcctgatgctctctctctgccgactccctgccctcaacaggccccagtgtgtgttgttccccatcatgtgtccatgtgttctcatcatttagctcccagaaaattttcaacatagacaaaagtggagagaaaagtataatgaaactccatgtattcattacccaatctaaaaaaattataaacatatggccaatctagttttatttattatctcttcattccccactttcaacttcccagaactaattttaaacaatttctaaagatgatatgattctattcataaacactagttattattattatttaacatagggaatattcatatatataacaggtacaaagtctataatatttaaagctcttttatgttcccatattaaatgtaaatatttgtttaaactcatggctttccttggttcatcaaatcaggtaataaattaaccaggcaggttcacattcaatcagatagtattctgaattgctcctggcatcttcaaaagatgaggattgttcggacgctttttccttggttcattaggtcaaatgcctcactgattttgtcaaaaggcagggtatgggtcaccagtgcatccagattgaatttcttattcttatagtcagtgaccagctttgggatagaatctacacttttccaaccaccaaagaatgttccatttatagtacggccgattattagctcctctggaaaaatagtcaatcctttgctaccag

SEQ ID NO: 335303 - DNA, 1000 bp, Homo Sapiens
tttatgtgactacattaaaactttattcaacaaaataccataaagtaaaaagaaaagtcacaagatagactagaagatatttgcaacatataaaactgacaaatgattgatgtctagaataaaagaactcctaaaaattattcagagaaaaataattcaatacaaagttgagcacaggatatgaacaggttcttcacaataaaatgtccattagaatgaaggatttaacgagaattgaggaaaatgcaaactaaagtcataataaaacaccattccatactcatgtaattcacaaaaactcacatttactttgaagagcaatttggcaatgtctataaggctaaatgtgtttattctgtgatacgtcttaggtaacacgcagtgagcccaatgcagaagaatgttccactacagtgttataatacagaaactggcaacaacttcatgccttcaactggagaacagataaattatggtagttcccgtaattgaattctgctacacaggactaaaattaatgaacgagagcttcagatataattatacaataatgagtgaaaaaagctgtagaatgagcaagtatgaggcttaaaaatatataaaacagtactaaagagtagatggtttaggttatacacagtgaaagtacaacaacacaggaatgataaacatcaaattgtggataattgttacctctggaggggaggaatggcaatgtgatctcgaagtggcaaaatgttaagatttgacaaaagtaggtgctgagaacttggatattcagtatgtagttcactatactagaaatagtacagtcacaaccaacacatacatacacctatttaagcccagaatgctgtttcaataatacattttagtgccccctgaagggcagatgccatcctaggaatttggggtacaggtatgaacaaggcacagtacctcccttcaagataatatcacagaagcagacttgggtcctgattaactttgtcactgatgg

SEQ ID NO: 335304 - DNA, 1000 bp, Homo Sapiens
agggttcacagttttttattagtcacatgggcctcccttgggagccagggcacacccaatttccaacagagggaagggcttggaagcaagtcctggagttgacactcatgttcagaaggtcaaccgacggccacctcccctccctcgccccccgacacaggggctccaggatcccccgcctcgccctcccacacaggggctccaggctcccccgcctcgccctcccacacaggggctccaggctcccccaccttgccccccaacacaggggctccaggcttggcagggcatgggttggtccttccccagatcccagatccctaaagtcctagacccccggacacctgcaacagagcttccaaagcccctgaaaacccagccagatactaggggtattgagggattcacatgacagcaaggccttcccccacatgctctcaggggggtactcctcctctgcctgctgcagcctgctaaacccaccccaggggcgcctacagtcaacactgagtccttacagacactccctcgtccaccccgttcccaggcaggcagaatgctcccgagttggcatgtctagtgttctcctctccatcaggcccagaagcagcagagatggggtcacctaggacagtccaggcccggcaacgggggccagtggagctggtggcccagatgacaggtaattacactccaggctcctccccggaaagctcagggcaagaaggagggctcagagctaccacctcgtggctgtttgaggccagcacctaccgcaccaagctcactccccagggcgtggagccagcactccagcaaatcatcagaaatgattactgaacctaccctttctgcctctcccacgtacaatcctgggctggcccagggcaaggagagcaggcaccctagcacctggtatggcctggggtccagagtcctcagaggtgggaacggaggctccttgattcctgccccttagctgcctctggccagtctctcc

SEQ ID NO: 335305 - DNA, 1000 bp, Homo Sapiens
tttgaccactccattcatatttatttcacatttgatctgtaaacttttttatttaaaaaaaaatccactgtcattagcaacatgtgctgacattagtttttctttagtgaaataagagtgcaggccttaaattgtctctgtctaaaacatgtagaaatgcagatgtaaacacaaagtctctgccctcctcccctgactttggcagttcatcaatgacatgatctcaaccagaaaagcacggaggggggaaaggacaacattttgatacctaacagctcttggggaagaaactgtacagtttggcaggcccatttgtcttttcaaactgtttaccttgggcaaattgtatcaggtttgcttcttccacataatttccactccttggagtctaaaaacagcagctaaaagatttccccatagtcagcactttcggggcaggaggggcacacagacatacaagatagaaacatacatattcttcttcaagcagtggccctggagggagagagggaacactggaaagagaggttttaaagtgagttactggggcaaacagtgcatcagagaataatggctttatacacagggctgatgtgaggcagaaaggctcatttacttatgtcttgatccaccatcataatatttacataggaaaaggcaattatgctgttaggcacaggaaaaaaatggacagaaatcttttccctgtcaggaaatctcaaagcaggtccgtgtcgaagggacagtcaccagttgctggtgaaaacgacgacatagagggacttcataacaccagaaagggcttgcattgcaaaggggcttggcctgaaccagacagctgtgtctgcctggaaggcatctctcccaaggccaggatttcaacatcaaaaccaaggccaagagatatgggggccccatgtgtgctatcaaaaatagtgtatatttacagcgggggatggggagggcaggcagggctgcccttagcatttttcttcaaaaa

SEQ ID NO: 335306 - DNA, 1000 bp, Homo Sapiens
tttttttttttttttttttttcatgcaaggttgtttttattaagctttatattcagtttacagctaaatattacagggattatttcttttgacaagcagacatgacatcctaggaaacttttcaaaacagtccaaggactttataactactgggaacagagcaatttactctgcagttaacgtgtatgttaagtacttcaagagtcactaagggaaagaagctaaatgcaactgttccttttctataaaattattatcctgcaaaagtagctacaaaggaaaatcacataactatgacaaagctagagagatcatacatccgaatttgtctttttttatttaggataggacttgggggtcacatttcagaaggcaaataattctttcagaagaagctacatgtcaagttttctatgggtagtattaatactaatatgatttagcttatgtttaaaaaaatcaagaaaagaaaaattttgtctttaaaatctactatattagtgactgtaaggagatgcttagctattgaagagcttctctccactcttgtattttctttatgagttcttctgagagattttcactgtgactgttttgacctctgtatattcatggaaaccgtactctcccagttctcttccatttccagacatcttgaatccaccaaaggggcactgggcacttaccacgccatagcaattcacccacactgttcctgcctgcagagcagaggagattgttatggctttatcaatgtctttggtaaacactcctgctgataagccatagaaagtattgtttgctcttttgatcacgtcatctaaagatttaaacttcatgatttgctgcactggtccaaaaatctcctctttggcaatgcgcatctcatctgtaacattagagaacactgtgggctggacaaagtagcctttattcccccacgggcctcctccacattccagtttggccccttctttcttcccactctcaatgaggtcaa

SEQ ID NO: 335307 - DNA, 1000 bp, Homo Sapiens; identical to SEQ ID NO: 157336

SEQ ID NO: 335308 - DNA, 1000 bp, Homo Sapiens; identical to SEQ ID NO: 157337

SEQ ID NO: 335309 - DNA, 1000 bp, Homo Sapiens
ttttttttttttttttttttttgctcacagaatgtatacgtttattttttaacggagttaattcatggccgggtgttgtggctcccacctgtaatcccagcactttgggaggctgaggcgggtggatcacctgaggtcaggagttcaagatcagcctggccaaaatggtgaaacctcatctctactaaaaatacaaaaattagccaggtgtgatggcatgtacctataatcccagctactcaggaggctgagacaggagaatcgcttgaatctgggaggcggaggttgcagtgagacgagatcacaccactgcactccagcctgggcgacagagtgagactccgtgtcaaaaaaaaaaaaaaaaaagaaaaaaagaaagaaattaattcatataccataattaaacaattccatagtttttagtatttttaccaaatcatgcaaccattactattgttcaactccagaacattttcaaaacctcccaaaaacaaatcccatgcccactaacaattactcctctatcccctggcaaccactaatctatgttccatctccatggatttgcctagtatgtatatttcatataaatggaatcatacagtctgtagccttgtacatctctctggcttgtttcactgagaaggatgttttcagggttcactgatgtcacagcatgtgtcagtacttcattcctttttatggctgagtaatccaaggaatattccatggaaacattttattaatccactcatcagttgacggacatttgggatgtttgggcttactttacaggtgtaatcatgtaagcatattctttgcctactccttcccacaaattaaggaaaatcagtagcaaaatgaagggcaagcaactaaaacagccagcaactggcacacagacaaggaaaagcacctctggtttttaggttaagccaatgaagagtggggccgagatttagtatccacctagttcaaaacccctaacactttccaagct

SEQ ID NO: 335310 - DNA, 1000 bp, Homo Sapiens; identical to SEQ ID NO: 157338

SEQ ID NO: 335311 - DNA, 1000 bp, Homo Sapiens; identical to SEQ ID NO: 157339

SEQ ID NO: 335312 - DNA, 1000 bp, Homo Sapiens
tttttttttttttttttaacaattaacagtgtgatttattttaatttcaccatattacattagcatacaaataatttgtacatttaaagggtagctccactggtgtaagacagcaggctgtagttcaaggacccaagatagggagatagatttcctctatcgcagtagtgaacagagacaaagtgcttactaggcaagttcacattcacacagaatttgaccccatctattatctaatcccctccctatcccagttgtcagctttctcaatggaatgacaaggggatatagcttaaaaaaatgtcaatgagctgaaatcatctctactgattctaccaggaacctataaaggaacaaggtttttttttgttttttgttttttttcttcaagactaggcaagtgaagcagtgggaatggagaaggaacaaagaaatctacaaactggttgtgatcaattagttgtaaataccactgcacttggatcagccaggaacaagttctttgaaatacgccagagaattaacattatcagtgggccaaatgtgtggaagatgtattatcctagtctcttttcctgttctctagaagtatgttactggctcttaaaagatttcacaaaaatacgctttgaggagaatcacagctttcttgattagtatctacaaggcacttaatgcacattttcagtgaggaagctgatggagagagaaagagtaacatgaaccattctcttatactgaacgccaaaattctggatgtaaaataacattcagttgtactgcctctgtaaacagggccaattcacatcattccacagcgtggccatgtcaataggtttcactgcaggttttcaaaaagcagattccacatcacccatctccacacacacagtcttcagctgtgaataatattcgattgtcacacggccgttctctctgccaaatcctgacttcttatatccaccaaagggcaactccactgggctgacgttatagttgt

SEQ ID NO: 335313 - DNA, 1000 bp, Homo Sapiens; identical to SEQ ID NO: 157340

SEQ ID NO: 335314 - DNA, 1000 bp, Homo Sapiens
ttttttttttttttttttttttttttttttgttttgaggacatgcatttaattttaaattttacaatttagattcagcatgaattgcaataaatggatcttcagcagagttactaatagaaaaatgagctttgccatcatcagaaacgtaaattttaatgcctgtgcaattgccattaattttatctccagaaatgacatcacagtatgtgccagcaggaagaccagtttgcaaagttaaagaaaatgaccagtcatcattgttgaaaacaatgaatcctctgtttcctctcccaaaagccacttggttgctcccattatcataccaatttgtaaaaggctggccatccactacattgcggaaaataaccatgttccttatttggcgccatcgatgttcacagacccagtcattgccacaagtagtgtctggattaatagtaacttctttaattactccattattatttggtggcccaacccaatcattaacatcgtttccattttgaaactgtcttggccaacggtagcttgacattactcgtgtaaatccgtaaggatgagcaagcataaatccaactgccattttgtacagcctagcatcccagaaggtaagaatagaggctcctccagccccatgtcctcgttgattgtcatggttatccacaaagacaagcgctctgtcagaaggtacgaaaccccaaccttctccccagttctttaagtaagacatcttctctccattccacttgcgaataactgtgccgagttttgcaccatacttgaattctgtcacccggccattaccaaagtagtcactgcttttaattggctcaccacccagatcaattacctcctggtaaatgaaaggtttacttcctgcagggaaccagttactgtttagattatgcagtttgtccaaaattgcctttatgtctccaggccacatgtgcttggaagcatcaagtctgaaccctgcaacaccaatgtcaatgagatgg

SEQ ID NO: 335315 - DNA, 1000 bp, Homo Sapiens
tttttttttttttttttttttttttttttttttttttttttcataaagaaatgccactttattattttcaagtacataggtagtacctcaaactaatgtcttacaaaaggtcaccaataaagatcctgtagatgtttctttaacaaatacataaagattgatgataattagcccatgcactcgctgcttctaaaaggatatttctaaagtgcctgaaaagtattgtttttggtagactaaacatgccacctctagcaatattgtttatgctcttaatttactaaaaaaatgccatttttattgattgtgcaaagataaacttttgtccacagttagtaatctccaattaatcggatccaaattaatattgtctcccacttagattcccaggcccaaggcaatgactcccttacttccttgcttctgataaagcaaaattccagtgcaatgaaatgacagcctttgggaggtggtttatgggtctgacccaatgcttgtcttttgtgcttccttcctgtctgccttaggtcttccattttcctcagatgtctttctcacttgcatgacctatctaggtctctctctacaggacattcccagtgccttctaagccaggcttagagaatgggcaaggctgcctgcagagcaaaagtgttagatagggagtaagggaaagaaagctatctcctgtaggaacctgaaaccaactctccagcccagggtaagtgggcacaatgatcgtcggtttgaagggcatttgcctggagggaacagccctgccacctaagacgtcaaaagcaaatcattttttttttttttgagatggagtctcaccctttcgcccaggctggagtgtaatggcacgatctcagctcactgcaacctcttcctcacaggttcaagcaattctcctgcctcagcctcctgagtagctgagattacaggcgtgtgccaccatgactggctaattttttgtacttttagtagagacagggtttca

SEQ ID NO: 335316 - DNA, 1000 bp, Homo Sapiens
gaattccccaaacatgaagataatgatcttgttaatgtccagcatagcacaggatacccttgtaacactgatcaaaatacgtttacaatgtccaagagaaagtccagagtaccttaagcaatccttttctactcttttaataaaatttggctttccttatacaaatctgactttaaaacaacctcgcagtgggggaaaaaagatatttttggccagtcaacatttcctctcaccttcagcatctcagttttcatgcttttcttgaccaataatatgtgaggaaccaaaaggaggccactgccagttgtaaagttaccattttgaaatgcaaggtgattgatagcttctaatagaactctaaactggccacaatgagcaggagctcattacaccccaggcacttgtactcctaggaggtaccatcccatctcctggacactgtttaaggctgcattttctgatgcacaaattaattttaatggatgaaaacataatttctctgaagttttctctgaatattaagactgatgatgagctctctttgttcagaaatagtgccgcattttatgtgacttttaaaccaatcaagtcttacttatgttagaaatgaaaataaaagaaactaacaacaaaatataaagctagggtggttatgatttttcctttaaaaatataacttctgttgtatttctgggaatcagacctgcatattttagtacagcatgtttccattaatattccatacaaaataatgtctagtttttggtagcaatatgaaaatgcaactagaaacacagtctcatacacaatgaattgatttatggttatattaataaagtgtatttgttcttgtgatttctagctcaattcagctaatgagccaaaaagtcaatcacaagaatcaagttgcatgaatgcaaggctcaagttgaaacaggaatgaatttgatggacttggaagatttaggcgagtccttccacatacccgtactgtttgttg

SEQ ID NO: 335317 - DNA, 1000 bp, Homo Sapiens
ttttttttttttttttttttcttggttcaatgctgttttaattccgccagaaaagttggaagatttctttcctatgggatgaagatattggagcaagacttttaggggtgcattgtttataaagttcccagaccttggtcctgaagagccggcccacaaagacataaattactggattcagggagctgttagtgaaggcaaagaagttggccaattgcaggcccaggtcaatgaagtcctcccaaaagcagcctcggactgcttgcacctggaataagaattccaggaaggcaaagaagtggtaaggggcccagcagaccaggaaggcaaccacgagcgtgaggatcagcgctgtggtcttgctatccttgcggcccccgcaccttgtcctgctgacctcctcccgcgttcgcagggaggccaggatgtggtagttgaagaagacgatcgcagccagtggtaggaggaaacccagaatatttaactccacaatccttgcaaagtgccaggcctcatgggggaggagcaggatgcaggcggtgatgttcagatctgggacggcttggatggatcgcagcaggaatgtggggatgctcaagaggccccccacaacccagatgagcacgcaggtgacccgggcctgcctccgccgctgctgcctccggctggccatagggtgcaccagcacgcggtagcggtcctggctgatggccaccaccaggaagatgctgatgaacaaattggccttgatgaccccgttgatgacacggcagaggagggctccgaaaggccagttaaactggttccagatattctctgcccagaagggcaagcccaagacaaacaccagatcagaggctgccaggttggccaggtagatttctgccacgttcagttgccgccggggcaggaggaagaccaacaggacaaaaaggttccctaggaggccgaagaaacagatggagatgataaatgttggcagcactctgtgcagcaggtc

SEQ ID NO: 335318 - DNA, 824 bp, Homo Sapiens
ctagagtaatttgaagctcttggctcaacatttattgcccccttcctttgctcctcatgtccagaatgccaccctcccagatggggacagagtgctactggtactggtgggaggggtaggtgctgtgtccgtcgtactcatcggtggtgaggcagcgcagcatgaaatggcccaggtcatgtttggagatgacccttgagggccctcgtccatccagggtcactgtgtacgccccagttagtggctggtctcctatgtgtggcggcatcacagccacgtacttcaggcctgattcccgcagcaccttgtgcatccggatgtggtcatcagtcacagcctgcagtcgtgggggcaccttggtagggtcccagagcaggaaagccgaggtgcaggccacgaccttgtccacaccatgagccttcatggctgccacaatgttccgggcgccctcggacataactgtcgtgggactgaggtcattgcgggtgcccagcagcacgatgacagcgtcctggccagccacggtcttgtccacatcggctgcctgcagaacatctcccactaccacgtgggccggccggggcccctctgatggcagcctggaggagtcccgcaccagcactgtcacttcgtaacctgcttgcaccgcctgcgccagggtggtgagcccggtctggccagtggcgccgaagatcgcgatcttcttgacggccatcgtacgggatcgtgggggtgcaaggcctcagagtctcggcacgcgcgggaacccactggctgctgggcggtgctctctgcccccatctgggagggtggcattcgaattc

SEQ ID NO: 335319 - DNA, 876 bp, Homo Sapiens
tttttttttttaaaggaagtcaaaaactttattcagcttataaaattccatgttccaagaacatgctctaagcatgcagaaagcacaggacactgctcccgggtgggggctcaggtggggccacctctgaagctctgctgacccctgggccaaggccctgacagactagcaggcccagtggtcatgaaagcgtgacggccaccacatcacaagcgtgatggcacctgctggtgcagctgcagtccctggtgggccgggcactcactctggcagccgccgtcccccacgccagccatggttgtcccgccatacgcagtagttgagtgtggtcgtgaaggccagccaggccaggtaggggtagagcaggcgggcggccagcgggctcacctggtaccaggccacggtagtggctgccgccgccccactgaccagcaggagatccaccaaggcccagcccatttgtcgggcaccaaagaagatggggggccatgcccagttcagggccagctgcccagtgtagaggcccaggggaaccacagccttctctgtgaagcctcccagctctttccagaccaggtaggagccgtaccccatggctgagtagagcgtgccccagacagggcccagcacccagtggggcgggtgccacgagggcttctgcaggccggcgtaccagcggagaccctcgccgtggacaaagcgggagcccacgaagcaccccaggctgggcgccagcgtgaagcccatggcgggcacccagggcggggccatggctgctgcagctgctgttcaggggagctcagcggcgagggcacgctccgggaagggcactgcctggcaggagttagccaggccgctgtccccgcatccgccccg

SEQ ID NO: 335320 - DNA, 1000 bp, Homo Sapiens
accaacaatgcaacaacaaactcccaaattttccaatagaggacacgtataggattttgctttgatgttacacatagatgatgcagcattcacacacgtttaaggatctgacaccctgacatgcagccagtgggtgccttaggagtctgcgccttagtgttatgccatggaacaggcccagctaatgtttgtctgattttatagctgaccctacgttactgtaattgagggcagggctcatgttttggcagggtctggagtttaactatgcagatttggtttttagaaggtcataacaggcggtgtgtgctgccagataccagccaaagtagtagaaactggattccaatgatataccacagggagggatttaatccagaaacaccaccacagtcagtataatcctccaagacattgttatcaaagcagacatcaggcccttttcggtatctgggttgcttaaccatgtcacaaggatttggaccgtcagaagtctgctccgcttgtatgagcagtcgtgtgtcacatggacatgtccctttgctctcaaccattatgaatattaagttggtgttcataagcttttctccatgaaagattctggaacagtttccacagtctaatacaccactgaatgatttactgtcgttatcgaagaaatactgggtttgttcagtaatgcagctctgcttggacagggaggccgtgaagtcatcatcctccatctcaactgcctcaaggagtcgtggaaaggtcaaactcaagagaaactgctgtagaatagaccaggcagcagcagtggcccaccagccaatttgtaatatgtctgctactgatggcacatatgctgagcgatgtcctgctccttgttttggtgcagcaccgggctcacatactgactgataatcataagatttgttaaaagcataaactgatatattaaccaggtgtctcatcaagctgggatcaatctctccaaaaaatcttccaatctgattag

SEQ ID NO: 335321 - DNA, 1000 bp, Homo Sapiens; identical to SEQ ID NO: 157344

SEQ ID NO: 335322 - DNA, 1000 bp, Homo Sapiens
ttttttttttttttgctgaattggtattgactttttctattaaaatgggtttattcaatggatcagtaaacaggcagcttctttcacatctgggtgataaaaccatttttatcatcaccagaagtcaccccgccctcgccttcctcctcctaaggtctgtgggttgatgtgtgcgttttgtcactgctattgatacaacctcattctacaaggcctgctcgggtgcgcgcttgtgaaaaatgaccgactgtctctgctggtactgctgcttgcgcctcttttttttgtcacactggcacagcagcagcatcttgaaagtggttctgaatgttttgttgcacagagcatagcacacggggttcacggtgctgttgatgtagcacagccagtagcccagattccaaaaggttttgggtatgcagctgtcacaaaaggtgttcaccagaaccatgatgttgtatggggtccaagtgatgatgaaggcaagcaagatcgcactgagggtctgggccgctttcttctccttgaccagggacatccttttccgcttagtgatctgacttctggtcttcagagcaaacctcttggccagagtggcttccttgaaggacagaggtagagtggccgtgctcttacccactgaggagttgacgtcagaagtcttagctgtgtccacggctgactctagctggatgggaagcttggagaagctttttggaaaactgcctccatcgtccacgctcttctgggcctgcagcttgtcggctttcctctccaagtccaccatccccagctcctcctcaggcacctgcaggttgtccgatgagggtaacttggtggagttgaggatggtgctgtgacccggaagcttgagcacgatggagtagatggctctcgtctcggagccaatgtcctcctcgtcggaggaggcggagttctccagggaggcagcagcatcattgttgttccaactgtcactgctgctgtggtcttggtccat

SEQ ID NO: 335323 - DNA, 1000 bp, Homo Sapiens; identical to SEQ ID NO: 157345

SEQ ID NO: 335324 - DNA, 1000 bp, Homo Sapiens
cagctgggtccacttatgcaatgtggatcgggcttcttacatctgaaatctgcgtctctatccctcctctgagaccagtgtctcctgccagcttccatggccccgggatgacctcactctcccagggtctccctgcgtcctgggagctctggccgaggagcagcaggggctgatggcagagcgggggcaggtcagagctcagcagatggggtcctgaatacacgggggatgtgggaggggccagggggctggggatgcccaggatttggcacgggggtctctgtgtcccacccactcctggcacaaaagccccagcctcaggaccccggtcacaggcacccgggggtgggggtgaccagcagcagttcagaggcaggtgtgggcaatgtgggcctgagtctcctccccactcacgtcactgcccgcggggacacagcggcatttctggggcactcggcatgccgggttcctaacctcaattattcattctgctctcaggcacctcctgacgagaccctggcccaggagagctcggctcggggacagaggaatgagactcagtgggacgcagagcccaaccccatccccacccctggctggatggggtctgggggcagcagaatgtggaccactcagcaggaggcttcctgactgtctcctcctgaaccgatgtcactcacaggcaggggacacgccatcctggccccgcccctctgggcccttggaatcatggaggggtggggcagcctgtgcccatcccaaggggaagtgtgcccctggggacactggggggctgccgggtgcgccatctttagggggtgcactgccgggctccagggtcatgcctggaaacatttcaggcctccctcacctctggataccgcctgcaggggtgaggctgtgctgagctctgcctgccctgccaggacggagggcatgggcctgtgtggaaaccccagggctccctgactcccatgaggcttctcagggacttcctgcc

SEQ ID NO: 335325 - DNA, 1000 bp, Homo Sapiens
tgcaaacaataagcactactttatttctatttttatttttttagagacagggtctcactatgttgcccaggctggtctcaaactgtgggtttcaagtaatcctcccacctcagcctcctaagtcactgggattactggcctgagcgaccatgcccagcttataaacattattaattgctgtatttacttccggaaatttctttcccctattcaacaaatgttaagcacttactataggtcagcacctgtgcgtggcactgggcatgctgcagtgaacaagacacttttttttttttgagatggagtttcgctcttgttgcccaggctggagtgcaatggcgtgatcttgactcactgcaacctctgcctcccgggttcgagtgattctcctgcctcagcctccctagtagctgggattacaggcatgtaccaccacacctggctaattttgtatttttagtagagacagggtttctccatgttggtcgggctggtctcaaactcccgacctcaggtgatccgcccgccttggcctcccaaagtgctgggattacaggcgtgagccaccgcgcccggccaagtcacatttcttgacctcataaggcttataatctagttcctgttctgtgttctatttcactggcgacctaggtgttgatacccaaaagagcttcttcaagatcccaaagagtaaatcagatgatactgcatttcaggtgggtccaagacacctgcctacccagccctcagtccaatgcagtccccagaaacgaaataagaggcccagattcctcgtgaaggagttaagaggcagagaaggatagggcttgacagtatcaccaaactctcacttcaactggcagggggcctgggtctcaaccctccagtcttcaaggaaaggggtctggagggggcaagtggtacgtggcgtccaggaagatgactagggtcccaacgctggtgaagatgatgaaagtccacaggaagaggcggtccacta

SEQ ID NO: 335326 - DNA, 1000 bp, Homo Sapiens
gaaggaggcagggtaacgtgactgtagggaggctgctttagaatgattgggtggttagggaaggcctctcagaggaggtgacattggagcaaagaatggattggagccatgccctgactgatgtggctgtggaaagagcttgggaagccctgggggaagaggaagaaggttcaggtagaagatagggaaggccaggcatagtggctcacacctgtaatcccagcactttgggaggccgaggcaggtgggtcatctgaggtcaggagttcgaaatcagcctggccaacaaaaatacaaaaattagctgggcacggtggcggctttctgtaatcccagctacttgggaggttcaggcaggagaatcacttgagcctgggcgatatagcaagactccgtttaaaagaaaaaaaaaaagatgatgatatggcaaatgccaagcctctgagctgggaagaatctagaagtgtgtgaggaactggacaaggggaagtggagagagatggtgatggagaggcaggccggcaccatgcctgaagcatagtaggtgctgctacgaagtcatctttatccccattgcccggtgcagggaaggaagacaggccagaattgaactgtctgaagctccctcctactggggcttcctgggatccctccaaggcattcagagaggacagcccaggcccccatccttgcctgttccacggcttgggctggtttgatggggttgatggccaatgctcacatatttacttaggcctcatcggccacaacccagaaagaagcagcaaagtgcccacccggccactcacatcctctcaccccacaacccagggggccctcagtcacgctgggcagcgtagggcccctcagaagctgcatgggtctggaagaggggcggtaggaagagccccacagtgcccaggacgcacacaaacatgaacacccacaggaacagccggtccaccaccatagccacgtacttccagtcctcaacgacact

SEQ ID NO: 335327 - DNA, 1000 bp, Homo Sapiens
acctttgcaacttttattaaaaatataagtattcaacattctcttacacaaccaaactgaccaaggactggaaagatgttttattactgaaacgtttacaagagaaagttgtttcaaagagcttacagatttagtcttacccacccaagagaatggcattctctttggctcagaccacaacaaaaacaattgagtgacttctgtctgctttttcaaacaaaacgttttctcacaggtctacattctctttaaaacaccactataaacacctggaaacggaaactaaacgtagacaaaacgaataacattgtgttgctgctgcacgtgaatacactttgtgcatgctaagtaaggggtataggctctctccctctctccctctatgtttcaagctatataaaaataaacaaatggcataagagcagcgctatggtacagaatactgtatttttttaaattttttttgtgctaaatgcagattctttttggccaaacgcaccgttttatttcccaataatctccatgagtttcctgttgctgtgagcttgctgtgctaactgctcggccctggccatttccaagacttcccggaggaggtggaaggtgagatccagggagatgggaggctcctcggaccgcctttctctctccggtgcctcctggtggccgccgagggcattcctagcgccgcgctccgcgagagccgcggggctgtcgagcgagcgccgaggcagcagcagctgctgcagcaacacgcggaaaaagttggcggtcgcctgttccggcgaagggcggctgccgctgcctccggcgaggagcgaggaggcgggcgaaaggggagcggccgggctcttgttgaggttccccaggcggaggaagtactcctctcccatgcggagcaggaccggccgagcctgcggctgctggggctgctcggactgcggcggcggctggaagaaatccaagggctgagggtgctgcggcgcctgccgagctcccg

SEQ ID NO: 335328 - DNA, 1000 bp, Homo Sapiens
tggggagaggctggagagtggaggacggacggatgctggctcatggatggacgggggcaggctgttcagcaggcaggtacagtgttcacagtgcaatggcttccttcatgaggggagcctctgcttggcctcctggagaagctctggcaggtgctggaaggaggaggggcagaggccagtgcttgatccccctcttggcatcactggcaggtcaggcaggtcctgagggcagggctggcctcccctctgcgcctggcaaccagcacagggcacttaggtgagccgagggtgtagacccttcaggctgtcagtgcagaccagcaggtccagaggcctcctcttcccgtctctcaggctgcacacctttacgggaaatcaggccgacgctgtcccgccccacgaacttcaggctcctctctctggagacaggtccatgcctgtccaggctgggataccttggcaccaggcaggccctctgggtgcagggttctttcactcctcagcgtccaccctgctttcccacaaaccacaggccggtgggtccctggcctgggttccggcatggaagggagtgagaggagggtgcagcccctgagggaagagggtcctgagccgggctcaccagccttcctcaagcacatgggagcctccagggctcacaataaatagtggcagcatggggagcatcctctggcctctctcattcagtcaagggtctgcgggttgagacagaggggccccagcctggctgctctggtccagtcctggcaggcaggagctctggtggagggcagaccacattccaggaggatggccagggaggggtggtggtggacgccccataatgtctcctcccacggagagactgttctgtgcgtccagcttagaattccctctacactggcagttccacctgtctgtcatcctgagtcagggggctgccctctggttgctccaagggagaatccgctctctgaggctcttgatggctccgccgcct

SEQ ID NO: 335329 - DNA, 1000 bp, Homo Sapiens
cattgtgtaattccatttatatgaaatgtttagagaaggcaaatccatagacacagaaagtagattagcagttgccagggctggtgaggcaggggaggcaggctagggggaaatgtggagggactgctaatgggtgcagggtttcttttaggggtgatgaaaatgttctaaaattaattgtgggccgggcaccgtggctcacacctgtaatgccagcactttgagagaggtcgaggcgggcagatcacttgaggtcaggagtttgagactagtctagccaacatggtgaaacccgtctctactaaaaatacaaaaattagccaggcgtggtggtgtgtgcctgtagtctcagctacttgggaggctgaggctggagaagcacttgaacctgggaggcagaggttgcagtgagctgagatgatgccactgcactccagcttaggagacagaggaagactctgtctcaaaaaaaaaaaaaacaaaaaggctgggcgcggtggttcatacctgttaatcccagcactttgggaggctgaggcgggtggatcacgaggtcaagagatggagaccatcctggccaacacagtgaaacctcgtctctactaaaaatacaaaaattagctggccatggtggcgcatgcctatagtcccagctactcgggaggctgaggcaggagaatcgcttgaacatgggaggcggaggttgtagtgagctgagatcgcgccactgcactccagcctggcaacagagtaagactctgtctcaaaaataataagaataataaaattaattctggtgatggttgcacaattctacactagaagtcattcgacactttaagaatgtaagttaggctggatgtggtggctcacacctgtaatcccaggactttgggaagccaaggcaggtggataacttggggtcaggagttcgagacaagcctggccaacatggtgaaaccccatctccactaaaactacaaaaatcagccaggcgtag

SEQ ID NO: 335330 - DNA, 1000 bp, Homo Sapiens
gctcaggaaataagagctgctattattactactcttcatagcataatgtaagggtttccttcctctcatcccagctcggaagcaccttatcaaggtgaactgagccgcttctgtttcttctcttccctctagccaccacgccccttcctttccgccatcctgcccccagtcttagctgcgcccctctcccaagcccggtcttggccctgccctttccctggccccgcccaccagacctgcaccggcacagccctcgctcagcggggcaggaagctcatggtgtagtttcgtgggatcgtggcaaagcccacgtgtttgggggacacgtcaatgtccttaggtgactgggaggacttgaggcggaagttctgcatgacggtggtgaagaagagaaagagctccattctggccaggccttctccgaaacagttccgctttccgatggaaaagggcacaaaagcatcactcttcttaaactgccccttctcattcaggaagtgctggggattgaagtcctgggggttggagaagaaactggggtctctcagcacagagcccagcatagggaacacttcggtgcccttagggaggaagaaatcccgaaacttggtgtcctttttgactctgcgggccaaactcatggggatcacgtctccaaatctttggatctcgtggatcactgcctccatgtagggcatcttggcccggtcctcaaacttgggctgccggttcttgccgatcactctgtcaatctcctcatggaccttggcctccacctctgggtgcttcatgagcagcaagaagccatagcgcagggtggtgctgacggtctcggtgcccccaatgaagaggttcaacgtggtcatcaccaggtttttcaagtagaactccgtgttggggttcttctcctcctcctgcatgcggatgagaaaggagtcaatgaagtcccgtggggaattgggatccagcgtgcgctggttgtgctccaccttcttggcta

SEQ ID NO: 335331 - DNA, 1000 bp, Homo Sapiens
tcaggaaataagagctgctattattactactcttcatagcataatgtaaggtttcccttcctctcatcccagctcggaagcaccttatcaaggtgaactgagccgcttctgtttcttctcttccctctagccaccacgccccttcctttcccgcatcttccccccattcttatacccgcctcttccgcgaaccccgccctgaccccgcctttccctggccccgcccaccagacctgcaccggcacagccctcgctcagcggggcaggaagctcatggtgtagtttcgtgggatcgtggcaaagaccacgtgtttgggggacacgtcaatgtccttaggtgactgggaggacttgaggcggaagttctgcatgacggtggtgaagaagagaaagagctccattctggccaggccttctccgaaacagttccgctttccgatggaaaagggcacaaaagcatcactcttcttaaactgccccttgtcatccaggaaatgctggggattgaagtcctgagggttggagaagaagctggggtctctcagcacggagcccagcatagggaacacttcggtgcccttagggaggaaaaaatcccgaaacttggtgtcctttttaaccctgcgggccaaactcatggggatcacgtctccaaatctttggatctcgtggatcactgcctccatgtagggcatcttggtccggtcctcaaacttgggctgccggttcttgccgatcactctgtcaatctcctcatggaccttggcctccacctctgggtgcttcatgagcagcaagaagccatagcgcagggtggtgctgaccgtctcggtgcctgcaatgaagaggttcaacgtgctcatcatcaggttcttcaagtagaactccgtgttggggttcttctcctcctcctgcatgtggatgagaaaggagtcgatgaagtcctgtggggaattgggatccagcgtgcgctggttgtgctccaccttcttggctatga

SEQ ID NO: 335332 - DNA, 1000 bp, Homo Sapiens
tacttttgtaaagaggtttttattgatttgcttaatataaagcttactatagaatactacagatataacacatgatataaatgtcactgttagagccatcaaaataattcctatttttattaatgattgtggttgaaattattgagaaatgttaattatgttatcagagctcaggaggagttaatggtgctaactgggggtggtggagatagtcctatgagaagcagagaagccaaatctacttccccagcactgatttggtcatctcctctatattaccaagtataacactctatacagaccatgagagagcacaatgcacgtacagaatccctgattatttatgcagcacattggatgaagcccgtcttcatttcagggttctatttgtaaagtaatttgaggtctctggtgttctggggcacagctttcttaaagagcaaaccagaagtccttagggaaatcaggctccacttacggtctcatcccttgactcagcctttagaacaatgggtttttctgttagaagaagtcctccaaagcgtaatttcagggggatctgtgtttctttacaaggtttgaaggagaagttctgaaggactctgactagagcaagtttcatgttcacgagagcaaacctcatgccaatgcagtttctgggtccacttccaaagggtgtgtatatgtaaggatctatgttgtccttgttctttttactgaacctttcagggaggaacttctcaggctctgtccagtactttgggtcatgatgaagaacatagcttggaatcatcaccaccacccctttgggaataaacatcccattgatttcaacatcttttttgcagaccctctcaagtctcatagcaactgggaataatctgagtgtttcattcaccaccatgtcaagatactccaactgtagcacagtatcataggtgggtggtgccttattgggtaaaactgtatcaatttccttctgcactttctgctggacatc

SEQ ID NO: 335333 - DNA, 1000 bp, Homo Sapiens
gacgtggggaggtcaggctttagagatgtttatttaattctcagcagatttgaaggaacatatcagggaatccaaagcaccagtgcagaatcccacagctcagggaacctgggccaagggggctttttgatagacggaagcagtaggaagaggcagctgggaatgaggactggggaagactacagcagtgtgtgactgtggtctacaacaggcatgaacctcaaaaatagcattcaacatgaaagcaaccagacacaaaagatcacatattatgcctgtaatatcagcactttggaacactgaggtgggtggatcacctgaggccaggagctcaccaccagcctggccaacatgtccctactaaaactacaagaaaattagccaggcatggtagtacatgcctgtaatcccagctacttgggagctgagactggagaatctcttgatcttggaaggcagaggttgcagtgaacaaaaattgcaccatagcactccagcctgggagacagagcaaggcttagtttcaaaaaaaaaaaaaaaatcaaatattgtatgattctgtttatgggaaatattcagaattggtaagtccatagtgacaaaaaccagattgacaggggccgagatgaaaaagagaatggggtatggggagtgacagcttgataggtatgggttttgttgggggagagataatgaaaacatttggagctaggagaatcacctgacatcaggagttcaagaccacctaaaaatacaaaatttagccaggcgtggtgggggacgcctgtgataccagctcctccagaggctgaggcaggagaatcacttgaacccaggatgtggaggttgcagtggacagagatggcaccactgaactcgaacctgggtgacagagtgagactccatctcagaaaaaaagaaaatgtttggaactagatggtggtggttgtacagctttgtgaatgaaccacacgccactaaattttacactttaaaacag

SEQ ID NO: 335334 - DNA, 1000 bp, Homo Sapiens
tgaaccagcaattaataacactttttatttagcacattcacaaaagaaatggactaaattatcattcattaatcacttttctgtgttttacagtgataacatattaaaaagtcagcattagaaaagtattagcatatgcagcaattaatacaagtgttacagagtatgaataattgcagatatatttgtgcagtgacctgaacaactctccttaatggagtttggatgcttatgggatattgagtgaatgggaagatttgatgagaggtcagagaagacataatagtgggaatgtccttgataaaaaaagagttgcaggtgatagcagatcagcagccagatgggctagcattcttcagacagggatgaagcagatctggtatgagggtggcagagaaacaatccctttggtaactgcagtagtattgaggttctttaaatcatcaacagatttcaggttaaagttctgtaaaattgtggttagaaataaaaatagctccatgcgggcaagtccttctcctgcacaaattcgttttcctgctgagaaaggcatgaagtagtcacttttcttaaagttgccattcttatctagaaagtggccagggtcaaagatatttggattaggaaattctttgtcatcatgtagcacggaagtcagtaatgccattatggttgtgcccttggggatgaggtagtttctgaacttagtatcagtggtcactgcatggggcacaccggtggggacaaggtcactgtatctctggatctcgtgcactacagcatcagtgtaaggcatgtggctcctatcctgcatgcaggggctcctgtgtctgccaattacatgatcaatctcttcctggactttagctgtgacctctgggtgcttcagcaggagcaggagtccatatctcagagtggtgcttgttgtctctgttccagcaacaaatagatcagctacagtgccaaccaagttttcaatattgaattctgacttttggtt

SEQ ID NO: 335335 - DNA, 1000 bp, Homo Sapiens
cagcaaataataatgctttttatttagatcatgcagaaaagaaatgcctttgaattataatacacaaatcatatttctctatttaataataacatattaatactctacattagataagtatgagcattatgtgacagtcaatgcaactgttacagagtatggagaatagcagatatatttgcacagtgaaacataggaaactctccgtaatggaggtcgaatgttcactagatcttcagggaagggaaaatgtgagatgacaggtgagaaaaggcattacagatagtgcaaagatggataatgccccagaggaaagagagctgcagggactgcacagcagcagccaggccatctgctcttcttcagacaggaatgaagcacagctggtagaagggcggcacagaggcaaatccattgacaactggagtggtgtcaaggttctttgggtcaaccagagatttcaggttaaagttctgtaaaatggaggtcaggaataaaaacagctccatgccggccagggcttctcccacacaaatccgttttcctgctgagaaaggcatgaagtatttacttttcttaaaattgccaccttcatccagaaagtgatgagggtcaaacatctctgggttgggaaattctttgttgtcatgtagcacagaagtcagggaaattaatatggttgtgcccttgggaatgagatagtttctgaatttaatgtcacaggtcactgcatggggcaggctggtggggagaaggtcaatgtatctctggacctcgtgcaccacagcatctgtgtagggcatgtggctcctgtcttgcatgcaggggctccggtttctgccaatcacacgttcaatctcttcctggactttagctgtgacctctgggtgcttcagcaggagaaggagagcatatctcagggttgtgcttgtcgtctctgtcccagctccaaacaagtcaactgcagtgttttccaagctttcaatagtaaattcagatg

SEQ ID NO: 335336 - DNA, 1000 bp, Homo Sapiens
aaaataatcatgtgatgatttatttatattctgggaaaatatttattttcaaatactcatatgcaaagaaaggaatcagtttgagaaatcctgacctcaaacaatttgaaaacttgtttgaaagcggggggttcagggtgtcctccacacactcatgagcggggaatgacacagagtttgtaacgtggtgggatacagccaaacccaatatgtatagggctgaggtcgatatcctttgggtcaacgagaggcttcaaattaaaatgctgcaaaatggcacacaacaaaagaaacaactccatgcgagccaggccttctccagcacacactcgttttcctgtggaaaatggcttgaaatagtcactgtacttgaactttccattttcattcaggaagtgttctggcttaaacttttctggatcaggaaattcttggttgtcatacaaaacagagtccagagttggcactacgactgtgcccttggggatgaggtatcctctgaaaatggtgtctcgggttgcttcatggggcaggttggagggcacgagggtgatgaaccgctgaatctcatgcaccacagcatccatgtagggcatctcttgcctatccttgatggcagggattcggcttggcccaatcaccctgtcaatttcttcatggagcttctcttcgatctcagggtatttcatgagaatcaggagcccatatctcagagttgtgctggtggtctctgtccccgcaaagaacaggtcggccacagtcacggtgataccgtccattgtgtacaagcgctctgcactgtgcttttccttctccatttccacgagcaggcagtcggtgaggtcccggggacagttggggtccagagattgatggtgctccttcaccctttcagacacatactcttttacttcagccacattttttatgacttttctgtggcttccaggcaagtagtgtagaaagctgggaaaattattgtaaagctggagccagggag

SEQ ID NO: 335337 - DNA, 1000 bp, Homo Sapiens
ccaagactggtttgaatctattacaatgtactaagaaatgatacaaaaagcctagaaaagggcgtgccatagaacaagctctgtgggtacaaaaagacatgccacatctgcctctgccctgcagacggggcacagattggagggatgggggaagggcacgcggcaggcacagcatgcagggaagacagcgtgactgccagagggatgagggcagactgtggaccaagaaggggacgtagcaacccgcatgggcgggcctcatcgctcacaggcgaatctggaagggccggggcgttagcgcgggcgcaggcacagctggaaaggccgcggcaaattgccaagacctgagctgagtggggtcaggtcgatgtcctcgggcgcacccagcggctgcagcgaaaagctctgcaggatggcggtgaggtacagaaagagctccatgcgcgccagcgactctcccaggcacagacggcgcccagctgagaagggcatgaaggctggactcttcttgaaggactgattggcatccaaaaaatgctcggggttgaactcctggggcgtcaggaactggctggggtcgtagtggacggtgttaaggagggtgatgacatcggtgcccttgggtatcaggaagccgcgaaaggccgtgtccctagtgacgcggtgcggcaagttcatggggatgatgtctgcaaagcgctgcacctcgtggatcaccgcgtctgtgtaaggcatggccgcgcggtccttcagcgccggcagccgcgcgcgtcccaccacgaggtcgatctcctcctgcacgcgggcttgaacttttgggtacttcatgagtgccaggaaggcgtggtgcagcgtggtgctcaccgtcttggtgccgccaaagagcaggttatgtgtggtcatcagcagggtatccatgtggaagtggctcagtgggtcctccttctcctctgccatcttggtgaggaagcactggatgaagtcccggggagatctgggg

SEQ ID NO: 335338 - DNA, 1000 bp, Homo Sapiens
agattcatacttttatttctgaaagatgaatcatttcaaaattatcaaatgttagaatattttcttaatatttgtaaaataagcaaaaaggtaaatataatttaaatataaatactacacagaaatatcaattgacatagagctgataactcataccttaaaatattttatcaaagcattgttgtacacaggcatttaaacactcgagtcaccttagtttttttcatctgcaagtcatttagcgataaaaagcatttaaataaaacataatgtcaagctgcacttaatacactccacatgtttcataaccaaagcttccaaatggctatttccatccagttttaactttaaaacatacatcataaaagctacattttttcagtgataatgtgtatttaacaatgacagaaaaactaccttttttaatctctgagaaaactcttctcattaatgtgaatgaaataaaaatatagagaagatagttaaagccggacatagagttttcagcaacaataagttaaaacatgaagggaaaataaaaccacctttagtgtttttgggaaatcaagataatcatgtttaaagccctgaattttggatatagaagaagttgaaaaatatttcctttttattaaaagacataactaatcataatcatttgaaatatcctttatgatatatgatcacacccgaagaaccccaccatctagtcaacaaataatgcagtttcactagaacgtgaatttgaacattttttcataattgtcaggcagttttataaaaataaagcagtttccttaggaaaaaacaatctgccaattagaatacatatcttttcttcggagacgggatctcactaagctgtccaggctggtcttgaactcctgggctcaagccatcctccttctttggcctctcgagtagctaagactacaggtgcctgctaccacacctggctgtaatgtgtatcttcattttgaaaaaaaataaaataaaggtg

SEQ ID NO: 335339 - DNA, 1000 bp, Homo Sapiens
cgatggttcagctgtttattgtctccatggggtgggtgaagaggagtggcccagctgagctgaggaaggtgaccactgagaacccattcaacctgctgagcaggctgggcagaaaggagcaggacttgggacagacgactgaagatgcagagaccccatgggccccacccctgggccttcctcccatgtggctgcaggccatcctctctgatcactgctgggttgcttcctggttaaagggccagaaggtgaaggagatgggcttttcaggcatcagaatgaggttgaatgtggtgcccacatcgctgaggtgttggatttcaactctgaagttctccagcatattgatgaggaagatggtcatctctagctcagcgatccgccgtcccagacactgccgcacaccccagccaaagcccaagttccggaagtaggtgatgttcttgtctttgctcagccatcgggttgggtcaaaattttccgggtcgaagaagaaggtgggctctcggcccagagcatagatggccacttgcaccagtgtcttggcaggaatcatgtaatctcgaagaaccaagtcatttacaagatatctctgcagggtcacggagatggggtgaagtcttagtgtctccttgatgctggctttgaggagggggaccagctgtagcatcgtggccatgtctccctgggcctggtgccgcgcagccaagacctctgcccgcagcatatcctgcaccttcaggttgcgtgccatctcatacaagtgccactgcagggtcatggacgtcgtgtccacccctcctgccagcatctctgtgacgttggccttgatgtcctcgaaggacatcttgctgtctcccaggagtctgtagagcatgccacggtaatcgtggtgaacacttcctttctgtctcaattcccagtagaagttctgggtgtatatgtcagctttactgaaaatcacgtcccatgcagccacatggtccttccaggtcttggt

SEQ ID NO: 335340 - DNA, 1000 bp, Homo Sapiens
tttttttttttttttttttttaatatttaaaaacttttatttttactttcagagaatttgaaggtatacagatgaaatctgacaagacgtgaatttataattctaaaaataatttcacagcagagagaaagcatatacctagatatgtacatatttattacaatataaagacataaatgtatatttctgaaatattctaaaaatataatgtaggaagaaatatttatcaaatacacagaattatatacagtatgcatttaggaaaagcagtagtaaaaatatgcacaaataaaccatctgtaaacacaatttttaagtcttataagtattgcatgcatttctgtgcattttacatttatgaaatcatatttttcctaggagttcaaatcacaaaacaaatgttatataacagatctctaacttttgcatgctttacacttgtcccatttaatagacagaaaaattatggcatgggaaatcattttataatattaaagtcacactgaatgtttttaagctgtgactaaactttgaaacattgccctgcaccacagatcctaaatcaagtactgcaaatattaaaaaaatgactgaggcaaattaccattagaacccacacacacatacacggacacacacacacagacacacacacacatgcatgtctgtgcttcatatgcacatacacaatttaaaaattattgcttcatctttaccctaatgccataaaggaatcacatttaaaaaataaacaattttaaggtcctctaacaaaataatgccccagtgaatcactagtcttataagttgtttgacttcgttaaagtccttttaaaaatagaggtgttctctagtttcccaataatgtttttatttcaatgcaggaagaacgcaatttcatgggaggcctgataactttaaccatcatttagcttggcttacattattaagcagggacattttcctaagtagtacattaagcagagctacagtaaatgga

SEQ ID NO: 335341 - DNA, 1000 bp, Homo Sapiens
attttttcaaagagaattttaatctgaaaaattagcagagattctgccttcacaattagagtttaacatgagtcttccagtgttttaaaaagaactgtaatatacataaagcaaaatattttggcatcacctagtgaaaacagacgatgtggtattttttcagccatctcatatagttaggccccgagttacaatttgagataagttgattcctaaacagaatgtgctttacagaatgtgaccaattttattactcccaaggaccttgtttcagattatcttaaaaccagagttcactgatctcacattttaaaaagaaaaaagtttgttaactgttttaatcaatatgagtagtaacaaacatccctaattggattctagagaggaagcagggaaggccaggtgcggtggctcatgcctgtaatcccagcactttgggaggccaaggcgggtggactcacgaggctcaggagttcaagaccagcctagccaacatagtgaaacccccgtctctactaaaaatacaaaaaattagccaggcatggtggcaggtgcctgtaatcccaactacttgggaggctgaggcagagaattgcttgaacccgggaggcagaggatgcagtgagctgagatcgcaccactgcactccagcctgggcaacagagcgagactccatctcaaaaaaaaaaaaaaaaaaaaaaggaagcagggaacaactgagcccaaaacaaaattatcccctaaggacttgactttggacttccacataaatgtgaccttgtagaactagatacatatttatcaggtaaataaatatgtaatttatttagtaattagatcaagatacatgagcagtctttagcattaataattacattatttttaggaactcttatcaaatatggtcctggatctcttaatttcccatatgcagtgattttagttaaaattccaaaggatttctttttcctataatatctccatttctgagtatcatcat

SEQ ID NO: 335342 - DNA, 1000 bp, Homo Sapiens
gggagggcaggacctttaattgtattcacagagagacttggagaggtggggctcagtgtcaggcagccgtgtgctgggagaaggggctggggcggctggtggtctggaggactgggaggggagggggacagggacagggcaggaggagcagggtgggctggggtgtggggtgtgtcctcagctgcccaccagtgttcccatcccagtctctggtgggaggcccttgggcagggccgacccagccgggtcacctcaggagtgtctcagctccacctcggagccgaactggggcccgtgggagtgccggtggaggctgcggtggcggatgctgaagagccgctggctgaggcccagggtggctaccagcagggcgatgcccaggaagagcagcagccactggcccacgcgggcctgctgcgcatccaggtccaggcccaggaagctgacgcggccgctgtctgggaggggcccttctgagcgagcggagttcggcgtccagttgtactgcggccagcccagcttctccccatgcagctcgttctccgtgcggagccagtccagcagcggcttgaagtagctcaacatggccgaggcgctcatgttgggctggcccgtgatcagctgcatggcttccggccacggcctactgaagcccagcttcatggcggtcgccaggcgctgcccggcctccttggactggtagatgtcacacttgtgcagggggcccgtgtggccagctgcctggcacagtgcctcgtggaactggaactggatgatgaagctgacaaagtacctgatgtaaggcacgctagaaggaatgtggaacttggcccctgggtcaaagtcaccttgagtcctgggcactggggggcagaggccctggtacttcagcctgaggctccaccactcctggttatagttctccttggtgatgcttccatcaaataccctccagcgccactgatcgacgaggtagctgaaggggataaaggcgatcttg

SEQ ID NO: 335343 - DNA, 1000 bp, Homo Sapiens
tttttttttttttttttagtatttcacttgaattgtttattaggcatttagccacatgacaaaagacaatttgaagaccacagatataatttcaagttgcgtgaacattgattgccctggaaaatatatcagtgaggctttcctaccacttctgatgactgcaagaacatgaaaatctataatgttttaatcaacaaaaatcacagctaatgaataaaagctatggccatgaagattaactttttaattagcaaataatatttctttgttgatgagatactaagcagacaaaatcacaaccctctggataactttggagaaagacatgggaagccacagacagctgagttccatgaaggcaggatgatatttatttgcttcttattccagttttcagatatatctctcttcaatttttgattcctgcagctggcttcactcctactccctctctgctcgcagcacgtcggccgccagctctttgatgtgttcccaggcccgctgcacatgggcagattccaccgtgcgagaacagatggcaaagcgcaggacaaacttgtccctgaggtgacatggaaccaagtggatttttttggcactgtttattctttgcagaagagcttcattcactttgttggaaccctttagccgaaagcagacaagccccagaatgacttccacacagatttcaaagcggggatcctggcgcaccagtgactcaaactcatgggacagctggacatgcttgcggatataagcctgcagtcctttgactccatacatcctaaatacaaaccacattttcaaagagcgaaatcttctgcccagtggtatctgccaatgccggtagtcagtgataagccctgaatcctgatggctgtgcttcaggtaagtggggtccagtctaaaggctcccgttaagtctgttctctttttcacccacatggcagaacagtcaaaattcaccaatagccatttgtggggattaaagttgaatgaa

SEQ ID NO: 335344 - DNA, 1000 bp, Homo Sapiens
tttttttttttttttacttattaacaagtgtaactctttattaagatggaattgttcttattaaagaaatagatgaaaatggttaagtacaattaaatggctccaaaagtcttacaatgaaaacaacagtcctgccagttgttctttccagaggcaaatacttttcattctcttagtttttccttccgttagttaccttcatgggtttttccaaattattgtttttttttagtttttcaagtgaatgcatatattaatacataaaattttaaaaaggcttttcagtttataatgcatcctaacagtcccctgccccatccctcctaattctccagagcaatgacttttaactcttttagcaatgtcttctgtttttttcctcacataacttagtcatttcattattatatattatatagtgatttctggatatgacagatgaggatttagctcttacaccatcacaatcttcacttttcctcccatattgtcccagagtagttaccatatttaggggctaagcagtcacatcattatgactgtgtacatactgctccttgttgagaaaaacagtgtattatgctcttcctatcctgtacttctttctgccctagaatgattgcctaaccaaccctttccccttgttttttttttttttttttttacttttgctttatcttcaatgaacttctttccaaatgccccaaatctggcaataagttattatttttaagagaagggatctcactaaggtggccaggctggtctggaactcttgggctcaagtcgtcctgctgctgagcctcctgagtagctgggactacaggcatgggccattccacccagctaaccgattaatatttttactgttcctttttaaagctagctccatagctggaatattgcctgtgttggatcctatttgctggattcatgtcattctctggtttgtgtactccttcattttgctggagtattttctccaacagcttccctaaaa

SEQ ID NO: 335345 - DNA, 1000 bp, Homo Sapiens
tttttttttagcctgatatattttaataattctgttattagtttactgcatcttataacattttcttttgaatcaagtcacagccgtgtgtactttaggctgtggccatcataaacaaatatgtaaagacacagagttaaaatagatgaataccaatggctatccatcagtttgatgtaatctaacacaaatgaccattaagagacttgcgaagaaatcagagaaacagaatttcacaaatgagcttctgcataactgaatgacagcattgctggtgcctattgtttggtttggtcaaggttatgcttttgggaagccaaccctcccttctagatgactctgttgaaaagtgaggctagtggaagatttcagggtacagagagctagatttctatgaaatatattcaaagatggtaaagtgagtactctcctcttccctggtaaaattagggatgtgttaccatggaaactcacccatcatcaccaccaatgtggacaggtttaaatcttttggcaaggagaggatgactgcctcctcctgtttctaatccctcctcttccaactcctcatctcttcctaacaactggaattcttcccataattggttctaaaaactaatttagtgtcttaaatgatcaattccataaatgcaaattgggtaaaatgaatttccctaatagaaggaatgccagcttgaattacttggtatcagagtggctggagagagataccgtacctcagaagtgtgcctgtagagtgcaactgctctctcaaagaccgtgtgcagggaatgtggtctccaaagtgggagcagtgtcaggctctactttcttcaacagggaactgtttcttcaacagggaactggcctgaacagctcaagtgttgcttcattttctgataataacaatttgtcttgattgggtgctgtggcctgcattcctcagctgggagttgtttgcttagatcagaaaaatctgagctagtgattcagctaggga

SEQ ID NO: 335346 - DNA, 1000 bp, Homo Sapiens
tctagaagttacacatgaacatttagaatctcacagagtctgtgtgtttgcttcattggcttataaagtgctagttaaatggccagaaatgtggttgtaaggtcttggataaaactcattaatttatcctattaaatatgataaatatatatttattatatcataaattaaaaatatccatatatacaataaataaatagaaccaatatcaacaaaacatctctcaattctggaaaaaaatttctcactcctactgtaagcctcaattaatgttttagaaataatttatgaaggcatgcacctacctttacaatctgaaaactttgctgggaacagtgttagcacctgtttgtatacagcaaactcaacccatctcattttcttcccagaaaaatttgattttaagtgaagctgttcactgttgattctttgccctatttggtaaatcctaagataagaataaatttctaaaaacaattctgaagccaaagacatgtcccttatggctccccatgtttgtagtgtccctgtttgattgactatgaacaacacagaaaatacactggaatgtatttggaaacggagttaattgtgtgttggaaagcagcagagggctctcctgacacctcagagtctcaccgtaccttagtttcttaatagcaaaccccagagcaatctcctctagcttttgggatgagcatgtgtggcaggattcatctgcgagttcaggttgggtgctgaccgttttgtgtgatgggttggatcttctccagagagacgtcagtgtcatagtccaatatgaccgatagggctggggacagcttctccaagggtctggcgatgccagctgcctcctcctttttcaggtcctcagaggagcccacagcatgtgggatcaggtaaaccagattgcactccttggagatggagcctcgtggctcatgatggctggaaaacatcgcggccccattgttattgatactcaccgtctctatggcat

SEQ ID NO: 335347 - DNA, 1000 bp, Homo Sapiens
ttttttttttttggtggtttcagttcttgtcaatgaggttgaagaatacacaaaacttggaccccatgagagccagaggccagcccccatcctgtcttcatggttcccaccaccccggtgtcaagggggctcttgccaccaagggagtgcccatgcccgtgagacctggagaagtcacagcttgccacctaagttctccaggtcatcctgtccctgatggtaggtgcgaaaacaggtaaatcgcctccaaagcgtgtcctggcatcaaattttgcagggtgccgagtgagctcaggcgtcttcccagcatggctctgtccctgagtttaaagctgctctctgaatgcttcctgctctgggccctcaagttggccctgtgacatccttagatctcagagttgctctctggacagttcctctggcccctgagatgtcattgctggcactggagtgtccatgggacaggctggcgctgagctgagagcccctcgacggggttcaggagtggcgggggagggtgtggcacaagcaatgttggtgagggaggtggtggatatgcccaggtggacacacctggtcatctgtcccctgtcctgcaggcctcccctgtgtacagcttcagctttccccggaggaaattggagtagactcggaagagtttgcggaaagtgtcagcagtgattgttcggagtggagcagctgaggccgcatctggaggggagatggcttccttctgggctcccagagcccgaagcagagtggtgaggctgcgaaggccactgacggctttatccacatgcagctgcaggggctcccacggctgggaagagttgaccaacagggcctggccccgcaggacagcttccgacagcagggccaggccctgccagacttctacggcctgctgcccgacctccatcctcttccaggcatagaaattaactttggtgtctgggacagtgatattctcattcaagctgcagtgttcagcacagcccgt

SEQ ID NO: 335348 - DNA, 1000 bp, Homo Sapiens
ttttttttttttttttttgagaaaagccggcataaagcacttttattgcaataataaaacttgagactcataaatggtgctgggggaagggtgcagcaacgatttctcaccaaatcactacacaggacagcaaaggggtgagaaggggctgagggaggaaaagccaggaaactgagatcagcagagggagccaagcatcaaaaaacaggagatgctgaagctgcgatgaccagcatcattttcttaagagaacattcaaggatttgtcatgatggctgggctttcactgggtgttaagtctacaaacagcaccttcaattgaaactgtcaattaaagttcttaagatttaggaagtggtggagcttggaaagttatgagattacaaaattcctgaaagtccattagaaaaaccacaggatgaaaaaaaaaaaaggccacaaagaaggcttcagaggtccctgctggcccagggacagatacctgtagtgtccagcattgcagtgaacatgatctactttcaaaggcagagggtttaaggggagggtgggtgggaatggtggaggcaaaggctctccccatccccacctcagttttaggtagggcttttaatttaacccaaagacatctctcaacttggagagtaattcagtcctcaacagcgcctcaaatctgctatggctttgcagcgcagcagcaagaatgtttaatatataatagataaaaatttcatccaaaaaattaaaataaaatattcttgcaaaccccccccccaacaccaattcctattctaatgttaacctaccacttgtgctgttaatacttgaccatgtacttaattggaaacctatatccaaaagactgaaactgaatcttcaccccaaaatgaaaacaaaataaaatgaataacttgaggtttatggcatatagtttaggtaaacacacatacgaggagaaaggggaagaggaaacagaggtgtcggaagcaaagctgagtgacag

SEQ ID NO: 335349 - DNA, 944 bp, Homo Sapiens
ccaaataattctcaagacacatgtgcggtgtctggtttattcaaagtggctgtcagaggcccgaccatggagcaggaaccaaatagttgggagctgtggggctgaacagggcagggatttccaggtatcagaaggtaaaaggaggtcagctgagcagccacagcagcattagggccaggctaagcaggaaaggccaggctgcccagggcccagccccactcatggctgcagcatagaacctcgccacctcctcattggggttgccctgggctgggtcgaaccacatctggatgcagcggccactccctcggctgtagttgctgaccttgtaggagtgagtccagatttcattgcacagaacagtgggtgtggggaagtagaaatggaaaggttggcaggcagctcccactgcgcacttgttaaaccctgaagtccagttccagcccttgtgccagttgctcttgcaggtgtaggaggtgcgacaatcttcccaccattgctcacagtcctctttgcacaggggcacgttcagtacccgctctttgcgccagctctgatccacctgctggatccagggccccaagttgggggagcactcgtagaggcaggtgtcctggatgaaatgccgtttgcaggcaggtgccatctctccacagtggttccagttgaatctatataggtaggaaacatccttatgggcttcctggctggtgttggtagaacagcaggcattcttcctccagggtcgacactgctcatgcaacttgtcctcggggcctggcttttccttgtggtgcttggcgttcatgcagacattgagaagctcagtcctggcccatgcaatccttgtctgagcctcccctactacagccacccacactagaaggagcagcagctgtgttgtcatccgctgagccatgtctgtccttgtcgtttaatcttga

SEQ ID NO: 335350 - DNA, 1000 bp, Homo Sapiens; identical to SEQ ID NO: 157350

SEQ ID NO: 335351 - DNA, 1000 bp, Homo Sapiens
attaacatctttcgggctgactcataattatttcgagcttgtcatgctgtaatatgtacatggctatagatactatatagagtaattcatagctagatttcaaatctctagtttttcttatgtgtaccaagcttccaattacattagcagggactctgagcactcatgaacagagctgatgtcagatacaatgtttgttacttcaaaggattcatctaggaatgacaatgttatcttccatcataattaagcaacagtagaaaatacccctacttaagagctaaaccaaaagggtccacaaagggttgtacaggatccccattttcatctcatttggaagaataggaaattaatcaggtcacttgaaattcactttaaatcaggtcctagggtaaatctttaaaaaaggcaatggctgttttcgcatggagtgctttctgtctgcagttccatgagttagcaaatgcatgtctccattaaaggtctactggtaagctatgtcactatatacatactgtacatgttggatcacaaattagcagttattagtcagactgtacatagcaaaacaaaccaaatttaatgttgctatacatcccaaagataacatgggtctcaattcaaggactgacccctaatacaggttctctgtttaaatatgtagcccagtaaactaaattaaaggtaccaaacaaaactggaaaaactattctggacattctgtcaattttgctaacactgttgaaagttttctttgcttcagctggcttgttttctggcttcttgttgggttctggcgtggttgcactcttggagatggtggagagaactggatcttttgaaagattcggggcataattggcaacagccactgcataagcgttgttctgtatcataacggaagccttttcttttttcttgtcatttactacactcttcccatcccaagtccatcctcttttggtgaagtaattaacagttgcaaattcaattagggcag

SEQ ID NO: 335352 - DNA, 1000 bp, Homo Sapiens
ttttttttttttttttccaaagatatttatgtttattgttttaaatttaaatagaaaaaatacattagagggatataatgttttatattttaataattccagagtttagctccaacacatttatcttaaaatataagtatctgtgattaaattttatagaaatttaaatccttactattttaaagactcattttccagtgagaaattgagacctgaataattctacaatgctatgctctagtataaactttgttttaagaagcaaagtaactctattaccataagtaataagttgagctttgaaaagcaagggacatttacttaaagggacagtgtttaaaaaatcatttcctgatgaattactttaaaatagtaaaccaatatttgataatgctcctttttttcaaaataaatttgcaaaaacaaaataataatgactatgtgctcctcactataatataccatgataatattcctacattgaataaaattgccaatttcagggagtcaaatgtgattactaaaacctcaagaaatgtgttcttgaggaagtaattttcccataaaatcaaaacacctctatctcctatcaaaccttgaactgttataaatatcacactttatatttactattctaattgagcaagaatattgaagctcagatgataacaaatttagtttttatgatatgaggaaatatgcattattgtttttttacttctataataaggaatattttcaattgtacaactaaacaaacaattttaaaattattcaagagaagaaagaagggaatggacttcatattcctcagtttgtacaacacttcagctgagaaatcaaagaaaagctttatttcttctggagttttcaacattttcagaatcaaagtaattatcaggggatttccttcattaaggataagccagtggaaaaaattaaccttctatttcaaactacagacattcaaagtattatcgcatagatacacctttgcatg

SEQ ID NO: 335353 - DNA, 1000 bp, Homo Sapiens
attttccatattttagagtcagaaagaagcgcttggtaataaaaataatagagaattattttcttcgagcccgctctgcgctgcgccggcctccccgcgcccgggcccacggctgagtgcgcggcgtcagaggccccaagtccatctcactatttacagatatgttacaggccgggatggtcacagaggaaagcccagctctcagcatggccccacgtggtgaggagcccccaggctcctcccggctgtctcggacagagactgagaagcctgccgcgtcccgtgggggcctaggctgcggcgggctccacgggggggcaggagtgggccgtgatgtcgctgtgcttgtacgccgcctcgtccaggtccagcagcctccggttgacctccagtgtcatgcagccgcggtagaacgcggtgactggcgctgaagtcaccggcacatctggcaggccgccagcaaaggtgagcacggggctccgcaggtgcctctcgagcacggccagcctctcctgcagctgcgcggcgctcacctcgctctggcccctggtgccgtccacctccagggtggcctcaccgtccctcagcgagacggtgaccacgtgctcttggccgtcgcagaccttgatctccattagggccaaggccgtatgctccacggccaggaccaccagctgcttcttgagtttcttcgtggagtgatagtctaccagtgccacagagagaggcacggcacggaggtcgggggcccagagcgcaaacagcacgcctgtgtctgcggctgggcggatgtgagccacgacttctacttcccaggttgattcagtcccgacgtccagaggggtccgcatgtagtccaggctgtagaaggcgaagccgctcccggggtagaaagagcctctctccgtcaccgagaagcactgcatcctcgtgttcactttcaccgtttcctggatggtggtgtcttctccgttcagccagttccagctcctcatgcagc

SEQ ID NO: 335354 - DNA, 1000 bp, Homo Sapiens
tttttttttttttttttttttttttttttttttttttttttttttttaattttacttaaaatatgcaagcattttaataaaataaaaaagttaaaatcttttaatagttatggatttctttttcaacttattacttccccttggtttcttaaaaatgatgtaaaatcacatatctattactgcattccaatttaaaagatgtatgactcattttaaggcacaatgttttgtgtaatatgtaccaacaaatgaaatccatgaaaatacatttaggttttaaggtggattaaatagaattttgtttatcctaaatatttcgtcaataaggtatctttttttattttgtcagaattcagtatacagttacataaatataggtttccctttgtttaaaaatgctcactgtgtattactatctgatatttttgacaacacaagcacactttaaaacgagctgattttacaaattaatatattttgaactttatttctccacagagcctgtataattataacagatatatttctacttacaaagtttaaacaatatgtaatacaacctttttaaatctgtgataataccatctaaaattacaagaataagatggctttctttgaaagttacaaggaaggaaatttgaaatactacatacattagaatggtgaccatagcaggattcagcgtgcatatcattttattatcagaattatctgtagtatttgcagtttacactaactgaagagaattgtatggattatattatgtagtatgcttgtccttcatttgttactaagcaatatgttcactatacatatatacatcgttattagagcacagatattacatgatcatgctgccattcaaaattaaggtgccacagttttattacaatcaaatggcatccaaaatgcaatgttgctatgaaaattcaaaagttctcacagattggcatttatgaaaggagtaggtcacaatgaaatggaattttattttgtacaa

SEQ ID NO: 335355 - DNA, 1000 bp, Homo Sapiens
tttgccttttgtaagaacatgttttatgtatgattgaagtttttacaacactccggaaaagccatccgatgttagatttaaaaataaaatcgaaagcattttctgacatagtacacatgaaaaattggaaattccaatatcttcaatagaagttatagaaagtgtatgtcttcttggagtttgacacccacttaacacagcagaaaataaggtactatactgtaaacaaaaaagtacagtaaaggacaattgtaaatttacataagaatagttcataaacattttggtctttccataacagtttttatataaaatgaataaaaaaacctttagacagctgtcatcactcttgtttgaccacttttcacttatatgcacacagacatatttatatagcaatatattgatgcaccgttacatggatattaaactatgagtactgcttgtaactgagatgtgcattatccaatcaacattatccatagttgaaatactcttacattatgtattcttgtcatgttgtatctataaaaacatgaaaatataactttacattatttcaattatttacattagttcaagcttgacagagaaaaatcgataagctacaatttttagaagagtaggcccagaggtacaataaatagcattgattgtatatagtcatttctttttcacttttaaaaactcattttaagtacaatatggaaacaattagtctgcaatttggtcattctagcacttattattaaaacttaaaatgcacctccagcattcctgatgaggagaaatgcactaaaattatattatattaccttaggatctgtgattagggacagctaaatttagtgaagaatatcatgataccacatgcctccatgttcaatgcaagtgcttactgttaaaccttacatttttccttcccttctatgaaatacggtaagtaagaatgttttaaaagcactttgcaaaataccaagtgctacacaaaggctttctt

SEQ ID NO: 335356 - DNA, 1000 bp, Homo Sapiens
gttccggctcaatggtacaatctgagagggaacaggtgttgcaggaaggtagaagggcttctaccaagagtgttcactctgggctcaagtcacattcccacccagccaggcccaaagaggtggtggagggtccctctctgcccccgtctcccatttccaagtctcttcccctcttttcgtacctccagagctgcactcatggagtgcagctcatttctcttaaatgtcaagctcatttctcttaactgtctgctctgtagcagttgtaatcagttttggggggaagaagcctgctcgtctagcttcaggttaagtgagaagggatcaaagcataggaaacatccccctctctcacttaccctaccatacacgactccttacttcttcaaaggtccgttcgttcttccccaaaccttggccagtcgagagtctaaatgctcaaaagagctttgtagaatcttttcgtcccaagtgtgggcaaaagaatcatggctgtgaaattcggtttccctttagccttcctggaaggttcttggttcaaacaagttgaaacagttgccaaccactgaggacttgtttatgtaccttgctcttgcaggattgctcaccgcctttttttgtttagaccacagaatcttctttatcaagaattttcattctccttattccagaaggatgaagggagacacagccaaaattcaggtaatacatggccatctctgtctgtatataagccaaacaatcacactgcttggggatattgaaagaaacaataaaagagtcaaggttgccttctcttgaggcacctgactacacatgggtgcaagtgtgcatgaacacacatgcacgcacaatccacctgctcttgtccccaaggcaccgggggacactatcataacgtactttccagtttgttcaagaatccactctgccaccaatgaccttgggttctgttcaccaccactatcgagtctcatggggttgaagcaagcatttttgg

SEQ ID NO: 335357 - DNA, 1000 bp, Homo Sapiens
tggaaaaccttgaaggttttattctcagtatctttacattaatacagatgctttttattttgtgctgagaaaatcaatctgttacacataatgtaactttaatatacaacatagaaactcatcctaaattagttacaacaaggacctacaaaaaacttcataggaaaaaaggttacataatattgccaccgtatttttatttttttcttttgtttttttttttttgttttttttttttgttttttagtagactgaccatgtcagaccctgtcaccaatgctcagctctgtaaacaatggttatttccatgttctgggggaattgttaataataggggcactagactcagcctagaaagttctagcacatcactatatacagtcctcaaaaataatttatcgtactgtttctaaaaaaaggtactagggttgttcttttgctctgtttccatattctggagctgcacgtgagcacttttgtctaacagtctaaaaacacaagaactgaactgcaattcacaatcacagagatgaggtggtggagtcgaggacttcccgcccattgcacaccgttggcacatacgtgcttgcagaggactgagagtatgtggtcccagttccactgacactgaacctgttgaggtgcagtctgtgtgtgacaacattcttctggggttgaaacaggatgatgtgaaccttgggtgcaaacaaacagcccaagaccacaaagccactcaggctgacagagatgcacatggttgtcgtctgcactctgtagtcacttgatgtcacataaaatatagggaggaaggccaaccagatgatgcacgtggtgtacatggtaaaacctatgaacttagcttcgttgaaattttctgggcacttccgcgttttgaaggcgtacacagtgcataagatcaccaggatcacatcgtaggtaagagagatcaacatgctggaatctttgacattgcattttaggatgactgtttcccgcttct

SEQ ID NO: 335358 - DNA, 1000 bp, Homo Sapiens
gggaaaagttaaatttattgaacaggaagtaacttgaattaaagtcagttacctggactctttacagtaagcaatgaatgtaataaattaaagggaaatttctaaagagcaaaaaggataagaaatgggacaaagctataataaatgtgtcagaagattcacacaagtgagacagcctaagaaaatggttactatacagaagctcttctgtagaagtctcaacacagtggaccacaggtgagaccttataaataggtggttaaagcttacatcagaacgtaatcttactctgctttagagctctcatcccagagaggaacactgcaattttaattgtgtaaacatggaataagcctccaacccagaactccattttcactggaacatataattcatacagataattcaagggcaacaaatgggacaaacttcggtgcaggtcagctctcactcgacataagagaaaccacactggaagaatgcctatataattccacacatagaagaaaacccacaaaactttattcaggggtccaaataaattggacctcaaagaattcaaacccatgcatgcaaaaaaacaggaaaatctttagggagctgtcaacccccactgaacaccacagaaatgatcaaagaggctaggtgcgatggctcacgtttgtaatccgaacactttgggaggtggaggcaggaggatcgctcgagctcagaagttcgagaccagcctgggcaacatagtgagacctcgtctctacaaaaaataaaacattagctgggtatggtcgtgcgcaccagctactcaggaggctgaagcgggaggattgcttgagcccaggtcgaaacttcagtgagctatgatcgtgccactgcactccagcctaagaaattgagcaagaccctatctcgaaaaaataaaataataacataaagaaatgatcacaggcagaaactgtatgcacacaccgagtgtggaaaagccctcttgtggaagtcagtt

SEQ ID NO: 335359 - DNA, 1000 bp, Homo Sapiens
ctcgagttttttttttttttttttgcaaaacattcctttattattagaaataaattatttgtataaaaaattgcatgcatcaatcattgcatttatttttagcacaacccagggcttcaatctggtcagccattacaagaaacagactcattgtcttatacaagttaaacaatgtgggacaggaacgggagttctcacaatcacagaaaaatacaagaataacatcagacattatttatttcaacagcatttttttcacgagctaacattagttttccttttgtgatttgttttaactgctcatgaataagcaatactttagcttgacactcattggttttattgtataaaacgggtttcttcactccccgtttattgatacttttggctcatggctaatttttgttccttacaagactgactattgatttgattgattgtagtctacggagatctccaggagtgaatttttgcggtctcatgttcatcatttaagatcatataccacgtctcttcagattgtgccatttccctgtttcagattgaatgattgctgtaactgatatatgttgtcttggtagaggaagtgttggtttcaagactctcacagagttcacttttcacctcgccatttggtctgtcatttcctttttggatcagtttgctttgcatggtggcagctgtcaccacagccttgaagctcctcttgcgtttttgaacattctgttctggatgaaaaattataatataaaccttgggcatatagagcatgcccagagatactgaagcacttaaactcatggagacagtaagtgttgttgtctggatgtacatcttttctgctgactgggctgtaccaaaaaagatggggatgaaagctaaccaaatgatgcaggtggtatacatggtaaatccaataggtttggcttcattgaaagtctctgggacacctctcgttttattggcataaacagtacaagtgaccatcaagaggatactg

SEQ ID NO: 335360 - DNA, 1000 bp, Homo Sapiens
tttttttttttttgtggttgaggctttacttccatcaggtaggcctaaggcagggaccatgctgcaggagcagggcctgtaaaccagtcaatgctgctccttcatgcaacacggggacagctcggggctgagctccacaggcgaggggccaggcaggccctttaaagcagacacaaccactaacaggaaggaaggtcaggctggctttagtgcagggaagggtaatgatgggaggggatgttcacgaaggatagtgggtagctgaggcttcaaagggcctgcatgggacaggggtttagggggagtgaagagggacaatgaagtcttgggagtaaagatgggaataaacaggagaaaggaacgaggaggcaggtgctgggatgcagagtccagctgcgctgcacagcctgggcagcaggctgagtatgggctcctcactcccacctcctggccttcaaggccctacttgttgccccagacagccatctttgtgaacacaggtcttgggaggaagcggctggacttcatgtaggcagagatcttctccaagccctcaaatcgggagatgaagtccttcaggtttgggaaggcatccaggcagctgggctcaaatacttggtttctctcaaggacatcataagcgatgaaatccacaaaggtgatcttgtccccaagaaaccatggctgcttccccagaaactgtgagtagagcttcagcatttcagggagtgcctgcaggtattctggtttcagtttctcaaaatctgggtcatagcagagtttggccagctgcatacggctgtccataaactggttctccaaaatgtcttcgcgaatctgctccttttctgattccccgcacaggttgtgcttgcgggcaatgtaccgcaggatggcgttgctctgggtgatcttgtgagtcccatcaatcaagtagggcagattgggaaagtccaggcccagcttgaatttttcattcagccactggcttctgtcataa

SEQ ID NO: 335361 - DNA, 1000 bp, Homo Sapiens; identical to SEQ ID NO: 157353

SEQ ID NO: 335362 - DNA, 1000 bp, Homo Sapiens
tttttttttttttttttttttttttgtggctgaggctttattttgatcaggtaggcctaaggcaggggccatgctgcaggagcagggcctgtaaaccagtcaatgctgtcatgcaacacggggacagctcagggctgagctccacaggcgaggggccaggtaggcccttcaaagcagatacaaccactaacaggaaggaaggtcaggctggctttagtgcagggaagggtagtgttgggagggggatgttcatgaaggaaagtgggtagctgaggcttcaaagggcctgcatgggacaggggtttaggggaagtgaagaggcccaataaagtcttgggggtaaagatgggaataaacaggagaaaggaacgaggaggcaggtgctgggatgcagagtccagctgcgctgcacagcctgggcagcaggctgagtatgggctcctcactcccacctcctggccttcaaggcattacttgttgccccagacagccacccttgtgtacagaggttttgggaggaagcggctggacttcatgtaggcagagatcttctccaagccctcaaagcgggagatgaagtccttcagatttgggaaggcgtccaagcagttgggctcaaatatacggtggaggtcaaggacatcataggcgaggaaatctacaaaggtgatcttgtctccaacaaaccatggcctcttccccaggaactgtgagaagtgctgcatcattgtaggaagttcctccaagtattctggcttcagtttctcaaagtcagggctgtagcagactctggccagctgattggagacgtccatagcctggttctccaaaatgtccacacgaatcttctcctcttctgtctccccacacaggttgtgcttgcgggcaatgtagcacaggatggcgttgctctgggtgatcttgtgagccccatcaatcaagtagggcagattgggaaagtccaggcccagcttgaatttttcattcagccactggcttc

SEQ ID NO: 335363 - DNA, 737 bp, Homo Sapiens
agctctcttagaaattttattggtcctggagaaaggaaggcaaactctgcctcccgctcagagtccccccaaccctcactgtttcccgttgccattgatggggaggttcacgtactcaggggaggccaggaaggccttgagcttgggccgggcgctgaggcgccccacatatgctgagagcagggggaacgcatccaggcagccaggggctaggacctcatggatcagcagcaagtccagcaggttgtagtcagcgaaggagatctggtctcccacaatgaaggtcttgcctccctggttctgggacagcagggtctcaaaaggcttcagttgcccgggcagtgccttcacatagtcatccttgcccgcctcatagttggtgtagatgagggagatgtatttgcagcggaggtcctccacgccgtcattcaccatgtccaccagggctgcctcctgctggtccttcccatagagcccaagggtgcggcccaggtgacgcaggatggtattggactggtacagggtgaggtctccgtcctggaacttggggagctgcccgtataggcaggaggctttgagtgagccctcctgccacgtctccacggtcaccacctcctccttccagctctggccctgatctgccagcagcatgcgcagggccgcgcagcggcctcgaactgggaaatagaccacggtgtagggcggcatggtggcgaagactgcggcggcgaaactcc

SEQ ID NO: 335364 - DNA, 1000 bp, Homo Sapiens
tcaaagtgtttggaatctttattctgtttaaaacactgatgacatttgccaatttttgagtgttcttcatgttactgatttgtaggagctctttatatattgcagatttagtctcttactggttatgtatgctgcacctgaggagtagcagcactgccaaggacactgagtgtcttgtctgtgcagagcttcacatgaagctggagagaagggactggggcaagagggaaagataaaaaggggcaagtaagtaacagaatgaatccttgttgctaatctcctggcccccatcccagacccttcaggggatcctggcgattcgaagcagcatagcctgataggcctctggtgagggtgttgggagggttttcttggccgcctgttccaggatgctcaagatgatgctgtgggcctcctggcatagctcagcacccaggaaagcctccactcgtccacgccatgctgccagtcgtggccgtccctcaaacagttcgtagccgagagccaccggctgcatcagctcctccagggccatgagatcagccagtgtcacctgctggccagcgaggaagggcctgtcccccaggaacttgtcctccagccattgcagggcctggtccatggcagtcctgttgcgttccaccttctcctcgggcacctggaccccaatgagtggccccaacacctggacccacaggggtataccaaaggtgccacggatgcagtcggcatgccagcccaggtactcatgaacacgggcacgagcctgcaggtcagatggataccagtggtccggcgtctggtacttacagctcaggtaaatcaggatggccgagctttcggtcaagatgaaatcaccatccttgagcgtcggcagtttccccaggctgttgatctgcaagaactccttgctcttgtgctgccctttgaccaaatccacggtgcgcagctctaaggggatgccattcttcttggcgaagatgtagacggcgcggctggg

SEQ ID NO: 335365 - DNA, 1000 bp, Homo Sapiens
tttttttttttttttttttttttttttttttttgacgacactatcacaaacacactttaataaccatggcattccaccaggatatgagattgcaggtgactccatcagtttgtacaattgactacaattatctgatatatgtacaaggtgctgaattttgagtacaggtagtaagtgctggttatataatagaaatactcccacaaaagtagctttttaaggtttttttttttttcttgaagagctgaagtactgaagtgagtacattttgtcatgttaaacaggagaaagattgtgacttggctcctgaaattttaatactgcttgttagccatctacaatccctaaagtgctttcagaggctctacacatcttcaatgagtcaaaccccaaagacttataaataggtatataggttgctaatctattcctgatgctttgcctaaaaaattggcattgccatcttccacatctttcttttggaagcatggttttgagtttgttccttgttggtaagcatccagaaaatggcagattccggggatttcactagggaagtttggtggaagttcctcccttgatcgaggggtaaacacgaaaccaggacagtctttgagtaatctgtaagttgttgggctgacattgatttttcgtggtacactgcaggactcaaatttgttagccagagtgacattgtttccaaaaagacagtaacggggcattttaactccaacgacgccagcaaaaactgatccagagtgcagtccaattcgcatcttgataggttctccatggggagacataacttcatcagagagctccatcatcttcagggccatcagcgctatctgaacagcatgagtatcactctctttgtgtaatcccccagctacacaataggcatcgccaatggtctccaccttgtagacatccagctctccacactgctggtcgaagcgagtgtacagtgcattgagcatggtgatgacctgcagcggtg

SEQ ID NO: 335366 - DNA, 1000 bp, Homo Sapiens
tggagtttctaatccaacagttattttattaggatgtcagccctgggtccagagtgagagatagggacaggggacagcccagcgaggctgggtcgggggtcaccccaggatgttccaaccacaggggcagcatctcctccactccacatgctggccaagggcacagagctgccgtatcgcctgccaagggggtggctcaatgctgctgccctggtcctgtatgggcccggggtgccgagaacagacagcaagcctcaggcgccggtcctttgagctttcttgatttcctcagagagcgcctccttcagctctgcgtaggcctggtccaggctgtcgttaatgatgaccacatcaaacaggccgggctccttgctgctctccatgtcggcctgggcagcagccagccgcttcaccaggctctcctcggtttcagtgttgcgctgccgcagccgctgctccagcacgtgcagtgaaggcggctgcacagagatgtagatgggccgcagatcggtggccttgatgttccgcacaccctgcaggtccacgtccagcacacagatgcggttcatggcctgcacggcctgcaccgccaccttgctcgtgccatacaggttccccgagaactcggcatgctcgatgaagtcgccggctgctatgtcacgctgcatcacctccctggttacaaagtagtaatctttgccgttctcctcgccgggcctcgggttcctcgtggtatgggacacgctgaagccaaagatgccgctgtgctcctggagcagcctcttcagcagggtgctcttcccagctcccgaaggcccgctcagcaccacaggcctggggcccgacatgcctcctgaggaaatcgggctcttccagagccacagaggagtgaaggccccagcccttcacgatgctgcgcggctatgtttgggtctgtccatcagggagaaagaaaaaccggccgagtcttgcacagggtcctcgacagcaaccccaggta

SEQ ID NO: 335367 - DNA, 1000 bp, Homo Sapiens; identical to SEQ ID NO: 157354

SEQ ID NO: 335368 - DNA, 1000 bp, Homo Sapiens
ttttttttttttttttttttttttttttttttttttttttttttttttttttttttgccatataaccatatgaatttatttagagctacctatagaaggtaagatttaaagtaagtttttaacttatgtaactcacatttttcaattctacttgatatttgattttaaatgtctacataatttattgatttgaaaaaattaattcaaagcagaatgtatattgaaggctactagtccaaaaaattgtccataaatgaaaaggttatactatttacacgacagaggaaaaatacagaagataagtgatactgggcaaaccgacatcatttactgattagtcactgccagaacatacaaacaagcttatgcctgattacagtttatctctatcagatgttcattgatgttcactactttgtctttaatacattatatgaaaatctagaccagagttattaatattcaaattactccttaaaagtgaaggcaattgttttctatagcagaattaaaatagggcaagatatgacaacattccagtacttctaggaaatccatatcaatctcacatggaaagatttggcttcaagctgggaggtctggagttagcagacaggatgagtcacttatacgatatttttttgagaaaacgactgatttggaaatcttgtgctttcactgttactagtgttaattactgcttgcaaagagttttacccaaagcaggtgtatttaatgattcttaagatagctgacaacaaaaaaagcaaaacctcacagctatttttatgtctgtgttgttatgagtttcagcatgggtacaaaaacatttacagttgtggctgtggcaaaattggttttatttccttgatagctatacatagaagactaagtaatttatggagatcagaataaaaaagttttattgaagggtaggcacttttgaaatttggacaagtcaataaagaagtaatttgaaaaaaatattacatttgcattt

SEQ ID NO: 335369 - DNA, 1000 bp, Homo Sapiens
gagctcacaatcagttctctccactagttgccttgattgttcaaggtaaataatggacacttagccacttgtctgtgtgaagtgctcttttcgagtgttctttggtcctgagggaccctgaggagcaactctctcacagggaggtcttctgaacaatggtttctgacctggaaacagaccagctgcagcttctgaaaccgggattaaagtctcctaaactccccccgttttgaacaagaagtttgggggatgcaaagcagagtgagaatgaagctttttacaaaaagtaaatccttttgaaaagacatttacaaatgtgatgagaaaccaaagagaaagcccatatcaaactctgttaacatttgatggtacatttcaaaacatcttcttagtccaagagactcagaaaggtagaaataaataaatcacatagagtatgcttttaaacatcatattttaggcaggtaaaaatatctcactttgacagatcatgcaaagaggaacacaaaatacaaaacatcagcttgtacaggcactccatgtgctatacatattgtggtttagcaccaagctttaaaatataaatcacaaccagattgcaacataaacaccaagtaaaactacatgttcctatgtctttactagtttttgcttaccaggtatggctatgaaagattacaatgactttttgacaaacacaacagaactcacagataaaaatgcacttggttccttcaaagcgtccccttccgtaggtgcacgggaactccatgtcagctgttcgtctactcaaacatatcattttgagctgccaccactcttgggaataccgtgtatgtgtatctgtgcacacttaagagggcacattgttaaaatattgtatttttttttttgagacagagtcttgctctgttgcccaggctggagtgcagtggcgtgatcttggctcacggcaacctccacctcccgggttcaagcgattctcgtgcctcggcctccc

SEQ ID NO: 335370 - DNA, 1000 bp, Homo Sapiens
tttttttttttttttttttttttggccatgatgtctcatgctttttatttgataagactcaacatctctaatgagttttcagatctctaatgagaaagagatgttaaaaaaaaattcagaaaaaaaattcagaatggtgtcccactcaaagcttgcggtgggtggggggtgggcgtctaaagccggtcaatctacctcaaaggggtgatcatgggtttcaacttcagaatgtgaagatggcgcaggcatattggggaagaaggaagggtacagggtagtcaatctggtcccaaccatcctacccccgctacccctaacttctgaatctctctccaagtcactctatatcatcggcactgcaaatactgtctttctcttcacggacaactgggagagatttaatctaagaaagactcagtggaagaaacgcatggatattattttccaatcaaggtgccacacagaatggagacccatcctggctccaaattctctttcaattcaggtcattaatcttattcaccctcctttaagctccatatagatctcaggtagaccagagagccttccctctgagtctggggtcttttctataatcaaacagtttctcacctgaactgtatcaaccaggaatcttgtaggtcacacacttcttccaacaaagaggaactgtgaaaacattatgttggccaggcacagtggctcatgcctgtaatcccagcactttgggatgctgaggcgggcggatcacgaggtcaagagatcgagaccaccctggccaacatgatgaaaccccgtctttattaaaaatacaaaaattagctgggcctggtgacacacgtttgtagtcccagctactctggaggctgaggcagaatctcttgaacccgggatgcggaggttgcagtgagctgagattgtgccactacactccagcctggcgagagggcaagactccgtctcaaaaaaaaaaaaaaagaaagaaaatattatgctaagt

SEQ ID NO: 335371 - DNA, 1000 bp, Homo Sapiens
tttttttttttttttttttttttcaacatttaataaatttaataaattaataggaagtctcataaaacctgtagtggataacatacaggaattaggaataagacaacactttgcaaccattcacaaaaaataccatttgacaaaggagaagaattacagaaaataatataaggcagtctgttgcacgtgtcttacacagatatacatatataataatacatcaaaatgatttgtttgatggtaaattcatcacctttacaattatcacatggacttctttaaaacatttataaaagtttgtagatttaacattgaagggtaagatttatatccaaatgagtatatttgtttcataccaaactgcacagaacttacgaatagcacacaacttgaggataattaccaggttgggtactattaagtactactacttgatgacacaagaatcattaacaaatgtgctgtgagctattatcattcaacttattgctagtacttttggaaatctgtgatttatattttgtttctttgtaaaacatgtgctatgagcttgccctgatagttcagaaatcagatgtttccagttttttctaacactcacactacttcagatctgaatgcatggtctttttaaggattgctgaaggattttcttcagtccttcttctatcagctattctgccctacattaatacaaatcgatggattcatgcaacatacatggcatacatgcaggacaccatctgtatgtgcagaactcatgctaaatgcatgctgtgtttcttcagccattttcatttcggtaagaattaaatcatctcattctgcttcatataattattttaacatgcacttcaacagacctaacaggcaaggcaggtagacttgactttcatgtaatatttgggcatgctcaagcaaatgactgatgtttggccagtgttgcaaatcaaatagagactgtatgagtttcctcaaatacagcagctcttccactgcc

SEQ ID NO: 335372 - DNA, 1000 bp, Homo Sapiens; identical to SEQ ID NO: 157355

SEQ ID NO: 335373 - DNA, 1000 bp, Homo Sapiens; identical to SEQ ID NO: 157356

SEQ ID NO: 335374 - DNA, 1000 bp, Homo Sapiens
tttaacagtacaaagtttgaaaattttattggaaaataagtacagtctattgatccgtgatgcatgctgtacatgaatttggtgctttaatatacaaaaaatttggcttctgctgcaaaattatataaacaggttaaaaaaaactccttcatcaactagtacaaacataatttatcaaaaatgtcatttaaaaaatggctcaataccttttattgcaaataagaaaggcaagagagggaaaatataaattgtgctaaaccagttttaacaaccggtaattaaatattttgttgcatttgcaaactcttcttcaacacttagggcatctttaaaaaaatgccataaaaaaactgcaagaaaatctaattaatgtggaaggcattaaaagttttttgttttgttttagtggggacaataagtcaaaggaagttcacggggaactaggaatgtgtcttcttcctccagaattcaacccttggaagatggggaataactttgcacttttctgtttggatcttcctccacccacgcttatccattgattcttgtccctccttaaattccagctgccattctacttgtaattcttggtcatcatcacccccactctctggccaattttgtcactaacctaagtttccaaattggcttgctttcttagcactatgcatgctgacacattttctggatgacagactaaaataatctgcaaaattaaatttgtaaaacatctaataggcttttcaagacgtgacatccctgctccatgggcttctggctgtagtctgtgtgtcaaatgaaagctaggccctgtctgttggaacagcagctccagaacagcactgttccttcaagcaggcaaagcgggcccaggagaaagcaggtggaaaggcaagagtcagagacttaaactcaatgtgtttttgtttaggaggaaaattattattccaaataaaagttggtgttcacccatattaaatacgagaaatataaaaaccaa

SEQ ID NO: 335375 - DNA, 1000 bp, Homo Sapiens; identical to SEQ ID NO: 246391

SEQ ID NO: 335376 - DNA, 1000 bp, Homo Sapiens
tttttttttttttttttttttttttttttttttttttttgttaatacatagctcatttattttatcaaaggagaaatgtattccaaagtaagcaatttgtaatgctgtatgaaaatattttatatacagatatagtgtcaaaattaaatacagatatttcattaattaaaaggtaaacatatattattatcttaaaaatatatctcccaaattgcaaacttatttagacaagttataatctatataaatgacaatgtaactcagtactaaggtttagcatccttagactaggtgaatttatttttattttattttatttttttgaaattgtccttttttcatgtcaaaacatttgctataccatttattgaaggcactgtgttacacattcatgattaattaaatctcttgaaatctcttttaggtatcttggaccttgttatgctgttgcttacttaaggtttatgactctcttattctcaccggcattatccatatatcattgttaactctaaaacatctccagcacagaagaagacaattttcactcttaatacagtataatagattcatagtgagccataaaattattttgacagtaaagcaatgtcaattttgaatctttgaaaccattatatacttcatagatttaatgtcttgaaatatttaaacaggtttgagaagtattattgcaactgataccttacatggattgtcttacaaaaatcagtacagaattatactgattgataaatgttcacatatataagaaatagtttgttgactggagcattcagtttccattgtttgtattcatcttctagtaatacaatatgcatttctcaaatgccctaatccgttttgaccatggtgcattcagtaacttctaggaagcattccactctgaaaaactgcataagcagatagattcttggaggatgcagctaaagttcgtgtttctatattgccactccatatttttcagtgttctttagtgccc

SEQ ID NO: 335377 - DNA, 1000 bp, Homo Sapiens; identical to SEQ ID NO: 157357

SEQ ID NO: 335378 - DNA, 1000 bp, Homo Sapiens; identical to SEQ ID NO: 246392

SEQ ID NO: 335379 - DNA, 1000 bp, Homo Sapiens
tgcataaagtagttctagcaatctgtggaaaggtctaccttttgtttttccctgtgtttataagttacatttttaaaagtacttgtggatcctctgtagagtggattggttcccgtttgccacttggcttttgatcgttctgcttcaaatttggcaacttctttacgatcatgaaatgacaccagtagcttccagatgcacagtaggacaaccccgatgagaagaatagccagggaaacccctaacatgatcatgggaatgtttggaggcttcggacaatctttttcattgatgctgtgaatgatggttttcccctcattatctgtagttattaggaatgtaataagacattcattttctccttgcagagagcaggaaacagaaccatcctttgagaaatcttcttcttcactgatggtcgcaccagctagtttgcacttgtccacacattcttctcgggcttggccagctgctgacaggtggcactcaatgcagctccgtttagagttacaggggtcaccacaggtaggacatcgttcacaggttggtcctgaggctccagggtttgtgcaaacacacttgccacaaacacagtccccgcgcccgctgcagagcactccatcttcagagacgcaggagtccgtgctggtggtgcagttgcagtactcgccagtccagccgctcctgcacacacattcaccacagtcacagtcgccgttacctccgcagagcagccctttgtgtctcacgcaggagaaattgtcacactggcaataaggcccataaatgtttccatagggagacaagtggcagatacactgcccacagtagcagtcaccccttccgctgcaggagggatgatctggggcctccttgcaggaatctgtgctcagcatgtcctcgccacactcacagcgaggccccatgtggccagggtggcaggcacacaccccacactggaaagagccgttcccgtggtgacatttggagctgttcactt

SEQ ID NO: 335380 - DNA, 1000 bp, Homo Sapiens
ttttttttttttttttttctgaggtaagactttattgtatacttgggtggggtagcccagatggatgcaaggttgcaggcatgggaagcagccctcttgggtgtcactctgaaaatgaagtagggtggtggccgcacctcgccagtgaattagtcccctaccaaggtcttacagacccacccttcctctcaccctccagttcccactgtcctccaaggagaagagccttgggtaagtgtccctccctccttcagagagtgggactgtctgcctcttgaaagcgaggattgatggtggtcgtgatggcacttttgtagagaggattactgtcctgcttccagttgagttgttgctgctccttctcaaagcgactgtattcccggcggtcatagatttccaccgagagccggtaagccaggaccagccccagccccactgccacgatgccccctacgcagcccagcacaatggcctgcgtgtggtctgctcccttttcttggggtctcactctgagcacgaccgtgcctctggcgtcatcctccaccaagaagaagaacagctggttgtccagggtccgctctttgcaccagccatcatccaagataggggccaaggccagggtcacattggtatgggcacaagctgtactgcagttggtggccagtgggccagtcctgaaggccccacactctgcacagtcccggtgtctctcgcatggtgtcttgcagcctgggcattggtcgcatagagcaccatagtagccgtccaagcactggcagcggttgcatttgcagcgtccatgcccactgcagagccctccctcgggactgatgcaactgtccatgtccccactgcattcgcatgctctgcccgtgcggttggcatgacagtgacatactccacattggcagcgaccaaagcctccgcagaggatgccctcatgtcgctcacagctggcatcgtcacactcgcacagatgcccagagctctgtccactgca

SEQ ID NO: 335381 - DNA, 1000 bp, Homo Sapiens
gatctttcaccattttatttcacaacacacagtcatggagatctcagttgcgacctcgcattgtcagcccctggttacggcgtgctgaaagcgggcttcagcagacattgtcctcagcagctctgagtgcactgtgtctttcgtccttaggatgcaaagaagatgccactctccatgctttgcagatgaggaccccccaggctcagaatttgacttgaactcaggttgtaaaaattgcctagactctggactgcttctcatgctggtgactgcatctgagcttttccatcactgctctgtgttttctctaaaatccagtccatgtactcagcgactttggtgtagacaccaggttgctccctgcgggcacagccttcaccccagcttgtgatgcccaccaaacgccacattccgttgtgtttgcaaactaagggaccacctgaatctcccttacaagcatcttttcccccttctttatagccagcacagaccatccgttgggttattttataatcttgatatcttttctggcattcttcatttgttaccaaaggaatatttaccttttgtagaatattttggatttcacctttctccttcgagaagccccatccggttacccaacagttggtataaattgtgcttgtgtcacctttggaaggtaggcatattggtttttggaattcagtgtaattcaaaggagcctggagttttatcaaggcgatatcatgattcccttctgagactttatagttttggtgaataataatctcttttatttgtgagaaaggtgtatcttttgtaatgtctgacagatttaaaatgccactatagatgcgccaaacatcctgcaggggaagcccatcaaagcagtgggcagcagtgaggacccactggtgtcctatgagtgaccctccacacaggtgcctctgagctgtcagcttcacctgcaggctcacctgccagggccactctccccaagaagagtttgttcctccaa

SEQ ID NO: 335382 - DNA, 1000 bp, Homo Sapiens
tttttagagttagaacatcaagactgatctttatttcacccagaggcagagtgataaaatggcattcttctctatttaaattctatcccatctttcttcttgtccttcctctcaaggttgctggcagaggtggttggggctatgtgcctggagtgaagattctgcccattggtcaagagacctccctctcagatgctggctctgcccctgcctttgggggtcgacccttgtactcgcaggaccttaggtgactagttgtttcttcttttatttcccctattcgtgatgatcggaaaggtgaaaaacctggaggccttttcatcagtgagatcattcccagtggttgacagttgacagtagggtaaatttttttctcccagggtaccacataaacttcagcgttgcaatctaggctttggccaagttttttggtctcacagctttcggtcaactcttcattactttccttggaacatgtggtttccctggccacgaagtcaataaaatatttcttgccagccaccacctgtactcttgcttttttcacattgtcaatcttgaaatagaaagttgcgttattctctgcattaagctttgtgatggtgtgagtcagtgtctcctccagctctgggctgttggtgggtatatctctggggcagcccacgcaaatcttggtaggtggttgtacaaaatccttccctggataaatgtcacagttctgtgagaaggaagcaattcgtagctgaatatcgatgtatgcattatctgtacattcaccggtatcaccattccaaagggacttgcagtctggagttaagaacagaaaattctctttggaacaattcgtttgcacaattgagtaggtaattcgaaagttcaatccagccaccacctgtctttgggcccgttttacttcattaagcatgaagagggaggaatgttgagtgttgttgttaaagtactgaatgccgtgtctcagaatgggctccaggtctgggct

SEQ ID NO: 335383 - DNA, 1000 bp, Homo Sapiens
gaagaagtagctcatctttatttcagtaaaatcaccaacaaaacaataaaaagccaaaactaaaaagacagttttaattgtgagctgaagttttatatttctttacgaattccatttaaaaaagagaaatctctaaaatcatcaatacgcaggtctttaatccacttttaagtctttccccaccagcattgcagtcacgggatgcatgcttgctttgtgctcttggtaggttcggacagcttgatcatgggatttgtcaaaggcagcaagatccttgaataagggccgggtaaacttcattcttccttgttcagttgccatctttagcgccaaaggaattgcgtcctcccacttggattgaatgcagagccgcagccatctgaatcgtatttcagaattgttaatggcattgaagttgtacacctcttgcattcgctttatgtgccccaatggaagaggtgccctctggagcgtctgtgctaaaaactcattcaattgatgagaagagagatccttcaggtctgtggcattgaatgaatttaaatcatcttctttggcagtaatccatctttgacttaaggcaatacaagcatttgtcagagtcatatcataattgggctttatgggaggcagtccaggagagtagagccaggcattccaatcaacttgattgagaacatcaaccttatctttaaaataggaatacaggaaatccttccagtcatcagtagttatgctcttataggaaaacttctcaacataagcttttaagaatcctaggaaaatctctggtcctccaagcagttgttcaaggtaaaaaagtaaagcaaagcccttctcatagggaactgaagaataagctacatcagggtctatatctgtcagatcaaccacaagtttggtgaaaggatgtgtctccccaaatgtctttaccgaattctgtagttctccccatcctcccagagcattaaaatgtctgaacttttcaccaaacaatcgt

SEQ ID NO: 335384 - DNA, 1000 bp, Homo Sapiens
cttttaaagtcaccattttattagcattgtacaccagaaaaaattaaattctcagctgtacatttaacaaaatatgtgcaagactgtcatggtgaaaactacaaaacaatgataaaagaaattcaagaaaacaaataaatacaggggtatactatattcatgaattgggagaatcaatatcattattaagtctcctcagattgatctatagattcacagaaatcccaattcaaaccctatcaggactatttgtagaaatagacacactgatgataaaatttacatagaaacacaaaagaagcagaatagccaaaaattattggggaaaaaaatgtagttgaaggattcccattactcctttaaagatatactataatgcaacagtgactagggcagtgtggtattggtccaacatggaatagatagaaaatccagaaatttatccacccaaatttcaacaattgagtttctacaaacctgcaagggcaagttaaagcaaaaagggattttcttttcttttctttctttctttcctttttttttttttttttgagagagagaatctagctctttcacccaggctggagtgcagtggcacaatctcggctcactgaaacctctgactcctgggttcaagcgattctcctgcctcagccatccaagcagctgtgaatacaggcacacaccaccacgcctggctaatttttctatttttaatagagacgtggtttcaccatattggccaggctggtctcaaactcctgacctcatgatctgcccaccttgacctcctaaagtgctgggattacaggtgtgagctaccgtgccctgccaaggatattcttttcaaaaaaattgtgtgaaacaattggatatccatatacaagaaaacagttaaaccacagttcacaccccacacaaaatttaactaaatggagattatggaattacatgtaaactctgaaactataaaacttttaaaagaaaatgtaggagaaaa

SEQ ID NO: 335385 - DNA, 1000 bp, Homo Sapiens; identical to SEQ ID NO: 157362

SEQ ID NO: 335386 - DNA, 976 bp, Homo Sapiens; identical to SEQ ID NO: 157363

SEQ ID NO: 335387 - DNA, 1000 bp, Homo Sapiens; identical to SEQ ID NO: 157364

SEQ ID NO: 335388 - DNA, 1000 bp, Homo Sapiens
ttttttttttttttttttttttttttttttttttttttttttttttttttttttttttttttttttttttttttttttttttttttttttttttttttttttttttttttttttttcattttcccaactttttaattgcaacataaagcctctacataaaaggtattttattaatgaattgacataatgaattggataagatatatgttaattgaatcattaattggattctaataatttactaatacaacatgtaacacagtagcatatacatttcttacagtgtaataattcaccaagagggagggtaaatctttaaccacagttttctattagcatcttaagcaaagtgactgctacttaaaagacaaaaaggttatttttgaacaatttgcctagtctaacagaaaaatgaatcatttgattatatattacagatatacattactttttgttcgcttcttaaagtcttacacctaatctaacatattgttttcattctttttcagtattccagaagtgcagtgcacttaaaaaccagtcctttatatctatcatggaaggaatttaataggagctataatatgaattttaaatatatccacaaagtaaagctctccagttcataaaattaatgttgtaactatatatcatatgcatgttgaagttttttgctttaaaaatatattcacaaattctgtcatatttacaaaaatatgactaatgaaactttaatagcatctaaagacgtatgactattttaacatctcagttgttattttttatgaacatagaaggtttttaagcatctttggttgggtactattgaaataacaattttattcataatataattaaataaaaaatactgtagcatctatgttctacaatttatagaaacaatttttatgtatatattcatattatataaaaatatagctaattattttgaaaagaagacaaataacttatgtgaaactggtttgaaatacaacatttg

SEQ ID NO: 335389 - DNA, 1000 bp, Homo Sapiens
gactgttgtgattttcagcaggtacagttttgattttattgcaaggcacacaatcgtatatacaatgcataattatcatcttttaaagtacaagataaaaatcatatacattatagtaaagaacatatgagtatattcttgtttcagagaagaaaattgccttaaggaagctgggttataccgtttttggatgtgattttcgtatttatactgaatcatccgaacagctcttggttagaaaataaatctcattgataggacacacaacctttcacagctttcactttacaatgttccaatttaaagtcagccagtgtgctccctgaatttgcatgagtcatcgtatttcatcccaggactagatgaaacacctataaattgtctgacaatagttatacacgtttaagaactgtatttcttagtaatatatcacagaatagaaccattttcttaagattttatgtgactctttattgattttttttctccaagctatttttccaaatgatgtattatttttggtattaagcctagagttttgacttaaactcgaaggatgctcttagattggtaactactctgagatactaagagtgtttccactctcctcccagttagagtggggggtttcctcctcagtgctgcccctgcatggctggttcatttctctgtgccttctctgacccctcgttaggacctgtcttccagaccttcttaccagggtggaaagaatagggttcatgtagagaatggatctgaaggttaaacacatggagttctagtctcaaagagacacaacagacagtgtcctccttgttgaggtcagagaataggaacatcaagaaatgagagatatcagagagccagaggggtttggacaaatgcattgcctggaacaatgaataaatggcaatgtggtccctgcttcacagcaggacatcaggacaaacagaaagcgtgtacacactttgacaaagaaatacatttgtgcaagtggtat

SEQ ID NO: 335390 - DNA, 1000 bp, Homo Sapiens
tttgtttatttttattttttaaagttcattggtttttagtacattctcaaaatcgtgcacaatcaccactaatttcagaacattttcatcacccgaaaaagaaaccccaaacccttagtagtcatgcctcatctctcacagcctccaggccctggcaaacgctaatctatattcactctatatagattcgtccattttagacattgcatttcaatgcagtcagacaatatgtgggcttttgcacctggcttctttcacttagcaagttttcaaggctcatccatgttgtggcatgtgtgagtacttcatttctttttagagtctaataatgttccattgcgtggacagaccacattttatttcccattcatcagttggtagacatttgggttgtttccactttttggctattacaaataatgttgctatgaacattggtgtacaagtttttgtgtgtatgtacgttttcatttctcttgggtaaatacctaggagtggcattcctgggtcatatggtcactctacgtttaactttttgaggtactgccaaactgtttttcaaagcaggtgcaccatttacattcccaccaacaatttaaatttctaccagtttctctacatcctcaccgacactcgttcttgtccatctttttattgtagccatcctagtgattgtaaactggaatctcattgtgattttgacttgcatttccctaatgaataataatgttgagtattttttcatgtgcttagtagccatttgcatatcttctttggagaaatgtctattcaaaccgttagcccattttttaaattgatttatttttctccttattgttgtgttataagagttatttatatattccagatacaagccccttatcatatatatgactcgcaaatattttctcccattctgcaggttatcttttcaccttcttgatagggtcttttcaatcacaaaagcttcaaatcttgattaagtccaatttacctattt

SEQ ID NO: 335391 - DNA, 1000 bp, Homo Sapiens
ttttttttttttttttaaaaaagatttaagatcataaataggtcattgttgtcacaacacatttcagaatcttaaaaaaacaaacattttggctttctaagaaaaagacttttaaaaaaaatcaattccctcatcactgaaaggacttgtacatttttaaacttccagtctcctaaggcacagtatttaatcagaatgccaatattaccaccctgctgtagcaggaataagaggcaaggtattagcactaagaaaaacagcaaaattcctgaacaaaatcatctgtcattttaaaaaagggataaaaaaacaggctaagtggtgagcattttagttaagaaggcccagtgttgttatgcaggactttccattaaaaaaaaaaaaaaaatcgaaatattttaactcaagtacgtttaattcaccacagaggagctaaaagaaaagagagggggttggtaaaatacagtatactttctttaaaaaagacttgggaggaaaaaaatcaacttagaagatcatatgaaagggcaatcacatggaacccagttagtgtcctagtttattactagtcttcagatccagaaaacagagtaagacactaggtaaacagaacacctaggcacatctgtaaggcatttgtttcctatcacacagcccattctagcttaacacccaccaactgagatgtagtgaaatactaaaactggatgctcaaattatgtttttatccaaccaaaaagttctttaaatataaaattcctcactttaaactctgccttgtcttctgtgataccaacagaactttaaggttttatgcaatatgatgatttcgtgttacttttaaaagaacccacaaagtaagcaattgtccacagatgaaacatgggatgaggttcatgactgaatcaatcatggagtgttagtcaattgtaaactcctgaaagttaagactaggaaatgtgtatatcagacacataagagtacaacaataggagaaaaa

SEQ ID NO: 335392 - DNA, 1000 bp, Homo Sapiens; identical to SEQ ID NO: 157366

SEQ ID NO: 335393 - DNA, 1000 bp, Homo Sapiens
gcaggggaaagccagctttattgagtaaacttcccaggacctgggacatcttagatctccccttcccccaggagataggacccctaaacctcccctgggtcctaggaccacctgacccaccacttgtagtctccagtgaggaggggacccttatttggcaagagatgaacatgtaagcagctgtccgccggaggaaaggacgatggctgaaaggaatgaaccaccgcaggcggtgtctctcctgtccagctgtggacaggacctccacggcccggccttcctggcctcgggcactggctggcctgggcctgccgtggcagcacagcttctgttgaaggcttggggatggccaggctgccggtctggggcaagatcactcgatctccaggatgaggtcgtcaccttccagtgtcatgtccttggtcacatgaaccttgcggacagtaccctccatgggtgaggtcaccacagtctccatcttcatggcactgagcacacacaggggctggcccttggccaccttggcccctgccaccactttgatgtctatcaccttcccaggcatgggcgccccgatctggcccttcacgtcctttagggccttggggtggaagtgcatctccttcatggcctgggtgtccttgaccaagatggaccgcagctgcccattgagctcaaagaagacctgcctctggccggcccggttcaggtcgctcacggccagggctttgatgtgcagcgtcttgccccgctccagctccacctcaaactcctctgcgatcttgggtccctgcaggaagaggcgagtattcaggctatccagggggccaaaggtggcagtgaagtccttgaagtgggcaaacacatcggggtacatagctgctgagagcacatcttccggcgtcacctcctccccatgccggtctaccagctccttctccagtgcctgcagatccaggggagggagggaggctccaggccgcccctccacccttggcag

SEQ ID NO: 335394 - DNA, 1000 bp, Homo Sapiens
aaccacaaaaatctctttacatatgcacacacatgcacacaagcaccctctcaaaccattcccttctgtctctctttcacacacacacacacacacacacacacacacacacacacacacagtgttggcaggatgtatcagaattcaaataatgctctggaactttcatccctcagtactaagagcaaaagctgcttagttggtaacctacatttcctgcactgtttccttgctaagccacaccatctcctttgtgatttggtttcctttatgatttattatatcacagtgaccactatatatatatcttaatataaatgttactaaattgtggagccagcaatcgtggccttcagtgtgtatgtgtgtgcgtgcatgggtgtgaatatgttttacatgtatctatgtgggagcttatatacacacacacatatatattccctccttaaaaaatccttagaagctggtgttgcaatgtgaaagcttctttgagcaaaaagtttttaacaatgtacctcactgtaaaaatatacacacaaaatgcgaagaatcccaaaatgcaatagccatttgcccatctcaaatttctacagtgttgtgtctaaatgttgtgctggcttgaagagagtctttgacaagtcaatctgtttggaaacacagcccattctatccattgtcactggtctggcttttgggttggtatctcctcgcctcttggtttccctttctcttcttcttcttccttgatagcctggatctgttctgaagagtgcgactgaggggtctggtccagggattgattttctatgcctgccaaccgttgctcctcttcaatgactttcttccacatcttgtggttctgtaagaggtgctgagttatttggcagtagatttttctccttttgaaagtcttcttttttggagattcattattttcacaggtttcctcttcatttggtgctggtgcttcttcctcctcttcttctgggtcatcagtatc

SEQ ID NO: 335395 - DNA, 1000 bp, Homo Sapiens
cggcacgagccagttctttacttgttctcaagaaatcactcttgcagttaggcttcagaaataataagtagtgataggtcatttctgtcatgtactctttaggcagagggaaattaacagaaagatgaacatcagttttagagtgaacaaatgacagctaagatgtggatctaaagataaccacatgttccaattatttattcaatgtatgtgtcctttagggctcactatatttctttttttctgtatctttgatgaggttagttttggtattacagcaaattttttttcttctgacaaatctgtgctgtgtttatattaactaaatctttaaaaatacgaatcctgagctagagtaaaaacaacaattttgactaaagaataaatcccttcattgttaaacctaaacagctttaaaattcagccatggaacataagataagactggaattcaaacttctgatgtccatggcaaacctgaatactctcagcagaaataaaacacacatagtagataatacacaatagtaaaaagcatcagaaattgatgcacctggattttgttaaatacaacaaaggtcactcagtccttcatggataaacctagctgggagaatagcactgaacagtgtattgcattgagcagaaatccctcagaaaggcaacactggattcatttttagacaggcatagacttttctccaaaacattcaaagacataaaagacacactgggaaatacaatatgaatctattttcataaaagcaaaaagttcctggccactttggtaactgaaatatgtcacttgagtttttagttatagctgacccccagtgaaaaataagagctcactacccagcaaagcagcattatgacaaagtattcatacaccagtgaaggatttaagtaagggctctgcaacatgggtcaacacggatggtatttttggtttaagaatagttttctagttcctgtgaaagtgcataggagtgggaaactg

SEQ ID NO: 335396 - DNA, 1000 bp, Homo Sapiens
tttttttttttttttttttcttttttgagacagtgtcttgctctgtcagccccaggctggagtgcagtggcatgatgtcggctcactgcaacctccacctcctgaattcaagtgattctcctgcctcagcctccccagtagctgggattacaggcacccgccaccatgcccagccaatttttgtatttttagtagagatggggtttcaccatgttggccaggctggtctcgaactcctaacctcaggtgatccacctgcctcagcctcccaaagtgctgggattataggcatgggccactgtgctcggcctcagagccccgtctctttcctttccttctcttttctttttatttttagacaggatcttgctgtgttgcccaggctggagtgcagtgatgcagtcatagctctcttcagcctccaactcctgggctcaagcgatcccctttgtctcaaccttctgagtagctgggattctcaggtgcacaccaccatgcctggctaattttttttttcagagatggtgggggtcttgctatgttgcccaggctggtctcaaactcctgagcttaagcagtcctcccacctcagcctcccaaagtaccgggattacaggcataagccactatgccttgcccagcccttcttttctgctcctcttcctgccccctaccgtagtttcagaaacaaaactgggtatgagtgaagctttggtgctgaaaattttccccactcacatttccatgctcttgcagagagccgcttggtagaggaagacagggagatgcctttgggatggtctcctgactccccaccctttgtgcagggctactacagaggcagaaagctggcccgaagtagatgagcaataaatatttgataaagaaggaaataattaagtgacagatgtgactcaagagtgaccactggagagggtggactagaggctccagcagacagcacctctcctcacagggatagaagcccaggagaaagaca

SEQ ID NO: 335397 - DNA, 1000 bp, Homo Sapiens
gccactcgcaatacctcattagaggacaattctctccccaaaaaaggttattttaaaaacctacaaaacccacaatactatttgtataatgatatgaatctacttattaacttcctaagagatttgtgtttccaatctggaaaatggtcttaacatatgagttgttttgcctagtttgaagaacatcaatctattttagtggttttaaactctttctacattttttgcattaaaaatacttttgaaaatctgaggaaagttatgaatttcctcctcacacaaatatatatagacaaaattttgcataccattttaaaggttcatttttggaaatataattgacacaaagggagttacctagaaataacatataatagctttgtgttattacatgtaagattttttctcttaagtcgatgatttgttagatgcaaaagttaaaaatcctcacctacatggtatgaaataatatggataagatatagtttactttaacaattttagtactttttcaatcttgtaaattcttcaagaaaatatgggtaaacaaaacagttaaacattctaattatactttataaaagaaaataattagaacctcacaatttttcttttaaatttacacactatgatgttataaatgtaaggctttcagaagaacattataaaaactcaagacctcataatcctgaccaaaacaaaaagacatgccacaaaatttaattctttaaaagaaaaagatgacattcactttttatgaaagagaaggggtttcaccatccctgccaatatcttgggtaattgtgcagcaataacttcagacatcatttctggaaattcaacactcagtgcccgggactggataaatgtattcaagcagtacagatgaagctgtttgacaagatcatgcaagttatcaagaagttttgtaagttgatagaaacgctgtgagctcgacacaactcctttttgcctcaaaccaattgccttgatgagctct

SEQ ID NO: 335398 - DNA, 1000 bp, Homo Sapiens
agccttgagaatgaattttatttaatacccatacaccagatttagagagtcaatttggctcttcttgcgtaaaattctctggagggtggtggtgatgataatctgatcgcagaagctgagaagtaagtgcatctcaggaaagtgttccaactggagccaggacgctgtcttcagagaagaaaagagacacagccaaccctgagttggaggagagctcttggcaccagaggggctgccctcagaagtggaggcctagggaccctgggaccctaccaagtcctatgaccagagtcactctcctgggactcgctggagggtacagtgtggccctgggggtccgccaagcttcgagaaagactgaggtctgtgacttaggagcctctctcaggaaccaggcagagtcagtactctgtgttgtagaaaaacagaacaaaagtcttggtctgggaggagctcgctggggaggcctaggagcagaggatgttgggaaagtattggtactgtgggttgtagctccgtaggtttctcttgaggcagtagacgagcttccggtcacaggcacagaggttcacatggcagaagggcccgggctcgcaggtgaccacgccccacgcgaatctgtatttgtaggactgtgtgcgaatgttgcagcccttctcctccagccgcccatagcagtggtcatgcgcccaacagcaccaatcggtgccatccttgggggttcctcggccgccccagccgcagtaacagccgtagaagccgtagtttgtcagggcgttcttccctgtcaccttctcgatcattgattttaggtccagcaagcctccttgcacagcaggcacactacaagccaggaaccaagccagtgggaggaggcctttcatctctggggttctctttggcctggcctcaaatcctgctctaggggtctgctcccatgagcaacttccttgggcagaccctggagacccgggtctcgcgggctccccgtctccagtcg

SEQ ID NO: 335399 - DNA, 1000 bp, Homo Sapiens; identical to SEQ ID NO: 157367

SEQ ID NO: 335400 - DNA, 1000 bp, Homo Sapiens
tttttttttttttttctaaaattattttattttttataattttctaacacatggtgttagaaaatgaattttggcaccgtgattaagaatttcttttcaagtttaacctttacattaaaaacagtagctacaataaggatatttcaaccttacttagagaagtgataaaacatcaagtcaacaagtatttttgttggagaatttttttataagcgggatagagggaagttaacatagacactcagaagaataaaatggaaattatgccaggaagataaaaaagcaaataaccctccccccaaaaaaagaataaggagcgagacaaagggcaaaacggaagaagcaaggctcaacaactttgttttcctgatataaaattcaagtacttaaaaagttttttaaaaaataattaaatgcactactcatctcaatgaaatttttcgttttcctattttctagaactttctaaaaaaggaaacaaagcaaaaacaacaacaaaaaaaacctgtttgacttaaggacacttgctgatcttgacacttgataatactttaagaaatggaaaggttttcctaaatctaatacctgcttaatataatccactttggaagattcatctgaaagaaacatagggtttgatttttaatactaatataaaataatctgccttccaatcaaaacaaaaatgttttcaactgtatacgctcctcggttgtgttttgtaccattttcttgaggaaaacgttgtgtaattctttgtgtgttcccttagtaactactgtaaataagacctgcataggtgttcagaaaaatacttagttgcatacaaatccagttagaatctgattttcaaggttttacaacatggtaattttcatttatatccattttgtctacatttcctctatattttgataaataaaaatcttcccatgctttttttaaataagaaaatattattagtcttgttatttgtacctaaatattttatcaatttgaa

SEQ ID NO: 335401 - DNA, 1000 bp, Homo Sapiens; identical to SEQ ID NO: 157368

SEQ ID NO: 335402 - DNA, 1000 bp, Homo Sapiens
cacacatcaagactatctacaaaaatttattatatatttacagaagaaaagcatgcatatcattaaacaaataaaatactttttatcacaacacagtacatatttgtcatttttataaagccacacaatagaaacaagacaccaagatatttaattatcttgttgactcctgtaaaatagctaaacactcatcattcgcggtgcaatactcatagacataagttcctgaaacaatagtttgcatgcgtaaggcattcgcaccaaagaaatctgggttttattgcggcagcccctgcattcatatgtatgggtcctggtgttggcaatcgccattattccacaaagattgcaaacatgaacctgatatggatctgatgcctcaaacaatctttcccttaaaaactgggctgctccatgggcaatctgacaatctcgttccatttctccaaaacgcaggccaccatcacgagatctaccctccatgggctgtctattgaggatctgaataggtcccctagcacgagagtgaatcttatcatccaccatatgcttcaaacgctggtaataagtggggccaataaatatttgtgatgtgatttttcgaccagtgaacccattgtacaggacctcatttcctctgagatgatagccataatcagataaaagattagaaatcttctgcacgttaacagcatcattaaatggagtggcatcaccaatttcacccttgttagccgataccttcccttgaaggcattcaattaagtgaccaatagtcatacgagaggggatggcatggggattgatgatgatatcaggggtgataccttcacaggtgaaaggcatatcctcttgtctatactgaataccacaagtacccttttgaccatgtcgactagcaaatttgtctccaatctgtggaatcctaacagagcgtacccttattttacaaaatttatatccttcctgattgagagttaccataacctgatccacaatg

SEQ ID NO: 335403 - DNA, 1000 bp, Homo Sapiens
tgtgaaatttgaaaggttttatttcctaactacaggcagctttaagaggctgattatctgccacgaccccccaggctgggaggcggcagcagggcaggggagagcaaggggctttggggtcgacctcctgggggagggtagccctggggcccgctgtgccctcactcgcccttcttgtaggcgttcttgatgatggcgtttttgaacagcgtcaccaggggcgtctggctcttctcggaggtcatgaaaccgccgtagcgcttgtccttgggcgggctgccccagcggaagtgctccatcctgtaggggccctcgtccttcttctcggccgccaccagcaggctgtgctccaggtcggcctgggcccctgcgccgtcatcggcagggccgtcggggccatctccctcccggagtcgctggccagtcagctccctcttgaactccagggggaaggcctcggccgactcgtcctcggcgccgttagggtacaccttcactgggcgccgcttcttgcccaccggcttgccccagcggaagtgctccatggagtaggagcgcttgccctcgcgcgggcccggcttggcaccatcgctgcggggctcggggccgccctcaggcagcgggccgcagtcttcgcccgctgagacgtcctcgcgcttctgccctgcgccgctgctgccgctgctgctgctgttgcggcggccgaatcggtcccagcggaagtggcccatgacgtacttccgggggttctcggtcagaggctgctcgtcgccatttcccgggaacatgggagtctcggccgagaggtcgggcttgcaggcccggatgcactccagcaggttgctttccgtggtgaggtcctgacactggctgctctccaggcaccagccacgcacttccatggaggcctgaagcagcaaggccagcaacagggcccccgagcggctgcagcacgatctcggcatcttccaggcaggctgaggctctgtctcgggaggct

SEQ ID NO: 335404 - DNA, 1000 bp, Homo Sapiens; identical to SEQ ID NO: 157370

SEQ ID NO: 335405 - DNA, 1000 bp, Homo Sapiens
tttttttttttatttctcaaggaaaatttactttgaggtttaagacacatatatagttctgccatatttattaaatggctcttgaagtatttgatctgtggttgaaggcagaagatatccacaatggtttgaggagctctgtcttcagaaatctttttgtaaatcactcttcttaagaagttctccttttcgggatttatccagattttcaagaaaatgttcaaaaactttcacataaggtgctagactggtcttcttataatctctggttctatgtttgacatcagattcagcttcattctcctctttttcctcttcattagtggaaatggcatccaattcacggcagatgaagcttatggtcggaacagtaaatggatcaaactggtccactttctgcaaatcaataggcacagatatgcgacctgttttaggatgaacactaaaagggctcttcagtagatgattgattcctttgctgacattgatatccagccgtggaaaacagtactggagcataatctcccactccagccagggtccatatttgtcatttttgatgttattctgatatctgctggctactttcttcaagtgctcccaacgctgaagtgaattgtgagacttttggaagctttgttgaagttcatcatgaattgtttcaggaacaagggctaaaatcttatcccagctttctttattttcgagaatatcttgattaaccaaggcatattcttcaaagtatttttttattatgtttatagattttctgataaaagggtgaattttttcacttaggtgaactttctttttaacgtcttgaccaccctttacaaggctcaaatactcaactatcccagaacgtactgcagaagacagttttctaactgattcatcacagacccaacaatgaacacctctccttccagaatatacccagagacgatgcttaaatccaaagtcctccttcaatgctctgtcaatgatgcgtatggccatt

SEQ ID NO: 335406 - DNA, 1000 bp, Homo Sapiens
ttttttttttttttttttttttttttttttttttttttttttttacactttgatatttattaacaaaaatggtccagaaaaggattgagtcaaaattacaaagtgattaagagttaaaacaaaagttgttctttattgtagtttctgggggactttaaccagtccccaaagctgtttttatctcctaaaataggacttaaatgacatcactcaagtgacagattttaatagaaactcctcctctttccttctgtcaaagcaaaatatagtgaaagtctctgttgttacctcaaacctcctttcctaataagtgtgcatgcctgtagatggattgggatgcagtgaagagagaagttaaacaaaaaggttaaaaaaaaaaaaaaaggccaggcacagtggctcacaaccgtaatcccagcactctgggacgctgaggtgtgaggatcgcttgagcccaggagtctgagatctgcctgggcaacatagggagaccccccacctctacaaaaaaaaattgaaaaaaattatctggatatgaggtgcacacctgtggtcctaactacttgggaggctgaggtaggaggatcacttgagctgggaaggtcaaggctgcaatcagctgtaattgtgtcactgcactaagccttggtgacagagtgaaaccctttttcaacaacaaaggcaaaatcttaaaaacaggaaacaggctattgaggaaaaagggttataaaactgcctaagaatcttcactaaagtaatcttctagtccttccatatccatttccagagaggaatttaaagaggccagagcagatgatgcatccttggttttctggacacttggtttgggttgaggagtttctggttggataggttccttctttatgtctttaccaccatttagaatacgttggctctcacaaaagaactgattaggatgattcaaagaaaagccacaatcatccacattgtgtatcatctcaaagtatttttgacaggc

SEQ ID NO: 335407 - DNA, 1000 bp, Homo Sapiens
ttttttttttttttttctgggaaaatagaaaatagtcttttattttacctaagtcatagaaaaatagtcttcaaaaatacagttaaacttatgggtttatattaaagtagaatttgtatgtacagtaaggcagtaattccattagcatcctgctgtggttttcttttcaagttagtctttagggaatttttttttaactaaggaaagactaaggtgtataataaattatctatcatgctgaaatgaaggaggaaaacatcctaaagggattcacatgaaattcatttgccccttgtgtaagaacatttttatttccaaactatattttatagaagctttagagtagaatttagggggaaaatccatgcttaacatatctaaactattttaagaaaaaaattggaggcattatttcttacttgcatatcagcaatgtgtcagtaaggtataggaacttatgtaaacaatttgttctggaatgcattctttctttaaatggttatatttgggtaatcctaataaaatggacgaggagtgtaaaggttatgcagttgtttttcaaaagcaattttcatggcattttcctatgtggaaaattttcttttgtcatctttctatggtaaacaattttgacaatttcatttccgtctgtcccatgtcaaatcatgaaagccttttccagaggatatacctattggcattgtccctcaagaatactaagcagtgtgcttttatttcattgaacacatagttttataactaacagcaaaaagtaaatctacaaatcacagttaggaaacataatgatttgttctggaatcagctgctggagaaagaggcaagtggttaaaaatggagcatgaaaggagctgggagctttagtagtgtcagtctgactacattcttgagcatttcacgtactctgtagtgttacctgaagaaaaatcacattttaaccaatcattccattagtcaagctatcagtgaaaggagtgtgtaa

SEQ ID NO: 335408 - DNA, 1000 bp, Homo Sapiens
gggtttaaaaatagctttatttagcataccaaaaacacagaaacataagaaagaccctacctagtataaacataaaaatagttaaataccataatttaatgtaaaccaagcatcttaaaatgagaaatattataataaaatacatactatttacacagaaccaagttaaagctacctccacagttattggatcacatcatcaatcttgaagtcatcattaaaaatgaagcaaacacaacatatctatctgtactggtcaataggaaaagaagaaatcattacatttactttaaggaagtataattttttgtgacatttagagcaaggaggcagaaagtgccaattctaggattccagacacaactactgcacatgcaggcatgtaaaccattctacaggaagaccactgagcctgttcttttatttaaatgcaaactggttgattcaattcagttactccttaagaaaggtactaaatatattctgtaaaaataaacttttaaaaaacaatcaaaggtgaatgtaatatcaatcaggtaagaaagacaaaagcataaaaaatatatattattccaaacaaaccccttaattttaacgaatgctaagaaactcagtttataaaaccagatggggtagcaaaagggattttaaaaaatataaaagccaaatcaaactcaaaccaaacaaacaaacctaagataatgtttcttgaagacagtggtattttgtttatcctatcattatcatgcaacagccaccatgagatctgtggctgatagagctattactgtgaagtagaatgttctttgaccaacagtctaaaaagctacagtcattgatcagtttaagcatttggctttttggcttcaaacatcaacattcattctgatactgcaatttaggtgtctctaaaaagcagcattatatccaatatcagcagtttaaaatataaaataaagttgcaagaaatcacactaacagaatatcctgctcctatgtc

SEQ ID NO: 335409 - DNA, 1000 bp, Homo Sapiens; identical to SEQ ID NO: 157371

SEQ ID NO: 335410 - DNA, 1000 bp, Homo Sapiens
tttttttttttttttttttttttttactataaaattatatttattgattcatctggggccttttcaaattaactggacaattatcctaacacacctctccaaaaaaagaatacaaaaaacatgttcttcctctgacaataaaacatgcatgtacttacacattgaaggtacaaacaaaagttaaatttcaaaaacaactgtatttttttcatcatgtcatactgttaaatcatactccttgtatgcctaatttggctttttcacagttttgctataccaaaaaattacataaaaaattacccagctttatattatctcagatactggaaaaaacataagtgaaacaaaggaggttgctgctcagttggaaataaataaacatgagtactcttatatttggaagggacttctggctggaggtcttgagatcacgcaaatgcagcaggctttgcaccttggagtcctgagattgtcagatacaaaggaactccagagatgctgaaaccccttgaacctccccagctgttcttttaccaaaggtgaaagctcttacctgcaagctgggtttagagtctccgcttcagttgcagctgcgtttcctccacttttccctttcagtcatcatattgctgacccttgaaaacttttaaattactattaaagtgctcagttgtgctccttttcggctatatgctgctccagttttgaaggtgtaatttgaagtaaaatcttggaacctaagatcttaccgtctccacggacagcagaatacggctgtaataggtagctgttaaggtagatgttaaggccattgttactatcgtcaactgaggctaagtcctgggtgggctttttgctgtgccaaatgcccccctgtgccacacagtcaaacagtaaacatggctctacagtgagtcacacactggttttcaaagaagcataaatccttccactaaagaatccattgataggataattcttttataaaatggaggttcta

SEQ ID NO: 335411 - DNA, 1000 bp, Homo Sapiens
ttttttttttttttttttgaatgtatatatttattataatctccaaaataatttcacttggtacaactgcttcttaaaaccatatcaatatcaggctcagaatttaattacaaccaagcaattcacaaaaacactgagcaacaaaacatgcttaatatttctttgagaaagacccttcaaatatgtgtacagcatcactgggagttacacaaaactgttacaaggtgaccattaagtgccccaattctgcacttctgacatacatgaatggctaatgtaaccacgtttgggaatctttttacatctcaaaataaagctttctgatgcaacttgccatccttttaaattttaaaggatattcttggtaattccttaggaaagtaaaactacacacactttcagagaaacaataagctgcttagatttttaaaattttttatattatacacttcaattatgggttatttattaaagacttcaaaaaatttatgttatgtttttaaaagtaccaattagtgagggaaaaagttgaaaatattcaccagcatgttaggttctcctgaaatcacagttttctggataaataaatgtaatatcactaaacaattttcactatgtattttatacatagcctggaaagaacagtattttggactgtaattttcacatcttaaatagtatttttttctttatccctttgataatactaaattctttctcttaaaaatttatatctattttatagatatcaatcttactatgaattttcaactttgactcgaacttgtttatgaaaaatatctaacatctgcaacttcagctggttatactggaaggagaggggttgcgataattttattataccttgtattaacaataaaccttctcacagagaagaaaatactttaaataccttaaatcgtatgtacaacaataaaaattcacatttcatgctttagtgagacacttaaatcatccataaggcagtcctcatagttta

SEQ ID NO: 335412 - DNA, 1000 bp, Homo Sapiens
ttttttttttttttttttgccatttattttactatttatttccagaaacctgaaaaaatacacttctattttgaacatttatgtgaaagttattggtagatgttccagtctattattcattacacagtaaatcgccaagctacatgcaacacatataataacagaaatgaaactcttaagtcagatgtgcacattgttgcatttgttttctataattttgttttactcagaagaaaaacttaaaacaatgaaaacacattcctttttttttttttaatttttgatgtctacttcttgggttaacatcatttttaagaccaatttggttacccaaacatatactcagataacatagataaccctcctaagatatgtacacatctctctcactccttaaagccttgcacatggccatgttgcaagatctcctcaagtcagtacacatggccagggtgacatcatggcaatacagcaagaattctgccatttatttagaagcctcaaggagaaggatcctggagcccctgaatgagagtttcttctccatgcctctccccagtcaaaatacatggaaatattcatagaagcattgtacccagcatgataaggaaggatggagaatggttccttatatctctgttcacaagacatcaacactcttaagtaactgtatgaaataaattctctgctgaaagcaaataaaccatctgaaaggtcttctggttacttacacagatttcctagagaatctgaaatcagcctaacagggaagattaatttttaaatgaatccaagttaatgaaagcaaagaactcttatacagaaatacattttcctattataaagcaggactaccttccctaatttctgatagacctaggacaatttgaatgggtattgaaattcttttggttgaattacacaaacaagcaaagaaaaagtctcaattattattggaaaatttggggagagattattatctcttgatctcctagttaat

SEQ ID NO: 335413 - DNA, 1000 bp, Homo Sapiens; identical to SEQ ID NO: 246393

SEQ ID NO: 335414 - DNA, 1000 bp, Homo Sapiens
taaatagtacaaaaataaacagacatttatttccagacttatcttttacataagttaaatacacatttgtctgaggcactgaaacattcgcatacacaacccaaattcccaggttttgtcagcagatcaatgttaataacaaatcaagttttttttttaaaaaaaacagtgaacagtgttttatacaagcatattgactatttctttcttaaccttaaacattctaaacgtaaaattgtaaagaagattctcctgagttatctttaatgatatttatttcattttctccctcttcccaaaagaaaatttttttcaattatttatataaatactattatctgtaatcagcgtttgatttaaaaatattaaaacccacagtgcttgacacagaatattttctcaataaattgtggctgaacaaattaacgaagcatccacagatccctcaaaacattttaaaaggtcagtcttatggcacattcaggctaatgagacaatattctttgtgggctagcacataggcctatcctaaggacaaacattcaaccttaaatatctcaatatgccaatcagatttctaaaaatttattcacaaatcttaatacaatcatttctttggattgtttacataatattcagagaggtaaccccaaagaaaatatactgattgtgacataacaaaaaaaaatcaatgattgtaggcttaaacacagtttataaccatagtgtcctaataagacataaataataatcttcaataaattaagtaatatacagtaccattaaatgtcagtgacaatgagatgtggaaaagaagtattatcgtcattattattattgctgagaactacttagatatcatttggttttgtttttaaataagaaagggcattaattagaatgggaacgtaactttttccagtcacaaaccccgtacagttctctctgaggcactagcctctttgcatccatcttggttacagatagctaaaattagcta

SEQ ID NO: 335415 - DNA, 1000 bp, Homo Sapiens; identical to SEQ ID NO: 157372

SEQ ID NO: 335416 - DNA, 1000 bp, Homo Sapiens
tttttagttgctgttcataagtttattatctatatctgaaaaaatcatagaaaattgctgggtttagctctcagcagcccgctcctgagctctgaggaagcttgccttcttttgagctacccgatccttcttctgagcaagggacattttgggacggttccacctcttctttttaacttctttcttgggcttcttttcatagactggattctctcgtatagcagcatgagctttcttatacatctcctccatcatgtctggagttacgctgttctttatgtattgagagaactgtttcttgtaagcatcttcatcttcttccattaagtagcgcatgtaatctgcaacattctggcccatgatgtgcttccgatgtacttctgcattaaattccttgctttcagaatcataaccagggaatcgtttggtactgtgagggatagacaagcctccatccacagctcccttcagggcaccaaaaactttattgccagtggtagttctggcaaggcctgcatccaaatagcaggtgaaggcacctggctgaccatcaatgctttccacattgtattcatcaccagtcacctccacttggccttcatagatcttgtccatgccaaacctattgagaagcctgcgggccagcagcaggccagtacaatatgctgcagcataatttgtcaggccaaccttcacaccatattttggcagttcgtgtgcatacgctgcgcagactatcatatccccctctatacgggcataagcaatctgacaaatgatatctctgtttgtcacacgaactatcatcctgtatttgggtgtgttgtatttatttttatcttgtatcaccaagcgtttccgagcataataatcagttttaccctctcgtcgtcttctaaatttcacttggtatctcttaaagtaggccttattcttaacaactttaacaaaccccatcctgcggaacagagaccggcgtccgctgctcgacagagacctg

SEQ ID NO: 335417 - DNA, 890 bp, Homo Sapiens; identical to SEQ ID NO: 157374

SEQ ID NO: 335418 - DNA, 609 bp, Homo Sapiens
ttgcacatttcactgaaaactttttattgctcttttggatagaaacgggaatttatttgccaggaaggatgatcccatcatacttctgctggaaccagcgcatggcctcctctttgctgattctgtgtttggccccaatgcagcctgtcctgcgcttcttgtctgcgatgctgaaacctggcctacccagcaccacatagaagtccaggccgtagataccaatgcttgggtcatatttgatacccagatcgatgtgttcctggatcccaaaaccaaagtttccagtatctgagaagttgttttttcttaactcatactcccgcacctttagacccttctccaagatttcttctgccttggcccctcgaactgtgcagtggacagcaatcttttcatttctccggatgccaaaggatctgacagtgtatctagctttggaaaacacaggggtctgccctgtgagctgctccaacaccttggctgctcgcgtcagtctgtctccactctccccaacacagatgttgagacagagtttgcggatgcgaagttcccgcatggggttctccttttcaccttgatcctgcgccatgatggagagcaggaagagaa

SEQ ID NO: 335419 - DNA, 1000 bp, Homo Sapiens; identical to SEQ ID NO: 157375

SEQ ID NO: 335420 - DNA, 1000 bp, Homo Sapiens
tttttttttttttttacagtaagagtagccaggtgttagccactttaatagaaaatatgatcaaaactcgattacaagagttcaaaaagacatagaaaaccagtgagtttcaattttattacaagttttcaaatctgggactagtttctttttttcttttaactgaaatgccaacttcagcccagggttttttcacaaccaaactaaaaatgacttactacatgggaacatcaatgcaacaagtagaatttgtaaactcaagccacaaacttagttaataatcatggttaagggacattgccaaagagcaactgatgcctcagtgaagtttgaaagaaactctgctttctgtgacggcagagaagaaatatgcaagcaattctgcttcaaagaaatttgcatagaaatggaaaaatgccagagcctttaacacaagtgaaattgcaaagcctcaacacgttcaactcaatccacagagcaccaaatgtttaatgggagccaaggtaggactgagcattgaacttccagctatgcaactcgcagggcacaatttcaagtgtggaaaccatctgtaggcaagctcttttaaaaacatgaattttagacaccgtaaattctaatgcagacacttttgcattactgtttgaatttcagaagggcaccacaaggcaccagagtctttcaaagtcactcacagcaacaattgcatttttttcccagccttggtagcccctttcagttgtctagcctctgcactgtggcacaccactgacattaaatccagtcatggcctaagtggcatgaggcagctatttccagggcacctcccacctccttggcatgggaggcttcccagtcactcctccttcgtgtcccctctttcaagaacctccagagctcttggcatcaggggcccccattgctgggccccacacgggagaccacatctggaagcactattcctacagctccctctgctggagacgaaagtgacagtttg

SEQ ID NO: 335421 - DNA, 556 bp, Homo Sapiens
agagttataatccaatctttatttaaaaatctaatctgccagtttagcgttttccaccaactcggggagctgaaactttcacaggcttcacaatcttttgcttaggtgctgcctttgtaggtgccttagcagcagccattgcagtctttttagatgcttgcttagccttttttgcttccttagcagccctgatagcttgttctcgttgagcctttctaacttcaggtttctgattcctcttggccattatatcagcaagagatgcaccagtaatggccctctggaatttgactgctcggcgggttcttttcttttgaatttcttccgactgtccctttttgtgcttccttctgtagaggacagtccagtttatctgccgaggattcctcttggaaaggaaagccgactcgcatttcgcattaagaaactggaaaaccttcccgtcggtcctggcgtagcgcctcccgtgtccggggtagatcttgtacccgctaaaactgcacagctcgaccttcatggcgacagctccacggaaagacaaaagatggcgaaaaga

SEQ ID NO: 335422 - DNA, 524 bp, Homo Sapiens
ttttttttttttttttttttacaatgtttttaaaacaagcaaattttattaaaggaaaattttgcaggtttaaggtttgcaggtgaaattttgtaggtgaaaaggtttacttttcaccagtctgttctggcatgcttctaatgatgtcagagtcacctggatcaatgatagccagtgtgcacactctgtagtattttccgcatgctgtgcccagttcaatattattgccactgtagtgatggacaccagttttagccaacatagcatagtactctatttcagatttcctcaaagctgggcagttgttagcgagaatgaccaatttcgctttgccttgtctgatcatcttcagagtctgcttgtaccccaggacgtacttcccacttttcataacgagttggagcctagagttgatcgactccagcgactttttcgtcttctttgcggccaccatcttcctgccttaggagcgggacggcccccaaccaacagcagccgctaagatggccggggaacgagaaagg

SEQ ID NO: 335423 - DNA, 1000 bp, Homo Sapiens
ttttttttttttttttttttttttttttttttttttttttaaagtagatgattttattctagtaactggctacaagagaaacaggggaattgataccattcctgggcagcgccaaacagcctgggctggaaatgcagctgaggacagaatgatattcacaaacacgggcaggaggctgggaaagctcacagccccacaggacggcggggcagacctggagccaccaggcattactgcacatggatctggcatgtcttccaggtgcttgggaaacacgagcattagtttgtgtacaaattagtcataggcatgtgaagacatctgtgatcatctgagtccatctgatcaaaatatttataaaaagtcattaatttattcctacaatcaggatttgtgggcacagtcaagcaggttttgcacatttaatcttctcatcaaccctgagtagtagggtctatcgacacgcatgttacagatgagggtacgaagacacagagaggttgaggaacttgcccaaggttgcacagccaccgagcagcagagccctgacccagtagatgccagcatgtcctgtgaacagaggatgcctcagtcccgagtctctgctgctgtggggagtctggagtccccagcgctctgcacaactttgggcttggcagccttccagggtgcgccctacgctcactcaccatgcagctactggactaagagctggagagacagcagtgaacactgagacacctgccttatgcagggctgtgaaaggcactcaaaatggccttttacatatgggaaactgaggcacggtgctactaaacgagctgcccaagtccccacagctgggcataactggcagagctgggactggaacccaggcagtttgattcctggcttccgtgaaccattagccctgagctgggaatgctgccgggcatcactcttggggataggatgacctgggggaggttctttcagcactctggatgtgtccccactgcct

SEQ ID NO: 335424 - DNA, 737 bp, Homo Sapiens; identical to SEQ ID NO: 157381

SEQ ID NO: 335425 - DNA, 1000 bp, Homo Sapiens; identical to SEQ ID NO: 157383

SEQ ID NO: 335426 - DNA, 1000 bp, Homo Sapiens
catctgtcaatctgaaatcaatcctacgaatccttacgtgcaaactaaaaactggagaattgcagacgtttgcaacatttaatgtgaaattagtttcatactgtttcctgaagatgctgatggtgtaggtcaaatgaaacatcatagaagaggcagtatatgtatatcctttagtatatcttttaccttcagaaacttttttttggagacagagtgttgtcctggctaaataaagtgcagtggcacgatcctggcccactgcaacctccgcctcgtaggttcaagtgattcttgtgcctgagcctccaaagtagctgggattacaggcatgtgccaccataccaagctattttttgtatttttcgtcgagacgggtttttgctatgttggccacactggtctcaatctcctggcctcaagtaatccacctgcctcagccacccaaagtgctgggatttcaggcgtgagtcaccgcacccagcctagacacattataaaaatattaaatgcaaggctgggcgtggtggctcacacctgtaatcccagcactctggaaggccaaggcaggtggatcgcttgaggtcagttcaagaacagcctggccaatgtggtgaaaactccatctctactcaaaatacaaaaattagccaggtatggtggtgcgtgcctgtaatcccagctactcaggaggctgaggcaggagaatcgcttgaacctaagaagtggaggttgaagtgggccaagactggtatactgcactccagcctgggtaacagagactccgcctcaaaaacaaacaaaaaaactaactgtaatttaaaaactaaagtttacagttggctccaatgtatctcaaagtcaaactggcaggagcagacttataaaaagctaacactcatatctaacttggaagacttatattcttatgctgcattttaccatttgactactaaaaaagacactgaattacaataatccatcttggcatgcttttccaata

SEQ ID NO: 335427 - DNA, 368 bp, Homo Sapiens
aggatttttagtattttaatataatacagttccaatcagtgtgtctggttcatttcagttccttcactgccaaaccggggggcagggactgcttcagtttctctgccttctctttgtcagtgatgaccagggtgtaaaggtatctgctgcatcgaactttaaacttcacgttgtccttatttttcttgatcttgacagatttggcatcctttcgtcgggctgtgagcaggaagtccttgatttcctcaattttccgaggcatggcgacgaggcgcgctgggctctggcgcggaccaggacctttctcacccacgtatcaccctagagacactcacagcaagcagcaaccggggaaaaggacgaaaaag

SEQ ID NO: 335428 - DNA, 401 bp, Homo Sapiens
aaaaagaaaggccttacatatttattactgaatccagccaaccaacgtgttcataacagattcagagaggaaaacacgtcgaaatctccagatagtggtgacattttcagcttgatatggtaacatgatcgtgaccttcagacagcataaatatgtgtgccatctcatgtgcaattccttatagacccagcttggttcttctccaatgtctccttttggagttgtacctgattttatttccagttttcatccgaatccactggggaatgggacgattttgcttttgtttcttggccaggaatcgcttaatcctgaaagtcttgtgagaagacatggcgagcagcggagtcaagaacacaccacgatggcggagaaaggaagaggagggaagctggcggaag

SEQ ID NO: 335429 - DNA, 549 bp, Homo Sapiens
tttttttttttttttttttttttttttttgcgtaagaatatcactgtatttattttccctcgggtaacttttctatggcttcaccattttctcttcaaaattgaagaaaaatatcccaaagtttagaactggatcacttggccctttctcttcttatctcctcccagttcaaaatgcttgcatctcttaatggccagcatcctcttggatctgcagttaggctcaacacattccagccttagcacaatcttctttgtggtcttagccttcttccggaaaattggctttgtctgcccaccatagccactctgcttccgatcatagcgcctccttccctgggcatacaaagaatccttgcccttcttatactgtgtcactttgtgaggctgatgcttgccacacttcttacagaaggttcttcgggttttaggtacgttgaccatctttgcagcagggctgttttgtctatatgatgaaaacgagaaacagcgcccgacacctggcccttcgcagctctcgcctttcgcagctctcgcctaacaggaaagg

SEQ ID NO: 335430 - DNA, 1000 bp, Homo Sapiens
tttttttttttaacttttgtatgaagaatttaattatctatacacggaactaattcaaaaggttgtattacagttgttaaagccgcaggtttatatatttatatattttacattcatatccgtgaaaatactgaagtgcaactgaacgaggaggagaggtcctcgctctctgcaccatgtgaaaggagaaggacctctacacgaccaccagcacagcctcccgacagcgccgggagaacgcgaggggagtgagcattacagagtctttaggaggacagctagattgtgcttgaggctccccctgccccattttctgtgctgtgagcagcaggcatttttattgagagcttccaactagtgtttaaaagacaaacagggcttcagctacagcatatctaacacacaaacggaccatgagctccatttcatattaatctgtagaaattccacagtctagttaaaaaatgtaaacattggaaattaattgcagggagacttctatacattctttcttgtcaagaaaattacttgttcaaaataggtcattccatgaaaagtaactggaataaaacttcatgtaacagagactaaaaagagactgtggatatcgttgatcgtaacgacctcagtggtgttgtctactgattttatgctatgcaaacacgcaaaattaaaaaccccaaacaaaacaccaactcaaccagataaatctgagaccgaacaaaaacacagagtgctttctcatgtggctacaaggtcactgtgcaaaataaaattaaatgcaatatgattagagcatcgtacaaggtaatagctttgccatggaaagaactaatttcttatgtacaggatgtattacatgctcaacaaggtacagctgatacacacaaacaagcacaaacaccttcgctttaattgggctcattctatacgtctttaaaacagagatactgaactcctctgcacttctatggtaagggggaaaagccccaaactgcac

SEQ ID NO: 335431 - DNA, 1000 bp, Homo Sapiens
tttttttttttttttttttagattagtacaggtttacttttaaatatttaataatataaaagacttgcatagcttcaattcatttaagcttcccaataatgggtaaattttaagtttcctgaaaagtgagatcatccatgtagacaatcctgtttttgacataattgtccaacgtggaggaggaaacttgttaaggccttccatttatcttaccatcagtgacagctgagtcgattttctcttctggtgggtatgctttgttccttttggaaaatgcctggctgatttctgcataggttctgtttttggtctcaggcagcacaaaatacaggtagatagcacctgtgatacaaattgtagcaaagactaggaaacagtaggtgtccagacttttctgaatgaatgggaagaggagcccaacagcaaagttggagagccagttgacggtgcctgcaatgatgaaggcagccggccgctgagattgctggaagaactcaccagtcaagatgaacgggatgccacctggcccactgcagaaagaggcgatgatggccagaatgcccacgatactcaggtaggggacccagggggcgtggtcctgcagggtcagcgtgatggtgagggtcccaaagaagaggcccatgagcccaaagccaccaatgaggaggggtctccgtcccaggtgctcaatgaccaaaccagagaagacggcagccaaagtctcgatgccccctgtactcaaggtgacgtatgggatctttgccggagggatcccagcttttccaaagatgctgttggtatagaaccaaattgcattgaggccacagagctggtagcaggccatggtgacaatcacggtgaccacctgccagcggacgtagggagctctcagcagctccagcacggacaccaggcggatgctcctctgcacgcggctctcagccaggacctcctctacctcttgggaaacgtctgctttacccaagaacgtttggaaggc

SEQ ID NO: 335432 - DNA, 1000 bp, Homo Sapiens
tttttttttttttttttttcagaaacagataaacagtatatttattaaatgagttaagacaaataaactttacaaatagacaaataataaaaggctcagtggctaaaatagatggtaagcatcattgaaagaaatcaacaccatcacggtatctcagttggcttacacgtgtaaaaagaaattttcaaagagcaatttcacagaaatgaagccagtttttttcttataaacaaatcaccaattcttggttcaaaactgacatctgttatgaaaattaccatatcacatatttgtaagatgacaaggagtaactcatcttcaaagtgcaagtaagtctatttacaaccacaaaaaaggcaatgatgaggagaaaaggatttttaaaaaatatacaaagattaaaaacatttgggatgcaaaattaaacaattttttggttagaggataaaagagaaaaagtgattgaattacagatttcagctatacatactatataatgggatccaagatctttaacagcttgcttgcatttttttctacctacataatgctctggaaatttctggtagaaattacagtgtctcaaagagagaaatacacactaagcatgtcttgctactacttcatagatgtcataagacccgtttatggattagagttggtgtagaaagccattgccttgagttgaaaaatgaatactgtaaaagctcaatacaaatcctccaaagcacatgcacttctaaatcttttggtaattacattcatatttaagcataaccaaaataaaaaagaaaactgaaaacatttcccttttctctattccctatgccttgtgggctctccagttgatagggtcaatttttagagttgaaagggttcttcaagatagtccaccacccttatttagggtaaatgattttcccaagatcatgcagcacattaatggcaaaaccaagactagaaaccaggtcttgactcctagtctaatatgctttccagc

SEQ ID NO: 335433 - DNA, 1000 bp, Homo Sapiens
tttgggtgggggatcacatttattgtattgaggtcacaggtcaagtcattcactagtccccactaggaggggtggcagggacagggctgggggtggtggggcgagtcaccaaggtggggggcccagggagggcaagctcctttacccatctttgaaggctgttggggcctgggaatgtggaccagccccgcctgggccccagagcagggcacgaagccccacaaaggtcctgccgccacagaggagggcaacagagccacaggcaggcccagaggggcgggtggacggcactgcaggggctggcttcatgccttcttgaggttctctgcgcccatccagctagagctcgtcatggtcgtcttcggtgggtgcttcaggcggtggctccgggcaggcggctggcgtcatcagctccatgaggtactcgcagcgactgggctctgtggtgctggtcaccatggtctctttcccgcacaggaggcgcacggtggtggagcggttggggccctgccagcagcccgtgccttgctcatacttcatggcactgaacttgtcgtggtcggggccaatccatgagccccaggtgccaaggctggtgggagagcccccgagtttgggtttctgcgagacaagcttgaaggggcagaggcggtagacgtattcgttggtggtgagctcgtagcactggctgtacaggtaagcaaactccccgttggggccaaagtcaaaagaaatctcttgctccaggttcctgatggactcctccatgtccttcagcgaccgctcggcctcctcgaacttgttgcgggcctcctgggcagcatcgatgaaggcctgcgtctgctcgtcgtagggcggcattttgtcttcctcagcagggctggccggcttgggctgctccccctgcacctcggaatcctcctcctcctcctcttcttcagcctcttcttcctcctcctcctcctcctcctcctcctcctctgtgggcgacgagggcact

SEQ ID NO: 335434 - DNA, 1000 bp, Homo Sapiens
tttttttttttttttctctctcatcattttatcttttggacaaacaaatagaacagtcaagtaaattacctgaacaagcataataagtacaaatttgattactgatcactaaaaccaccaaaaatatattgacttagggttcataatgcatagttatcagttcaagctaagaaagccttaagaattcaataactcaaaatctctttgagatttaaagttaaaaagtaatatgtttctaataatttccaatgtgcaggattaatgacaactgtattttgcattggcaaattatctcagccagaagagattcaaatgattttcgtcaatgccagtttataaactagcagcacatgtcaatgccaagcttgtgaatggattggctgagaaaaattatatgagttagaagggatctaagtgctatactggtcactgattctatttcacaaaagctaccatttttaaaagctgaaaatgtaattggtgttgacaaaaacatgttaagttcaattactctgtatagctaaatatagaaaattggttaatgtttaaagcaacttcttatttgttaagaagataattaaaaatagttaaaactgaacaattagctatacttttatattattaaaatccaatgaatttaacaaatgaaacccacaggaaaagagatgatataattcaaggcatagatttgacatgtcagaatacggcaaaaacaataaagatagcatcagtaaaacagttgtaaaataagtaaacaattttcaagtgtgcaaaactagtcaggaataaaagtgctatgtgtggatacctggttttcaaatatttgtttcaaaaactttcagctgatggtggaaaaactagaaagtattatataagtaaaaatttaaagaatatataaaacctactttattatcttacattatgtccttgttatgtcactgctgaatctgaggcctatttaattaccagatacaacacaaaaggaggtaaacacagtaca

SEQ ID NO: 335435 - DNA, 1000 bp, Homo Sapiens
tttttttttttttttttagtattaaatgaacagagatggtgagttctttatttacattattgtctagataaaaaaattcataaaaacagatgaatggtcataaattatttaccccctaatggagtgaactgccaaacgtaccccatgctgctagatataggacgcagagtgcaagctttatgtactacagtgagttttgacaaaccaaccatttcgtgtgtgtgtgtgtgtatgtgtgcaagtgtgagagtgagggggtgcatgtgtgcaagcatccttcattcctgacaagagaagaccaacgctaatgttggcattcttccatcgctccctgttccctaagccaggctccactgagaacccctcctggctccgaatgaacatggagcatggtgtgcaaacacagctatcctgatgtcatggaacgaggtcacggacacatgactgatcaaagaagtggggagatggaaaactgtgagaaaggaaactccaaaaaacaccatgttccaaggctgccccatgttttacacgtgcagatctttccttccttgtaggagagcagtgggctggctttggtggcgtttgtactggaatccaataagcacatctgagggctggtcacccctttggttatgcagttcctctcctggatacattcagagatacttcttcacgacattcaggtgatgcgctcttgaaggtcctccttccaggaggattttgccaggtgggatgggctgactttgaaccccaaaccctcaagtttttccaccgccatccagatgtaggccctcccagttgactatggctcttttcccgagtggctctcatcttgtttgtggaagagttctctgggcctggagaagggaaggggctgggctgacacagccatcgtgaggagggtcagcatgaggaatggattttgcaagagaggcggaaagtgtttggttttcctcgaagcatgggacatcatcgatcatggtattcaaaatgtcttttg

SEQ ID NO: 335436 - DNA, 1000 bp, Homo Sapiens
tttttttttttttttttttttttttttttgataacaattgtggttttattgtgtccaaccaatgcatcaataaatgaacttgaagcccaagcctgtgtgtgtcctaattccactcacccagccccgggcacctgccccactcacctctggctttgagaaggggcgtgtgtcggtggttgcctggctgcagtgtctcacctaggctaggtgtgcaccttagaagcacaaagcgggcacagttgtgggtaataagcttactctgcaggccgctgggtgtgtgcccaccctcctgagccccgaaagaggacctgtcagctcctgagaggctgctacgggtttgccttgttctgttcaggcatctgaggtaagaaggaggggccagaggagcaccttgtccagccttcaccatgagagcgggcatataaatataaatacaggtaacttataaatagaagtccagctctgagctgaaaaccacaggcaggataaagagcagcctccaagagcgaggctggcgggctgggcactgagcggccactctggtgactgacagcaggtagtgcactcctgccccctggtggctggagggagcggcagatcccagcctccagggctggttggcatagcaccttaaagagggagaagccattggctttacgaaatcaagagaactggaaaggatctaggagatcatctaagcaactctggtcatcttacagatgagaaactgatgcccagagaggggaaaggtcttgctgggtcacaaagtgggctggtgactcatagcccagttattctattccatctcaaccagtgaggcccatctgctccctgagcaggaagaggaagtaaaacaattggtaggggtggggaattttttttttttttttcgagatggagtcttgctctgttgaccaggctggagtgcagtggcacgatctcggctcactgcagcctccgccttctgagttcaagcaattctcctgcctcagcctccccg

SEQ ID NO: 335437 - DNA, 1000 bp, Homo Sapiens; identical to SEQ ID NO: 157387

SEQ ID NO: 335438 - DNA, 1000 bp, Homo Sapiens
ttttttacaagtgggcatgagtttttattctcagtgcacagcagtattggtttctgttcatcagcaaaaagctttattggctccaacaaattatcccttttaaaactcctcttcttcttctggtctcagtggaacaacacatttgaatttcagatttgcagtttatagcattttttttccctaagaaccatataaatacatgcaaaaccttgtacatagagcttaaataatatcaaaatgcaaatatagattgggtgcactgttaagctgaattgcaaattatggcaacacacactggactggggtatacgttgctttgatatcaccatttgtttgtttatgtcatgcagaccacaatagtcaatcttttgtttttcttttttgtacaaaaataccagtgcttgttatactagttactaaaagaagaagaaactcaaaattcctatctgcgtgctaatttgaaaagaacaacgtagatagatttgttggcacatatatatggcatattcacatatggcatatatacatatggggagaaaacatgaaccaaaggccaattcagttatgggagctcatctccttccatctctcctaatcaagagcaaagggaacagcaggcctaacagcagggttgggaaggcaaaaggactggcactgaactaagtgaaagggcgtctggtctattcagaggaagaggctggaatggcttaacaatagcaggcatttataagtgcccaccctcaccaatgcatcgggggtggtccctagatatgaaaggtgaggaagtctctgcatactgtgatggtaccacgggctgcttcaattgtaaggcaaaggaagcaggaaagaaaggaagggatgcatttagaggcttttccacacaagcgagtgtgccacgcccctctgggttttcagcagtgaggtaaccattcagatttaaccatgccaactctcctctctgaagctcaaggggaagaagaaactcaaaccctaaagaacc

SEQ ID NO: 335439 - DNA, 1000 bp, Homo Sapiens
ttttttttttttttttcttttttttttttttttttttttttttaaaattataaatcttctctttattcttcttcttcttcttattattattattattactttacagagacagagtcttgctatgttgcccaggctggtctccaactcccaggctcaagtgatcctccctccttggcctcccaagtgctgggattacaggcatgagccactccgcctggccaagcaggtcttctaatatccattttatagacagacacactgaggcttagagtggctgggtgactggccacaagtcctgcagtgctggtatttgaactcaggtgtgcctgacccaaagctttgctcttcatcacatttgtacctcctgatacctccgggccttctcttcccactggaagtgctgccacccaccaacatacaccttgttttttgctcatcctaatcctccctgacttcagggcccataccaactcctacctcctggaagagccctcccagcccaccttggcccacaaagatctgagcaactcctcccaaataattaagaggagggaaactggaccccagaagtgggaatagagggaaggatggataaaaaaggatggaatcatgccaagatcaaaatgaatccttagatgcttgggacttatgtctcagagctgagggcggtgctgagaaacctatctgtacctctgtttcctcctcaacaagatggaagctcgagtgtttgtgttgctgtctcatccctgcccaggggaggaggaaggaagtccttaggttcagaaatcaacaaatacattagccaccctgtgctgggtgcctactatgtgccatgtgcttttacacacagcaaccccatgatggcgggccgggggggcctcatcctcattgtatagatgaagaaacgaaggcacaggcagtgatgcagctggcccagggacagggtttgtgagtggtagagacaccatttgacccagttctgtctcactctggaatctga

SEQ ID NO: 335440 - DNA, 1000 bp, Homo Sapiens; identical to SEQ ID NO: 157389

SEQ ID NO: 335441 - DNA, 1000 bp, Homo Sapiens
tcagtgtgtggtggctttttattactggtgtggagtgggtgtgggggcaggcaggagtggtggctcccacctaggccagctccccatttccaaacaggagctgcctggggtgcccaggagggcccgggaactgggggagtgcaggccggaggcaggtgcgagcgaggagcagatctttggtgaaggaggccaggctctatttccagcgcccggtgactttagccttcccgcgggtcttggagactttctggttatcgttgatcctgtttcggagaacattgatctcatatttctgctgcttgaacttctcctgcaggtcgaacttctctgcctccaagttatagatgctctgccacagctccttggccttctccctcagctgatcttcattcaggtggtcaatggccagcaccttcctcctctcagccagaatcttcttcttcttttcccgctcagtctgcctcttcccacttttccgctctgtctgggcctgcttctggatgtaacccccaaaatgcatcatgttggacaaagccttcttcttccgggcctcatcctcagccttcctcctgttctcctcctcctctcgtcgagccctctcttcagccaggcggttctgccgctccttctcccgctcattccggatgcgctgctgctcggcccgctctgcccgacgtctctcgatcctgtctttgagagaaacgagctcctcctcctctttcttcctgttctcaaagtgagcctcgatcagcgcctgcaactcattcaggtccttctccatgcgcttccggtggatgtcatcaaagtccactctctctccatcggggatcttgggaggcaccaagttgggcatgaacgacctgggctttggtttggactcctccattgggccatcttcagcctcctttgcttcctcttcttcttcatcttcttctgccctggtctcctcggtctcagcctctgcttcagcatcctcttccgctgcctcctcctgctcttc

SEQ ID NO: 335442 - DNA, 1000 bp, Homo Sapiens
tcagtgtgtggtggctttttattactggtgtggagtgggtgtgggggcaggcaggagtggtggctcccacctaggccagctccccatttccaaacaggagctgcctggggtgcccaggagggcccgggaactgggggagtgcaggccggaggcaggtgcgagcgaggagcagatctttggtgaaggaggccaggctctatttccagcgcccggtgactttagccttcccgcgggtcttggagactttctggttatcgttgatcctgtttcggagaacattgatctcatatttctgctgcttgaacttctcctgcaggtcgaacttctctgcctccaagttatagatgctctgccacagctccttggccttctccctcagctgatcttcattcaggtggtcaatggccagcaccttcctcctctcagccagaatcttcttcttcttttcccgctcagtctgcctcttcccacttttccgctctgtcttctggatgtaacccccaaaatgcatcatgttggacaaagccttcttcttccgggcctcatcctcagccttcctcctgttctcctcctcctctcgtcgagccctctcttcagccaggcggttctgccgctccttctcccgctcattccggatgcgctgctgctcggcccgctctgcccgacgtctctcgatcctgtctttgagagaaacgagctcctcctcctctttcttcctgttctcaaagtgagcctcgatcagcgcctgcaactcattcaggtccttctccatgcgcttccggtggatgtcatcaaagtccactctctctccatcggggatcttgggaggcaccaagttgggcatgaacgacctgggctttggtttggactcctccattgggccatcttcagcctcctttgcttcctcttcttcttcatcttcttctgccctggtctcctcggtctcagcctctgcttcagcatcctcttccgctgcctcctcctgctcttcaacagctgc

SEQ ID NO: 335443 - DNA, 1000 bp, Homo Sapiens
tttttttttttttaaaattaatactaggattgcaggatgttctttaatctgcgtgattgctttattgtacaaaaagtttccagtaacagtaaattggttttaaaaaaggacaaaaaagtcattttggatagaagtgcttcactaattgctttatttaagcatacaagaaaaaaagttttatctgaccaattacgttggaagggttttattacctttaagaagccattagctaggataaaacactgaaagcacttgtgtcaaaacaaataaataatgtaaataacgctctctcaattagcagagaaaacagtgaatccgttaaatcagagacacacatcacttcacaagcatggcccagccagcaccaccacccccaaaacgaacaaaacaagagacagcagttttcagttacaatcttgggaaagatcaggagctttggaaaacgcgtggtaaacatgtctgtttctccttctacctccactcaacctgagctgcacccggacactttaaaggaggcatgtgtccagaggctgcatccagggatgcccagagggagcctgccctgctaggcctcctctcagagggcgcatcccaggcagaggagactggcctgggtgatcgttacctccacggcccagtagagtgtggaaaaacatgaggtgcccacagacaatggctgccagcgagtaaagggaaagaaaccctgaggtaccatgattcttttctcttacttcctcaaatgctactgatctctccccaagtacaggctcaacagaaaaatacagtggtttgaggaccccaagaagtcagcacacaggccaggggccagctccaggctgggtctgtctctcccaccttgggaaacccagcgctaaaacaattttttttttttttttttgagacggagcctcgctctgtcacccaggctggagtgcagtggtgtgatctcggctcactgcaacctctgcctcccgggttcaagctattctcctgcctcagc

SEQ ID NO: 335444 - DNA, 1000 bp, Homo Sapiens; identical to SEQ ID NO: 335443

SEQ ID NO: 335445 - DNA, 1000 bp, Homo Sapiens; identical to SEQ ID NO: 157390

SEQ ID NO: 335446 - DNA, 1000 bp, Homo Sapiens
ttttttttttttttctttcatgactgatttttaatcacactgaggcaaatatccccctcagacagaggctgcaccggtacagctgccatctcctcttggtggtgtcctttgtcaagagcatgtcagggtgatgagtcatctgggacaggtcaccctcccagcaccgagaagccgacgggggaggaacagactcctctgcattgtgatccaattgtgaacaaaaagtcctcttcgtggaacaggaaaaatacactccctctaaacaatggattgaacacagatgtgatttctaaagaagactgaaggcagggatactgacactgaagtcctgcctgtgtaataacaccgaagagggcagggaatcgctgcgtcctgtgacttgaaggccatggaacgcacagacggcacccagcaggtaggcatgttctcaggggtggccagcaagggctctctcagggtacagctgggagaagcggccgagggcccagatggggaagatgttcctgtagctcgtgtaggagatggcacaggacttgttgaagaccccagcaatgttttcctgcggccagtcgccattggggagctgtttctcaagtagacaccggactcctctctcctgggcctcgatgtcaggatgccgaacggccatcagccccatcatggcccagcatgtgttatggatctgggactgggcactctgcaaataacgccgctcctcgcaggactcaaagtcctccccccagcctccgtctgccatctgccgggacagcaggaagtcacaggcccgggagacctctgcacaggcagtcccatctcggtaggtctgccccatacaggcgaaggcctccaggccaaaccaggtgccgtaggtgaagcaaactccccaggagccttcccaggagccatcggccctctgctgccgccgacagaactctaagccctgcgtgagggtctcccggatctccgctgccctgtgctccgggaaacgcttgtggaaata

SEQ ID NO: 335447 - DNA, 1000 bp, Homo Sapiens
tgttttttttttttttttttagaactagtgacactgaattctttatttaaaaaaatttttgtaacacacagtacctcctcttctcttctatttttaggaagaagttataacaagttttaaatatctcaattctgaaaaacaataggcttttaaaaaataagacttgattaccagaaacaagtaatatgtagttacataaccattttcatatcactactcatttccattatttaccaattcatctttgatgcaacttggaaacaattaagcagtcactagacacctgttttagaatctgaagaaattattatccaccacaggaatctaatgatatatatatttgcatatatttaaaatttcatgagggaaaaggtaataaactattctagttattttataccaaatattgatattcctagtcaaaacaacaaggaattaagatctttctccaggtgaactgctgactatatagaagctatttccagcactttcttctggggattaaaaatgatttatttccctgctggctaaaatgataaattatatattacaagtaagtccttcagaagtgaatattaattccttaagagaaccataaaatgtatttttaaaaaattctcttaaaaactgaaaacaatccttctctctaaacctatggcattaatccctacttgaccaaagaaaaaaaaaaaaaagaagggcatcatgttcatgatctaagcatgcataaataaggaagcaaatgtatcactgtcttaatagaatttggcaaaccagaagaatggcctaaaaataaataaataaataaataaaagaagaagagtgtaccttatcttctaagtatgaaagtctaattctgtaggcctatgtcgcaaatagtgccccacgaggaaatgcagggaggaggcaagtagcatattcctatatacattttcttgatattctggttgtctttcaacaatgcattacagagaaatattctttttattattacaagcca

SEQ ID NO: 335448 - DNA, 1000 bp, Homo Sapiens; identical to SEQ ID NO: 157391

SEQ ID NO: 335449 - DNA, 1000 bp, Homo Sapiens
ttttttttttttttttttttttcggtgaaagagaacagtaaagagaataatatttaatagtcatttgtatttttcatagacacagatttagggtttagagaattcaaatgcagacatgtttatggtcaggtagtagaccagtggaaaagatcttatttcagggaaaaagtaaattccgatgggttgaataaagttaggtcatcattaaaaagacagttcagtatcaatatttcaatttatacagcaaggcatttatgaagccagaagagaaaaacatcttagtttttttaaattaatttctttctttatagaatttgtagtatatgtggagaaaatgaaaagctgttacagtgcttttagaaatactgcccttgggctgtttctttatttaggtaaggaagagctgcaggaagatggtgctaagatgttgtatgcagagttccaaagagtgaaggcgcagacacggctgggcacaagactggacttagacacagctcacatcttctgtcagtggcagtcctgtctccagatggggatgtatctcaaccagctgctgtccactcctctcccagagccagacccagtatgcttaggctctcagtctgaaaaaccttctgaagcggaggaaagtaaataactagtaattgtcccatgatggatccaagaactgcatagcaaaacattctattactgcagagtccaatctcaaacacagacttggtctgggatctggaacttagtgcattgaacatgtcaaaaaacacaaagcatgtgaaggtcattgttgtgtctcgaggtgtaatcacattgtctcgtagctcacgccagaagacaaacaaagtcccacaaacaatgattattgatgaaacaagtattttaagtatcaagtttttagtcaaaatgctgtctttccagttgcgaggaggtttacgaatgacatctttatccactggttctactccaaggctctgagctgggggtccatccataataatattga

SEQ ID NO: 335450 - DNA, 1000 bp, Homo Sapiens
ttttttttttttttttttttttcagctgataatcagtttaatgcgaaattgactaggctgagcacagtagaatcacaccgctctaaagcacttaaaattctctaattatatggatttgcccagtgattcataaccttagagtttaagaaaaattccttgcacatagtagatattccaaaatatatgttggataatcagtgttactgttgctaattcaccactcactgtaaaaagtgtgaaagtggccgggcgcagtggctcacgcctgtaatcccagcactttgggaggcggaggtgggcagaccatctgaggtcaggagttcgagaccagcctggccaacatggtgaaaccctgtctctactaaaaatacaaaagttagctggacctggtggtgagtacctgtaatcccacctacttgggaggctgaggtgggagaatcacttgaacccaggaggcggaagttgcagtgagccgagaatgtgccactgcactccagcctgggtgacagagtgagaccctgtctcaaaaaaaaaaaaaaaaaaaaaaaggtaaaagtgaaaccgattatgcacagcgggccttgtgactcttgagtggattttatttttgcactccaggatgcagtgaagacggtggaaggttcatcttcacaccgagggccctcagtgtcgaggtgactcccggcctgaggagggctgaggcatcctgaattttgagagttcgaggttgaggtctaagaaggtgtacgtgctgtagtcatgatgctgcaggttcttgtaggtagtgttgtcaaacggctcagcaggcactggggctggcttttttggtggactttgcttcttggaattctgtggctgacccttttcactcttccctgattccgcagacaaagaaaccgtagaagcaagtcctcgaaacacctgggcttcctggagcatagtcttcagcgccccggctcgtccttgccgcagcaaacacggggcagccatggcggtgaca

SEQ ID NO: 335451 - DNA, 1000 bp, Homo Sapiens
ttttttggacaactttggcacaagtgctttatttgtgctattgttacaatggtcacaagtacatcttttatctcatttctcccagaattaaagatatactttagtgatctgcgtgataatatttataggtttatttacctatatttaaaaatgatcagtggctagacatgtctagaaatatatatggcctaatatgtaacttctctttgataaagtgaaaacaagtaatatataagctaatattattgaagcaatattttttggtacatacttacttattttattgttttcgatctgcatgcacaatatgaaatcataaaagcaacaaacatcaccacaccaacactgagtaagatcatttctatcaggccaaggaggtttatttttccagttacttgacttctgaacatgtttgccttctcatcaccaatggtcccagtctcattaagccaaagaataggcacaatatagttcctcttcagattctttaatacttgaattttttctgatggcttgaccaataggttgacctgcagccgttttgcaaattgtaaagtgaatccagttataggttcaatatccaagtatgtcctatgttcttcttcatttgggtttaatccatcaataggttctgaaacatcaggacttgcatacagaaaatgaggaagtgaaatgtacacaggtctcccttctttgcatttgctgatgtctagcacaccatatgatgtacaattttttgagataattttttctgtgcagaaacaatagttgtctgggttttcaactggagaggcaaaggccttggatggaagaacaaatctatacacagggattcctttcagattaacgtcggattcaaatacagcatagattgacctgcaaatatcagaagaaaagaactgcaatacctggcttttctcaacaaaaggtggaaatgaggctgcatctgtaccattaatcatgtcgcagtgactttcccaataggacagattccttttac

SEQ ID NO: 335452 - DNA, 1000 bp, Homo Sapiens; identical to SEQ ID NO: 157392

SEQ ID NO: 335453 - DNA, 1000 bp, Homo Sapiens
ttttttttttttttttgacagcgaagtttcatttatttgtgcaaatacaggcatgagcaagaatgttctaaacaatgtaacgatttccagcattgattacagaatttcctctgatcatttgatttggttatagatgaatttaaacttcaatttaagcttgacttttaaaactccccctctgcttcctgatgaaccagcataattcctaaaattacacctaaacaagtctgtcttgacacattggggtttgcctttagaaacatttagaatctagtatgggcaaggcggctggaacgaggtttgtgatggcacaatgatttatgcttagttctgtttggaccactgatacaaaatcattgtcatttcatttttagggtttccataattgtagcaattatctctgaaacatttttgtccacacttatttggataaagttttctggagctgctgggggctccagagtctcaaactgggactgcaataattcagggggcataaaatgtccctctcttttgagtaagcgtccagagatgacctcaaacgacccgctcagatggaccaccaggagctgcatctcagcctgctttgcttcctttcccgactcctcacacttcagagctacaccatcttttccttgtgttaatatgtctctgtacgttttcttcagggctgaacaggctagaaccacacgctgtccagaggctacatctcttagtaaaatgtcatgcaagttacagagccatggaatccggtcctggtcattgagcggtatgccttttcccatcttccttcgattttcctccgggtgataatcatcagcatcatagaatttccatcccagctcagatgccagcagggcgcccacggtggatcttgaatagaaggtacctgaaaagctgtatataatgaaaacagaacaatgtgattaaattctagctggatactgttgcctaacaaaggtcctctttctttcactaaaaagctatcagagaggtgtta

SEQ ID NO: 335454 - DNA, 779 bp, Homo Sapiens
gtttgacgcctgctcaaatatggaagcacctttaatgagagttgacatgacttgggggatttcctaaccatcatgctcttaacacaggtgcctggttaggcaggttccttccacctggctgagcccagacaccgatctgtgagagcagcacagtgcaagggaaggctccctgcaagggagggctgcaggctaggctggcccttcagggtagtgttttggttctttcctgaagcaggaggcctcgcttggagcattgctttgctcctaaattacttaaccaaacagcgacttattttccacagtcaggtagacaaacaccacaatgatgaaaataccaagcacagcaagcttcaagcccactgggaaaccttcttctctccagctctcgatagtctggtcttccgcgcagtagtctctctctttggtgatagtcccatatgtgattctggtgcttggtgctcttgcagcccaccttcgctgtcatcactgtcctgcgctccatccagctctctgggtccattcatcacaggtggtgcacagggaggtgagaccaacaactgtactaactttttttcatacaactttctggtggaaggtagtattgggccaggtgaaaatccaagcttctcaagttggttctgcaatttacagtcactcagacacttcacatccaccatgatgatagaagtttggcctcttttctgatggtagaatccccttcacatggttatctaaagtctatgcaatcgagttggttactaaagctgggtgagtttcac

SEQ ID NO: 335455 - DNA, 1000 bp, Homo Sapiens; identical to SEQ ID NO: 157393

SEQ ID NO: 335456 - DNA, 1000 bp, Homo Sapiens
cactgatccaggtatctttaaagaattatataccaaccacaaatcctttgtggaaaatggcacggtattaaaaaataaaggattataaatttaaataaattcaggtttcagatttttggatttatagaactcaaaattcttttaacaaatttgactcaagctttctcaagcatttacctttctgctaagaatgaaaatgcatcagaagtttatttttaaatagaatattggctttcctagtattctatgtatgactgttatcctttaagaaataaaactagctttgcgcaggcctcccttaaactgaaattctagatggtgatgcccaatctgtgagttaaacattaatgagctaatgaaatcacagaataataagtaattctgatatttttttggataattcatgccataaaaccattgctatctcaattacctgagtatttcagcaaaatactttttggtccaaatcattacataattcagaaagtgcttcctatagtccatccacaagagaaagccagtcatttgccatcaccagccaaacatttctgcccactcttgatatacatacagagatacccatcaataccattacaaatcccagaattcattaagtcttttcatagtcactttcacccacatacctgcatacctgctttacaatggggtgcatatatacaaacaagctttgctagacaagcaaaaaagggatataaggaatgtgtggaatttcttggaagtgcctcttggattagagaggtatttgagaaaaagtagtagaaaaagagtgataagaaagtaattctatgaacaaactgaattatctgaattatcatctagataattctttatttcaatgtgaatagaagagtcttaaagtgttttttatctaagtttttctattaagtaatggagatagctcagggccaaaagaattgaaagtggttatttatatattacatggtttacaaatattcaaatgagtctgaattttcttcct

SEQ ID NO: 335457 - DNA, 1000 bp, Homo Sapiens; identical to SEQ ID NO: 157394

SEQ ID NO: 335458 - DNA, 1000 bp, Homo Sapiens
tttttttttttttttttttttttttttttgggacagagtttcactcttgttgcccaggttggaatgcagtagcacgatctcggctcactgtaacctctgcctcctgggttcaaatgattcttctgcctcagcctcccaagtagctgggattacaggcgcccgcccaccacgcctcgctaattttttatttttagtagacatggggcttctccatgttggtcaggctgatcttgaactcctgatctcaggtgatctgcccgcctcagcctgccaaagtgctgggattacaggcgtgagccaccagcccggcctatttttccttttttaaaaaaaccttatataggcaacatctaccttggccttatcctaagctacatctatgaaatcataggactagttatacttgagaaaaaaatgttaaaacaaatatgtaacaataatgattattatttagagatggggtctcactctgttgtccagtctggagtacagtggcacaatcatagctcactgtagccttgaactccttgcctcaagcaagcctcctgccttggcctccccaagtgctgaaattacaggtataagccactgcacccaactaaacacgtaagtattaaaagagaaactgtatctctaccaccacttaaaatcagctttgctccatggtgggttggtatgtggcccatgctgggggccacagacagtacacccctctctcctctgctattgaacagatgcaaaacctcaggcctgagcccaagcaccaccccttagctttacaaacgtgcagatctctggatgcagatactccaggagtgtggcctcggcaggtctgggtggagccctgattccatgtgttgaacacgcttcctggagaggcagccgatgtgcagctgaagcaaagaacccctggaccagatgaccctagagggccttccctcagcaacaggcctacgtgtatggatgctggggtgggaggccagcccgctggctgtggtgg

SEQ ID NO: 335459 - DNA, 1000 bp, Homo Sapiens; identical to SEQ ID NO: 157395

SEQ ID NO: 335460 - DNA, 1000 bp, Homo Sapiens
tttttttttttttttttttttttttttttttttttttttttttttccgtataagaatatattatttaaaagacagtttaaaaataaaattctgtacagcatcatgaattcctttttttttttttgtatcagtgaacaaaatggttcttagaaaacatggtcttgtggtgccaggtgcccagggcagctcttccctgcacaaggatcccgcgcagctcggccagcccgtccagaactgcagccacgccccccgctttcctcaggcacagtctccttcactgtttttcacatctctgcttctctctctggacttctcggtggccccagacgtcaagctgtcagtcttcttctgtaactctttcatggcgtcatctatccgcttcagctcctcgtagcgatctcgggattcccaaagtggctgcagcatgatctcctcaaccatggggaagagcttggtcactgtttcaaacattgggatcaggacaaacttgatgaacccaatctgggctgtggccttggtcactttgtctcggtccatgaacggtgccacaggaaggccttctgacttctcacggtcgctctgcataaaatattcctctaataaacagtccacccaaggctctgcgacttccattggacggacctcgttagagatatcacagcattttatcaaaatcatcttcagcagggtcatgtgctcctcgttgctgtagtcaaaattctccattttctctttgaaagaatccataatttctgcatgtcttgccatgtcagtggccaagattaatgtgatcattccctgtcggatctgcttgaacccatcaggtgggatgttggagaagatgttgcactcaggctcggcgaggatctggaaggccacggcgcagtggtggttctccagcggtgagatgtcattgtagcggaccgccagctctgtgcgggcattgatctggtacgtgttgttgtagccgggatggtccagatcgtggcagatggccgct

SEQ ID NO: 335461 - DNA, 1000 bp, Homo Sapiens; identical to SEQ ID NO: 335460

SEQ ID NO: 335462 - DNA, 1000 bp, Homo Sapiens
tttttttttttttttccattataatagccatctttatttgtaaaaatccagatataaaatgtattctttcagtctttccgggtgttccttttttacaaaaacaaaaaggcacataaaaaccttccccgctgtcatttccacagatggatggttttcaggcagccctcccccctccccccatagagctacatgcttcattccaggacgtcttgcttccccacatgctgcggtgctttcctaccagggtagagttccaaactccaagactgaagtacacaaagagggggtgggtgtcggatgcagagtgtgtggcctgatgctccacggcgtgcaggacggggggctaatagtaggtttccttctccacccagccgccagggcgtcgcctgatgatgagttttctgacttcgtcatatacgaagatgagaagagagtaggggaaggcacagaaccaccaggtaggtttgaggggatacatcctaagagcaacacccattccagggcagtaggaaaggaaagcagccagggctgtctcttcaaagaggccaaatatcaagatcttgttcttcatcccctgctggaagaccgaattcctcctggtcttacagatgaccaagtcggcccactgcaccaccacgatactgacgaagaaggctgtgtggcaggtgaactccacgattttcctctgctcataggtccattgccttctgagatgatgcccacacctttggcaatagctttagctgtgattggatggtctcctgtgaccatgatgaccttaattccagcacttcgacatttgcccacggcatcaggaacggccgcccgtggagggtcaatcatggagatgagcccaacaaagcacagattatcgatagggaaattcacatcgtcagtgtcaaactggaacccttcaggaaactgttcatctggcagaaagaggtggcagaaacctaggactcgttctccgaggccccccagctccaaataggcgttctga

SEQ ID NO: 335463 - DNA, 1000 bp, Homo Sapiens
tttttttttttttttttttttttttttttttttttttttttttttttttttttttctgttaaaaatgtttttattttttagtaagcaaaattttacgaaaagtcagattcacccgtggagccagaaccttctttctcacgggaagactgtggtaccagtgcgtgttggtcgggtggttcatcattagtaagctcccgtgggccagcggcagcctgaccaccgccaccctcctggaggggcttttcccacgggaatccttatgccggaagacaaagtctctgcaggcaccgaaggagacagaggcaatggggctcccaggggccagttctctttcatcatctcggtgctccccgatgtggtcacagccatctttatacctgttgatgagcacaaagttgaaggtctgtccagtcaccccagagacgtgatcccggatgcgctctagaactgggatccagggctttggagacagcgtgaggcctgaaaatgtgtaggtcagcccagcgtcgccatacgttgcctgcttcctgggcacactgtgccacttcccgaatacctggactctggccagtgctcctgtaaaatattctacttctttctccaactcttggaaaatctcatctgcctcagctttgccaaacaggactgtgtaactgcagtccaggccctcagcccgaatgtgccgccagctagggcctgctgagtggcctccattccctggggcctctctcctgggcctcttccttgtgctttctttgtctcctcccaacacagctggctcttctccagttggctcttgctcctcctgcttcctcaaaaggcccccttgagcccctttcaccaggaatctgtccatcctcgctgccccccaccagtgttaaaatagatcagtctagtgatgctcaagtggatacgattcagaagcgagacgcaaagaggttaaacacgggtaaaccgcacgcaaaattctgatatcactgcaacacgtccgtggggtggg

SEQ ID NO: 335464 - DNA, 936 bp, Homo Sapiens
ctaccctgagtccctgcccctccatagtactttccacagagcccccttcacgtccttgtttcttagtgtataaatgagaggattgagaatgggggtaattatagtataaaaaagggcaacaaattttccctcacgctcagaataattgtggatggattggagatatgtgtagatggctgagccataaaaaaggaaaactactaggaggtgggacccacaagtcccaaaagcctttctgcgcccagccgttgacttcaccctcagcactgcatgagcaatgtgcacataggagcctagaataagtgctgcaggaacagccacgactatgactcgggccacaaacatcttggcctctgttccttctgtgtccgcacaagccaacttcagaaatacaggcatctcacagaagaagtgattcagtcgatggccacagagaggcatggccattgcgagacctgtctggatcagagagttcacgaaacccgcaccccaggaggcgatagccagggtctggcagagatgggggtgcatgatggccatgtagtggagtggacgacagacagcagcatagcggtcaaaggccatcaccaccaggagcacacactctgtggagcccagggctaggtagatgaagagctgagccacacaccctccacgggtgatggtgcggtccaccccgcaaaggttgatcaggagctggggcacggtgctggtggtgaagcagaggtccaggagggacagatgagagagaaagaagtacataggtgtgtgcagccgaaggtctagccaggagagagcgatgatgatggtgttgccaaagagagttagggagtagaaaataaaaataaagacaaacaggatgggctccagttgcggccaatctgagaatcccaccaaaatgaagccatcttcaaaactggtgttgaaacttcccat

SEQ ID NO: 335465 - DNA, 1000 bp, Homo Sapiens
ttttttttttttttttttttttttttttaacaaatgagatagtggaagacatttatttttagcaatatggaaacattccaagaaacagaagccctctcaccatctgagagaaaatgaaaatccactatgagagaaaactgaagactttaatacagatttaagtaaaatggcctggtaatggaaaagctgactgaggaatatgttcctggctgtaacatttcttcactcaggctgtagtttctgaatttaatgaagggattattggatgacactgaagagatcgttggactagcagatcagtgtgaatgtttcctccacaactggcacgtctttcctatgacgattattgagggagatgtctctttgactgtctatggattatttggaacttttgtcaaggagccatagagttctgcagaccacacacctgtccagtgtgtctgtagccagtattttgtgattttttttcttttttgagacaagatcttgctctgtcacccaggctggagtgcagtggtgtgagcatggctcactgcagcctctgcctcctgggctcaagcgatcctcctgcctcaacctcccaaagtagctgggaccacaagcatgcaccacaacgcctggctgacttttatattttttgtagagatggagtcttgcaatgttgcctaggctggtctcaaacttctgggctcaagcgatcctcccacctgggcctcccaaagtaatgggattacaggcgggagccactgtgcccgatcttaccctgtgaatccttcaacctgcctcaacttgagccaacagagctgctggcacctcctgaaagccgactgcgtgactgctgcatggcctgacctagaggctggagggcttctctttggcatgcactgcaatgtgggtcttgagcgcccccacgtacgtgaagctccttccacactcatcacaagaaaaaggcctctccccactgtgaaggcacagatgggccttcaggcttctcttctgg

SEQ ID NO: 335466 - DNA, 1000 bp, Homo Sapiens
gaagttcagcagggaacacatttatttcctcactgcaagaagtccaactgtgtacagggaggagaaaactccatgccacaggatccttctctgacccgggttcctaccatcttgtactttccatcatcagagcctgagtcccaaggttttcctccattccattctaatgagggatagaagaaaatattgagaatttgactgatgtatttaagacctgtcactgaccccatattccactagctagagggtaacaatatgaccccgtttagatgagagagtggttgagaaatttaggccaggtgtggcatgagggagaagtgaaaatgattactagtgaacatttcaatagttattatacgacatatagggattacctctgtgtaggttaaaatgagggttgacatggcagaagaatttcccacatccattaacttcatttcttgtttgttttaatatactatgaggtctctatcttgaatgtattttctgctgtactgacttttcattaaagtttatcacacacttattatattctagcttttgtcattgtgtgatttctctgatggtgaatgagttttgattgttggcacaaagttttcacatttttattactttctcagagcttttctgcagcgtgagttttctgaggagtgagttcgcaagagtattttccatattcattatgtttatagggtttctttgctgtgtgagttctgtatatccatagaagactgggctctggctgaaagaatgcccatataaaatagatttcaacaatttatcttctattctttgatatttggtggaggctgaaattgtagaggaaattccagtgctcactatgttaacagttctctcctgtgtgttcatttatgtattgtgaggtttgatttccagctcagagttttttcgtattctttatatgcatacatttaatcccctgggtgggctttctgatgttctctaaggcttgatttttgactgaaagttctcccacatt

SEQ ID NO: 335467 - DNA, 1000 bp, Homo Sapiens
ttttttttttttttttcttgaataagtagtaacaactttattttaactcaatgtgttgaaatgcaaaaaatattttcagcaacaagatacatgtattatgtatcttatcattaacatcagctaattaaaaacgaggctgaaaagttcaatataagtttttatacacttgaatcttgaaaatcaatttccccaagaactaatttttaaataatttttgcagaatttcattttcaaaaatgagactcaggtaagttacatcttcattttttaaaactgaatgcaaaatttactgggttacagtatacaatgataaactctgacaacaaaaaaatttaaatataataatttcttttcaaacataaagttcacatactgcaaacagaagacactgtgtgatttcattcctagtaaggagttagtcttgcatatgataggcactcaatatttgttcaactggacctaaaatttacatcattccatgaacacttaaataaagtagagctcattaatttgtataaaaaaggtttgtaaaatacactttgtgtgcggaaagtgctgtctttatagctgtctttataatctgagaacactaaaacgaacccactcacccacccaccttcttttgtaagaataaattgaatatttttattttatccatcaaagagcatgcatgtccaagtcagaataattcacctcttcaagtatacttggctctaagccaagtatacttaagtatgttgagctggattttcacaatccctgttctattttagtaacactgggtcatatctatgacccacattttataaagaattctgattaagattttaaatttatgaacaaaatttaaatgggtatattattaattctaattttggccatctaagctcttatttagatccagtttaaaaataaatgaataatgttcatgacaactttttgagatctttgttaatattttaaaacaattttattataattgatgtcctaaaaaggcact

SEQ ID NO: 335468 - DNA, 1000 bp, Homo Sapiens
ttttttttttttttttcttttttttttttttttttgtttctgaaggcatcttttattacggaaatgttcacacgtacacaaagtagagagcataatgtcatgagcccccactcaccaccctgcttccacagttaacaacatctgcctaatcttgggtcatctcttcctcccgcagcctccccaccttcccacacacacaatacccacctcctgcagcaagctgggttattttaaagcaaatccaagatgccataacatttcagccataaacatttatatctttaagagctatctccaagagataaagtctctttttttaaaacataactaccattatcacaacaaaaaaattaacagtaattcccaaatatcatcaaatacacacagtcagcattcaaatttccccgagttgctctctttttttcatgcattggaagaattaatatttttggcttttattttatttttaaaaattatctcttaaatgtctttttacaagtggtttatttgaatctgattcaaacgaagtccagcattgtacttggttaatatgtctcctatattgcttcatctgtaacagttctcctctccccttggttttttttttgctttttggtttttgttttttttagatacggagtttcgttcttgttgcccaggtggagtgcagtggcgtgatctcagctcactgcaaactgcctcccaggttcaagcaattctcctgcctcagcctcccaagtagctggaattacagaagcccgccaccatgcctggataatttctgtatttttagtagagatggggtttcaccatgttggccaggctggtctggaacccctgacctcaggttatccgcccgccttggcctcccaaagtgctgggattacaggcatgagccacctcgcctggcccctcctcttgttttttgcctgtcacgtatttgttttgttggaaacccgagacattggtcctatagacctcactctattctggattttgc

SEQ ID NO: 335469 - DNA, 917 bp, Homo Sapiens
tttttttttttttttttttttttttcgcctacccaaaagctttaatgttggagacgggacaggtgaatggcaaaggtagtgtcagagttttcaggtgaccctgagggctccgacttccatgagagagctgagtgtgcaggagggatcaatgtttacctccgcctctggacagcagctccctagccacacggaggagctcacggtggctggggggtccagcaggactttggggcctgatctgctctgggactctggacaccatgccctcaggcctcatgcggcaaggtcatgggtcactgagtggatgcagggcctagggccctgcccatgacagcctccacgtacctggtctacacacagcccagccgcacgaagattatccagaaaagtctcccgccaggtcctgtgcatgtctgttctgtcccgggcggcactgtcctgctgcctgtctagcttcaggtcctcctcccaaacgaggacgaagtcgatccggggcttggcaggactcccagctctgcaggcggccgcttgctgtccacctggctccgaggcgtgggctgtgctcccgtaagagcccctcttctctgcctcaggggggctcacatcgatcaggacggtgctgtcctcttcctgggcccgtcgccgcagcatcctgctcctggcacagtggcttccggaagaggtctcggaggtcatggcccacctctcagcgtgagcctggtctcggcagtagagtcccgtcctcactgcgggacagagggtggggaggggtggcccttggagccccgcccaggcagtggcagccattcgcatgccctcaccttgcctgcaagtgggccaggaagcaggcaggggaggtgcccagcacagctggccagggcgaggcttcccggctcctggagcaggatctatctttt

SEQ ID NO: 335470 - DNA, 1000 bp, Homo Sapiens
ctctacaagatacaatatttattatcaggcaagaggacagttccattttaaaataagacttttgtaatcattccaattttgtaatcatttcaaaggccacataacttagttttctctacttacacattcagtataaatatgaagctattttctgttcatatcaaacattaactacaaggcacattcgtatcagttttgtgtttctcaaattgaagtaccataccagttctgaggcagtgtcccagcttccatgtttgttaaataccccttgtttgtttcaccattccagcaagtgctgaagggtgtactttttttgagacagggtcgggctctgttgcccaggctggagtgcagtggtgtgatcatggctcactgcagcctccacacctcctgggctcaagcaatcctcccacctcagcctcctgcatagctgggactacaagtgaatttcctaatattccgggaggtcaaaaccaaggctcactgttttcacaatacacacagttctatgtttataactaacaggtttcaaaagaaactcaggacagtatttaaaacaagttcttaaactattaattgaacaatggcatttttaaatatgtaaacacagcggaattcgtgtatacactaacagaagctttaacaaaacatgtagcgtggtgggacactctgccacagcttagctgattggtatcaagccttgtctttggtttctgaggcctcctgagcccttctgtactgggagaccgcactccagagtctgcagaggagaccaccccgtagtcgaaggtatcttagatcttccttagtgatctcattaagaatatccgaaagtgtataaccctcttcaacaatcttttcaattgtctttgcatcagctccttgcagccgcaaccagtctataagctctttatctgttctctgcccgtaggggcctgctgggttctctgtaatacaattcgattttaattttaactgaaggtgatacaattcttgagtt

SEQ ID NO: 335471 - DNA, 939 bp, Homo Sapiens
ttacaaaatctttgtaaaatgcgcaagacgactgcacagtctcctcattgccactttcatgtctttgttcctgaatgtgtagataactggattcagaaaaggagtaataaatgcatcaaaaatagcaagatatttatccaggtgtgatgtgggagaaggccatgtgtagaaaaacatcagtggcccaaagaacaagatgaccacagtgacatgagctgacagggtagagagggccttggctagaccaccagaagaatgtttccaaacagtgaacagaatgaagatgtaggaaattaccagcaagacaaaggagcccacagaaatgagtccactattgacagtgaccatgaactccagttcttgggtgttggtacaggcaagtctgaggagccgagggagatcacagtaaaaactgtcaaagatattaggaccacaaaaaggtaaatctaccacaaaaactaattggaccaatgagtggataaggccaatgatagaggaagtggctaaaaagtatagacacattcttgggctcatgatggtcaggtagtggagaggtttacatatggccatgtatctgtcaaaggccatggctatgagcagcaccatctcagtgcccccaagagcatggctaaagaagatctgagtaatacatccccgaaaggagatggccttgtgcttcttgaaaatatcacaaatcatcttaggggctgtaattgagcaaaatgccatatcaatgattgagaggttagccaggaggaaatacatgggggagtgcagatgagcatccatggttacagtgaatacaatgacaaggtttcccatcatgctcgcaaagtagaacaacaaagagaaaacaaaaagtagaagctgaatctcccgtgagttggtgagtcccatgaatacaaattctgataccacagagtgattcattccattcat

SEQ ID NO: 335472 - DNA, 1000 bp, Homo Sapiens
gaagttatgattaaattttattaaagcataaaacttgtgatacattgtaaataaaacagtagcaaaacataatgccagttgtgaaacgtctgtgtatacgtgcacatgctattctggttctttggtttggtttggtttttttttgaggcagagtctcaaaaaaaaaaaaaaaagaaacaaaactccagtgtcttaatgtcctggcgtgccatctcctggtcaactggtagagcagcaatcctttcctataagccagtggccctctggagaagggcacactgaacacaataagcatgacttttagttttgtatttttctccacctctccctgatgctaattcatacaatattaaatttcaaaattcagcattcttgttcttccagggagcatgaataggaatgaaccacacctaatgaagtaggccctatcattttattgattccttcccaaagatcataatgaaaggcctgtaagaaaagcataaaatcaacagatctcaaacatcagacggaaaccagtaatagtagtgtagcctttccaagaaacttcacataaatgaatattttatacactgaagataatgtgtcatttccacatgtccttttttcctttgatatacatcatgttatgaatttaacatattttggcctggaattattctgcagtttgtaatatttccagttaactttggaaatttagagactttgtgattcctggtatgagttctatggtgtgtagactcttatgggagttcatttaaaaaactaccaccttcatcacatcactgttgcttaaaggtctttccatgtttagtacatttttaatagattctgtatgaattttctcatgaccccaaagacaaggacatttgataaaaagccttaccactttcattacatttgtgaggttgctctccagtataaatcctgtgttgtgccagttttgaccactgggtaaaagacttagcatgggctgggcgcaggagctcaagcctgtaat

SEQ ID NO: 335473 - DNA, 1000 bp, Homo Sapiens
gcaattattttatacagctgttgattgctctgtgttagggaggaagagagaggccattcgaaggaggtgccctgggtccagcctcagccctgggcaggagagagggcgtcagcctgggggtggtcaggcatcagaagtcgtcgtttccccaggagcccccacgcctggagttaaaacagatgcgacatgtcaggtgccaaggctgaactttaaacagcctcaagaacagcacgttgaagtgcagtggtgacgtgatgtggaaactctggcatgttgaaataaaatccatctggttactgtaaagatcaaatctgagttttaaaaacccccttcacatttttgttcatgcgaaggcagaaggacttcaaattcttccaacctgccttacagatctccttaaggaaaagttgaagggatgtgttctttccctcttggtatcgtttagaagtaacaatggttgttgcctccaggacttcagcacgaccatagcaggtgccatgacctgcctggccctgccacctgggtgggaccccagcgccccctaactcccagcccggcccctgagacctcagcttgccatgagaatggccctcctgcctcttccctcttctctccccaacacaaaaaatccaccagacccaaagatcaatgagtcaaaacagcggcagaggaggaaggcaaaagctactgtggatgcagttccttgctctgtgatttggagcctctgaatgtgccatctctgtttatttcgtaggcttttaaaatattttgctgccaaaatcttctatagaagatttgtaattttaacacaggcccctaaatcattccacgtattgatcacaaagaaaagcgaactgtgacatctctttggtcacacctccgctggctcactcgtaatcccggggatgcggctgttttgtaagtaaacagggagggagggaactgactgcttggagccaggaacagcactgtccatttaaacgatcatcatccgcctaaa

SEQ ID NO: 335474 - DNA, 1000 bp, Homo Sapiens
ggctctagagggggtagagggggttagggttacgtgttggggttgggattagggttaggggttacagtttagggtaaggggttagagttaagggttagggttagcattaggagttacagttgggttaagggttaggggttaggcttagtgttgttagggttagcttcagggttcggtgtcagggtttggggtggggtagtggtaggtttaggggtagcgttgtgggttaggatttgtggttacggttcgggctagggttttaggggtaggcataggttcgagtttgggtttgggtgttaggtttatggctagcattagggtaggggttaggtgtaggagtaggggttgaggttatgagttgaggttagggttaggggtcaggggtccggtcaagggttggtgttggatttagggattagggctagaattaggggttagggttaggggtttgtgtcggggttgggttggaggcttgggttcagggtcaagtttagggttggggctagggcttagggttatgggttagtgttagcagttagggttaaggtttaggcttagggtttagtgcttgaggtgggggttaggtgttaggggttagggttaagggttagtgttttgcgttagtggttagggttaagggttatggttaagggtcagcgttagggtcaggggttaggggtaggggttgtgcttagttttagggttagggttcctggacggatggttttcctgcttgggaatgttcctgggctgtgagatccactcttctgggcaggtggttagcacctaacgttttccccttacttccccccaaattcttaagtcctttggtccatttcattacttcttttggggagggcctgattcctcagggcctcagtggcagaaccagcctgaggtcacctccccgtccatgggttaccacggcccctgggcaggcgtggggagctggggtggcttgggttcctggccttggcacctccctttgggcggctctgga

SEQ ID NO: 335475 - DNA, 1000 bp, Homo Sapiens
ggagcactttggtgtcacgcactttacttccaatgtcttttctagtccttaccacaacctgatggggtagaaactgtgccttttgtagatggagacactgaggcacagagtggttaagaagccaactgcaggtcacacagctgggataggattccaggactgtctgactctggaggtcagaacctccaccactaagcaaattgcctttctgtttgggcagcagccctggtggccacagagaagagaaaaacagaagttacttttgcttttcagtgagagcacacagatccagggggctgtgagggtgggcacaatctctgtggcagccagctgttgctgcataacaaatcatcccaaaactcagtgcgagcacacagatccagggggctgtgagggtgggcacaatctctgtagcagccagctgttgctgcataacaaatcatcccaaaactcagtgcctagaaaaaataaccatacactattgctacaatatacaggatggctgagtgattcttccattctctgtggtgaggtgcaggttgggtagaaagctgtgcttatcttggctgtaggctgatctgggaaatcttggctcttactcacacgtctcctgaatccttccagcaagttaggctgcattctccttcctcctgcaagattctgggcatctctctgccgtcaccctttgcgagctcttcctccttttcaaagaggctcttgcccaaaagccatgagcttccttctccactgtggtggctccttctgtgaagggtaccggaatctgggtcaggtcttggcctcagaggtggctgatcctaaagggcaggagactgtgtttcctcaggtgcctggagaccatccttgtgttttttaagtggaggggaacattctggagtgcccaggaccttgaagaagcccctctcaagggctctccagtagatgagcaattagacagattccttctggttctgagagctggagtaaggacccgcagctggag

SEQ ID NO: 335476 - DNA, 1000 bp, Homo Sapiens
gaattgaggaattcatttattcacttacaacacatttttggccactctggcactgcaatgctgtgacagccacacccagcatcccagctctaaggaattccgaacgctgggtatccccaattccaaaatggccacaggctgtcgcagagctgtgtgtaaagcgctggggtagcacaggacgggagtgggtcattgtgtttgggaggatctgaagcgacatttcacctgggccttgaaggatgtgcaggagttctccagacagagatctttgagttgttttcatgtgtgccacctctaagcaggtcttcttcactctgtacttgggctgcctatttactccccaaatgtaattttcatgcatccctgcaatgttttatcttggtgatgagggtcagcatttcagccggtggcattccttttggatgcttattccatcagttcagtccacagcagacatttatagaaaacttcttatacagtcaaccctctgtatccatccatgggttctgcatccgtggagtcaaccaactgcagatcaaaaatactcagaaaaaaagaaaatggagagtagtgtcagcactgaacatgtacacctttttcttgttattcctaaataatgcagtattacaaccatttacacagcatttacattgtaccaggtattatgagtaatctagagctgatttaaagtatatgggaggatgtgtataggttataggcaaatactacaccattttatataagggacttttgagcatgcttggattttgctattcgctaggggtcctggatccaatcccccagagatgccgagggatggctgtgtttttgtttgcactgtaaggatgatgaaagggccctcatagagacagctgccaccctctcttggcaaagtggctgcagagtccatgaggggatgatgggtgaaagcctctgagagaagtttcctggaggcagggagtaagggctgaaatcccagccttttgtcctgaacctgtct

SEQ ID NO: 335477 - DNA, 1000 bp, Homo Sapiens
agggacagcattggtcatttaataaagctgcagaagcttgcctaacttcagtgcagtaaccaaaattaacgagtttatacactttccattaaaagacacttcgtgtgaatgtagaggggaatgcgtgccgagtggagatccactgctgttttgtgggatctggggaggaaggagtcagccccggtgggttcctgcagggctgccgtctgcaagctccagccagggcgggacgcacgcagtgcagagctgggacggacgcccgcagtgcagagctgggacggatgcgcagctgaaattccggcactgccacctcctctctctctgacttgagcctggggtagggggatcttcagtgaggtctgccacactgcctcttcaatcaagttgttctcttctacctccggcttgtccttgaattctttcttgggcaaagccaagaacgctggcaggctaagctccactttgggcctcacctgccctgcatcacaaccaaccagcccgtatcgggacacgatcattgacttaagtccacagtttacattacagttcactcttggcgttgtgcgttatgtgggttttggcaaatacgtaacgtcccatagctgccattatgggacattacatatttgtacttcttcatacagaagagttttgccaccccagaaatgaggcttaaaagtcatttacccacttcctgctctggaagaggagggtctgtgctctcaccgcctggcacgccttgttccgtccagcctctgctctctgaatggtttttaggctaaataaaatgtttactaaatatttttaagcactaataacaataacggccttatgcagtggctcacacctgcaatcccagcaccctggaaggccaaggcgggaggatcgcccgaggcccagagtttgagaccagcccgggcaacagagcgagacccccacctctacaagacccccacctctacgaaatgaacaaataaacaaacatgatggactccagctt

SEQ ID NO: 335478 - DNA, 1000 bp, Homo Sapiens
aaaaaggaagaagcaaaactctctttgttcatagaaaacatgactgtgaacatagaatatcctaaggaattcacaaagaaactattaaaagtaaagagtgaatttagcaaagttctagcatacaaggtgaatatataaaaatcaactgtattttccagtggtgaatactgaaaactaaaatgtaaaagataccatttacgatagcatacaaaaaacttataaaacacataaggataaattagtaaatactgtacaagacttatacactgaaaatcacaaaagaggcaaatttttctgtaaaggaccagatagtagatattataggctctgaagattgcatatggtctctgttgcatattttcctctgtttttctcccttttttcctttcctcttttctacaaactttgaaaactcttatcaccattctaaggttattggcattacagaaacagactggaaagaattcagctcatgaactgtaatttgtcattcccaaccacaaaatagtctctgagagaaaattaaagcattctaaaggccgggcgcggtggctcacgcttttgggaagctgaggtaggtggatcacctgaggtcaggagttcgagaccagcctgaccaacgtggtgaaacccagtgtctactaaaaatacaaaattagctgggcatagtggtgcatgcctgtagtcccagctactcgagaggctgaggcaggataatcacttgaacccgggaggtggaggctatagggagctgagattgcactattgcactccagcctgggcaacaagagtgaaactctgtccaaaaaaaaaaaagagttctaaatataaggaactatttaccatcctgatagagtacactatttgatatcagtaaattgccaatttcagccaggatcctaaaaagtaggtctatggaattgtcacaagagatgttggtgtccttggagcataaggctcttaagacagagtgtatcttgcacctaagtggcctcctgtc

SEQ ID NO: 335479 - DNA, 1000 bp, Homo Sapiens
gtacttctttaatcatggctatggacagtgacagggcaaaagcagtcattgactagtggtgacataatttaaaattactttttctgggaataaaaaagctgtctttaacaataaaaattaactccagtaatttcaacttaataaagttttaatttttcccactttcttatcttaaaaggtgtgatgatggaacattttcacccctaacttaagtaagaaccagttcagactgacacctaatggaaactattataggaaaataattctgcaaaggaaagaaagcaatgagataagtatttaaacaacaacaacaaaaatactttcagttaactatgagtagaggtttcctttagatttcatcactagcatttgcaattattccattctcaacattattcttcctctatgaagcaactgcaataaatttgcacaaaactgaatagaatagcttatttttcaaaagttcttcctcatctcctcaacaaatgccagagtgttacatcttctgtttctcacaaactctgtcaccaggacttcagctctctttcttcctttcaaatcctaaacacttattatttagccaaccagcatgaggccaactttccagagaccacctaggaactagagtatgtagcttctacttttctaatttcccaaggaaacaatgccaccagtagacatattgcattttgttaaatacataacaagcataatatttaaaagccctaaatcaccaactggtagatccctagagaaaaaaggtaattcatggaataatgaaggaaagaacaggagttacatattctcttgctggtgatagaatgtcgaatgcaaagacagcatctgtgttttctttcctacttcaactcattcttaaaatggactcgcccccgggagcttctgagaagggctccacccgttccctgcagacgacaatgttctttgagcgcaaaagctgtgagtatagataccctgggagtaattgtgggatcagacacaa

SEQ ID NO: 335480 - DNA, 1000 bp, Homo Sapiens
gaaatttccaaattttatttgtattctatcctgacttacacccattttttctattgaggtcttcgaataggggtgcagaggagatagaaatagaggccacagagagaaagtgatgtggcaaaaagagtaaagtcatgaccagttatcctctgaaagggtgcttctctctctgtctctccctgccccgtcatttgctattgaaaaccaaccctgggccaggcccaatggctcatgcctataatcccagcactttgggagacttgaggcaggaggatcatttgaaggcaagaatttgagaccagcctgggcaacatagcgagaccctgtctctattaaggttggttttttgtttgttttgttttgttttttaattagccaggtatggtggcatgcacctgtagtcccagctgctcaggaggctgaggcaggagaatcacctgagcccaggagttggaggttacagtgagctatgatcacaccactgcactccagcctgggcaacagagtgaggcccctgggggaaagaccaagcctgaaatatgaatgtgaacacaccacagtagcagaggaagggcttctgggctgtgcaggaggcagcccctatgctgggtaatttcagccaagtgtacagcgtggcacagaagcccaccccaaattcaggtagcttctggccccactccagggctgtgaaggtggagccgctggaccatctcaggccagaagtgcttgcgtcgaagaagaggccaatccaagccggggtgctggtcatgagggagtagagcttccacaggccacttggctgcaggtcagcgaggtctgtgtagtgcagccggcagtgctgctgggcgtcgtaccagctcagcgcctccttcaccagaaccaagtccctcttactgctcaccagctgcagggctggaacaggagaggctgtcatagcatggctgtccccaccccagcccctagtcctcaaagagctttcagccacactcgggtgggcctc

SEQ ID NO: 335481 - DNA, 1000 bp, Homo Sapiens
aagacagagtcttactctgtcacccaggctggagtgcagtggcgcaatctcggctcactgcaacctccgcctccctggttcaggtgattctcctgccccagcctcccaaggagctgggactacaggcacccaccaccactcccagctgatctttgtatttttaacagagacggggtttcaccatgttggtcaggctggtcccgaactcctgacctcaggtgatccacccgccttggcctcccaaagtgttgggattacaggcgtgagccactgtgcccagcccactgtgtctctttacctaaagactttctttaacaactctggagcacactcttcccgcctgtgaagcaggtcagaggtgcctgagaatgaacacccctgcccccataggacctagtagataaataccctgctccccaactccgcaggcaggagaactccgaggtgttattcatgggctcccagaggtctggtggaatcaagcccccgttatccacagtgtaacctgctcgataacccttttcctggctgcctacccctccctgtcttcctttcccactcccctacttccaagtgtttcctgggatggccatgcaaataaattctgtacatccaattccttatctcaggcttttaggtgaactcaaataagagagtctgtaagaagaagaatgagtttgctggcgcagtggctcaagcctgtaatcccagcactttgggaggccaaggcgggcacatcacctgaggtcaagagttgaagaccagcctggccaacatggtgaaaccctttatctctaccaaatatacaaaaatcagctgggtgtggtggcgcacgctgcaatcccagctacttgggaggccgaggcaagagagccacccgaacctgggaggcggaggttgcagtgagccgagatcgcgccattgcactccagcctgggcatcaagagtctgtctcaaaaaaaaaaaagaaggaggagtttgagagcagcaggggaggatg

SEQ ID NO: 335482 - DNA, 1000 bp, Homo Sapiens; identical to SEQ ID NO: 246394

SEQ ID NO: 335483 - DNA, 1000 bp, Homo Sapiens
gtgtttcagtgaaattttatttagttacaaaaacagatcgtaggtcagattttgcgcacagagtgttatttgctgacccctgagttaggtcacaatagcaaagagacctcaatagctcacttaagccagtcaaagttcatgtctctcatacttaaagaatctcagtatagagttcagagctgatcgaacaatttggtggtgtcaggaaccctggaaaaattcttcttcttgctggcaagtcttaatgtaagaccctcaactcattttcccagctatctgctctagctccatttatcagctttgaatttcagccagtaagaatgggaatgcaaggaaatgggggacagaccaattttctttaacagcgaagtcagaagttgttcacattgcttttctccacacatggctggtcactcatcaatcacagggccacctctagctaaaagaaaagttggagatgtgcagattttggaaagccaagagcacttctatgttttgatggccctgcctggacagagatcttgggtctccactccagctaatcaacattccactgagacagcattttcatttctccagaacatgaatctcaacagagggaaacgaatgtggtcaggtccggcttccaaatgcagcattgtgcagctgcgtgaaggtcagtctgagtgggcagaggctgggcttaggtcaggaggtcagtgcacagttgttttgagagatgatggagatctcagctgggtcccaggcatcactgtggagaggatagggcagattcaatcattattccagaggtcacagcagtggggcctacctgattacacagtggtgaggaaacagataaataaacaggaggggccagaggaagagggaagagggaattcatctgagagagatgtgcctggagagcagaatggcacaaggatgggctctagggaaggccacaggtgaagggatgaatcatcccagaagaaaagaaaccccttcttctcacagggaacag

SEQ ID NO: 335484 - DNA, 1000 bp, Homo Sapiens
acaccatagcagagagattttaatggtcgttgtgtggtaataaagaggcccatgtctgcacacacatttcaggctttatcagttttaccatggggcccttctagggttcagtctcgtctgccgggacaatttcccagcgccacgtccccctggtgctcagtcgcagctgtgaagttggatccatcggtcaggagagactgactccttaggtgtgcctgggagtagggggctgtgattccagtggggcctgcctgacttccaaggctccagagcttggagcctcatgccacctcctcccctgtctgtgggcacaggcatgacttgatgtgaaaagccttcaacctgcgttttagtgacccaccatctgtaccactccatctgcttcaatatcccctttgctgacatcatctccactttggacggtggtgctgtaaaggtgtttctagatgagattagccttcgagtaaagcaggtggctctcgtcaaaaggggtgggcctcacccaatcagttgaaggcctgacagcgtcagccagttccttaaaatagctctcttctgatgcgcacaccttgagtggctctgctcctctggagaacacgcactagtacagttagtgtcttcatgaagatgtaagtcctgtattagaggggcccctggaagggacaggcaggtgctaagctcaaggcacccacaaggggacacggttgacgtctatcctggggcctgggaggcacacaggggagccacaatctgggctgggaccaagggaaggtggcttggggatctcctgagacgggtttcagctcccacctgcccttgcctgggcctccgtcttgatgatgcatgggggcttacagcactcaggaggtgcccagacacgggtgcagttgctgctggccgtggaaagggtcgcccgaccacctccccgtctccacttgtcttcttcctccataagccatggggatcggctgggtgtctggcagaagccatcaggtctgta

SEQ ID NO: 335485 - DNA, 1000 bp, Homo Sapiens
acaaaaaggacatctcttcatttattgaggaagtttcgacgattttatgtacgcacacacacaacgcttacacataaagtcaatgttgtgataatcattttcacggagtcacatttgtaaaaaatgcatacaacaaattagaactctcaacgtctttacacaatttatacctcccatactggaaatcatgcaaagatgaaatacatagaataacaaaaataacgttgataattaaaaacaatgggcctgggtgtggtggctcacgcctgtaatcccaacactttgggaggccgaggtgggcggatcacttgaggtcaggagtttgagacgagcctggccaacatggtgaaaccctgtctctactaaaaatacaaaaattagccagacataatggcgggtgcctgtagccccagctactcaggaggctgaggcaggagaattgcttgaacctgggaggcagagggtgcagtgaaccgagatcgcacccccgcactccagcctgggtgacagagtgagactctgtctccacaataataataattttaaaaaatgggaaaacaacaacaacaacaaaagaaaactaaaaactaaaaagaaaattcaacatatgacaaagtgtattaaagggatctattgcagggatagattagagcaattgcacgagatggtccagaaaggctggccgactttcacgatcattgactatctttgaagtctctcatctcaacgaatagttgcttcttatcctttaggacatggactctcctagaatttcatcagccttcacctgtgggactccggtgccagctcattcctcaggacatctcaggccagcctcagtttccctccatcctcattgggtgatgatggtcactgctggtcactgccatgggtgctcaggcatgggaggaggggtgtggagtagcagcggccctgaggcagacccaggaccttggggagccctgtgccccctccaccccacgactccctccttggcctc

SEQ ID NO: 335486 - DNA, 1000 bp, Homo Sapiens
tttttttttttttttttttttttttactagagatagggtttcaccaggttggccaggctggtgtcacaactcttgacctcaagtgatctaccacccttggcctcccaaagtgctgggattataggcgtgagccactgtgcccggccaacattaatattttttattagctactacagcttagagtagctgctatgggagtgtggcctttttgattaaatactagctgatcaaccctagaatataaattcttgttttataacatttagatttaaataacaataagaatgtaagctccatgaaggcaagaatgcctttttgttttgttcactgctgtgtctaaaataatgcctggctcaaatatttgttgaatgagtaaatatgctgactttgctgaagtatttaagcaagttacagatattatacaagtaaatattttgggcacaagcacacttaatgaaacagtaaaaaaaaataggtttgaaacacataatccttcgttataggaggctcaagagtttaaaaggaaaaaagggggaagatacccaggtaagagggcatgcatgctagctttccaatactttgatattacctgctttttctaagactgtatcaacctgtcgcccacccataacctatcttttcataacagagtccaactaaacctaaaaattaaaactggaacctagcagcttctacgcaatctaagaatactttgttccctctctcaaaatctttccctgcttttgaataattgacttttgaattcataaaaaccttcccttattaatcatcctattacttgcatcatagtaaaccctgatcaactcttaaaacattaaaagacattactatatttcttaatgaatacacaagacctttaagtacaaatgcttttatattcagcccctgtaaagccatcagatgtttgaaagtttttaaacacgaaccaaagggtttaattttaagaacttagctaggaatgggtgaaatcctacccaat

SEQ ID NO: 335487 - DNA, 1000 bp, Homo Sapiens
ctttcttacgattttttattagcaatttattttctttagcttgccttattgtaaaaatacagcgtataacacatatagtatacagaatatgtgttatcttctgtttaaattatcagtaaggttcctggtcaacagaggctatcggtacttaagttttgggggaatcaaaagttatactcaaattttctactgcaaggtaggtctgagtccctaacctctgcactgttcacaggtcaactgtgctccctttgtgccagacaggggatatgctgaaagtaacaacaaagaaagtcaatgacttcgttaggatgccatggagtgttgaagtcttgactccaaggacttcagaatgtgatcttatttggaaagaaggtcccaacagagataatcaaggtaaaatcaggcctaatggcctcagggtttgggccctaaccaatatgtctggtgtccttaaaacaaggggaaacgtgggcaccatcatacacagagagaagatgatgtgacaatgcagagagaagacggccatgtgaagatggaggattagagtgcacagtgtggaaacaagccaagggacctctgtggccaacagaaactgggagagggccaggcgtggtggctgatgcctgtaatcctagcactttgggaggccgaggcaggcagatgatttgaggtcaggagtttgagacaagcctggccaacctggtgaaaccccacctctactaaaaatacaaaaattagccaggcgtggtgttgggcgcctgtagtcacagctactcaggaggctaaggcaggagaatcacttgaacccaggaggcggaggctgcagtgagtcgagatcatgccattgcactccagcctgggcaacagagagaggcacaggacagatcctccctagagtcttaagggagccttagggagagagatgggacagatcctcccctgagggcaccttcatcttggacttctggcctccagaactgtaggacccacctaatctatg

SEQ ID NO: 335488 - DNA, 1000 bp, Homo Sapiens
gcccctgccatttttagtattctcctattctggagttcctcctaaaacattctcattcccttactaatatattttttttctattgggctatggtttcctctgcgaatgtgaacacatcagctttgctctttcagggcttcttcaaattttctgatatgctaatgacacaatatttcctcttttccagagctgactcctgtgtgtgtgcgtattttaagttgtttcttgggatcagagttcttagataactttagcgtacatcatggggcttgttaaaacacaactgcccagcctctccatagagtttctgatccaatatgtgtaaggtaagcatttctgatcagttccaaggtgctgctgatgctgctggttcagagaccattctgagatgaccactgatcatctctgccacatcctctgtatctcagccttgtatagttttgtacatgttaagtagatgtttatttgccaattggctcacttaatgcagaagtttcccaaagatctcagacagtctgataactctaaaataagatttcagaaagcaagccagtcatcagacattcagcatcgctcattttgataaatggaaactagatcattttattatcattctgaaattgtatataaaaatacactttgcagtttggagagaagataagtcagaactaatttctcttctcactgtaccaattactgactatctgtctaaccattacatttcagctaaaatataaatttggggaagatgtggcatagactgcttactcactctctgcacaaaattatgtgagaggttttctccttgggtcacttcagcattatacaattttgttttagttccatctgtgttgcagcaaagctgaaaatctaaaagatcatttaaaattacgtgtgataaaaagatccttattaattcaaatatttgcaatgggaaacagccaattaatgtgatttagtatttaagaaataagccaaaaattgtgctttcctatgtgtg

SEQ ID NO: 335489 - DNA, 1000 bp, Homo Sapiens
acctttacatttgccaatttattataaaggatacagatgaacagccagatgaagcagcatgaagggctaggtctggaaagattccaagtgcaagagcttctgtcccagtgaaactggggtgcagtgccctcccagcttgtggacgcatttactggaagctcctcaaatcttgttgttcaagagtttttaggcagcttgatctccagcaccttccccacccagagatcagtgggtagagctaaaagttccaaccctctaatcctcaaatgacctggtctttccgggaactagccccatcctaagaatatctagggccccacattaagtaacctcattagcataaactcaggagttatcgaatcaaaggggctcattatcactaatgagatattcctaccactcaggaagttctaaaggtttggggaactctatgacaagaactgagacaaagaccaggtatccatatttcatattaaaccacaatggtagatattaattgtattttagcctggctcatctgaccaatctgcctgcaagaaggcagcaaggcagctcctagctacagtttcagcagctacacctcacagcccttacaccattaaatgctccccatttgttgtgcttttgttgagcacgtgactaaacctcctgtttcctaaaaatggcttaagatatattttgccggtagatacaaaatcagaaaaactgcacaaaccagttagattggtagaggtggtttatgtgccccatagccaagagaggtgtgcaccaaggaggatatcatcaaatctgacaatctggaaagcctttgaaactgttcttttcctaagcacagtattcagctgtgtcctcttgaacccatatctatcaggtcaacagctttagcccattccacatgatattggctgtgggtttgtcatatatagctcttattattttgagaaacgttctatcaatacctagtttattgagagtttttagcatgaagggcttttgaatt

SEQ ID NO: 335490 - DNA, 1000 bp, Homo Sapiens
ccagcagaaagagatttaataagggaaatagcgacttacagagggatcagagggcctagacaaaagaagtttaggaccacccaccgctaggcttttggcttaaggttgcatccccacagctgtgattctgagaccaggagacagctgctgcccctgcaaggaaggaccactagtgtggctccagctgccccgaattcaggaagctggtgacaagaccatggatataccagttgctgcaaatcctcacattggcaggagcccgcggaccatccagcacactgcagtggagcacctctgcctctctgccactgtccagagctcatggaaatgcctcttcttggcaaaactgaaactgcagccagatccaaacagcaagaaactctgggaaatgtcacttttgtcctgctagacccattgttttccctgcctgttccctgtggtggtgtgctgtggtcatgaaggttccgcctgcctggggtcaggtgcaggttccactgttctctgtgttgacctcgataatcttgtgtgacttttctgtgtctcagttttcttatctggcctggaagactgcaaacagaaaatagagcctctgtgtaggagccccagcatctccaccacctggtccaggccttttgtgttggttgcctggagaaatggaagatgattaaaaggtgtgagaaactggccccttcagagtccttggaaggggagggcgctagaccagttgctctagttactgaattgagcttgctaaatatagctgggtcacacatggggcactgaggaggcaggtctgaaatcagatggggtggagggagcttcccagttccctgccccatgccttataccaccaccccaggcccagtttgtagtgagggggtgcccttgacatggaggtggagaaagagggagaagcagatgcctaagcttatggttgttctgatccagtgcctgcccagagctgggcattccattctgaatggcagatatctgaggtcaa

SEQ ID NO: 335491 - DNA, 1000 bp, Homo Sapiens
acagttttaattttttattcatcaaacatctcaggagttgtgctgcgagtttgtttgtatcagttttgtgggatacacagacagttttacaaacatgaagtctcaggagagctgacttacaaaatcctatttaacctctacatagaatattgaatttccgaatgaaaaatcagaagaaatcacaccattctaatgttaacaaatgaaaaaattataaagaacatttaaagtttatcctgaaaattaattcttaagaaaagaagatttaactgaagagtagcaaagggaaattaaattattattaattagggaaactaaatgtattaatttttcccattttacaataaaaagccctaggtttacagaggctaagtgacttactcaatgttatacaacctcagcgaaacaactgaagttgaatgtcacatgtgtcagcactccaccaggcactggagagcagtgaacaaagtcagtgagaactggagaagggatactgcgtaggtgtgtttaactgcaaagcctggactccttcactgctgaaacatttgaagtgattcagaaggggaccactagggactcccaagggcttaaagtagttaactgtacttaattccaggttaggacatctttttgatcctaaacattagcatgacaccttaaacagagcaaactttcagaacatgtttgatgagagaaatgagcattataatgaggctacgatttctgtaagttttgctcatggctgatttgccagtatttgaaacagtgtcagacacaaagctcaattaatgtttgctgatggactgaatgaataaatgaatgaaaatcgaggcaaataattaagaggagggttcttattcttacatggtgccataattttctcagtccaatggttttttcttatctacttttggttgtgaatattttgttttgacaaagcaacaattactttggccccgcttctgcaatgctttgtgcctgcagttgcagttgcagttgc

SEQ ID NO: 335492 - DNA, 1000 bp, Homo Sapiens
aaaaataatgatatttattaaaataaagaaattatgttcattattaaaagcataaaaataaaaagcaagctgcagagtgaagtaggagtgaatataagcatacatataaaattgacaaagagctcatatccataatatgtaaagaattcaattaaaccagtaaaaaaagaagaccaataaaaatggatgaaatacttgaacatgcatttagaaaaagaagatagccaaattgacaataaaaacatgaaaaaggtgctccccatcattagacattagagaaattaaattataatgtaatgtgaaatctctatacatcccccagagtgaataaaatgaaacaggaaatgctaaacgtttggtggatatggtaatatctattatagctgcatatactgctttctgtgattcagtaattcctctctcagcatatatttgtacactgaaaaacatgtaaaagaatgctcacgatagccttatttgcattaatctaacactggaaacaggaatatgtattaagggaatagataaataaaaggtgtgcttcttacaatgaactagcaatgaaaatgacataaatacttaaactgaggttaatgtctcaatcataatactgaaggaaagtatctaaatgaaaaaataaatgtgtatatgatttcgtttatatatcataccaacacaaaaaaagactcgagaaaaataatgctttttgacatcaaaggaaatttgggagtgttggtaacatactatttcttcatgagggagttagacacatatctttctggtgaaatattattaagctctacacttagcaatttccacacctagaacaaaatggatataaaaaataaaataaaagctagaaactggcaaatatgcaattgaagacaatatgagtaaaaaatttctgaatgtccagctgggaaagtaagcaaataaatgaaattgtatcagctagggaggaatgtgtaattagagaaacgtttaattttttaaactattt

SEQ ID NO: 335493 - DNA, 1000 bp, Homo Sapiens
atcattgcctgtccttttatttattatatggtagcaggttatagagagggtttcatttttttacggttttctaactttccattgtatgacgtataataattaatttaatcagcatcttattgatggacattaagttttttctagttctttgtgattaccaacaatgcagccaggagtaacactccacgtatgtcatttcactcatatgcaggtttcctatatgataaatttctaaaagtagaattgcagggccaaatggcatgtggattttagtgattcaaccaaattgttctagatgcccacaagcaatctatgagaattttccacattctcatagcgtatattcacactttgagttttgccattctgacaggtgaaaagcagtgtctcagtgtaatttcaattttgatttttcttatatgagtgaggctgaacatatttttatatgggtaagagttatctacatttccttttccgtaaactcttcatatcctttgcccattttttctgagttgttggtctttccctctgaatctagtaatttttaaaaactggttattgtatttttcagttttaaaatttccatttggttcttccttacattttctatttctctgctgtgactttccactttgtcatttgtttcgagcattcatacttgctttaaaatcagggcatttgtataatagctgctttatgattcttgctggatagtttcaacatctgtgtaatctcaatgcttacaattgccttttctctttcaagttgagatttttatggttttcagtgtgatgagattttggattgcatcctagacattttcagtagtatgttatattattctggttcccatttcagtctttgattttagcaggcacttgacctgtttaagttcagaatgcttgttccggttcactttgtgagctgtggctcaaaagtcatttcattttcaaagcctttacagtgctatttcaatctgccccacttgggtgctaccctg

SEQ ID NO: 335494 - DNA, 1000 bp, Homo Sapiens; identical to SEQ ID NO: 157397

SEQ ID NO: 335495 - DNA, 1000 bp, Homo Sapiens
ttttttataagaaatagaagtgtttttttattttatttttttacttagtaaacactttgctttggttctgtgtctatactggcatctcaggagagtgagatatccagacctgatcttcagaagcactatgagccagtatccatcggcgccactgatgagttccagagtgaggacagtgctcacagctagaactgaccgtccccacacttcatctccctccaggttctcctgctgacaccagggctcctcaaaattactccttccttcacacatggtgacaagggttctcaaaaagaacacctggcagagatgcccactacagcactgcttgtggtggcaagaagcataaaagaacccaatgtccaacaccaggtaatggaatcaagccaggaataccaattgtaacaaaaacaactccaaaccccacctgctaacctggagagatgcccaggatgggctgtgagtaacaaaaaggagcgacagagaaacagctatataacgtggtatcactttcatcaaaataagtatcagcgaaaaacactgaggacaataaccaatgtttctctctgtgtatggtttcactgtgctaattctttaattgtaaaggagcttaagatattatttaaaagtgcaaaagaaagatgaacacccaagggcattttataagttcacagcaatgagcactcgagcattccaaagataacccctggatggaaggcaaagggacgtccactctgattctaacgagggacagaatcgaagcatcaccagcaggccactgagttgtggaaaggacattttatacccccggccccgaagttgaccacatactgagagaagagggcgtccagttcgtcgtactgcaccagggcgtcctcgaactgctgcagcatctcgaaaacaaaggcaagctcctcctgaaccatgaaatattcacaaaagctccagcctggctcagtcctcttctccctcaaggttctcatgtcatcctcaaacttgc

SEQ ID NO: 335496 - DNA, 951 bp, Homo Sapiens
ttttttttttttttttttttttttttttttttttttttttttttttttttttttttttttttttttgagggcttttccagacatttactgtctagactggctacgggattcagcaggaccatgcccctccctgcggggctccagctagatgcaggctgggcttcccttcagcccacctcatcctctgcccatgattccctcaagccagcccaggattgcccatctttctcatccaagataattcatcctagtgtctcagatgttgtgtcaaacttataatctctggccccatcccagctctcacaacacccctgtgtcacatgaagctcttcatctgctgagtttagtagtacgtctccctttccacccagccatccgggtgctgacggatgaggagttttctgatttcatcatagacgaagatgagaatactgtagggaatggcacagagccaccaggttatcttgagtgggtacattcgcagggccacgtccatgcctggagtgtaggacagaaatgcagccaagagtgtctcctccaggatcccaaatattaagactttgtttctcatgccctgctggaaaagtgagttgcggcgagtcttggagatgatgagatccgcccactgcacaaccacgatggtgacaaaaaaggccgtttggcatgtgaactccacaacttttcgttgctcataggtccactgctgtccgtagctgtcctccaggtcattcaagtatttatcttcccagtggaggcggatgcccagcagatcaacaggcctaaaaccattctcagccaggattacaaagtaggtaaagaatccagccagagcctggatcatccctgtgaatgacagagttgcaggacaggggagcctggttcagagaagggccccaaaaggtaggccaggggagggctgggggctgggacttgcttctggctgggctggtg

SEQ ID NO: 335497 - DNA, 939 bp, Homo Sapiens; identical to SEQ ID NO: 157399

SEQ ID NO: 335498 - DNA, 1000 bp, Homo Sapiens
tttttttttttttttgtggttccaaatgtcgcctttactgctgagacaatggtggtgcaggaaggggagcctgcagtctgggcggggggccaaggaaggggagtgtgtgcttggcccagtgccgccaccactggggagtgggaggctcaggcagacctagggccctgggaccgtggcccttggctttgttctagggagggcacaagacagcctgcaggtctttgggcagggagccgatgaccgtctcgatgtacagctgtgcccgctgcagcgtagcctccttcacagggagctggtggccctgagcccgcaccagcttctcacgaagtttcaggaccaggtccacgacctccacctcggacttgtctttcatccaggtctcgatgttcgcctcacagatagcctccaggtgcagggcctccagcttcagggccatctccttgtgccgctgccggtaccagccatcaaaatggggggacttgaaaaaccgcctgtagagacccagccagtcgcccttgaggatgcaggtgagctggggcccagcatgctccaggctacgcaggaagtcatcctggctgaagggctggatctgggggggagtcttccagggcgtgatgctcttctgcaggggcatgaggctggccatgtagtgctccagggggatgatgaagctctgggtgagctccaggaggtgccgccgcagcagggcgctctgcacatctgacggccgcttcttctgcacgcccttgagcagccgtttgagcagcgccttgtcgcggtggaggtgggccgtgtaagcggtgtagaggcctggcttggtgtccagggtcttcaaccttgaaggctttttcagcttgacttgcttaggcaggtctcctgacatcttgggctccccgactcggaggatgtggggccagtgctggagtgttttgataaagaaagggtttgtgactcccaggaccacgtttggtggggcctgcgtgcgtgtggtgaactcctt

SEQ ID NO: 335499 - DNA, 1000 bp, Homo Sapiens
ttttttttttttttttttttttttttttttttttttttttttttttttaagcacagcaataaagttttaatggaatagctttggcccaggcagaggcagttcccagatgtctcaggacgcgtgtgaaccccaagaagttgggggcgttatctgggcccttgggatccattcccctgggtataaagtgttggtacgtggctccaggcctggcccactcagcctcccccaggaaggcttctcaagtggagaaggttcttggcctcagaactcacggcgctgctgctcacgctgaccccccactagatgcagatcggtgtagaaaggcctgccagggcagggatgagggccccaagctggaagcagcccagaaatccttttaccagaggacaactccctaatccgctgggcaggggcggggtgtcacacgcaggattccgcgacgactgtcactgcctcctgggcgcccctctgtgcgggagcggggagggaagaggatggaacgccctgtgtctgcctcgggcgcagtgcgaggcccaagctggtctttgggcggcccttgcgcacctctgcagcgctgcgacctggtgcctgtatcccccacggcctcctctgctacccacgagagccggttgattttcggccgggctcagggagggcgtggcctccgcgttccccatccccctccaggacccacgcccttctcggagcgcaccagggtcagagccgggatggtccccgatcccccagcgcccccacgcctggtgaccttgggtcgggcgtcccctcacctgacgctcccgcggcgagcggctcccccgccgtgcaggtggcggccgggcccgagcagtcgccgggctgggagggggcgggggacgctcgcgcacgcgcaccagagccccgcgcccgccgccagtgcctgacgtctcgagcgcaggccaatccggagggcgccggagtcgggtgcgcggggggcgcgcgccgtggggagcggggtgtccgg

SEQ ID NO: 335500 - DNA, 1000 bp, Homo Sapiens
aatttattcttatttatttattttgtttttgagacggaggttcactctgtcacccaggctggagtgcaatggtgcaatctcggttcactgcaatctctgcctcctgggttcaagcgattctcctgcctcagcctcccgaatagctgggattacaggcgtgcaccaccatgcccagctaattattgtatttttagtagagatggggtttcaccacgttggccaggctggtctcgaactcctgacctcaggtgatccacctgcctcggcctctcaaagtgctgggattacagacattagccactgcacgcagcctttctatacactttaaatcatctctagtttacttataataatgaatgcaaaggagatgcgatgtaaatagttgttacactacattgtttaaggaacaaagacaagaaaaaaagtccgtacacattcaatacagatgcaattcctttttcacgtatttttgatctgttgttggttcgatccttgggatgcgggacccatggagatagaggacaactgtctagctcatctgacagttttctgagagtttctatgtgcacataccacaccatttctactcaaattgtccaaatttctttacaaggaaagatagtgcttgctccaaaaaagaggggagggtcaaaaagtcattactccaggcagcatccaagaggaagcttttctggcattccataaagcctgtgtgtgtgtgttggaaggaattacattctgtctcccgcaggctgtgcggactctatatccacagctcatctccgggatgtccctggctttaggaacttgcacgtacagcacagcagcagaaaggcaacaatcaagacttccagaggatgatctggacacagcagaacaaaacccagtcataggttgttctttcctctgaatttttattatagttccaggatgctggcaaaaggaaatttcatgacatttgaaaaaatctgttcttcccttctgaagccacgaactgatg

SEQ ID NO: 335501 - DNA, 1000 bp, Homo Sapiens; identical to SEQ ID NO: 157403

SEQ ID NO: 335502 - DNA, 1000 bp, Homo Sapiens
tttttttttttttttttttctgaaaaaatagtgtttttatttacttttgagttacatacctgaagttcaaaaagtaagcctctagttgccattcaagttcacactcaaaggtgttctgtgtgcagctgtacaatttgttggtttgtctttaatgttgaacaaaagtcagccaacccataccataaagtcagctgcccaaactcactttaaccagtccatacatacatacagaaaagaaagagagagagagggagaacacaaaagccgcccctaagtcacccaccccaaacccctagggaaaaatcagaaagaagacaaaatacagcaagatatcaggagccagtgggaggaaggagattcagcccaactggcctcttcgagaacagcaccatgaagcaccctagcgcagtgatgttgtaatactcaacattcaagaaatggaaacgaggttggaacggtcttcacaggaagacctggcatggatcgggggtcgcccccaaagaaagtggaagaaagaaagagttcgaaatgagagcaagaaatctcatgacgaaactgacagtcatatccagaaaagaagaactacagcaagaggctgccgcgcaccgagaggtacagagtttgtaaggggtctgggggaggtagcccctccccacccacactgcctgctcacccccaccctctgtgtgtcctcagaccaccaggtgaaatggaggaaagaagctcatctaaaacttgcccccaggtgtgcgatgggagaattctatcctgcatgatcaaagtccctcctggggaagagaaaaacactgaagaccaaggggcaggagtcactgacatgaagcgggatgtggtcccttcacgtcagtgactgcgcccccttctgggccctctatccccagccccacacctggcagttaggaaattaaatctgaatgggaggtcaagaccttctgacactgatacagacgacttagcaagtggagcgttaaactgctcttct

SEQ ID NO: 335503 - DNA, 1000 bp, Homo Sapiens
ttttttttttttttttttttttttttttgtcagatttattattcaagaattacatcattacagtgaattataatgtttctgaaaacagtaagcagaaaagatgattagtaaatgttagcataaaatgaaatgaaatgtgaaagtggctgatatctgggtgcctaaggaccttgtctcacagagttctcaaagtcagcagccagtctcagggcccgctcatagtactccagggcttcattcatatttccttccaatttgtagacgaacccaaggaggctcaagctttccagatctaatgcctttctccgaagtttccttaaaaccaatttcttcaaagaattgatacttttatcccttgttaatgatgcctgttctatttttatagcttttaaataatggataattgcattgacgtcagatttcttttgaaattcctgaaaccgaccatagtggaaatgtatgtcttgcattgtttcttctaccactggtttcatgcataacaatttttgaaaattctcttcagcttttctgtgattgcctgcttctatatacattcttgccaggtctagatgagccacctcaaatgtgggctttttttccactgcagattcaaaatgaaatatggctgatcttatcattttgtctagcttttctctgttctgccctctaggctgcccttttgtagcctccttgatttggatcatttgtgccttgtagcaaagccctatctggtgatgcagtaagacagaagtgggtgtttcctgcaaggccttttttaataactcaagagctttatccacagagccttttcttcggtaaaacttggctgcatatcgaaagacataggtctgtgaggacatgttggctagagcttcttcaatgtacttttctccttcagcttcctgtccttcatcctgaagcttcagggcaaggagaaccttaatatatccattgtctggatttaagcggacagcctgccttaggggaagcaaagaaaatg

SEQ ID NO: 335504 - DNA, 1000 bp, Homo Sapiens; identical to SEQ ID NO: 157404

SEQ ID NO: 335505 - DNA, 1000 bp, Homo Sapiens; identical to SEQ ID NO: 157405

SEQ ID NO: 335506 - DNA, 1000 bp, Homo Sapiens
ttctgggaccattttattgactattacacctgttttagcccatgtggatatggctaaagagtgatggacccagaaaaagaaaaaacgattgggaatttaatgattagaccatggaaaatgaagtggttagatccttcgtgtgtggtgagtctttaattcctggaagttagagtcccgggcagttgtgtccccagctgcagacactcggtgtacatgctgcagggcggcatcctcacccagccacctgccctgtgctccccgcagctgggctggtggacgatgggtccacagatgggagttacaaaggcgaaagccggagggaaatattccgggatataaaagtgcgtctcgtgcttctacaaatcacattgggtgagactaagacgcctctggaaacagcagcatctcccagcctctgcacatggtttctgcctctccactctgaggttatgacaacatcaccgtggctctcagttgcctgagatccagttcctccagttaaatgctgcgttcgccccgtgggtcagggtcttcaccggtgggttcaccaactcccattttccttcctctttattttcttcacagaagcacatgcccagggaagggatctttctcacgagttgggcaaaatccccacattcccggggcggcagcccgagcagtggccgcgtgcaggagtccagagtggagccgtgactcacaattaggatgacacccgtgtcctgtggacaggtgttgacgatttgcaccatgctcgccgtgcacctgtccatgtactcctggtagctctcggccggcatgagggcggacaggggaaacgcgggcctgtaatcagtgtcaatgttgaaatttgcctctttcagctcttccaggctcatgagggttggggtggttttgccagcttcccattttgtccattcaaagattccaggttccactcgtatcttgatttttttctccagtttgagttcttccaggatgagtttggccgtctgcacac

SEQ ID NO: 335507 - DNA, 963 bp, Homo Sapiens
ttaaaagttatgagaattgtcctttcccttaagaaagaacctaatgacactttctcgtacctgcctggttttcaccccatacacaatagggttcattgtgggaggcattagtaggtagagattagccataataatatgtatgtgtagaggaatggtgtgtcccccaaaatggtgtgtaaagaaggtaaagaaggctggaacataggtgaggactatggcacagaagtgggcagtgcaggtgctgaaggccttctgtcgagcatctgctgatgatagactcacaactgcttgaagaatcatagtgtaggagattgtaatgcacaggatatcaaagcccccaatcagcagggcaactatcaaaccatagatggcgttaaccctgacattaccacaagatatcttggccacagacatgtggtcacagtaggtgtggggtatgacgttgcccttgcagtatggaaggcgcttggtgaggaaagtggaagggataacaagcatcacacccctaagaaaagtgaggaacccagctttagcaatgactgaattagtgaggatggtggcataacgcagagggaagcagatggccacacagtggtccagggccatgagcatgagcaccccagactccatccctgtgaaggtgtgcacaaagaacatctgggcgaggcaggctttaaaatcaatctccttgagattaaaccacaatatgaagagagtgttgggaagggtgctggtgcacatgagcacatctgtgaaggaaagaagggcaaggaagacatacataggtctgtgtaaggcctcatcacagtagatgaggtacataaggccgaagttccctgtaatagcaatgctgtacatggtacacagtgggaaggagatccacaaatgcacatcttccaaaccagggatgccatttaggatgaatgaagctggagttaggctggtgccatttagaaatgacat

SEQ ID NO: 335508 - DNA, 975 bp, Homo Sapiens
tcaacctgcacccttatcaccctggaagaactttatgacactcttgcgtatctgttttgtctttactccataaacaatagggtttagagttgggggaagaagaagataaagattagccacaatgatgtgaagagaagggggaattgtgtgtcccccaaaacggtgggcaaagaaagtgaagaatgctggaacataggtgatgatgatggcagatatatgggcagtgcaggtgctgaaagccttctgccgagcatctgatgaagagaggctgatcgctgccttgaggatcaaagtgtaagacaaagatatacaacaaatgtcaaacactccaatcaggagagcaaccattagaccatagattacattgaccttgatgctggcacaagatagctttactacagacatgtggtcgcagtacgtatgggagataatattgctttggcagaaaggcaaacgcttaaccaagaatgggaaaggaatcatcagcaatacacccctcaggaaggtggcaagctcagccttggcaatgatagggttggtgagtgtggtagcataacgcaaagggtagcaaatggctatatagcggtctagagccatgagcatgagcaccccagactccacacctgtgaacccatgaacaaagaacatctgggccaagcaagcattgaagttaatttctttgagactgaaccagaagatgcagagtgcattgggtagagtggtggtgcaggtaaggaggtcaatgagggagagagcatggccaaaaaaaaaatacatcggatgatgtaaggactcctcataataaatgaggtacacaagaccaagattccccacaaggaagatgatgtacattgtgcagagtgggagggagatccatacatgtactctttccagaccaggtattccattaagaataaaagatggaggagtcacatgaattgttggaaaccagcataatgaattaaatagaggcat

SEQ ID NO: 335509 - DNA, 1000 bp, Homo Sapiens
tttttttttttttttttgcaattcttgagtattccagcattatttatttgatcagagtaaaatacacttcccatcactacaaactgagcacaactacagttgtctacacattcatatttttgacgtgccaacattttgcattctacatgaaacatttggtttaaacaaaatcttaagaattctctattttgtttcccatcttccctcctgttctctcccatcctccaaagatgttttatattaactgctatgagatttatttgccggtcacgtaatacggaggacagcagggaacaacacaagatttaccatgcctaggggatgaatggcaaacccaactttggctaatgtcattgagaacaacttggaagcgtgagcagagatatctcatgaagtggcagtgaacctacatttccatttatcagaagcaaacatggaaggttacatacatgatgaagtattggaagttaaagacttaagacacaaaatcactaatttaaaagaacatgcaacatgagtatcaacttgctatgtagtgtacatgtaaatgacccaaatattcacctctagcatcctgaatctcttcttactacagctgttatttgtacagccactgaatgtagattagtaaatactgacatcacaatgttgacacatgcagggagggggagataaagcaacagttcttccttccaccttttccaaagtctcaggattaggggaggtaataagttttggaaagaaactgaaatgcaacctggaggagagttggacaagccacattttccactcatgggaaagaagcggaccattctgctactttcccaaagacaaagggactccttaaagggtaactgaaaaatgagcgctatcctcccagactgttttcttctatcaagtactgcatcatcggtaagcactgaatcctacctttcttaattatactagccaatgacttccttgttctcgttctttattctaagatttcccaaaatttgta

SEQ ID NO: 335510 - DNA, 1000 bp, Homo Sapiens; identical to SEQ ID NO: 157406

SEQ ID NO: 335511 - DNA, 1000 bp, Homo Sapiens; identical to SEQ ID NO: 157407

SEQ ID NO: 335512 - DNA, 1000 bp, Homo Sapiens
agtgttcactctttgctttattccaaaagtaagtgtccagagctggcagtgacattgtaaatttgatcgcggcttaaattccacctgaacacttagaaataaagccagatgctgagacatatggctttttgcagactagttttgcatatattcagagagcttggcacattacggaagacacaggagtacagacagctgcagggtagagacgctcctcctcattagcggtggtcttctaaccaatacagatgctgacactgggctgctcccactgcccacctccacggcacatccttgcctggtcgttccactctcttccaagtgctacactaacacatctccctgaccacctgggaagacccccgcccaccacccagctcttcaagagacttaagtatttgattgtctgcatcttcagtcttttcatgtttactgagagacactgcttacatctgaacttacctgagttctactcaataaagaccccattagctaagggttttcatgtcatcctcactaagctgggttcatccagcctacctcaaagcattttaataccaacacattttttttttgtcgaggaggaataagacgccttctggaagatgagtatgcagtggatgaccccaagttagaccctgccaaggtcagaggtgcctaccttcccccaacttccaaggagaaacattgctgggaggagggtgagccagagagaggaggccggatggattccagatgtgctttctatactagcgattcgctttctctacccatgtcaagttgaaaaataaacaaactataaaaggaagaaaaagagaaaaaataaagaaaatgtttccacagtctggtctccttcccaacacccccctttctctctccgcataaaagataggcacaataagatagtaagatagcatcttggtcagatgcaggatgctatatttttaataggcatgtactcccagggaaattaactagttcatcctccaaactgaatcaa

SEQ ID NO: 335513 - DNA, 689 bp, Homo Sapiens
tttttttttttttttttttgggatctgccatatctgatatgataggcctgtgtattatgattctccagagaaacagaaccaatacacacaaagagatttcttataaggaattggctcatgtgattatggaggctgacaagtcccaagatctgtagttggcaagctggagaaccaggaaagcagatggtattgttgcacaccggaggcttgtagccttgagaccttgttgtacacgttaaaccattcaggatggtggtccagtttctcagcctgcagggccactcttgtcatgaacccaaaggccctgttgaagtctttgaaatgaaactgcttgaagatggcatcacggccttccagctcattccaccccacagccctcaggtttggcagcagctggtccctctcctcagcgctcagcctgtgtgctttgccagccatggcgcgggcggcagcaggtggccagcggagagggcaggcggcggccgggcgcgcaggctgccgtcccggggcggggccgcgctcgggccgccctccggtaatgattaacgtccccagccagggacgcgctcggcctgcttgcttccagcactttcctcgctgctcagagccatcctccgtgcttgtttcagggagctagggtgaagcatgagggctccaaatgcccgcttctgggttggaatcccaccccg

SEQ ID NO: 335514 - DNA, 1000 bp, Homo Sapiens
tttttttttttttttttttttttttttttttttttttttttttttttagaatatatagagttacattttaatagcaactgtgtacatgtcacgaaaccatttcccttatcaaagatgtaatttgtaaacctcaaatagttgtgtatctgtcctgttagaagtagatgacttcaattaaacaaatttatgaaggacattattctgattcataaaagttataaaatattaggtaaatacagagaaaacaataagcctctgaaataagtctgtttctgaaatagtcaatagtcttcccatccaaactataagagaatgtgaatttcttcaacatcatacttaaacattacagaaaatagaaatacaaacaaggttggtacatgagagaaaatgttgaccttttacttccttttacaaaaatgaaaataataaacatgttttcgtataaaataacacaaaatgatatacactgaagttgatgaagcaaataaatattctggcttctttttcaaggtatcagggcaaacaatttccaaacttttcattttgtacagaaggatgaataactacagctcatgggaaatgttttgactttacaaagtatagatgttggaacattaagaaaaatgtatattcccaatgaaaaaatagttatatcatcttatagtaaaccaaaagattagcaataatactatggacacattagattatatactacagacacatatctatccaaaatacctattttaaatttttaatacaatattttattttaatataaacatctgtcagttatagacaaagataataattcacaaagtacatgctatcagaatgaactttggtaaccagaaatgtaaaatttcaaataacggataaaataatgtgttatttttatagagaaagaaaaaaaatagcaacacaatctagtttattttagggtactgagagcctagcagacttaaaggacaaggtagtaaatgttttatcactcaaaaatcca

SEQ ID NO: 335515 - DNA, 1000 bp, Homo Sapiens; identical to SEQ ID NO: 160017

SEQ ID NO: 335516 - DNA, 1000 bp, Homo Sapiens
ttttttttttttttttgtagttcagaagccaacccttattttattaaaatgtgtacaagagatggggaaggaaaaggaccagactgtactgtggccatgtacacaaaggcatgcaccacatcccagctctgctgccctgggctgtcccacaggcagctctctagaacttgagagcctcaaaaggggcctcatgaagcccagatcttccctggtcaagctgatggcattcgtataactgaaagttggggaagaccaccaggtcagtggagtggagaggttttgtatatggtcttctttgaagaaacttacttcttgcaagccctggcatcttccaattggctgtcctagtagtggacgcggcatcagcctaccagcaatggaggtctactcacccttcactgagttttgtccctgaagtcagaagccctggcacagccaagttcacaggccaaatcacacttcaggcccacactgcttcacgcaatgacacacgtacagacggatatacagaaacacttctcaaggagtgcatgagcatggttcatttcatatttctttcaatccagtctttaaaaggcagcaccttggtgaaggcagtggagagcctgtggctgcatgttttatcatagctccagctgaccagtcccatcagatgccagcgtggctcaggagatgctcgtcccgggaaggacacagccgcgatgcctcctgtctctgcagtgcagatatcagaaggggcagtgggttcccagctggcacagaacatgttatcagtgacactcactgggatgccatggtcctcatgctgctcctcacacagcagcgagtccaccacactgaccaccccagagcgcagtgtgtcgttcttgaagccagggctcctcacgtctgccaggacattccagccagccacagtgatgtgggactcctggaaggaagtgctgagatcccgactggcagcgaggcagatgggctggactcgggtgctgatacgggcctt

SEQ ID NO: 335517 - DNA, 1000 bp, Homo Sapiens
ttttgaagctataattttatttcattactcttagtacatccacaactatttccacctaaatagatctttaaaataagcatacacaagtattgactattatctacaaatatttattgtaacacttgaatagaactacaggaagcccttggcactgatagaaaatattgattcactgttaggttacaaaaatttatacatagcaaaatttaatgctctttacataaaaaatattagactacttaaacaaaactttcaaaaattcctggtaatagctaccagaattagaaaagtaaaattaggctttagacactgcctcttctagaacactggactctgacagcacctccactgctggaaagaatagttaaatctgtcatgcaacaggaaaacaaaacactaagctattttggaacaactgttctacacagaagagagcttctcttaatttaaaaaaaaaaaaaaatcccaaataggcatttttaggcattaaccaaaaaagagaatccaaatgaaatattatacttgatgttcaattttaatagcatcttgataaaggtatgcttcctttcatttgaatacatttctgcacatgtatgttataaaatccaggaaacagccaaaccacaagttaactcttaacaatgaatatacatagttaaccctatagtaagcagcccctttgaaaagcactgatgcacccaacagttatatggatcatttcataaagagcaacacaaagtttaccatcactaatacccagtacctacagtcacttaatgttctggaacacaataatgtaaaaggcaagtttcttttgaaaatggcttaaactcaagcagttctcttgctgaacatcaaactttattattccaggaaactaagatttagataagaaaaaaatgaaataccaaccctaatttaaattacttaagtattcaagtctataaaagtaggaggttagaggtctgtggtcaatttgcaattaggttttagatagttg

SEQ ID NO: 335518 - DNA, 1000 bp, Homo Sapiens
tttttttttttttttttttttttttactttttaaagaagtaagcctttatttccttgttttgcaaataaaactggctaagttggttgctttttggtgattagtcaaagagaccaaatcccatatcctcgtccgactcctccgactcttccttggcttcaaccttagctggggctgcagcagcagcaggagcagctgtggtggcagcagccacaggggcagcagccacaaaggcagatggatcagccaagaaggccttgaccttttcagcaagtgggaaggtgtaatccgtctccacagacaaggccaggactcgtttgtacccgttgatgatagaatggggtactgatgcaacagttgggtagccaatctgcagacagacactggcaacattgcggacaccctccaggaagcgagaatgcagagtttcctctgtgatatcaagcacttcagggttgtagatgctgccattgtcgaacacctgctggatgaccagcccaaaggagaagggggagatgttgagcatgttcagcagcgtggcttcgctggctcccactttgtctccagtcttgatcagctgcacatcactcaggatttcaatggtgcccctggagattttagtggtgatacctaaagcctggaaaaaggaggtcttctcgggcccgagaccagtgttctgggctggcacagtgacttcacatggggcaatggcaccagcacgggcagcagctggcaccttattggccagcaacatgtccctgatctcagtgaggtcctccttggtgaacacaaagcccacattcccccggatatgaggcagcagtttctccagagctgggttgttttccaggtgccctcggatggccttgcgcatcatggtgttcttgcccatcagcaccacagccttcccgcgaagggacatgcggatctgctgcatctgcttggagcccacattgtctgctcccacaatgaaacatttcggataatcatccaatagttgga

SEQ ID NO: 335519 - DNA, 1000 bp, Homo Sapiens
tttttttacagtcaatgagctctctctttattgaggtatttcaaatatacaaacacttcagagctttttagatatgtgaaggtccaatttagtgaagcggattaacaaaacatgattctaaaagcctgcctcctctagaccaaggccatgtaaaagatttatgtaccaatcagcatcttttccttttaataatcttcaggatgttgtgttgggtccccagattcccatttgattttcttgcatcattttctcagactgtttgcttccttgcttcctccccagtgagtgccttgggcattttgtgtgtgcagatagagaagtacagagttactgcaggagccctcaggagtgagacaacaggaaatgacaaagtaatacagagctgcagtagctgggatgggtgaggaccccacttgggatgccccatggtagagtactggtgccttgggagggtagaactgctcaggtctagcacgcctcactgaagattggattcacctgctgggtgactcggatgaaggtagttctcctgctcaactctttgagcttagctgctcccacataggtacacgtagagcggatccctcctaggatgtctcggatggtatgttccacatctcctttaaaaggaacttccactgtctttccctctgaggctctgtactcagccacgcccccagcatacttcttcatggccatttcagaactcattccatagaagagcttgtacttcttgccatccctctcgatgagctcaccacctgactcactgtgcccagccagcatgccacccagcatcacgaagtcagctcctgccccaaaagccttggccacatccccaggacagctgcaacctccatctgaaatgatgtggcctttgaggccatgagcagcatctgcacactccatcactgcgctgagctgtggataccccactccagttttcttccgagtagtacacacagagcctggcccaattcccactttgatgatgtcagcc

SEQ ID NO: 335520 - DNA, 1000 bp, Homo Sapiens
ttaaaaaggttttgcatttcatatttattatcagtgcttcaatatagaatgttttgtaatgattagcaacattgtaaacaccaccaggtttttccaacactaactgctagtcttttccagtaaatattttttccccagacaaaataaccaaacctaacacaatttcaagagatggtgataccatcagcataataacccaaattacaaaaatggcaatacttaaaatcatgcatattatttcaccatttcataaaacttattttaaaatttctacaaactttcccagtgtaaaagactcctcaaaagctgcatgataacattaaactacaaaattcactttggaaaagtagggagttatttttctaattttagcttttttttttttttaaatgggttaaaagatacggtgaggagtgtgttgagagaggtggagaaaaggagcttccagtcaatgcattcaccatatctgaaaatacttcagttatacaaagggaacacttcgagagtaaggatatattataaataagtctctcagcaagatgaacggatgaacagttcaattgcacccacaggagagaggtcttcttggagaatgcttgtttatagaatcttctgtaaaatagagttggctacttctaatgattcatcttgtactaaaacaatatcataagagtccatgtacttttctaaaagctcatccactctatcatttagatatccaattttcagaatgtgctcaacattggccactccatctgccattcttaagtctccttgggagtctcccagaagaattatgttactattgtcttttagttgattgaaatattctgtattcctcaaggcaccatcatgtttgttaaatacatgaattagttctcctttaaatcctttgagcaccccagtttcatcaaaatccataaaattggacacaactttgacattgggatgataaacaccagcttgacgaataacttcctctagtacatcgccgattcca

SEQ ID NO: 335521 - DNA, 1000 bp, Homo Sapiens; identical to SEQ ID NO: 157809

SEQ ID NO: 335522 - DNA, 943 bp, Homo Sapiens
ttcctttgctcagcaatctttattcagttcttcttgggggtgggatgcctcccttcccatgctcccacccctcccatcccagaactccgttgggctcagtgtcctctgttgagggaaggtcttggtgcccagatgcctactctgcaggagagggaggaaccttgtccctttgcgggagtcgctggtctcttctgttgtggggaagaaggaaggtgggaggggcactgtccaccagcactcagagctccattatgtccccagctggggttgcagggtaggggggactgggggtgtcccccagcctcagcagacggagggcctcagggatgaggctgccaggatagcgccagagaagcagctcagagcaagggctcctgagtgggggcagggctggggagaaggtcatgggggggctgcagtaggggtggtcattgtgcaggctgagttgagagaagtgggtggccatgttctcctcagacagaaactgcttgcgcagaggctccctggcgtccaggccccaagtcacccccaaggcggcccgcgggaggcgctgggcccctccctgggggcctcgctgcaagggctgctgcaggatcattgggttttggggtcctgcgggtgggatctgggcgacaggggaggagtctctgagggcgtggccaagagaggatgggcgtggctttaggcgggcacagccgcgaggttctgcgcgggcgcggaagacgggcggcgcgtggcggaaggcaggcttgctcctcggggtgggggagggtatccggcttaagggggctgcggtggacaccacttcttaatgtcgggggtcttcgcggcgctcacctcggctcctagggttcgggacggtacgcaccagccaccttcgcgccgaaggcggtagggcgccacggagaggaaccgctctaggcacgtaaggcctcgtgaggtt

SEQ ID NO: 335523 - DNA, 1000 bp, Homo Sapiens
tgttttttttttttttttttcttttttttttttttttttttttttttttttttttttttaataacgaaaaagctttactagtgttttaaccgtgtacaaaacactgtagcaataagagaaaggcccgtgctatctgtgtttaaacaaaatgcagtggctgcggggcttccaggcagggctggggaacaggccgggcgcccgccttgggcgcatctccgcctcttaggggtaagaggctcagagcctaccccttaggcctagttggatgcgggtcggtcctgcccaaggccccagtgaggggagccgaggctaggaaggggcaagttttatgtgtttgggagggggtgtctcttcccggcctctgcgtcttccccctggagcgtcagtatggtcaggctctggtgacccagccgctttgcctcccgactttgggaagagtagcaaggagaggtcctggcaagtacaccctgggtgacaaacggctatgagagttcccaggtgatttctcgagcagcttcagtttaccggagcccagccaggagagagaattttagcacaggaaacgcaatcccgtgtccaagctcctagaatacccaggactgagaaccaaagcaacagacttttcccagggagccacactgcctccccacctcttctttaacccctcacttggcagctccaggagttggctgctgaagacagagtacaggagggcatttcgttgacgtaaaaaagctacaagccccttccggggcaaggtccagcaccatctgttaacagggcagccagggagaaaggatgggaccccagcactctgagcagaagcagaataaatctctcttcactggccgaagaccctctgcctcaaagggccctacccagactgctgagtgaggatcccatccccaatcttcccacccctctcaggaagagctgggtcccagaaactcctatgacacaataaatccactttctctgacagtgtcagagcttcaagccg

SEQ ID NO: 335524 - DNA, 1000 bp, Homo Sapiens
ttttgcaggcagggaccagctcaacccttctttaatgtcatccagggagggggccagggatggaggggaggggttgaggagcgagaggcagttatttttgggtgggattcaccacttttcccatgaagaggggagacttggtattttgttcaatcattaagaagacaaagggtttgttgaacttgacctcgggggggatagacatgggtatggcctctaaaaacatggccccagcagcttcagtccctttctcgtcgatggtcagcacagccttatgcacggccttggagagcttcaggggtgcctcctctgtgaccccggagaggtcagccccattgctgaagaccttagtgatgcccagttgacccaggacgctcttcagatcataggttccagtaatggacagtttgggtaaatgtaagctggcagaccttctgtcttcattttccaggaacttggtgatgatatcgtgggtgagttcattttccaggtgctgtagtttcccctcatcaggcaggaagaagatggcggtggcattgcccaggtatttcatcagcagcacccagctggacagcttcttacagtgctggatgttaaacatgcctaaacgcttcatcataggcaccttcacggtggtcacctggtccacgtggaagtcctcttcctcggtgtccttgacttcaaagggtctctcccatttgcctttaaagaagatgtaattcaccagagcaaaaactgtgtctctgtcaagctccttgaccaaatccacaattttcccttgagtacccttctccacgtaatcgttgatctgtttcttggcctcttcggtgtccccgaagttgacagtgaaggcttctgagtggtacaactttttaacatcctccaaaaacttatccactagcttcaggccctcgctgaggaacaggccattgccggtggtcagctggagctggctgtctggctggttgagggtacggaggagttcctggaagccttcatg

SEQ ID NO: 335525 - DNA, 870 bp, Homo Sapiens
cctgagggagggtcccagggccgccgccggcaatccagcaggcaagagcatgcctgaagagcatgccccaggctctaccgtctgatcctgctccttctcctcccagtcatgactcagggtttgacgagggccttggcgtttcacggagatgtttattcatgagagttttcatatcaaaacacaccgagaccacatctatatgccgagaacacaggcacccagaggcctccagcaagatttgagtagtttaatgagttttcacttattggataaaagtgtcaacatagtgatggcaaaacaaacgcagctccagcccttgtttccaccttgttgcagctcaggggcgctgtccccagcagccatcggcgccagcatgaggaaggagtctcaggatgcccctccagcgagagccaggtcgggcctcactccttgaacttccattcctggcggcacatggggcagtgctgctgcacctgctgtgcgtgcagccacttgaggatgcaatgcatgtggaagcagtgggagcactggccccacaccagcgggcagtcgtcgccgggcaccttgcagtcagggcagcatccgttaaatgccatcctgcagatgccacagttctcatcgttggccacccagagccaagtggccacgccgttccagcacttaatcttcaccttcatggcagcagagcctcacgttgaggatatcttcaaagatctcaaatgggcctggccaacatgacgaaactccgtctcgccctacccgcccttccgttggcagcgccggcgtccgcgcgggaaggtataaaaacgaccacagtcgcggcccgactccctcaacagcgcccgccgagtctcgcacgccagtgcgcac

SEQ ID NO: 335526 - DNA, 1000 bp, Homo Sapiens
ttttttttttttttttgtgcatgtaacttttttattgaggcacaacaaggcattgtaacttgcctggacttgaggcagtcagtttagtaagctgaacgttaatacagttaaggattaagtgcaaacaatatacattcacagcttgactagcgaggctacatcacaatttataaagtgccagattagtgctaattgtcattcagcttgatttttcacctcaggaaggaaaacaaaaaagtaaggacctcctccctctaggaacaaaaacattttcctaaaccaatcagtcatgagggcaaagactacttttccttcaatcccactaattagaacaccatccttttattgtcaatactgtactgactttcaatcttgataaagaagatagcctgaaaacgtagaatatttccagctacttccataaattgctcccctgtgcagacgtaaccatatctggtctccctggaagagctgaagaattgcatgattgctagcagtttcatggtctggagcaccatcattggcataggctgataccaagacctcttcattcttcatgaggttgacatacagtggcacattcactgccagctttagcatgtgaaaaatgaaaacgtaagtgccattcactgggcaattaaatctaccaagctgaagatcaaaagtttctcctaagttgttcagaagaagatcaaacacaataggttggtctaaagttccaggggccagattagaggttctggctgctgagaaggcaactcgcatctgctgaggcagagggtagacgtgtactggcagtatggtggctgctggatttgtcactggcacatccacaggggtcatgctacgggagtctccttgtccagagtcaccactgttaaaggtttcgttgtctctttctgggctgctcacctgagaagaatcactccaccctgctctcgaatttgctcgtggaccaccagatgtccctcctcgcttataacactgctggaaattatcc

SEQ ID NO: 335527 - DNA, 1000 bp, Homo Sapiens
ttttttttttttttttttgacgttggtaagtttgtctggtttatttgcaggctgtagagatgatatcccagtccacgcacactcccatgcacacgcacacacatacttcatccacctgaatttgcccgacaaaccctcctctgagtcatagggacaaagccatacttggcagtcctcacgttactggttacattagatttggtctttcagaaagaagatggttgaagtcccaagaagctgagcccttagccagagaagtaagagtcctagaaccaagagccacaacctgaaatagatgcagactgcccccgccctccttccagggacaactcttgagaccctctcctcccaggagttgagtctcaagaaatgaagggactgatggggtttcccaggacacacgagcccccacccccattcaatgagaaaaccctctcttctgccatttccagaagctggggccacacctgcttgctctcctcccttaaggagaattcctgcagtcttgtagaactgtggaacttactgaaataagcctgactggttctgccttcctctctgagtgaggaacagggacactgaatatgatgggtagtcaaggaaggctttatcttcctcaaaggtcccagcctgtcccagagaggagaggcagtgaggaggggtgaggacatctaatgatcttggggaaaaaaaaaacaaaaaacagggcagggtgggggtagaagtaggattttccatttacagggaggaatgttttgctggggtttaaacttcaactaggcctgtgtgcatttgaagcagatccttgagctcaagatcagccagtcatggccaaataacctcattcctgaactggttgaaaccagtgggttaacccaacctggccatttcctcatgccttacctgttttcctccctcaatctgctatcagaggtgactaaggagccgcagggaacccacgttggctccaaccaccaagacctcccagtcctgtccactt

SEQ ID NO: 335528 - DNA, 1000 bp, Homo Sapiens
ttttgaagcttgaggcctttttattgacaattctccatagacacagagatccttttagttcctctccagtgtaaagaaagcacggggtactgaactctcctctcttaaaaggacacagaggcgatacgataccaaagcctgtctggctccccagggctgtggcacctccactggcctgggtaagcccctggctgcacagccccagctaagctgcttggctcggcaagaaagcgggcctaggatgggtcccttgcctccccagcctgcctctctggacccctgctcctcgagtgtagaaacctctcagccccctcatgggtcctgggtcccaggcagcccatgactccagggaagagtcctaggtagaagacccccacccccaattcctcctcatcccattacttgtgccacatgttcccaggaaccatgcaataaataaataaatacttgagaaaggcagggcagctccagggaagggaagggatgcctgagccagctcatggctaagggagagatactgagcccgtaagagtccagtagtgaacatgaaactgttggaaagaaatggagacccccagggggccttatcccataactgagactgtcctccagggaatagccctggaatccaggacccagcccagcgagatcctacactacccaggcccccaggggtcaagggcttcaggacctctgctccactcacctggcctcccactccattggacaagaggcagggaaaggaaactggagtgctgggccagtggaggactgccctagactctggacagagggtgcagaagttgtgatccaagtgccctgcagctgctccagcggagctggggacactggggcattgtgtgggctgagagtctgtgaattgaggtgtcttcgaggggaggctgaggtctgtccagctattggggcttccccaagctttcctccacttaacgctgaaggactcagccaaaccctcctatacacattctcctctcaggga

SEQ ID NO: 335529 - DNA, 1000 bp, Homo Sapiens
ttttttttttttttttttttttacagaaggagttcaaaatttatttataaatttgtgtaaaagaatataagacctttttcttttgtacatatttgtaccataaagaaagtagggattaaaatctaaaaagacccccaaagctttcaaaacctgatctgagaattagataagaatatgtcacttagaaagacaagcctgtagcacccatagctctgattaacctgaaagcatcaagtgactccctctttttctaccctaccaacatcactctaattatacttccaattagaaaaataatgtagcatttccctggcagtagagattaaatatgagttcaggaatcagctcctccaaacatgcataaatgaggacaaggagaagccagtcactcctgactgcacggtcaagtgtgtgggcagttgaaattaaggtaaaaacagtgaggctgaacaaaatcacattaagaaaaagcatctcatgaggcttttcgaggtcagttgatgaaggccagataggagtcaatattttctcatatacccttaggtgcctcgaaaaaactaatagagaaccccagctgttaccgctattcatattccaacagcctccagattgctcgaggccacctggttgacttttgccttggagtcggtccagaaaagcattatttaccctcctgtgttcagtctggtggattttggctctttcttgctcttgctgctgccgtttcagttccagtaattcactcttttgatgttgttcatccttcatcttttgcaattttctgttttcttctgcctttagagaatctctgtaagcccagcttctggcccagctgtgatccctaggcaggataggaagtttccatgttgaggattgtgggccacaaacagcactttgacaggcacttctgtctggcgattctgtgttcagtttgctcaagaactcagcggttttgtattgctgatgctctctaaatgcttctcttctaaggttttcttga

SEQ ID NO: 335530 - DNA, 1000 bp, Homo Sapiens
tttttttttttttttgcataggaatcatgctttaattgccatttagcatccactaattcccatgagatctgtgattaaaaaaaaagcctctggcctgcttgtcctgtcttaaaagtcatgagtctgttttatgaacagaaagaatgccacgcttcttagcatatgtaaggcaaaatggatttttgatctctcatgatgtaaaggagatacaaaggtaaggaagggaagatttctaagtgagactttttttgagtgtcaatcccgctggacacacatattacaaaataaagattttcttctgtaaagtgctgtttgctcagtgaatcatgcgccaccacagagcaccatggctccacctgctcaagagcatggaggaggcagcatcggcagagggcaggcaggagtctgtgtttgggggtctgtttcaataccatctcctggggttcgccgtgatgcagagggaatcttctcgtcatggctagacactccccaatgctctgctccaggctggggaccactgcaagctggaggcggctgggtatcagggcctgggcacccctgctcctcctcttcccttgggattggcattttattctctcattcagctcaagaccatgggcaggaactctgctggctccccatgatgtcatcatggggtcttccactttcccacagagctgccaggcagaggcaggacccaggcatgcctggcccacaggaaggttttctaggagactaaggagggtttagaaaaagagaagccactataaatagtcacctgtccagtctatgctattaaaggacataagaaaggtatacaattggcagtaaacaatttccttcagctcttcatggatgtccaggaaaatgacaacccgcacacaatcagacgtgaatgatttctgctccagtgtcttcaggctctgtgcaacaagaagagtttgtgtcggaatgacagattccatatccatgtttattttcaaagttgggctctgttagt

SEQ ID NO: 335531 - DNA, 1000 bp, Homo Sapiens
ctatccattcctgccttcctaagagtctcatcactgaagagaaacagaccccaggcagttcagtctacactccaaccaatacagccttgaaaaggtaaacagaatgttgtttttataatgttttattataaaagtaatatatgatctttatagaaaaataaagaaaataaaaatcatcaataattttatcacccagaaacaatcacttttaatgtgctggtagaggttagtctattttaacatttctgaaatcatatagatttacatgattgttctcacgtaacctgtaacataagcatttcccaagttgctattatctgttaataacagtggtttgattaattggattggctgtgtggatgtggaacggaagagccttgatgtcaagaagagctgaagcacagaaggtgcagtcggtcatttgggaccatattgtctgtggctttcaggacagggagcttcaggactcaggtagatgactctggaagaaaccttctcttttggaactgcagcatctccctgtcctccccaaggggaatttaggccaggaaataccagatcttccctctctgattttcttctcaaatcccaatgcaagacaatggagactaaatacggttctggtcatcaggctcttccagagcatccgggtgcatgagaagtgaataggtgattgtgttctcagccccaactttgtcagcctcatcaggattagtgggattggctgaaatccgctttttcctgcagtagatcaaggccactacagcagcaacaatggccgctacagcaatcccagtgaccacagccacaatgatccccatcggtgaagagctgggagcttggacagtgatggtcacaggcttggatgagtacagcgtgtagcctatgtttcctgtgcagtggtaatcaccactgtgactgtggtttgcttgtgggatggagaagttgggatccgaacgggaaaatttcttggattttccattctggaagaatgtgacct

SEQ ID NO: 335532 - DNA, 1000 bp, Homo Sapiens
ttttttaagacaatactcaaagaatatttattgttgacgcttttttccttatatttaacattttgagataaaggctaaatgagtgtatttgtgtgcgtatacaagtacaatcaatgtgactgtgacaactgcaaatgcaaagctgataaacatgtgttgccttgttgactcaaataccagaagctgcgttgtcattgatgaaggaatatttcgaagcgctgaacaattcttgataaagttccgaaacaaacaaagcacaatcttccctcgatttacatgggagttgcattccattggactggtcttctccatagtttttatgggatggtgcatacaagaacatcagagcaaagacatacagattccacatcccatagatgcctgtgaaaaaggcactgttcacttggactgtgacgccgccccatttccaatggccttccgttacctgactaacgatgaagaagatgacagtcatggcagcgcaggccaaggtgataagcatgaggaacttgaacctaaaaattagcccctcatagtgtagccgccggactttgctcatagctggcaggctggactgcttcccactgatgttccgaaacacctgaaataccatgaagcatagaaacaggaagtagaggcagaggcagattccagccacgatgatgaaggccatggccagctctgttccaatgtctgtagtccagatactgtagaagggattcgtgagttgtacccctctctcacacatgtcaaatatgaagaggcagaaggagccaacggcaatgggtccgacttgcttccaataccctgcgatgtggttccgctcgtgctgatccatcatgtgctcgccacagaagatgatccagaaggacagaagcatcgcatagaagatgccctgtcggatgtcaccaaacagcagcatccaggtccagtcaaacccgatggaaaaccattccactgggatattgataaaggtcatggaaatcccaagggcaaagat

SEQ ID NO: 335533 - DNA, 1000 bp, Homo Sapiens
ttgtagttttaaaatattttcactttattattatgcttataatattattccaacagactgtattaaaggcagtgatcactaacacagaacacgacagggcgaagaggcagccgggccgattgcaggacgtggcctgtcgggccagggtcgctgacatgcacgctggtagctcatacactgctaccctcagcacaggctgcaggaatagggacaagacagatgccgccggactcttagaagctatttaataaatatcatccaaaaacaaaatggaaaagaaacaagaaaccctccgagcacaaccaccttaggccaactgaatgtaatctagtttattcaaccaaaaattgagagagaaggaaaatattgaaacaaacaaacgaaagaaagcagttcttaagactagcagtaaataaatttatacaacagttcggtctgtataatatgatgaaataaatctacatcttttcttattttggtgctttgaattatacatacaaacaacaattacagggacttgttcacaaagcatgtaggcctagaaaaaggctctctgaaaccctcaacggcaactggtgaacggtaacactgattgcccagaactggtatttcctttgcagaggccaacagctttgaacaaatgattcgcctacaacttttttctttttttttcttttctcttttttcttttttttattttcttttaatgcatcaaacaactgtggccagtgaaaggaaacaaaactggcagtttgtccatttgaatatcagacctagtttcttcttaatttccacactatttctcccatattccttaaacttcttggcatccttcatgccttacagctacccagatgcaataaagtcattgtacagtatttcttacaatataagttatatgcaatgttcagcattttttttttcacagcactagagaccctgttaaataggggatatgagtcagaatggcttattcacagatggggtccagattcagtgg

SEQ ID NO: 335534 - DNA, 1000 bp, Homo Sapiens
tttttttttttttttttgtttaagaaaagttttattaatgtgttaatatttcagcaaagttattgcaacaggttgaaaatgcagacacactattacaggctgtaaagtaacaaatgagttttacacaattaaaatattaacacatacttatgggatttgttgaatgactaacagacccataaaagaaattaaatctgagacgaaatccagtattagcacctacaatatatctgacagtgaaacttttaatggtttctctctcctaatgtatttttaaactctctcccaaatacagcgctctcaaaccccaaggataaacgaaaggcataagcagccccgatcctaggaacgtacagccaaaagcagagctacaaatatggactcagacttgagagttttactgagaagtaacttactgtacttgagccaatcataagatttctgtgcactgaatactgtatatgagaaaattctgtgggtcataaggtttgccttagggatagttaaaaattagtaatatacagtattattcctatcaaatttttttctcataagttatatttataacaaaactataattaaaatattttttatacctgcttattccatatccagggacacagcgggaacatttatgtgtctgatggtttggcatccactttattgtgcttactgatttttgtgatgaacaagcagcacgtatcatatctttccaacattcaaggtaatggaacaatgacataaaattctccaaagaaataactggaaattgcattaaatactgctttaattaggcataattgctataataaaacaaataacattatacatttttttttcaataagcttcagtttgaggaactgaatagtagaaacagatcttaagatttgagtcatggtaaaaccagtaattctttgaaatctgggaggtgcaaaacgacagccacagccaaccctcaccaaaatcctggagaaaaacattttattaatttaggggaac

SEQ ID NO: 335535 - DNA, 1000 bp, Homo Sapiens
ttttttttttttttttatggttttggacatataagtttaattacctgctagactatcagatggaaatatgtggtaaatggatggaaacaaggtacataaacttaggaggcagaaatttttaaactttagggttagacattcaccagattggacaatttttaacatttaaaataaaactttttgtcataaaaaacaaatgtattaaaactagtttccagaactgcccaaatgactttttaaacatgacttaaatgtcgttttgacaaatctatccaaaatactaattttccttttagaacttagtttataatttatatattaaagtgcccttaattgatattcattgggataccttcctctgagccctaatggttttgggaggcctaggcggtggatcacctgaggtcaggagttcgagaccagcctggccaacgtggtgaaacccagtctctactaaaaatgcaaaaattagccgggcatggtggcgggcgcctgtaatctcagctactcgggaggctgaggcaggagaattgctggaacccgagaggcagaggttgcagtgagtcaagatcgcaccatcacactccagccaggatgacaagagcgaaactcagtctcaaaaaaaaaaaaaaagtgcctaagtatcttttaattaagttgtcattctcaaagatattctggagcaaaaatcaggaattaaacatctataaattcttcttcacttctgttatagtgtagtaatttatcatctaacccatagtggtctatcaattgagtaaggcttagtttcttgttctcttcagacacagctgactgcaactcataaagcaagagctggctacagcttctccacttctttattaacaactgtaactgagacagatcattctttgatctatacattttgactagttttagcctccgaagaaggtcttctttctcctgaacctgcttcaccaatttggctttttcagcgtttaatctttgtttaggaagcttc

SEQ ID NO: 335536 - DNA, 1000 bp, Homo Sapiens
ttttttttttttttttttttgccagtcacataataaacatatattaacagatgtacaatttgagaattctaattcaagaaatacagcttccagaggatcctttaggatctatgttcttattgcacatggctcagcccgtctagggacatctaccaagaccagatggtcggggcgtgggggcagagcaccggggccacagtgggtaggcactctggccacatcagttcttataatctctctgggctgaagtggctgcttcattgcagggttggaccttgtttaaaaaccagatttgacatttccttaccgaacttcctttcccagcaagaatcctatttgttgggggacttttaaaaaaagagccgagagaaactctgggagggtggttatcacctcctggctggcagcttggggaagtaaggctttggaagacggcgggcgcaatgacacacccaccgccacaggaaaacatggtcattccagaaggcccaggagaaactgtgggaataaataaaacctccctcctcccactggcggcaagtgctgttttaagcaaaatcctcatttcaatgtgagggtaagaaaactattctggttcaggtgtatcctttgtccaaggtacgagaggaggcctggcggtcacatcaacagcgagtgaagacagaggcagccacgggcactgccttttcttcaggagtcgaggaggctgccctggggtcccggcaccactgactgactcggaggaagaactttctgaagtccttggtgcatgacttaggaaaaaccagtggcaatgatggagctgtgccctgtggcacctataaggcaaagcccactgagggacttaggggtggggaaatggttaggtagatcctggccccctctgcaggccttcccttctgtgggcagggggctggagggctcctgggcaccaggacaaagagcccaccagcgctgctgagaggggagaggtggtctcacccaagcaggtccttgtggg

SEQ ID NO: 335537 - DNA, 1000 bp, Homo Sapiens
ctagccaagattgtttttctttcttttatatgggctatgagaaggatctggtttcagttcttggtattgcaccacttgtacatctgaagggactctggaaaggaagtcaagtagttcattgttatcaattgcatatggactccgaagcttttttgtaaatttattgatgccccagacaaggacaatgtatctcagcggaatgcagtacaggatggctgtgaacacacagagggctacaatggccagccagcttaagaatgggacagtccagttgaaagtattcttaatcctttcgccaaaggaagccacttcatctaggatgttctggacactgacacatacctcctggatggcatagattttatttataaatccctttttttcactgtccttgtcatctttgtcatcttcttcttcctcgtcctctagcatgtcctccactactgtatcacgttgcctgttatctttccctgatattatcaagaagtagttccatgtcaatagtaacaacaaaaccagtggtatcatgtagagctcaaagttccagacaacaaagagaaagagcacaaaagcagcgagactccttgggggtgaatcccaatcaaagcaactattaacgtagtatgcagcatttaccagcaccatgacacaacgtttcattctgataaagtttcttagtagcagctgtttagagagtctgttttcctcttcaatgtacttctgttctttgggtattaatgttcgtaagctggctttcacagcattaaaaatcacatctatttcaagatagatgaccccctttgttggccctgtcagctgcttgtttttcaagacgtaggctttctgttcaccattttgaatagacagcaatggtatagcaactttgcccagaaagtcagcacttcgatcccgatcttcatcataaactgtcacttcaagaactgaatggatatctttaatgttgaacgtgaagactttattccactcaggattgagattt

SEQ ID NO: 335538 - DNA, 1000 bp, Homo Sapiens
tttttttttgttatggcaaagtaagctttatttaattggtagcaggagagtcacaacttcaaactccagaaaagatgaagtaaatttgcaatgatttcatacaccaagattcctcctacccaaagctgaagatatattttcaaggaaaggtgatggaaagaaaaatggtgctcgcccaagagattcttccatccagcaggcatatactttgtctatcatgagtcaagccctgatccaaaggcttgttaacttataattacactaagcatctctcctatgccaagtaatgtggcaagtattgtgagggaaatacaaatgccctaatgtaaaaagttcattccagtgtaggctgaccttctcaaaatggggtctggtcagattctccatgctaggctacaggaaagaaggctgaagaagcaaatttacaaatcagtttgcctacaattgagaattagagcaaatgacttgcaataccaggagtacttcagaccatatcaatcagaaactttcttcatatctgtgtctcctgttcatttattctgaagttaatcctgtcccacagtcattataaccatcagtgaccagccaacctcccaatctagctgtcttagagtagacatttgttcatcctgcaggtccctctctctcacccaagatcctcaatgaaatcagagagtgaggacagagggatctgtctggagggacagagatgtatataattaaagtcacaaccatcggtaaggaggactcaggagaagctgttcaagcaaaaggaaaagtggagctcatgcaagcactcaagggagaagggaaggtcgggtacagctatagcaacaagaaggtgatcctattataagaaggtgatcctactactacaaagaaactgttgagaatatgacgtatcccagacaactactcatgtccccaagtgccaaatcccaaaagatttgaggatgcttatttgggctcttcttattggttgattcgatgtctcttcttt

SEQ ID NO: 335539 - DNA, 1000 bp, Homo Sapiens
ttttgaggctggagaatttaattcctaatggatgacctccaggattgggacatctgccagagctctcccatcatcccagatgggggcctgggtggggctttgctgattgtcacagttgaggtgccaggactgagttttgggggaccccagttgtccacccctggccaggacagagaggcaggtgcagatacagctggaggagcagcaggagagaggcaggtgggcttgcaaaagattgaggcagaatggtggtcaccttggcccatctgcctaccccaccctcagggccccaggcccccttcctccagcccccgatggccctggggactaggagacaggctgttgggcgccagggcctcccgatcaggtccccaggagccaccaccaccagggtctacagtctctaggcgcaaggcgggcaacaggcccaggcttcgaggcacagctggtgggaaggcccaggggccaggcaacccagagggcccctcttcactactgccccggctgctgccattactgctcctgtcaggagccactcgggacaggcggcggctctggggtgaggggctacggctggcaccacggcgttcacgggatgagggccgtagggcaagcccagggaacctggccagtcccgggctgcggctgcggtgtcgcttggacttgccaggactggggctgcgggacttgggtgcaaggagctccagtgtgctgtcatcctctccctctgagctggtgcctgagctgtctgtgctgctgctggccaactccgaggaaggcagcgagatctggaagggttcagtgatgccgatgaggatgctgtggttgtgactatagtagcccaggatgaagtctccatggcccttgggcagtgattcctcactgaatgttacctggtaggtattcccatccacatcttcatgtttggcccagacataagccacatagtccttgcaatggcggaaacccacccggtataagccgatccagtcccaggagc

SEQ ID NO: 335540 - DNA, 1000 bp, Homo Sapiens
cagcctgggggacagagcgagaccccgtctcaaacaaacaaaacaaaacaaaatgaggacaatggggcttccaatggcaactcgagacgttagtttactccagagtcatggagacagtgaatggagtgtgtgtgtgtgtgtgtgtgtgtgtgtgtgcgtgtgcgtgagtgagagagagagagaggaagaagggagggagggagggttacaggagtgtgggaaagtcaacaggaaaaggagggaaggttcactgtgaactgacagtaactgtgacatcacaggcatgtgcggagtccccgcccccccaggcactgtgccaaggccagtaccttcatgtcatgagaccctctcagcaactctgtaaccttgtccccaccagaatattcctttcacagctgagaaaacaacagcacagagaggatgaattaaaaattgtctaacatgctgggcgcagtggctcacgcctgtaatcccagcactttgggatgatgaggcaggtggatcacaaggtcaagagatcaagaccatcctggccaacacggtgaaaacccgtctctactaaaaatacaaaaaagttagccaggcgtggtggcgggcgcctgtagtcccagctgctcgggaggctgaggcaggagttgctgggcactggacacaaggatttctatcagtgtgctctcctgcacatcacccaggtctggagtgccaggaggatcaaaaacatagaatcaaagattagccaccttccaactccaagtttcccccaccccatgccaccgttcctgccttgtacaagtgaagcaagcaatctctcctggtttcaccctaggaggtggaaggtccctggccctggctccatgtggcacgtgctctggtccttctccagcagcaggcttgtcagaccctcccagtccttcagctgagtccctgcacagtcccacaggttgtctactaagtaagcagcgtggtcgtggagcttgctctccacaaagaaggacagcag

SEQ ID NO: 335541 - DNA, 1000 bp, Homo Sapiens; identical to SEQ ID NO: 159653

SEQ ID NO: 335542 - DNA, 1000 bp, Homo Sapiens; identical to SEQ ID NO: 157417

SEQ ID NO: 335543 - DNA, 1000 bp, Homo Sapiens; identical to SEQ ID NO: 157418

SEQ ID NO: 335544 - DNA, 1000 bp, Homo Sapiens
ttagaaaaatcaattttattagaaactacttccaaggttttgttgtttatattttttatgagtatctttataaagtcacactcagcctctttactctttgttctgtgaaagtatatatggatattgcatactcacttattgaaaatatcctacccttctccatgagtgatagtaattcctcagctgcttacttttattcttttaactgaattttctccagatgcttacacaatatcacagtgcttctggatgattttcagtatctcctggcaatactttgcccgaccaccttggttgcaaatactgacagaagcggagcttaaagccaaaggctaatatgtaggttttgatgaactacacggcaattattgagtcacaacacttcggtaaaacgttccctccaaagaaactaaatatcaatattattatcacattttctaaaaactgaaatctgtagtgtaggattgtatgtcccacctcgtgtctcttatcaattcctcatttgacagctgcagtttcactgctgacaagcaggagaattgatggcagcatatactagcatgattaagataagcatccatacttacccaccatgctggaattattttttgtgttgctaggaagatgagttccacttttcgaaaactccagccatggtgtcaacaataatacaaaatatatgattaatagaaagtgtaagctcccctgtttcagagatgcagggaagaatgccagagtcactacaggtgagataatcaccaacgaatgccatatcatgagatagatcaattttatcacctgtagcttaatggcagcaaagtcgttgccagtgcggatggccagtatattgcagtgaatggcacctacacaactgataagagggaatatgtcatcagcaatgctattaaagataaacatgaaaatgctagagaataattttcattagtaatggccactttctcttttaaacttgccaagttaagatatatttctcccaacc

SEQ ID NO: 335545 - DNA, 1000 bp, Homo Sapiens
ttttttttttttttttttttccacaaatcattggtttattagaaagttcctttccctcattttacagcatatatatctctatcatatgtgataaagttaaatacaatctgttatgcttgtaagtaaggtttatttttatttttacttttaaaatcactattctggaagttaaagaaaatgcccctaggaaggcaaagaggcagccagagtatggctcaatctacaagctaatgggaagcagcacgaaaatgttaatactgtattatttatttacatgggctgaaagcaaagaaaaatgagtcccttcacttacacagatgatttcatttttccagtgctagttatccaagaagtgatgcttctgaatcagatgagtactgaacaggtaggagggtgggagggcagtcaagagttgtgtttgcctgccactttcttttcataaactttactcttttgagaatttgcgaaggcaggaacagagccttggcccaggtaagtatggtttttcttgtcaagtgaccaaccaaccaattctagccacacgaatagttaggaaaatgccaaagtgggaattgttaacctcatcaaaggagatgggacctgcaacacaagcacctttgggtcagtgtgttaattagggctgagagcctgggtgaaaggcaagaagaggggcaaaagaggctgaggtggtaattcctcttgtcagtgtcatgggagaaaagaaacaaggaacgtttactgtctaaactgagctgggcagagggcatggaaactatgaagcaaaatatctgtaaatgtgctcacctcccaacaaaaggaagactgtcccaactcatcctccagcctacttctacttccgtttctaccaacccaaaaggcacattaaaaaaaaaattgtcagagggggctaagtactaggaaggcaaatggactgactgcctggaacaaggtacccagggaaacccaggaatccccccagacaatcaccaaatctcactgc

SEQ ID NO: 335546 - DNA, 1000 bp, Homo Sapiens
ttttttttttttttttttttggaactaccacattgctttattgtacattagagcctctggctagggagcaggctggggactaggtaccccattctagcggggcacagcacaaagctcatagggggatggggtcaccagaaagctgacgacacgagagtggctgggccggggctgtccggcggccacggagaagctgaagtgctgcagcagggaggtgaagaagaggaagagctccatgcgggccaggggctccccgaggcatgcacggcggcctgctgagaaaggcaggaaggcctccggcttcacaaagtggccctgggcatccaggaagtgttcggggtggaagcggaagggcttctcccagacggcctcatccttcagcaccgatgacaggttggtgatgagtgtcgttcccttagggatgcggaagccctgtacttcgatgtcacgggatgtcatatgggtcacacccagggggacgatgtccccaaagcgctgcacctcatgaatcacggcagtggtgtagggcatgtgaacctggtcacccatctctggtcgccgcacctgccctatcacgtcgtcgatctcctgttggacacggactggacagacatgcgtccccacaatgggtgagcacccaggggacactctccttcctcgctgcacatccaggtgtaggatcatgagcaggaggccccaggccagcgtggtcaaggtggtcaccatcccggcaaggaacaggttacccaccactatgcgcaggttctcatcattgaagctgctctcagggctccccttggccttctccttctttgccaggaaggcctcagtcaggtctcggggtggctgggctgggtcccaggtcatcctgtgctcagttagcagctcatccagctgggtcaggaaagccttttggaagcgtaggaccttgccagccagcgctgggatgtgcgggaggacggggacagcattcagcacctcgcgcaggaagcccgactcc

SEQ ID NO: 335547 - DNA, 1000 bp, Homo Sapiens
ttttttttttttttttttcttttaaacatatgattgatttatgttttaataatgaagaaacaggaaacaaaccatttcaggggaacatacaagtaattttatcaacatagtatttgcagagaaagaattcacttattcaaaatatcacaatactgaatttcacagttaaattcacatgcagattgtaaaattatgttatgggatgttttgatggagtgtgttaaatataaaagtaatccaatgcaatactatttagcacattgtacaaaactaatttttcaatgggattaatacatttactatctttcctataaggtgtgatgtattcaaagtgctctgtagcattgagtttgaaatcaggaaacaaatactgttagagctccacagtaatacagctcagtaataaatgaacttgaatataatgtagatgaaatctactcataaaactttaagacagatgatggagatttatgatgtgcagtgagtaatatccttgaatagggagtagggcagagggacttcgtgcatgtatcaatacaatcataataaaaataagtttaagattgactccaccacttttatattgagtgccatttactagagaaagaaagacagataaatcagaagacaggaaaagacagagagacatagagaggcaaagaaagaaagttcaaaatgcctctgtagttggctttccaactgagactaatcctcaatacaatcaatagtccatgacagcagtttttggacatcagtgtacatcagtattaactgcagggcttgttaagctatggattactggaacccaccaagagtttctaatttagtaggtaggagacaaaggctgggaacaatttccaggtgatgctgatgtgctgatgcttctgatcaagggaccagtctactatctggtccagtgtatttttgatcattgaatggctccattacacattaaaatggaaaatacctactatgataatatgcctggtccctagggacc

SEQ ID NO: 335548 - DNA, 832 bp, Homo Sapiens
ttttttttttttttttttcacagtcacccccactttaatccgcaggcagcctggaacagtctagaggagatttgtataaaaagtagataccaaggctggcgtggcagctctgtggcagtggctgggttggtgggcactacagtcaggcaggcagccatggccactagtgtcacggccccagtgagggcccctggcttcgctcacggatgtggtccaagatcaggtcggtggctcgatccagcaacagaggcagcagctcctgctcagcaggggagaagcagcccagcacatgggcctgaaccgcctcagggtgcgccgggcgcccgatacccacccgcagccttggcattgcattggagttgaggcagctaatgcaggaacggactccattgtggcccctggcactgccccccagcttcagagccagtctccccaggggcttgtccagctcatcatgcaccaggtagacttcctcggcagtcagcccaaacagctccgcagcccgggccacgctgcgcccgttggcgttcataagccgccgtggccggagcaggaccagttgggcatcccccagcggggccagggcgaggtcggcggcacagtgccggtcgcgcgtccaactctccgccacacccagccgccgcgccagctgccccagcaccgccatgcccacgctgtgtcgcgtgccgggcagtccgggattccccaggccagccaccatccaccgcttccccggggggcgaggctccaaaacacatcggctcatggctctactcagccgctgtccggcgcccaaaaagccgcccggcctcatgctgcccccattcactcc

SEQ ID NO: 335549 - DNA, 1000 bp, Homo Sapiens
gtggttccaaaagcagttttatttttcttcttgtaaatcatgaccagtgagaaataatgtgtgccccaccccccaccagtgaagaagctgtgcgtgagtatcccacccgctctgggacccagaaatcccatcccttcccatctcctcccccactgtcccaaactcttcgtctcctctctctgccctgggcggccttgggccttccccagctatctcctagcaacaggtccatggttgcctcagcaaccaagagttccatacaggcctcagaggcccagctaagcccagtgacttctcttacctctcaccaggaagatcccagtgactcaaaccccaacaggcccctcctggctacgtggtgatgcatatacatgcgtgcacataaacacacacacacacacacacacacacaccctgtgattaaactactaattgtcaaccacctcacaggtataccacagacacaccctgtgccagaagagtcgctaggcaaccccaaacaggcctggacatgcggacatcacagacactgtagtcagcaacacagatatgaaccaggatgccagggacctatacatcagtcagccacacgggctgatatgcacgcacacatgaagaaaggccaggacccacagatactaccctcttccccctggccagccctgccatcagtatgggattcttccagatgagggatgctccagccccattgccatggggactgtcctagctcccatacatcaacctagggtgggttgtggcctttctgcctccctcagtagatggcttggaacatagcaaagaactcctcttccgatgttccagagtgttctggcctctcattggtcaggccaggccaggccacccagcttcaggagtagaagccatggtccaagagaccgcattgggaaaatgcaaagtcctcccttttccccagacctcaatatccttccagggttttgctaggtctagtctgggtaaagagatgttcccccctttt

SEQ ID NO: 335550 - DNA, 935 bp, Homo Sapiens
tttttttttttttttctttttttttttttttttttttttttttttaattttagaaatttatttgtatgtcccatttgacagaaagactggcgctttaaagcgaaaacaattagcataatgagaaataagtcactgagtgagatgcggtgttttagacaaggtacacagctctgtctctggaaaggaacagggttctgccaagcgtctttggttttcaaagtgttgctccggacatgtagggtcacctggcggcaccgtccagagcgatttagttgtggctgatttcgtggggggtttttcttggtctccttgtgcagtgagcatttctcttcaactattttcatgacatttttctaatattcttgcttcttgtatcagcgtattcactttctctgttgctgtatggcatacagtgaagttctgaggacagccttcgtgccttcggactcggcgagcttgcccatctgccccggcagcagcaggcgcacagccatccgggtctcccaggcagtgatggtctggcgcttggtggagcgggccaggtgaccagcctcggtggcgatgcggtccaatatgtcatgaaccaaagaatccatgacactcacggcctcccgggaaaggctgaggccctggtgaacctgcttcagcacccggcggaaataggtggcgaagctgtccccgcggcagttggagtggcacctgcggggcccatggcgccctcgcttcctctgcttgctctgcttctgggacgtagtggagttggcctctttgggctcctgggtgatcagctgttcctcagaggtcgtctcagaggaaggtccagccatggcggaggcagtggccattagatggcacgaccagacaatggcggttgtggaccggggaagccggggcacttcggtacgcagcatggctccacatctcgggccagcttc

SEQ ID NO: 335551 - DNA, 573 bp, Homo Sapiens
ctgagactttgctgaagttgcttatttgcactccagcctgggggacagagtgaaactctgtcacaacaacaacaaaatcaatgcagtataattaccaagtattagattctagagtgatctgtgactctgctaccccagaacagtctagatgaggtcagatcttgacacagggctttttgggtggtattcctgggcacagatcctggtgataggggaggacttgcaatctggcttcatgcctgggaccttgaacctcacaactgtctggttctgagagcccaaagactccaggcagcagtgctggaagcagggccagaaggtgcagctggagccgcagagccgggtctggttcaagtctaggatgacaccgtcatcacagcactgctccaaggggttgtaggtccactccccgcacctgggcgctggctggcatagccacagtctaagatctgtgactccttctgagtttgaacccaaaagttcaaaaatgaagatggcagcagaaattctgggcaccatgggttaggcttcagagcagcggacgagggagcagcagtggaaatgggtcagtga

SEQ ID NO: 335552 - DNA, 1000 bp, Homo Sapiens; identical to SEQ ID NO: 157419

SEQ ID NO: 335553 - DNA, 512 bp, Homo Sapiens; identical to SEQ ID NO: 157420

SEQ ID NO: 335554 - DNA, 1000 bp, Homo Sapiens
ttttttttttttttttttgtcattaaaatcaattcttttaattgctgaaattaacatacataattgatgtaggtgagagagatcacaagtagttggatgaaatttatagtaaatcatcctattgctggagacagtcatgaagagctccatcctgttgatctgctgaactgaaagggactgttcattcagccttcaaggacatgcacatcataaaggaggccaagcaaaaatcaaagcaaacaatagctacatgtttggaaaaatatacatcgaattacacagacaggaattatgaccagttgtgtacctgctcaagtgggaacattttaaaatgtgacagtcatctatgaatactgaaatgtgatggtcaagtggtccatcatcaacacaaatacaaatggaaatcattaaactttctggaggggccatttgaataacaatgtcaaggcctgggtttttcccagcgggattttggtcttcttatctggataagcacaggcagagatgggctgggtagtggccggtttctggatgcagctgcacgctggctggacttagcactgcagctcctcctccttggtccgccgggagcctcctgccaagctctgggcactggcatgggccgtggagctgaggacctcctcaaaactgcctccattagggttcgtaccgcctactttcgtctcatgtctccgaacttcttgctgatggccgttccaacgttgctgaaagctgcagttgccttttgccctgcgtgactcagggtttcatgtgttttcttgtaggcagtggtagtctgcatgtcatgccagcttttgctgaagttctgttttaattcattcatcaggttcatgccgagtttttgttttatctcaactagatgcctttctttcgctgacaaaacttgtcgtagtgttgtaatttcgtcttctagctgaactaactctgcttttaactcttccttttcctcctcagagagcatgctagagaagtcagcact

SEQ ID NO: 335555 - DNA, 1000 bp, Homo Sapiens
tttttttttttttttttcttaaaaaaacaaaacaactttgggttttatttaaaatgcccgtggaggtggttagcgccccattcttctgctgtagttatttcaccccgggagggtgtgggccttagccatgtggccgtgatggtcgtatctgaagtgtgaatacttccccgcgctatcttctaacctgcgctgtctcagcttagtgtgaacgtacggaccgttctcaaatcctggtgaagtcactggcagttttttcctgcacacagagtagctgtgctgtttttgagctgagggcagtgtcatgctgggctgcatctggcacatggagaggacgggccagtcgagcaggtggcctcctggccgctcacagactctgcgcccgccagactgtgagaggggttcaggcacgacacttccggagctgtcatctggaggagattctcatcattttttccaccacttaaaataaaaccactcaatgccttctccagtgtactctctggtctatttaaaaatagcagcgcaagtcccaccacttcttatttataaagggaacagccagtgaacatatttttacctcccgtgtctgtcatcatgttcttgccactcattgcctccaattccaaataggtaaagagtgagggccgtgccgctgtgcctggagtggcaggggcagccacacagacctgggggtccctgagctcccccagctccagggaggacgccccaggcatgagcaggggccgccaacaggacaaagaggccactctgtcagcctctgctggacccctgagctcccctctcatgggcctctccgtttgggtggctccgagaggccaactccagccccaactgcaggctcccaggactgcaggggcagggactctggaggtccgtgtgcttcgtgagagaggggaccctgtcctcctagcaggggtccagcggcaccacagcaagacttctgtggccaagtacacgccatgctcagctctgcccccac

SEQ ID NO: 335556 - DNA, 1000 bp, Homo Sapiens
tttttttcttaaataggcttctgggcttttattcaaaacaacactggtggtggctgccgcttggtttctctacacccgggccatgggccagcaggtaccagcgccatcagcaactaggagggaagttcattcacaccatagaaactgtacagcgactgagagtgctagagtcacggcggcggcccaggccgagggctttctggaggaggtggcctctgcctcctcagtaggctgcagcttggcccaggctctgccaggaacactgattattgcacaaagacaaaaaagagtatgtgtatctgggctaaagagcagcttctaagaccccaagcccttacacaacgcagcaaacggggctggggttggccctggaagcggaaggctctgagctgaggatttgggggaagacagcagacgggctttacacactttgtcctcctttaaggggctgcctggtgccggagaaggtagagcaggggagaggaagaggatttggccagactgggccgtctctgcacagatgccaaggtgcctgcccaccaccgctctacggagcccagcagacagctcagggacctgggtccccactttccccacagccaggcccatgtgggttagggcaagtttgtgcttttgtgatagacacaagcctgaggccatggccccagaccacagggttggggaggaaggaagggccctttgcccaaccctcacccatgttgacttgtcctggccagtggatcacagcttccctggttctcatctctgtcacccacaggaacaaggtcaagtgcctgggatcggcaggtggggcctccaggagcctgggacgggccaggccatctcccagtgctccctgcaaggagcttctctgcctctgagctcagctcttccaccttctccacactccctgctctgtggaccctggagccttcgctcatgcccatccctttgcctagaacacctgcctcgaggtgtctgcttgcagagtcacacggtt

SEQ ID NO: 335557 - DNA, 1000 bp, Homo Sapiens
tttttttttttttttggatttaaaaacactttatagtgtgttgtttttattgagcgctcacacccgaaggggtggcggcggatgctgtgggtgagtggggccgcctgagcctgctcgggccacatccacacatccacagagtccacctggactcggaggaaggccgagaggacacggacggtggccacaccacgctgcagtgaaggcccaagtgtgatggcagagaaagagggaaagttggagaaagagcggtatctgacaataacttttctcttggatgttaattttttggtctataaattggaaaggaaggctcggactgaaataaatacatttattctgagtaatgaccttttgggagcagtgtccgtcaactctgcttcgagagcgtctccacgtgagcagcagcgcctgtctcgcgcctcgccgaggcggaaccacaccgggcctccagcggaggcggctttctcctgtgtctgtgaagggaagtagcaggtgcgtcactgttcttaatggagcggacaatgatgccttttctctgacagaaaaatgtccggcttaactatgcaagacaagacttggtcctcacgttcgcgtctctagttgattttgtcctggaatatgtacaagttattggtggcagccacggcaatgacattgtccacggggtgccaggctgtgtgcaggatcttcttgttgaagtccagactgtccacactgatctcgtctttcctccgcttaccccccgtacacaccttccggggtttgaggctggcgcgcggtttgctgctctctctcgaggcctccagggtcacatccctccgcgtgtctctatcaaacatcctgaagaagttgttataggacccggtcatgatggcgctatccgaaccgttccagcaacactcaaacttgtcaaagatgcagtcgttctcatagagagagcagagcttgctgcgcaggtactcgtggacctggtgggtctccaccggcctgctctcca

SEQ ID NO: 335558 - DNA, 1000 bp, Homo Sapiens; identical to SEQ ID NO: 157422

SEQ ID NO: 335559 - DNA, 1000 bp, Homo Sapiens
ttttttttttttttttttctggactgtttgtattgaaacaaagtggtgtcaaaataaagcccctgcagggcctggctccctgttggtctgagtgaagcagtgtcctctggatcctgcctccctgcccagtgccggcccctggcctcactctctgggctcccaccggtaatggtagggcgtcggtaccgaagctgaggacactctctccagggcctcctgcttctctcttctctgaaagccaaaggcccctggctccttggctctgtgctgccgtgaggtccggtgcagcttcgacctcaccaccagccgttccagctcttcatccattgctgggtcgtgcatcagatcccccttgtcaggcaaagctccgagggcttggttgattccacggtgctttgagagagccatgaggaatccatagaaggtcagtctctgaacattgctgagggcctctttgacaagtgctgggggtgggcagctgtacttgtgccgatcacacaggttttccagacactggtagaacagcgacgcctccacgccctccagcgtgccggccccgcccaaggcaggtcgttggcggtgctgcccactggacgacgtcggcacaatcactgtgttggggttcttgcctgacagcaggtcctcatagatggcagccacactgtccaggaattctgagtagtaaaactggatctggaaggcaaagaggaaatctgaaaaagacatcaagcagtccatggcatcgtccatgagcacaatcctggctgctttctgagtgagctccagcgggaaatcaggacacagtaattgcagcaaacagtgatattctttcatggtcagcaaatcgccatttttgcccacagttcggaagcatctccagaaggcccgtaaaaatgataccctattgtggggggtggcttggacgaagctgaattctcgaaagagaatgtgtgttccctggcatacactgttaaaatattcagtgaagaacctggcaatt

SEQ ID NO: 335560 - DNA, 1000 bp, Homo Sapiens
ttttttttttttattgatcattcttgggtgtttctcacagagggggatttggcagggtcataggacaatagtggagggagggtcagcagataaacaagtgaacaaaggtctctggttttcctatgcagaggaccctgtggccttccgcagtgtttgtgtccctgggtacttgagattagggagtggtgatgactcttaacgaacatgctgccttcaagcatcttctgaaaattaagtccttgtgcccaggaacaattcttggggttcggaacatcttcccaaaatagctttttcattctttggtgtgatattaataatgttccaagcaataagatggaagaggaaataattactggcacaattacatataaacctgcatcactctggtgtttttcaatatcatcttgagtgaaactattaattatctttggttttcccactccttccataaatattgggtaaagactgaactggtacttctcaatggggataaaatgatcatggatataatacttcttaacagatgaagagattctaagccattttatttcaccatcttcattaagatttttccactcaataataaaatacattagcttgtaatcactgggtgatagtatccaggaaacaatcacacaactgctgtttaaaggataagcactgagtgactgcacgatatttactttgctcataggccatgaaaaggttaaattaaaatttgcaacagaagcaccaattgaattgatggccagaaccgtaacagtatgtgcttgctctgtccacaggaaagtgaatttcgtgtgatttcccacatcttctgaccatgttccattgcaggaagtatgatggtttatcacatatctctgaacactgcacaatgagtcatttttcatcaggggcttccaaagtaaagtgacatttttctcctttttcatagtatctccattaattattctccaaaattcaggtcctctcataggaacttttatatccatgacaa

SEQ ID NO: 335561 - DNA, 1000 bp, Homo Sapiens
ttttttttttttttacaaatattaaaaatgtgatttttaataatataagtacaaaattttatttctttatacaactgtaatgggatttggatcaaaccactagaatttatttaaaaaacaaaataaaacaatgatataaaaactgcaagaaggtctgaatccaaagtttttcctctaatagtaccaaataccacaaggtacagattattatacaaatgtgtacaaattttaaatacaaatacaatagggctgggtttcaaaggaaaacaaacaaaaagcaggtcctcatcaggatttcattaatgtatataaatgacaatgctaggattaatgtcttcctatactatccatgtcttccccgcccctcctagataccctgtgtcaaacaggaaacttccacagatacagaagaggcatggtacaatgttctaacacatgaaatcaagttaagatttctgttcctcttgattttggttctcaaacaatcctgtttctctgtattcccaattaaatcttaaaactgctctgagctgagaaagggattcagcagccagactacctttaagcaacatagccctgtgacaacactggtggggagaagggaagaaattaaataggatgcagatgggctacactgtccccaaagatttactttgatgctgtagtgctctgtcagggccaggagaagaaagcacagttaactcagagcttggtgttggcagagaatctcataccaaatttaaaaaccatcctgaagtgctcaactgtcttctttccaactgggaaacaaacgtctggttctctggaaataagggcagctggggatggtaacattcctctttattttactttctagacattattgaagcccatgaagttctttataaagaattagaatcctaacacaatgattcatttttgaggtaaaataccttaaaatgtagatgattcagagtttttggaacagaccaggaggaaggaaggaaagagggaaggaaac

SEQ ID NO: 335562 - DNA, 1000 bp, Homo Sapiens
tttttttttttttttttttttttctcgctgcaattttattttaatttgagaaataaagatttcctccaagccacatgaggactctggcacccacccacaaagcaagacctgtatttataagccgagggctcagggagcctaactgcgggacccgtcagggccccgtgacccatccccgtccccacccccccctccaccgctgggcccatcagtgtgtgttggggggatgcttggcagctgggggtgaggagacaacaaacctcgggaactggagccagagctgcggcctgactgacgccttttgatgctcacgggaaatttctgcccaggatctcagccccaggctggttgtttctacaaatctctctcaaatgtattattttggtgacaaaaatgaaggagctttgtaaatttttttaaaattatgaatcatatcaagtagttgtttacatttcttgaaaaaataggaactcgggcagcagaatcagattggcagaatctttagactacacaggcaataatcaagtctgctgttttggcctttcgtagtagaagtggttgtagtgtttagatatctgtttggtcttgcttcttgtattgcatttttttcaataaacaacaacaaaaagaactctctctgtgaggattgatccacttttaaatttctcttctaccagcaacttgggaaaaattaaatatgggtgggggagacctaaactcaagtcattttctaaagtaagttacccacattgaccaaaatgcagcttcaacgttgagtaaagggatttctgagagctggccaatgccttttgccagctgcagtgagattctgcagcataggccacgataaaggaaggagagaaggggcttctcagacttatttgcagaggggcccagaactcagtatgaaggcattggcagtagtgtagctctagagggatataccccagatggctgagggaagaaagggattgaggtggtaggagttcaaggctcagtc

SEQ ID NO: 335563 - DNA, 1000 bp, Homo Sapiens; identical to SEQ ID NO: 157423

SEQ ID NO: 335564 - DNA, 1000 bp, Homo Sapiens
ttttttaatttatgaagaaaagaggtttaattgactcacagttctgcaggctgtacaggaagcatggctggggaggcctcaggaaactgacaatcacggcagaaggcgaaggggaagcaggcacgtcttcttaatattcctttgaaattccttatggcgcacaggtagcgtagaaaataactgcttcacgctgactgtggtccctctggggtgggggtagggggtttcctggatgattttcccatcgtgatcaaacaccagtcgagtcccaaccttcaccgacgcgtggcaggtagaaatggtgacatcgttaagccttcaaagttttcttcttctaccccacatccattgtctgaaacttcaatgagatccactccatagtccttaagctttagatcaatattagtggcaccagcatccagactgttttctactaactccttcactgcagtgcttagactcagtaccactggcccagagcaaatctgatggactgacttccgatcaataggtttgatggccttagcaggttctgtactggactatgttgacatggaaattcaccttccattatccacggctcctctccctgctccacttccttcacctccactccatgatgatgtttggcttggtgataatcataccccacagaaactagatggctgtagttctccaacatcacatccccgtatgctatcttctcatcagggtccagttgccgccactcctcctgggtgaaatccacagccacatctttgaatgacactggcccctgcaatgtgttcatttcctgttgctcttggaaacatgcagagactgtggctgatagaccctcctggggctccgcagcctctgccccccggctcccgagaggccggggcggggctgctgtcgctggcgcgcgcgtctgctcgcgaggtcccctcctgtccacctcaccaaggctgttctgctcccgaggggcccgggccgggcctacggggcaaatccaggcggg

SEQ ID NO: 335565 - DNA, 1000 bp, Homo Sapiens; identical to SEQ ID NO: 157424

SEQ ID NO: 335566 - DNA, 1000 bp, Homo Sapiens; identical to SEQ ID NO: 157425

SEQ ID NO: 335567 - DNA, 898 bp, Homo Sapiens
aaaatcacctgggcttgtgggcaggtgggccaagacgggccaaatggatgttctcatagacctggatttcgggtttgaactgaggaatcgaggcatctctgcctggagccccacggaccctctgcctccagagcacgatgctgagggccaggatgacaactccctggcccattgtgagcagcagcatcagaatccaaggcatgtcccagcccgtggaaggggcacagagggcaggagaagcatcgatggaggctgccaggctaaagctgacccctttgttgtgagtcatgaggcagcggatgattcttggtcttcggctcctgggctcagaaagcccctccccaggacacaccaagagcagggcagcctcactgccccagaaggactgaacacggcccctcacgggacccttcccttcctgccaggtcacagagtccatgcgtctgctggggaccacagagcacaggaggacattgcagggggatccatctgcagcccttgcagataactgggatcctttgagcaccaagacgtcgtacaccctccagttctggtagttgtggtgctgacctagcacagcgcaccagtaccgcccggcatcttcctctttggatccctccaaccacaaagaatagttccccagcagtctgagcctggattcccttcctggttttccagggtctggggctggcctgcccacttggacttgggctaccagggtggtgaaggagcctgctgcagggctgcagaaccatgacaggtgttcgtccccatgtagagtaggtggtgagggacatggcagctctactgcctcccccaaggccacatagatggcctgcatgttgtctgcagcctggggagttccacataggaacaggaggaggaataagactgccat

SEQ ID NO: 335568 - DNA, 1000 bp, Homo Sapiens
cctaagggatgtatgaactggttttaactaagtaggccaagggatcattggttctgatttgcattcatctctacagtaaataaaacctcgtttttaaactggttcatacacccctaatacagttaaaaatcatatatacctcaaccttttttcctttcgtatgcgaagatatcacttttcattatctcaagaatatctatcttcctgtgaagtctgggaggttggatttcagaaactggtgaagtggcggagaaaagggggcgtgcacgtttctgtgtgaacaagtctatgtaaaggaggagcactggggccagaaaaggccaggggaaggaagctggggtacaggggtgcctccccaggggaaggcaagaggctccatacactgcagcaagcacaggggtccccagcagcaggctggctggggacccctgaggtcttggctgagggaccaggagctcaggtgcagtggggtacattctcctccctgcaggcggagacagtgagggaagtctattgcctgcacaggatgctcatgggtaaaaataaccctgcctttttgcatccaggggtgtgggctatttaagaaactagaaacagcacatttatcttcaagcaccaaccccacatcgcaggaaggtaaatataaacctatttcttatctgacatcttgctagtgtagttttattaccagtagtagtatttccttgctttgcaaatgacagtagcacagctgggtaaggcttggattaggcttagcaggaagactgggaatacctcgctcacgagtaatgtgcctggtcactgggtcactgctttgctttctccaaagtcatctctgcagtgctccaggcacggccctggcttcttgatgcctgttccctggatgcatgcatcctcactccaccctctctgagctgctcctggaccatgcttgggaagactgctcacggccccttctaaattctgcagtgacagaagaaaggcttgtctcattacagta

SEQ ID NO: 335569 - DNA, 1000 bp, Homo Sapiens; identical to SEQ ID NO: 157426

SEQ ID NO: 335570 - DNA, 1000 bp, Homo Sapiens; identical to SEQ ID NO: 157428

SEQ ID NO: 335571 - DNA, 1000 bp, Homo Sapiens
tttttccagcagcgtctctgaaaattttaatttgttctgacaacgaaactaacacagcataaggacttaagccctcaagctaggcaagacactgatggcccttggagaaagcaccagggcagctggcaggaggcgctaagatggattcttggtgggaaaggaatgaggcacacacataaaccgtgggaaagacttaggtgtcagggcccaagccagaagagggataaggatggactgttccagccttagtctgtgcttaaaaagacagaaatgcccttctctggaattatgagggagaggtctgagggaagggaggcaggcagcttactacttgccctttcactgacctatagcatctgaggcatctgagagcaaagttaaatagaatgaggctggtcgcaagcactgggaagaggtggcggtcctcgggtttaaggagccaaaccctgggcttggaattcagctcccagggccagagcagcatctctcttctgcggaggaggtcacctgagctcacaggactgggaatgtcggctttggaccctcctgatccctggttgttgagattcccttgtgtctcaaaagccttggagcagtgaagtgtctctccaggattttctttcccaatcagtcagcagtcaactttcctggaagaatgtcctttctacccaatctgcccaggagggcgggaatgtggccggccctcaggaagggcctctgggtggcctctgcatccctggctggagaatgcgcacagtttgcagaggctcagaactcccaatcgtccacctccagctcttccaggtttgttaccaggccaaagattccactgtggtcctgagactggctgccctcaaaattggtgatgggggtgacaggacgaagcaattcgggcaaagcctctgaggcacgtcgcttgatctgcttgaagaaagagtggttcaggagggtgctggcactgggcctggcatccgggttgcgctgaaggcactgctccaca

SEQ ID NO: 335572 - DNA, 1000 bp, Homo Sapiens; identical to SEQ ID NO: 157429

SEQ ID NO: 335573 - DNA, 1000 bp, Homo Sapiens
tttttttcggtcaaataaatttttttttttttaaaaagaaaagaaacgaaaacaacctctatcttctggactgtaatagggtgtcacttcatctttggtataaaataggccatccataggctgaatttgatcacaactaggaaagactacagaaattgtcaacaatttctctatctattgctttttttttgtttttttttttgcactttttgaccataagctcctatctacttaagtttttttttttaatgctcttaagctaggttttgcaatgtgacaagcaaagctgactaaaaactttgtaaagctcataaaaaagactgcagataaaaagcactaatgcttttgctagcgatcacgctttgtaaattaaaaaaatctgcattctgccccccaaacacgcattatttctaatgcagttgtttttaaaccaaccttaataactttactgtaaaatgttttagccttttagaatgattcatgtcaacacttaagacaaagttcatgaaaagtcccagcatttttccaattcttgcagttgccatggtttatcaacaaattttcttcaaatgaagaaaaacattttcatttaaactgtacagttttttcttcaccctaaaaactcatagtcttaaacttctgtgccagtgaaagccggcacagtatttcaattctttcttgatttttgttttcaacaagacgttgacagcttgcctcgagagcctttgacgtccttaaaattaaggcaattaagattcaagataaaccttacctacatatttctaagaaaaaataaaataaaaaacccactagattaaaacaagaagggaaaaagagaaagtagcttaattattgaggaagacaatttgtttccatttctattgcccacctcttgacatcaggttttctgttaaaaaaaaaaaaaaagtatctacaccttcagaaaaattctgaattcaattcaaatgttcttccacataaaatatcaaccttcaatgtt

SEQ ID NO: 335574 - DNA, 1000 bp, Homo Sapiens; identical to SEQ ID NO: 157430

SEQ ID NO: 335575 - DNA, 1000 bp, Homo Sapiens
tacaataaaactttcttgatttttaatgaatagtgaggcatacaatgtaatataaacaagtatgatactgcagattatatttctgattcaaagtggaaaaaaaactgaaaaaaaaaaaagtttaagaactcattttgtcagctgggcacagtggttcatgcctgtaatcccagcactttgtgaggtcgaggcaggtggatcacctgaggtcaggagttggagaccagcctggccaacatggtgaaacctcatctctactaatacaaaaattagccgggcatggtggcgcatgcctgtagtcccagctgctcgggaggctgaggcaggagaatcgttcgaacccaggagctggaagttgcagtaagccgagatcacgccactgcactccaacctgggcgacagagcaagactccatctcaaaaaagaaaaaaaaaattcattttgtcatctcccaatcccttgggactagaagactccagcctttcccaccatagggccctgccaggagttttctctccatcacgttgcgatgtggagtacagaatcccactgggaatcctttaactgggagcagtattttgttttgctcagtttcataatggagaacagctgttcgcagatgtaggtgctcccgaacatggaaagaatctttgcgcaatggtgcttgtatttcgggtagctaccccagaggtacttgtagaattctggtattcccaccttgtcgtatttcgtcttcaggaccgtgttgcattgcaggtcgataacctccatctggagctcctcgtgcacactgtcgatcttcgtggagaacggggagctgaacagagtcagttcgctttcgtagagtttgaaatcagacagccttttctggaattcggtcttgagttccgcgattttgggaatgtagttcaggccatcgctttcatttctggaaaccaatttcagggtgggaaagtgggccagattattcctcgtcaaatgagtctcccagaggcacagt

SEQ ID NO: 335576 - DNA, 1000 bp, Homo Sapiens
ttttttttttttttttttgtgctttgtctttttattattctttattggtcctaccaatgtgactctttacccaggcccactgttcctatgcgcactggctttgtaggcattcacatcatatgtctgtgtcctgaaaatctcaattaatttctccttcctattccttttccatgctctgcctcattttctcagaaattgaaggcatttgattattatttttttgtttgggtctgtgtaaaggttccttggcaggagaacatgcatatgactttaaaataaagaccaacattctgacactaaggtaatgcacagaaaaaatacagtactcagacatcattgcaaataaataccccatacagatgaagttatctcaaatgtaacaatatttcttatgaatcaacactgtaacggaaggtaaaaataggagtccctacaactaggaataagaaatgcttattccaggaaacagaattcttttatttttgtcatttatattattataatttttccttttttggagaaggaaggacagtttttcttcctccaagagtaccaatttgaccactcccactaacctcactcagcaaacaaaacaggatgtagacctggtttgctaaggagttttaatgagttctgtttcctgaaattaacagtgattagttacaccaagcaagagaagatataatgtctcgctttcacatttgcaaagaatactatggctaaccctcatcccctactgcgcatgccaacacagcgtcggccctcctgataccctcagctcttcacaaacgtggcgttcatacagcttgctcagcttgtcccagaaggtccatttggttcccaaagcacactcaaggttttgtgtttgctttcattttctaagcccctgaatttgcaagtaaagaatcactgactaacagaattttgcacaatgactgttttctttccctcaatgaagatgcccaggtctgggtgtgaggagcacctgcctcacctgctg

SEQ ID NO: 335577 - DNA, 1000 bp, Homo Sapiens
ttttttttttttttttttgtcagatgaatgacttttaatccagccccacaccccaaggtggcagaggagtgatgctggagcccggggcaaaatgctggggcccgggacacggctgaaagttccgtcgtgctgcttatttttgggctcctaggtgttgcgcacaaccagcgactgctccagctcctgcctgcgctgctggatcttgcagtagaagtagcgactgacggcctcctgggaccagggctggtggtagaactcagcccggcgctcctcttcagggttgccggctacatctgtcatcaccttgaggtcccggctctgggagcggagcaggtcttggacatagcctttggggtctctggagaagcttagcatgaagtccctctggatcttgagctggtttatggactcaatcgtctcatggatcttactgtccagagcactgatctcctgctggttggccgtggataggaggaagctgctcatctgcccctttaatggctcctccacctccacgtcaatgtcatagcacgccgtcttcttctggtctgaagggtccacgctgatgacatggttgatgacaattgggtcagggggcaatagcagggctgtgaggcgctggggaatctcagaaaacttcagccggggacaatcaaaaatctgctggaaatacttgtccccattgatgtattccttgtcatgggagtcctgcagcctgttggtcttcacatactgccacagggcctggacaatggctgagcggctctgtgtgtgcagccccagcagccgggctaggcggggatccagtttgaactggggaggctggtagtccagcatgaggagcagcgtgcagcgcacactcaggtccccaggccgtttcacctggaagccgtccgtctcctgggtcgtgggtgtccgatgccactcaacgaggtggttgtcagggccataaagatctttgtccagctcgatgaccaaactcttgaagaaagaagagaac

SEQ ID NO: 335578 - DNA, 1000 bp, Homo Sapiens
gctgcacttttcttaaaatgaattaatgttcataaattctcacttccaacttagtaacattaatgagccacgtctgaatatttattttctacatatgatgcactctccacttctaaaatgtcatgatatggcatccttataattctactgatgactatataatattagttgatgtttggaatcaacagtttcaaatgatcctttatactgaaataagacacattattttacttcaattgtaattttagttccagagaaggcagtgctgtcttaaaggcttggacaagattttctttttctcttactccaggaagatcacttaacaacaaatatttgaggtttcttaaatgacgcaaagcaatgatgcctttgtctgtgatattcccacaggatattatttccatttccaatatggttttttgtaaattttcaagttgactaagtctcagcaaacagtcatcctcgatataatgacacttgcacagccttattttttcaacatgctctaggccctccatgtgatcaaatccaatgctcatgatacaagagtcggtggcgtcgatcgcctgaatcttgtatttgtccagagggcctgttggaaggtggttgtagtccttctgccacctctcctggccatggtagcgcaccatggccccacagcgcagcaaccactcggatgccgccctgtcagggccaacatccctgatgcgatcataatccaccttattaaacactgcattcaaccagccccagaagtatctggagtcacatgaccatgggagtttctttacgccacacaactgctgggaaatttttccaaacggcatcatttgatctgcacaggtgagtcgctgctcagagaccgcacagcacatttaaaactgtatctcggttcagtactcaagaaaaggacacagacttataaatggtggcaaaaaccgagctgtctggttcttccggtacccagtgccgggtcgagtacagagcaggcgctccatat

SEQ ID NO: 335579 - DNA, 1000 bp, Homo Sapiens
tttttttttttttttttattttttttttttttttttttttttttttttttttttttttttttttttttttttttttttttttttttttttttttttttttttttttttttttttttttttttttagaaatacactacatgttgtttattcattcattagtcaatgggcattttcttttaaaccaaataggaaaaacaaaggaagaattaaacaccaaaaatatacatgttactactagcttttataggactactatatatagtactatatatatatgcacacacacacacacacacatataaacaccaaaaatatacatattactactagcttttatagtatgactactatatatagtactatatatataatttcatagtagtactatatatagttatatatatgtggtactatgtatagtcatatatatgtatatatatgtgtgtatatatatatatatatatatatttatatatatataaaatccattatttctgaaggagagtttttccagacacacaattcctgcatgacagtctttttttttctgacctctaaatttgtcaacattccagtgccttctgaactctatggtttctgaagaaaactgggctgcaatcttattgaggatccattgaacctgaaaagttccttctctgttattcatttcaatatgctctgtttgtcattggcttttgacaggttgattataatgttctcttggtgtggacctctttaaatttaaatttttttgctgcttaaaatttgtcaagtttgttggatgaataatgtttttcatcaaatttggaaggtttggagttattctttaaatagtcattcttctcctttctctctctcctttctttgaggactcccaaagtgcatgtgcttgatgttgtctcacagatctttaaagttctgtttatttttcttcataattttttttctttctgctactgaactagagaatttcaattgtcttatcttcaagcttgctgat

SEQ ID NO: 335580 - DNA, 1000 bp, Homo Sapiens
tttttttttttttttttttttttttttttttttttagcaatcatgagagcaaatatttattatgttccagacactaaatcgatgcattacatttagagacacttagttttacacagtgatcttaatagttaggtacagtcttaaatcccaatttatatttcaggaaaaagaaactgagaaagtattcatcatgattagaaaacaacaggcaaggtttgagctcaaatactctggacataaaatcttcactctgaatacacatattgctcatattttcctctccttgattccttgatgtacctggggtatcctgagcaacacactgacataccctccaagaacctttagttgatgttggtggtggtcatgggggtggttcctatggactacctaggtagcatggatggtggctaacaggctttgggcctcttcacatcagtgataaagtgaaacatggataaatgggaaggcaaggatgttatacccatactgctgtgtctttaggagggattaggtaactttctctgaaaatatgaaaaagagtaaatgaataaataagcatctctcataactcaagccaaatacaccatacatctcaaggatgagtaaaagttctaaagaagggaaaccacaaggaagcaatggtgtgaatgttgcagatgagtcagttgcaggagataagtcgagacaaagggttgtaggtgaagaaatgagaaaattcaagagcttggtgggcatagagtcatgggagctggacagttccaaggattgaaatatggataaacaggctgagaaaagcaacatttagagaacttgtaaatgagggagccatggcttgtgacattgaaaaatgagacaatgcctgcttcatagtcgaggaaaaccccaacacggcagggaggcacagccatggagagagtcaaaacctcgggatcagaggacaaagactcttcaaagacaccatacttacatttattctgtaaccctataacccagtagc

SEQ ID NO: 335581 - DNA, 1000 bp, Homo Sapiens
caacggggtcttcctgtagtgacccctgagttaaagtatttattttcacgctgcaactgctgatcactttacagagacatatcatgctgtagctctgcatggagctgaagacaaaagcaacatttttattaatgttataattattataattatctttaacaaagctattaaataacctgtacaaagcccaaaccggtcctagcgaaaacccgagcactgtttcaaatctcccaagttcctttctattcagttcagcagcatttcctatatacaaggccagcccagggtggtcccccgaaactgtaggtctccctgacggtgggaacggtttagagtttggaaccgccctggcgtacggcagagctcccaattacaatccaaatgccccagccccaaccctacctccccgctcctgggaactgggtcccatgtccgaaggcagcggaagttggaagcctggctccattttgggaggcaggcaacggagagggtccgtctgctgagtctcccctccgccagctgcccacaggtccccggatctctcgcagaggtgctgggaagggggtccacctccgggagggctcacaggtcccgcgcgtcctcccgcttaaccccggcctcagcgactttgagcttcttattctggtgagtcttgacgtgcttcgcgaggtggtcgctgcgcatgaagcgcttgccgcactcgggacaggcaaagcgcttctcgcccgtgtgagtccgcaggtgccgctgcagctcgtccgagcgcgtgaagctcttcccgcagaagagccagttgcacacgaagggtcgctcgcccgtgtgccagcgcaggtgcgccttcaggtgcgacgtcttcccgtacaccttgccgcagcccggcacgtggcacacgtgctgcttcttcttccccggctccgcctcgggggcgccgcccgccgcctggcagttgggacagcggcagcggcggcacctcctggccgtggccgccaggggggccttg

SEQ ID NO: 335582 - DNA, 1000 bp, Homo Sapiens
ttttttttttgaacaactgacaaacacaggaataataaatttattataatcacagatggtggggtagtgcacataaaaaggggggacctcttctcaccagagggtgctggccggtgcccagagtggcaggcaacatagggaggcgctccctgcatggcccggcccgctgccaggcccgctgtctctgggtgctcagtgtgtggtgctctgaggacacgggtcctgagggccttgctcttcatccttcacagtggggacacggccctcatgccagcggcacaggggtgccggcagcaggatccctgacgcccctgctccctgggtgccccacggtgctcagcaggaatgccgtgagggctgaggcccagctggtggcggggagccagcagcacctatgggccagccctccctccaaaaggcagcctgtgccctggacttgcaggcttcctcggggggtgctccacctgcccaaagcagcatagcctgaacccaaaactgtgaccagagaatcccatgtgtgttttaagggtttcctatgtcctctgtgttctataggaacgagtaggggtgcgtctagcacacacgagacgctctaacaacaccctgagtgcaccctcacgctgctgagatggacctggaccgtggacaggccacggtgagagcagcctgaggatcgcatctggctcctgggaggaagtcacatggagggccttctctaagaagtcggccaacgccccccaagcaacccgctccactgcgcctatcccagttctgtacaggtgtgggatttcgtttggcaggtccccaaggcagaagataaaagcaggaaagctaacctaaccccaggctctctaaggaagccaacacctagaagtgtctgacaggaggcgtgtgtccttggccccgatgaggctgcgggccatccctgcagtcttggctaggcggctgagaggcaggcctggtggacgctctgggcccaggtgttgagcaaggcggtgac

SEQ ID NO: 335583 - DNA, 1000 bp, Homo Sapiens
ttttttttttttttttttaaaaaaggaggaaatcttgtcatttatgaaaacatgggtgaacccggtgcacattatgctgagtgaaataagccaggcacagaaagacaaacactgcatgatctcacttacatgtggaacctataaaagctgcccttatacaagtaaagagtcaaatgctggttaccatgggctgggaggagagggactgggcagatgtgtcaaagaatacaaaatttcagttaggaggcataagttcagggatcttgtacagcatggtgactatagttaacaacaacgtattgtattcttgaaaaaaaggagtgatataggggtaccagagatgggcaggatgattgaagatcacagtccagccttgcaggaccccgggggacagggcgggcactcagaggtggacctccagcaggtagcgcaggcgacactggctctcctggtagatgaggtactcgctctgggagaatgtggagctgctgaactctgggcagggcacaggctggccctggggcaccaccacttgctggccatccagctccaactcagtgtcctgggtcggatcaggctcggtgtggcctcgggcaatgacactgtcgaagccaggaggtgggctcttcaagctggggttgtccgtgttgatatggtgctctctgcccagggccacctcacccaggaacatgtagccgacatggtgggccccacacttcatgccaataacatatccagctgacttgctgttctctgaggcaaagtagatgcccttgccaacacgcccaccagaatgtggcatgatgcggagcccactagtgaggatggcggccaccacggccatgttggtgccatgccacagcagcttccgattacccagtttggagtgggcctggaatctgtcttcctccccttcttggtttactttccagatgtgttgaagtgtagggcacctgtggttgctgccagtctgttctaagtaggtctgtatcaccttgta

SEQ ID NO: 335584 - DNA, 1000 bp, Homo Sapiens
ttttttttttttttttgctttaaatgattttattaaaaattgtaccaattgatggggggaaagatatacacacatacacacatatgcatgtgaagaacataaacacataaagccaaaggctctgtacagttttttaaaaaatggggcccctttcttcttcctctctcccagaggcagagtgcccagaccccagggcagctaccctggggatgaacaaaatgctacattctcactgggtctcctcgatagcccctgtggatccagggatggggtagaaggctagcaatgctcccagagcagggaggggcactggccacctgcacagagagagggggcagtggggctctgagcacctttagctgggaggctggctgggcacctatgagctcagctttttccgctatcccctcaagactcaaaagtccccaccagccctcaggctgcctaagggtgacaggtgagccccttcctgctagggtgtctggccaggatggcctgcttccaagagtcctcaccttcacacacagagctgtttccagcccaggccagcactgatttgcagaaggcctgcagagccatggtgaccaaagtcttcccgcttctgccacgtcccttctgcctaccccacctccccatcaagtccctcaaaaagaagtgctcactggggtagcatgctccttgctgtccaggacagtcaccgtggctccacagcactcttcctgggaggccctggctgaaccatcccgaataacccccaggcaggggccacctgccgatggggctgggctgccaggagcagtgagacaggtcagctgggcccctctgggtccttcaaacaagcctgccacatagctttggacacagacctactcccctgggggctgagggaggtcactgggaggtgatctttttccacctcggattgagcaagagaaggctgccagtggcccagactttgaaacaggccaggcagaggccaggctgagtcctccaccctcat

SEQ ID NO: 335585 - DNA, 1000 bp, Homo Sapiens
tttttttttttttttagagatcagcaactggggcatgtttatttcctcctgggcctggcaggctgggagcagaatatagacaaaggcactggggcacctgggtctggcacggtctggagcttggccgcctgggtagcaaccgtgaagggtgtgccagggcgtgcagggactggagtcatcctcccagaactgagagagggccctcggggcatggaggcatcacaagtgctaggcttggcacaggtacaggggagaggttacggagtgggtgtgtgcagggcctggtgggaatggggagacccgtggacagagcttgttagagtgtcctagagccagggggaactccaggcagggcaaattgggccctggatgttgagaagctgggtaacaagtactgagagaacaaaagcttgtgggtcagcaggccccacaaagatgtgactgcagacaggatcggccctgggagagaccgaggctccaggtgactcctatagcaaggcagtgagggggcgggtctggggctccagttcaggaatacatagtcagctgcagccactcctggatgttcacctggatttgtccagtgccatctttgtcaagagatttgaaggcacggaacatggcgtccagcctgaccaagcagctgatgaagttgtcaaaatccatgttcccactttcatctgagtagcgtcggatgatcatgttatagagatgctcattcaggtggaaccctgctgcctcaaaggcacctgggagttcactactgcaaatggtccctgatcggtcagtgtcgaactgtttgtatatggcctgccaccttttgatgttgttccacaagtacttgaattcctcaaagcccagcttgcctgtggtgtcgctatccatcacggccaccatgctgcgacatgtgtcaatgccaaaaccatcagtcttcagatcagggtgtcgtgtcacaaccttattgagaatgttcatgagttctgtggcgctgacctccatg

SEQ ID NO: 335586 - DNA, 482 bp, Homo Sapiens
ttttttttttttttttttgagatgtgtaaaaaggctttatttgcaggggagcaggaatttaatcaaaaaggccaaatcccatgtcatcatctgactcttcagactcctccttcttctcatctttcttctcctctgctgcagcaggggcagaaccagcagcaggggctgcagagcctggggcagcagagacggctacagccccaccagcaggtacactggcaagcttgccaataccctgggcaatgacgtcttcaatgttttttccattcagctcactgataaccttgttgagccggtcgtcgtccgcctcgatacccacgctgtccaagatcttcttgatgtccttggcgctgggggaggagttgccccctagggcagccagcaggtaggaggcgacgtagcgcatcgcggcggcgtctgcggcggaggcggcggagaagtctcacgcgtgcgacctcggtggcgacagggaggaaaaggaa

SEQ ID NO: 335587 - DNA, 1000 bp, Homo Sapiens; identical to SEQ ID NO: 157431

SEQ ID NO: 335588 - DNA, 1000 bp, Homo Sapiens
gtcaatgacgagcacggcagtatcatcatccatggtgagctcattcagttgtagaccctttaaaagatcatcattctttttttccacactttcaatttcctccaaatatttcttttctcttagctggctctgatgtttcattatgtctagttccagtcttagcatgacaatttcttcctgcaacgtactattttcatgcaagaggtctttttctttcttataactaagagaaagctcagaattcattttcagccacttctatctgcttttcttcatgaatcagaatctcatcttgtaatattccagtgttctgttcttcagaaagttgcttctgagtatcattttgttcatcactgtgatactgttcattctcagtgtcaggaaattgctggctttcaggtgttctgcttttccttggtggaattaatccatcatcaccattgtcagcagtggcaccgttagtcaggttttctgggaatcccatatgagtacttccgtgcttcttcatttcttcttcaacctttctatcaccacccttatttatttctggttcttgagacatttcctctggctggctattttcacttcctttaagcctttgtgactcttcctctgatgtcagctttaagtcttgttctggattgctgttttcagaagagacttttagcatctgtttttctttgtagtcagaaagtaactggcaaattacattatgatgactagaaacagcatactctctggccgtctgtccagatagatcttgagaagatacatcaatgttttgctcaagtagaaggctgactatacttgccgatccacaacatacagcaagtatgagagcagttcttccatatctatccagtgcatttaaatttgcttttttcttgattaaaaatttcaccacttgctgtttttgctcatgtacaccaagtaacagtggtgtgaggccatgacctgtaatcctagcactttgggaggctgagggggatgaattgcttga

SEQ ID NO: 335589 - DNA, 924 bp, Homo Sapiens
tcaattctcaaagagcttatagaaggcatttttcacctcttcgtttcttaagctgtaaatcaaagggttaagcatggggattactaaagtgtaaaacacagaagccattttatcagtatcaaagaagtgagtggaattgggctgcatgtacatgaagagtagagacccatagaacacaaccaccactgtcaaatgggaaccacatgtggagaaagcctttttcctgccctctgcagaatgcatttgacatatagctaacaaaatcaacatgtaggacactaagactatcagaaaggaggagatcaaattaaatacagaaaatagtatgctcaacaattctatttcctgtgcatttgagcaaagcataggtagcaaaggaacatcatcacagtaaaaatgactgatgacattagagccacagaaggtcaatgtaaaaatcttaatagtgaacatcagagcctgaaatgtgctgtagagatattgaatgcccaccagtacatgacacagtcgctgagacataataacataatagagcagagggttacaaatggccacatagcggtcataggccatggctgacaggatgaaaaattcactgataatgaacataaggaagaatgccagctgtgcagcacatgcataataggaaatagtatttcgatccacaacaaaatttgccagcaccttgggacaaatgacagtagaattaccaagatcaacagaagccaaatgtctgatagaaaagtacataggtgtatgtaagtgggagtccagtttggtcaaaatgatcatagttaggttgcccaccactgtgattaggtagatgacgaggaagactccaaaaaggggaatctgcagctcaggccgccttgtgagttccatcagaatgaattcagttagcactgttagattgtgttggcccat

SEQ ID NO: 335590 - DNA, 1000 bp, Homo Sapiens
tttttttttttttttttttttgagctacaacacaaatgaatgggccattttattgatttttacctcctaatagtggatacaggttgccgtggtttccagcaggatctcagatgcaaagggaagtgaagaaaacagatgaatccctagggtaccccgccatggaaccaaacaccacatcaactggaactcttcttgcaaacgaaggctgaagatcaagaatgacattctcacaccacagcacagcttaaatacttctttgacaaaaataataataaattatatttgactcagaaaataaattctgttcagcagagtgacaggagggtccattcattgcattgcacgaggggctctacggaggggtgaggatgggtgcaggatgccacagtgacaagggacatggggtgcgggcccagcagcacaggctgaagttagctgacgcatgcttttggcttttatcccacgggcgggtagtggccggacccctggctgtggcctgtcccaagtgagactgcaactgtccccttcctcctcacgtccgccttgtcttctgtttcttggcttgtctctttgcatcttctgggccgctattgtcagaggctgcctggccgagcgcgccgactccctgtagccggcttgtcaactgcagcagcaaaggaatgagcttgtcatggttgtaaccggccagcagaaccagcagcgtcaatggcagggcaatgtaggatccttgtgcgatgtcctgttcaggcagcttcctcgtgggattaaaaatcaaggtgatgtgtttatggtagcccactgcggtgaaagaaacttgaggcaagatgtagtcatactgggatctggggagtgtggagtccagaagcacaacatagttctcgccatctctgagcagtggggggaaatggaagaacagggactggccaagggaaactgtctggattggattgtcgaggttttcgcttttgtaaagcttgacccataacgtaggaaggtattc

SEQ ID NO: 335591 - DNA, 1000 bp, Homo Sapiens
ttgccttaacaaaaataatttattccacacacctcccaaggcagggggtagcgtgggaatcaagcatgtgtaaggcactgcccccgccagacccttctaacttctgcacactggaaggtgaaacctggagagagaagacactcccctccctagcttctacctggcaccctccaaagatgagcattcatcttggagaccaaaataaaaaaggacaaaagaccaggctcagagggagcagagctcaatggggggaagtgaaagcagccatcttctcctgcagctaagccagggcaaggcactagagacccacatccttcccatgccaccaactcgtcaggtcccaccaagcaagccactcaccctacagcccagcaaccatggcttgcctcacctgggagaccagcacgacttccagaagcttccaaaccccaccctgaagccaaaccccacccaggaggtctgaggagctggaggctggccaggcatagagggcccggggtggtccttcctcccagggtgcaaaggcttcttcattgtccggaagggagcagggtgggcggagccccagcagctagtgaggagttccattccagcccacccagctgggggaccctcctctggcttcacttgccccagttgagggccaagaccaagcaggagagactgaggctccagtgagaatgaggcaggacttcaaataagctcaggtccctcagccggcacatgtggggtggtgtttgtgggggacttcatcatctcaggcttcccagggtccagagttgaattccggctttccagctccagggctcccatcgccagctctggggcggctgccacattctgcacatccctccgggcagctgacccagctgcagggaagtccaggatgatgttgcttggggagaagtgggccttgaggaagttgagggtggcttccacgtcccacacgggcacatccaggcgttcattgtggcaggcagaacaaagttcacggggtggc

SEQ ID NO: 335592 - DNA, 1000 bp, Homo Sapiens
tttttttctatttttgaaaaatctttattgcttttcctgattgtacaacaaatgtaaaaattcaaatattacaaaatgacttaatttaaaaagtacattttaacatgttataaaataaatgcccatttcaaaaaattcaagtatcataaaatacatgacgtagaaaatgagccctctgtaatctagcccaacccccgtatcccccaggattactgctgttcagatccgcgtgtttccttccagaccgtctctgtgcacccgccacccacacggctgacatgagctccatatgatccgagatgatagtaacgctgaccaacggagcagggttcagctgccgatgccctgaacagcttccagtttctacacagaaacgctttcctcataaaagcctgaaactgtgacacagttttgcactatgtaaatgtatcaggttgaatcatgaaataaatgatcgctcaccatttttggcctagaaaacagcagtttcacgtggttcaacgtgatagctgttcaacagacattggggggtttcctatttcttgccattataaacaattcagcaggtcaggtgcagtggctcatgcctgtaatcccagcactttgggagaccgaggcgggcagatcacctgaggtcaggagttcgagaacagcctggccaacatggtgaaaccccgtttctactaaacatacaaaaattagctggccctggtggtaggtgcctgtaatcccagctacttgggaggctgaggcaggagaaccacttgaacctgagaggcggaggttgcagtgagccaagattgcatcactgcactccagcctgagcgacagagtgagaccctgtctcaaacaaacaaaaaaaaaaatcagcagtgaatgtccttgtatgttctttacggagtataaacatcgtacccccaaagcatgacacctcttttgggcatttagaagagtcaagaggatggagctgcccatttgccatggaaagggagacccagca

SEQ ID NO: 335593 - DNA, 1000 bp, Homo Sapiens
tttttttttttttttttttataataattgcatttatttccatttgtgttgtaaaaactagcttgttcttagcttcccaaacagacatatttataaataatgtgtattataaacatttggaagaacagacagcaaagttggaccattaggctatttcttaacaaaagaactgttttaatggggcggggcaggaggagtattgtagaaaacactgaagttacgtcagagcttccatagaaatggattcttttctctggtgaggaatggggcggggtgactgagggccctctgactgctccaggtcacaaagagatgggctgattgttccacagcctcgggcattgcacccaccggtttccaagtcagcctctagcattgggtggtgtacatgttcagaaaggtttcaaatatactatatgatgacccacattttggcatttgcataactggcaggtgctgagattgaaatttaaaaggagatggatttggatcccaaaagtttgatgtaaaagattccccagggatgtaaacaaacttgcttgtatcaggcctctctgatgggcaggaaacagcaggggagaagaaatcagaagcaaaaggtacaatttagaagcaaaaacattaaggggactgtatccagtgggttacatggaggtggtttccccacaacagattgttgacctattttctcgagggttattgtttctgtttggcttgggtcagtaattcaggaagtgatgttttcctttatggaaaaaaaaaatcgaaagtaaaataagtgttttcccatgatgaagataatgctaagtttaatggcttatccagcattcgaagtcctcccaggtccaggtagtgtggtcagcagggcagcctgtggttagaccgcattcctttgaaggagctggtccagtaattgctttttgaagacttcggcacggagtctgttactttgtaagatcacccttttcctttgttcttcttttttctttttaacttccggc

SEQ ID NO: 335594 - DNA, 1000 bp, Homo Sapiens
ttttttttttttttttctaatttacttatctttattcttttggctttgcttgaagaggagtttgagaccctggaggggctcagtggtccaggtgtccagtgggacctttacgacttcctctgccagagatgagtcatacagctttaccttggaatagtggacccacctggtgatccctggcaccataactgctcacaacaggatgcgagtcacaacaccgagagatgttgtcaagcctggagttccagaaagtgtcctccattcttgtcttcctttgacaagtcgctctccattctgatatttgaagacaatgagtttaaggtaggaattcttaaggcttctcttggaatatgtattctgctgagacctaaattttcattaagatttccattgcatgctgactctaggactggccttgtagtatgagaagtaaataaagatctgctccactctttttcttgaagaagtttggtactgacatctgctagaatttctttacgcttgtttagttcatctgacaaagattctctaagttttaattcttctagatacagctccttatatttttccaattctgttgtattacagtccgcttgtgaagttcttgctttgtagagtttgaattccagatctttaattctaagttccatctgacttttcatagtagcattgctttcctcttttaactgtaactggtcatgagctattttctgtgactgtaaaagtagaccaatgttttctaattgttctgctatctcctgccttgctctttcttctacctcctgtttatagtgttccaattgaccacattctaacatattcatttccatgtgacttttgaggtttactagttcttcttccaacttctcctgatccttctgtagtgtttcacgtttctcttgcattgttttcatatataataatgcctgttgaagaacttcaatctctgcattcacatgtagaccttctgaagatgcagtttccactgcttctgtaagat

SEQ ID NO: 335595 - DNA, 1000 bp, Homo Sapiens; identical to SEQ ID NO: 246396

SEQ ID NO: 335596 - DNA, 1000 bp, Homo Sapiens
acagattcgtaccagtttattttggtgcaaaaactgggaaattcatacacaattttctcataatatgcaaaatatgtatttttccatgaacttcttgaagaccccttgtactaaaaagctgtattcaagaggatgtaaaaaggactgtagatactcaagtgccacttatttctgggatgcaaggatggttcaacatagtcaagcaaatcaatgtgatatgccacttgaacagaatgaaagatgaaaaccacatcatctcaatagatggagaaaaagtatttcacaaaattcaaaatccactcatcatagaaattctgaacaaaatagacagaaaaggaaatttacctcaacaatagaaaggccatccatgaaatgaccaacgagtagataacgaagcagggaacatggaatgattttcctgtaggatctcacgtgatggaagaatgctctcaccccttctattcaataaatactggctgtcctagccagagcaatgaaatagcaaaaaaaatcaaacccatccaaatcagaaagaaagaagtaaaattatatgtgtttgtagatgacatgatcttctgtgtagaaaatcacaaagactcaaccaaaatactactggaagtaataaacagattcagtgtatctgcacagtacaatatcagcaccaaaaattagctgaatttccatacattaacaataaacaattttaaaagaaaatttaaaaacacttccatttgctagagaacttaaagtaagaaatacttaggaataaaagcaaaaagatgagaagtttgtaacaataaacaattttaaaagaaaatttaaaaacacttccatttgctagagaacttaaagaaatagaaataaaagtaaaaaggtgagaagtttgtaccttgaaatctacaaatatacatcaatatgattaaaaacatatacagacatataacccatattgatggattggaaaaattaatattgttaaatgattatataacccaatgtg

SEQ ID NO: 335597 - DNA, 1000 bp, Homo Sapiens
tgtttttttttttttttctttttttgcatatgtagaatttatttctcttattgacatgcagtgcacctcatttaaaaaacagaatagatgtcagcttttaaatttttatttaattccatataaatgaaagtacatatgaatgctattatttgaatagttatttgggcatagacaaaataatgacaattgttcttattttggacaaaaagatgttttaaagtaatacagcatatatattattttgttaaatacatttgggcacttcttaaaatgatgggtgaatttaggaataaattatttttctgcaaactattcccaaaagaaacaaatgtggaacagtattcatatgagtttatttttgtgataaagtaaaaggacatttatacttttttaaagactgagccataattaagattataccttaaacttgagtatttaaaagaccttggttacactgtttactgttcagaattaaattataccaagtttgagtgcacaacatctagaaattacaaatgctcatatactaatattagaagcaaactaaccatctgcacaactgactaggtgccataaggcatgatttctaactttggatatggctcattaaataagtgctcaaatgctaacacatactgtttcacattctcttgaactgacagtgaagtagatactgaaatagacattgaaagatataaccttttaggagtaaaaccaacatctaaatgttgaggatttgtttttatttttctcttttaagttcagaacgaaagtttccacagattccaccatctcaaaattttgacatgtaaactgaaactgatgtaacgcaggactaggatcttaggactagttctcctttgtgcagtccatagcatttgatcttgatctttctaaggtgaccaactttgatgcttgaaatctagacgttcaatgagcacatatccatatttgcctttagaattacgacatatcactagattttgttcggtggtatcaa

SEQ ID NO: 335598 - DNA, 1000 bp, Homo Sapiens
aatgttgagcagatatgagcagatagtagctctggagtcctcaggtatccagcatgtgttgggaaatgtggatttccctgggtcaatgctcccaccatggccacttgaaggctaccagtatgattttcctgaaaacagatttaagaagagatgtcaccatcagcttcctcaaaccatgcgatcaatcctgaaaatgagtgtcctgtgttgactttgtcctgccaaatagcatgcccacccagaacctcagaatgtgggtttatttagaaatagaatctttgcagatgtaatttagttaagatgaagtcatcctggattaaggtggtctctgatccaatgactggcatccttttacaaagaagaaaatttggacacagagcatctcagaaggaagatgacgtaaaggaaggtaggtgagaaggtcaagtgaggacggaagcagagtacggagtgatgcatccataagccaaggaaccccaaggattgctgcagccaccagaagccagaagagaggccaagaagtatcctttcctggagcttttggggagcttggtcctgttgataccttgatttaagatatatgacccccagggccaggtgtggtggcttacgcctgtaatcccagcacttagggaggccaaggtggggcggatcacctggggtcgcaggggtcggggagaggggatagggtgtctttagctgattgaaatctcttctcatttgactgcaggtgaagtaggatcagaggtggattcactgtgaggccctcatttccatgggggctccttccaagactaggaggggccccagtcatgtgtccctgtggccatagctttgcaaaacttgctgatggggagagattttcactgcagttgacttcaggccaccatctctttctgctccaacttcccatccctagggtttccctcacctcaggagctgttagaggggctgcggctcttctggaatgcacttatttaggcttgagtggcagatttgt

SEQ ID NO: 335599 - DNA, 1000 bp, Homo Sapiens
ttttttttttttttttctttttttttttttttttaattgatactatttattgaatatctcctatttatttacatagaaacaaaggaaaagcatattatgtaacattcaaatgactaaaaatacttgagatagcattgctaaatgctatgtaaatgctgacaaaagtaaaaatgccattcgctacatttgctaaatatattgtgacacattataagtattttaaagatatatcactaatgcttgggtcaagtgggcaaaaatgattctaagtatttaattgcggaaaaatttagtacagaggatagtattcaagtgatggaaaaatttaaagtggaactcagagattagaagcagcaggaagttttaataacgtaccaggtgcagtgtataggatacaagacagaactgcaggtaaagtctgactctttccagcatagctaggagacatggctaactccacctgtcccccaggccttacctagaagttgagcagctccaaaccaggtaaacagaacaattttccaaagtcaatcaatttatgacgttaaagcacttctaaaatttaacctctgacttaaattagacaaaatggataaattttgatgattttttttaccaatgattttaacactgtctttatttcccaaagattactgaagtcatgtgaaataaaaggcattggagattctatttttctgacaaaatatttaagagccgtccttttcttctaagccaagtaattagggctcctttacatatccatcacatacacaacactcctagacaggagaagatctagcagttgtaagtttttctttctcattttatgaaccctagcacaacttccacagaccatctatgacatgaactttctgacttttcctgtatttccctctttcataattagtcattctactttaggacaagaatttgccatacaagatcctctctcatataacatttctttccttcataacttttttaccataaatacatcttc

SEQ ID NO: 335600 - DNA, 1000 bp, Homo Sapiens; identical to SEQ ID NO: 157432

SEQ ID NO: 335601 - DNA, 1000 bp, Homo Sapiens; identical to SEQ ID NO: 157433

SEQ ID NO: 335602 - DNA, 1000 bp, Homo Sapiens
aaatctcaaacaatctatttttttgtggaaatatatctgcttgtagtggcgcaagaaattgaaaagatgttatgggtgaaaaattttacctgtgatctctaaaaggctatattcatagagcacattccaacataaacatagaaatcggacctctggaataccaacaacttaatgatctgttactctatcaaaaccctcttgaaaaataaggcttcacaattttccagctttttacagtcttttgttaaatacatctataggtatgccttcctgatctgtgaaaataattttatcattgtcattctcagttacagtgaattcctggcactctctgaaagagcgtgcacgctgtagggagcttcctgctcctcattttggatcattgctgactccgccttctcctaagaatggcagccagtctctgtctagtctcatttgctgaagatgctccacccctgggaggatgtggctgggggagaatgggcacgcctgatctaaccctcttcggcttatctgaggttgggaaagtggtgggttttgacaccccgcgcaggttgggaatttggattcctttttcagagttcagtcttgcaaggcttctctctccatgattactgactgctgcagcaggggaggttaggctgcccttgctgagggaacacggtgagaatggtaaacttccacgaagcttactgagctccaggagctgttctctggcttgactcaaagcctctgtcagttcaaagcgttcttcacattctctacgcactgtctcctgaagaaaagtattctcttcctgggactggttaaattgctctatcagttgtgtttgagccagcattactcttttcagttcatccgacttctgttccatttccttcctcaagttttctgaaactgaatcattactgtcaatttccttcttcaagcgagattcaaattctgcaaccaaatttttaagattttcaatttctttttcctttgaattagattcttcagt

SEQ ID NO: 335603 - DNA, 1000 bp, Homo Sapiens
aaatgccaacgttatatgttttatttttaatcaagtaatttttttaaacctcaacatatccataattgacagaataagacattaggcatgaaatgagaatataaaacccagagtgtacagaaaggcaaacagtgcttcagtccctccagatgactgcatgcgagtgaaacgcattccaaacatctaccccttttttgtcttttaaaaacatacagttcaagtgtttttattttcacttgtaaacaacatgagtcaaaatggacaatgaggtaatctaaatactacacaggataatttaaaaacactagataaaacaccattattaaagacatataaaaatcagggttcactttggtctctagtacggttagttgttaataccaaaaagcaacacatactaattgaagccagcttggtggtaggtgccagtggttgatagatgtgattcaagaggtagtcaacaccatcattttcaagctggtaactctcacaagtgttaagccacagatgcattaaatatcataatacttctcacagtacagtactttaccataacttgcagctttgttccaaatataaaatttaaaaatgaatcataggtcaacttctcactctaactgaacaattaagacacagatcatacaaccaccacatcttaaagaggctgttgacagctatgtaagacagagtttgatgcttttaacaagatgttcttctctaaaacaaataaatctcattaagacatctagaaaattaaagtcagtgcagctgcacttgtacatactttcccaaattttataaccaaaggggaaatacacatatatattttatgataaacatttcttagagaaaacagataaattaatttaaattaactttaagacttaatgagatttcccatgtcctgtataattcatcttatagtgaatgttacaaagtctattaacacttatgggctcctattcacaaactaaatacaaccagcagtaacttggggccg

SEQ ID NO: 335604 - DNA, 1000 bp, Homo Sapiens
gagatgggagtttcgttcttgtttcccggactggagtgcaatggtggggtctcgggcccctgcaacctctgcctccccagctcaagtgattctctcgcctcagcctcccaagtagctgggaccacaggcacctgccaccacactcggctagcttttttgtatttttagtacagacggggtttcaccacgctggacaggctggtctctaactcccgacctcaggcaatccgcccgcctcagcctcaaaagtgctgggattacaggcatgagccaccgtgccaggcctcaaggctacgtttgttacacagctgtcttgactaaactagatggcctggctagacctagaagcctgtatgttgtataacttctcaatagaatgagacaacatactttaaaaaaaaacgtactgagattttaaagtcttaggatacctaaacctttttctctgaggaaataatttcgatttgataaatggcagctacaagaggaaaaacaaaaatgagactaatgtgagcaaaaaactactgaaactcaaaattacatggacctcaattctcatgttccaattcaaaaaagagcagaacagtgcatagcatagtacaagacagtccaaacgtgtgtctgtgtcactggaatcacctggagagctttggaatactagatctttggatatagcgggtgcagggtgggccagaatgtcaatattgaacatcaagaagttggagtgcctgacacattattaaaagacccagttggccctagcaaatgatggtggaagaggtgatgttacaaatctctatttaaaaacatctcccaaattaattctgatgctcacatttggaaaccataggtgtagggggaagaatacagcttttgtgatccaatggcaactttactacttaaaactgcaagacctcgaacaattactatacttctatgaacgttagttcattccccggtagacagatcataaaatcactatttctgggctgatataata

SEQ ID NO: 335605 - DNA, 1000 bp, Homo Sapiens
atgtaattcttgtaatttttatttaggaagtgttgaagggaggtggcaagagtgtggaggctgacgtgtgagggaggacaggcgggaggaggtgtgaggaggaggctcccgaggggaaggggcggtgcccacaccggggacaggccgcagctccattttcttattgcgctgctaccgttgacttccaggcacggtttggaaatattcacatcgcttctgtgtatctctttcacattgtttgctcaaccatcctggctgcggcgtctgtctgaaccacgcgggggccttgagggacgctttgtctgtcgtgatggggcaagggcacaagtcctggatgttgtgtgtatcgagaggccaaaggctggtggcaagtgcacggggcacagcggagtctgtcctgtgacgcgcaagtctgagggtctgggcggcgggcggctgggtctgtgcatttctggttgcaccgcggcgagttctacgtagctgggaggcctcaccatcacggcggaaggcgaaaggcccgtcttccatggcagcaggcaagagagaatgagactcaagtgaaaggggaaacccctataaaaccatcagatctgctgagacttgttcaccaccatgggaacagtataggggaaactgccccatgattcaatcacctcccaccgggtccctcccacaacacgtgggaattatgggagctacaattcaagatgagatttgggtggggacacagccaaaccatatcaaaggcatcgtctggccactctaggcccttgttcccaactctcaaactccactgacatcacctctgtgcctgcaacccctcctgggattcagtggagacctcgtcccttgttggagtatctgcgctacccagagggtgatggtaaaaactgacctttgaggaacttcagagacaaagccttccgcagtcagctctccctgcagccccttcgcagaagcctgtcctcacacgcccgccacccctacctgccctgcctcc

SEQ ID NO: 335606 - DNA, 1000 bp, Homo Sapiens
acgatatcttgtgctttaattgaagaagatggaaataaagaagcaaattcaaaaatcagtatacaaaagtcgattgattccctctatgtggagggaagatgagcttgaataagagaagcattctgtgttacgctttaataatggctggagatctgccaccatgcatttgtcaaatcccatagaatttcatagcacaaatagtacatctcaatgtggctcaggagtacatataatgtcagccacagtttgtgggtaaattacatatttaattaaatagattaaacaataaataatgatatgagctctgcctggacacagtccttgcctctccaaccagtttgccaagggcttgaatttcttgctcattatcctcacacttgacataaaccctggctgcagagtaaaatcaatcacttgtggagattttttaatatattgatttgtcaacttcaaccacggataaggccatttagccttagtaaggccgatcgtattaagattgtgcctgtttggcaaaatttcaagtcatcccacttgatattcaggaaacattttctcttgagttttaggttcagtactgaggctccttcacggacaatacattttccaattctgaggacaaggcagaggagggcccctctgtgagaactttcattttgcttcgggaaaagtacattgaatcgaatataggaaaggcttgcaaggtggctgacaggttcggctgttttatcatgctggtgttttatcttctggactgcagtaaaaggagcacagctgtgtctgtctctgtgtaataactcaggactcacctgaataaaatgtggggtgtcatgagatgaactgctacttccagttagagaggctccagggacaaaatttcaagagccttctgagggatagaagagaagagctgccttattctctgatcccaggtaactgctcagagacagaggcaagggctgcggacacccaaatgcatatactaggggtctttgataca

SEQ ID NO: 335607 - DNA, 1000 bp, Homo Sapiens; identical to SEQ ID NO: 157434

SEQ ID NO: 335608 - DNA, 1000 bp, Homo Sapiens
agatggagtctcactcttgttgcccaggctggagtgcagtggcatgatctcgactcactgcaacctccggctcccgggttcaagcgattctcctgcctcagcctcctgagtagctgggattacaggtgcatgccaccatgcccagctaattttttgtatttttagtagagacggggtttcaccatgttggtcaggctggtcttgaactcctgacctcgtcatccacctgcctcggcctcccaaagtgctgggattacaggcgtgagccaccgcgcccagctcagggcttttattttgtcacgttgaaaaaacaatgagttggtaggagaagcctcggatccaaggacaaagacaatatcaccaaatagctccaaaattacaatgaggatcagaagcctggaaggatggggtggaggtgagtggggatcagaatggaaacatctttcctctctctagcggccagtttggtgagggcaagggactcgtgccatcctccctcttcccatttcacagatgggaaacagccagagctgagctgtcactggctccgtctaaagcctccaatgaaggaaggaaatgtctctcttcaagaaggtcatcagaggacattgaggtccccttcacgctggagaagcaggtggagggaacacgtgaatgccacaaggccagcgtggctcaccccacatggaggagagtgactccttccatgtgcaggggctgccaggcctttggggtttcatgagatgccttcctgcatgcagaggcagatgctcacctccgaccaggagtgaacccctgatttctcccagcgcggtctctggctggaggaccatgcatgcgctccacgggggcaggggccgcacacatgtgctcatcatcagtgcatggccatggcacacaccgagagttttacagaataaacaaatgaaatgtacttcccttttacagctgaggggcacgaaacttagatggttcttggaacttaaccaagaacagagat

SEQ ID NO: 335609 - DNA, 616 bp, Homo Sapiens
tttttttttttttttttttttttttttttttcgaagagagcagattctctttattgagatacgggacacagcgaagggtggagagacggaacagccccccagcctcagccctctccacgggggccggatgccagagatgggagaagggattcagtctctcgcccgggaaacccagtcccacagagggcgccggcaagggtgggacgcgacctgggtgacacggtgcagggagtctttaaatagaggaggggctggagcggggaaacgcgccggggccctagcgcaccatgtattccttgcgcttattgagccgaacttggcagaaagagaagcctccgaggaggaggtaaaggcctgcagcgatgaaacagttgtagctgacttgctcgtaaaggttgtatatgttctgggggccattctcaaaatctttctccgtgaagggaacgtcctcaatcaacacagcggaatggacattgaaaaatattccgagcattatcaacatgatcactccccaggcgctgaggacgatgccgcaggcggccagcttcggcccacagcacaggagcgacgccataaagaagggagtcggggatcgccgaggtgcaagcgggccccc

SEQ ID NO: 335610 - DNA, 1000 bp, Homo Sapiens
accacttaactgtttaagtaagtgatatcagacagatcatatcacgagtttggcctctctcccctgtaaagcagaaaataacatccacccaacagggtcatgatgagatctaaatggggtcatgggaaccacaaggtgctgtacacaggtaattcttgtcactgccagcaggtctgcaaggctcattctaaagcctgaatcttcacattcactttctctagacctgtttcctctgccctctgttcaaagaggtcttttggtctgcagaaggcttccctaggggcctcatgggtactgtccctcttttttctcatccagaggcgaagggagtgatgcattcaggccccagaatttcagcccagtgggcaccctccctgccagtgcccccaaccctattcattattccatcaataaatatttagtgtggaactttgtattgggcactgtttggggtgctgaaggtatagaagtaaaaaaaaataacacagtggccaggcaaggtggctcacgcctgtgatcccaacactttgggaggccaaggtgggtggatcacctgaggtcaggagttcgagaccagcctggccaacatagtgaaaccctttctctactaaaaatacaaaaaaaagtagctgggcatggtggtgggtgcctgtaatcccagctactcaggaggctgaggcaggagaatcgcttgaacccgggaggcggaggttgcagtgagccaagatcgcgccattgcactccaacctgagcaacaagagcaagattccgtctcaaaacaaaatgataaataaataaataaataaataacacagcacctctcaaaaagcccatagtcatggggaaatagctaggtaaacaggcaagtgttctatgaaaaggtatgtacctttagataaggcaggtgcttgcataagataaaaaggcaacagtgaggaggaagatttagccagaaggagcccacccaggaggctcacagaagaggtgaagcttgaggaag

SEQ ID NO: 335611 - DNA, 1000 bp, Homo Sapiens
cgagacagggtcttggtttgtcgccaaggctggagtgcagtggtgtgatcacagctcactgcagccttgacctcctgggctccagtgatcctcccacctcagcctctagtggctaggaccacaggcatgtgccatcacgcctggctaattaaaaaaaaattttttttgtagagatggggtctcactatgttgcccagactgctcttgaacaatcttcccacctcggcctcccaaaatgctgcgattacaggtgtaagccactgcgcccggtctgccagtgtttttctaatactaagacaagggttatgggtctgggaggaagagcccagtggtgaagcgccctgtcacatctgcccgtgtgacctctcggtgatggtgccagccttgacctctgggctgagacagtgggtcgggctctccactgtggagacgccttgcctacctcccactctgtgctctctggaaggaagtcaccatgtgcagcccacacagaaggggcacgagctggggccccctccctgtgccccttacttttatttattttgagacgaagtttcgcttgtcgcccaggctggagtgcaatggcacaatctcggctcactgcaacctctacttcctgggttcaagcgatcctcctacctcagcctcctgagtagctgggattacaggtgcccaccaccatgcctggctaattttttgtattttcagcagagatgcggtttcaccatgttggccaggctggttttgaactcctgaccccagttgatccgcccgcctcagcctcccaaagtgttgtgattacaggcgtgagccactgtgcccggccgggccccttccttttaaatgtcagcctctggagtgaccatctgtgttggctgggagctcttcggaatgtcccatccagttgctgaggctaatgatcacctctcaggtgcgctggtcccattctctgcgctgtttatgtcactttatgcctggactcctcccaacaatgttctgt

SEQ ID NO: 335612 - DNA, 1000 bp, Homo Sapiens
tttttttttttttttttttttctcatctgttaagtgaggaaaataaaactcacctacccgtgaggattgttgtgaatgacacagaacttgaaaggatgtcttgtacagaattggacttaacacactagttcccctaacacatcctcacattagaataagctagcatctgataacaatgctctgaggtactagaacccaggtcaggaagatatccttttggaatcatgcaagagtgtgaaaaaatacagtacagtttaaggactatggaaggaagtaaggttacaaattctgcttatctggttggactctggtaatagtttggaacatggtttagagtaagagaatgagcttcttcctcatttgatttccaaagacagtacatggtactctagttaagaatctgaaccaagccagccaaaagcacaaaaatctaatcctaaaatgtgctaacagaaatttacttttattttctgaaaaacttaaacagataaatgacaaaacatgttcattaacagtcaacaataaggcaaggaaggaattcacactattcctcagagcagctccgcaaggcttatcaagtaagcttctgatatagtttatactgtagttgaagctggtttcagaaaagcccatgttttctttagtcagcatgcggggtaagaaaactccgtgaactctctggcaaagtctctttctggcctttcgtcttcctaccatttttggtcatggttccacccaaataaaatggagggattcagatttatcattacatgtaatctttcatctaaacactgtctgcaaatgcctaagtcccaccacgccctacaagctcactcacatacacagcatgtcatgctcacataacaggaaacatgccaaagatagacacccaaaattgtaaaaaggccaggtgcagtgactcacacctgtaatcccagcactttgggaggccgagacgggtggatcacgactcttttctccacccctctattcatttgag

SEQ ID NO: 335613 - DNA, 1000 bp, Homo Sapiens
gtctttctgttgttggcagtgtcaaaagaatttatttcaaatctgcttaagactgtggtaaaactcaggttttccaaaaggtaatacagaaagttcaactaacccccaaagaccagaaaacacagtgtttgcaattcaaaaaatacaaacgcttgtggataccaatacaaaaattagaaaaaagttgctttccttaccactccccgctaccccccgtgttttcagtggaacatccacagcaataggaccaagagctgccaccaaataccaacaacgagtgaccgaaagtggatgtgatgggggaaggggagggaggagaaatggggataaagaaaggcaagaaaattggacttctgtcgacggtcaaaacaaggacgcgaagctttttgtttcttgttaaatccctttgccaacgttaaacaaacacctctcatgcttaatacaacagcttagtgccaacgcagcaatcctacatcatgcattgaatgttttctgctttgcccgctccccacttcttctgggtgccgagaaagcctggggctctgggtgtctggtttccagggctaggaggagttggagaggcttccccggctgggtctcacccagtaagcacctgacatgttcctgctactgcagttgcaagcagtcaccttcccgaacctgaagcctggttttggcctctcctcagaactttacccgagggcctggcctggtctgcagtgcccgcatcaccggcccacaggtccctaggcctttcccaggactgtgctccttgagagaagagcgatggatccggacgagacttccctggaggtctcaactcccagctcctgactgatgtcaacgtcaatcattgaaaaagccagggcctcccccaacctgcatagctcgtgctggtgaagccccagcagtcccagcggttatcagtcatctgaaagtgacatgatgacccactagcccaaccagccttcaaaacttcggctcagttgcatctcttcgt

SEQ ID NO: 335614 - DNA, 1000 bp, Homo Sapiens
tttttttttttttttcttcaaattgcttttattatacagttgtaatggtattaattataaacatcaagtctattttcacacaaatcgtcacgagtacacactgataaagacatgcgctgggtaagagtcattattggtacataaacatactgggatttgggcataaaaacacagtatcaattaatagctttagcagtctcaaaatagacttcaacgacattcatatatatttcctaatttaaattgtgttagaaacattgcatctactttgaggaacaaattctgtaacagaagagggaagacaggtaggcaagaaggcaggagatttttagttgtatactaaggtttagttttggcacattgaaagtatcatgttttcctattagatttctgaatttgtgaacaaacattaacagttgctgttctttaatatgacctcattcatactatatttgtgggaaaatacaactttagttttttctgtttacttatttttttatttttccactattgctcagtgaaggtactaaccaaatattttttagaagaaagaaacgacgtttaaacctaacacattcttcatgtatttttactgtggcaagtagtcattcacaatgtgatataatcattactcttagtagtcattcaccatgtgataaaatcattacacttccaaacagcactgcattttttgccttcccggaatattttcctttccttaaatagaacatcatttctcattaggatggacttataggatgcatttgggggatagttgagatcaagattttattttcaataataatattttcaatattttcaatatttcaatatttttcttgtagtaagcaagctcttttttaatatatgacatagatcataaaatacattaaaaatgttagcatgcaagtagcaaaacctaaattacattttatatgggtaaccatttggctgacaggatatttgttgtaaacatactctatgtaatatttaattgtgt

SEQ ID NO: 335615 - DNA, 1000 bp, Homo Sapiens
agtctaaaaagtgtatttacaagtatcagttctcatccagcctgatctcatacaataccatttacatcctcttacacctaaagttgtagaaaatgatcttcaggcacactaggagttctataataaaacaccaggtatatcagaatgtccagacttactggagaataaaagtggaatcaatggctatattttcaaattgcattcaacaggaaatttaagtttttaatttttttcaccttcatacttccaagttaatacaattaaatcagaatagtccattctttcaaagcctctagccaggcaaagttttactgtattacttcttgctttcaatggatataaagcagagtcctggtaggcacattttgtatatttgcaaagatgcagaactaaacaattccatctgttccatagtaaaacaaaagtcctgtaaaccttggatggtgagtacaatacttcagcactaccaccaaaacctcaaatatgaaaagatactaagaacaccactagcaaacaaaagtgagctctcagctgggagcagtagttcacgcctataatcccagcactttggcaagcgaaggtgggaggattacttgaagtcaggagttcaagaccagcctaggcagcatagcgaattcacatctctgggtttgaatacgtgctctgtcactcatcagctgtcagatcttggggaatatatgtcaccaaagtcagttcagcttcctcacctgggatctctgttgggcattgcggacgctggtgttggaagttggggtgctggcttcatgaagcttctggtcctgtaggcggctctgacccataaagaggctgctacaatcacctgtactaagtgctgggacagaggaagtagaaagagtagaatgagcttcaaatgtacagaattattgtgtgcccaagaaatataggatacagaggaggggctctcatctagcctgggagaacacggagggcttcctggaggaggggacctgtggagtag

SEQ ID NO: 335616 - DNA, 1000 bp, Homo Sapiens
acagatacgggtttttaatcctagcaagagacaaagatagggaaaaaggctttcaagtaaacattttaccatcacacaatgcttctccacgtatctgtgtgtgaaaactggggtagacaaaagctggaccccaaaacaaactgtcaagggaataagttgaactatgtcatttattatacactcaaccaaacccaggtgcctgcaatgtactagataaagttctagtctcagaacatgattctaggaattgaaatttgtcattctttttccatccctcacccctctacctccagcaactgaattctcttcctatgttgaagagtcttattagaaggcagggactacctccttctacaaaggagaaaaattcactttccccaacattattgcagttaaacactgcaagaggctttggctgcacaatttagataaccacatgtgggcttctaatcaggatgagatgacacagagaggctgggacagtaaatactgcattttggtaaagatggctgaggagcagtagtggagcagttctcaggagcagcagtgatagcagtctttgccacagggcccagtgtcggccatcagggtatcagaggtatatgcagtagcatctgtgctcaggagcagggacagtggttcctatgagagatctgaattagggtggctgtggattatgttcctggctgtgtagcttcaaacctggttctgtgtccaatgtggtttggctgtgtccccacccaaatctcaacttgaattgtatctcccagaattcccacatgttgtgggagggacccagggggaggtaattgaatcatgggggccagtctttcccatgctattctcatgataatgaataagtctcctgagatccaatgtgtttatcaggggttttggcatttgcttcttcctcattttctcttgccaccaccatgtaagaagtgcctttcgcctcccaccatgattctgaggcctccccagccaaatggaactgtaagtc

SEQ ID NO: 335617 - DNA, 1000 bp, Homo Sapiens
ttttttttttttttttttttttaaatatcaaataaaaatttatttttacaagaatttaggggaactaccacatagctataaatgtaatatatacattaactaagtatcatagataaaaagtctgctcccttcagcagcatatgtagtaatagatacaaagattgaaaggtaaaagatttaggataaaaagaatcctctcttaaaaaggaaaacaaaattatatttatgtgtatataacagttataatacccatcacacagctttatagaaacagcatctattcaaaaataccagtatttccaaaatatttaaaataatatttaaagtaataacatttaaataaataaatatatttaataaatatttaaataaataaatatatttaataaatatttaaataaataaaataatatttaaataattctttgcccatctttttcgaaataaatcaataaaatagatagtatatattagacatgttagtatatatatctaagacatgttaaaaatcacaactgaattctcacaattcagtcacaaacctaaacagcaaataaaaatttctatgaccagaatttgggggaactaccaatagctataaatagaagagattattatggaagtatcatagataaaaagagtgctcgcttcaggagcacatataataatacagagaaaaatttaaagataataaaagatttaggataaaaagaattctcacttaaaaatgaaaagaaaattatctttatgtatatataacaactataactctcatcaaaaaactctacaggaacagcatgttttcaaaagtacaacaatttccaaactatttgaaataaacctattaatgattcaatggccaacattttccaaacaaaccaataaaatgcatagtgtgcatgaagctatctgttacagtctgtggcactcatatttcacaaagaattctgtgccaatctgagcccctgcactgtgccttcaaatgctcctggactgtggc

SEQ ID NO: 335618 - DNA, 1000 bp, Homo Sapiens
aagagtttaccttttctttatttccaaaatatgcaccaaaaaatgttagtggtactaaaattctaaaccaaattgtaaggatatgtagcagagtagcaaaggagacggcagctgatgacccttccatccagagaattttcatcataataaagagatcagcaaagacaattctctacaaactggcactaaagcaggtttgtcagtagagggcgctggagagacatcgcaagggaaagggtttatttcctggttgatcttggctcactccacaggcttctgttttctttcagcatgctgcagcccctggatctctggcatggtagtgtgtccagaaatggtgggttcttggtctcactgacttcaagaatgaaaccgcggaccctcgcggtgaccgttacagttcttacaggcggtgtgtctggagtttgtttcttctagacgttcggatgtgtccggagttttttccttctggtgggttcatggtctcgctggatcaggaatgaagctgcagaccttcgcggtgagtgtcacagatcttaaggcggtgtgtctggagtcgttcattcctcccggtgggttcctggtctcactggcttccagagtaaagcttcagaccttcacggtgagtgttacagctcataaaggcagtgtggacccaaagaaagcaacaggaagatttattgcaaagagcaaaagaacaaagcgtccacatcatggaagacaaccgaagcgcctcgccactgctgggtccggcagcctgcttttattcccttatctggccccacccacatcctgctgattggtccattttactgagagctgattggtctgttttacagagcgctgattggtccgttttgacagggtgttgattggtgcatctataatccctgaggtagactcaaaagttctccacgtccccactagattagctagatacggagtgtcgattggtgcattcacaaaccctgagctagacacggggtgctgattggtgtgt

SEQ ID NO: 335619 - DNA, 1000 bp, Homo Sapiens; identical to SEQ ID NO: 157436

SEQ ID NO: 335620 - DNA, 1000 bp, Homo Sapiens
gacagtaaaaggcaaatactttttaaatgatactcaaatagacattcaataaaaccacacctttcagacaacataatcatttgcatcataaaaaactctagtggttcaaatttaaaatattggttaaaaagcttcagttggatttcaaattagcctaaaaagaaatttccatcttaataaaataggcaaaactttccttttaaaattacaacttattttgttaaaaaatgtgttcactattcttgaaaaagacctaaaatggatctttcagaagagaaagcctctcctattttaaattgaacccagtggagcatggaagacacgattccaaagcatccagggaaaaagttgaataccaaatccatgattcacatgtactcaaatacccagaatttggggttgatccttcaacaaaacaggagggtgactgagtgattccttgatattttaaagtttcctcctgatgccataagttatgataattcagtctgtcctaaggacttttttaaaaccacaaaaatgcagtatcctgcctagatttatctgaacttctaagcttattacagacttttagatatcttctggaagatcccttaagtgaagtgagaagatattctgactttagtcaccaaagttaaatgttctcatcacttaaattgacttcatacagtcaggtttattttatgctctcagttacttactactgcaagtcaacacagcacaggaattgatgcattttgtgccttcaattcaaagtaaatagcaaacactgctgtctgtgaactttttggccaatgaataaaaaatatttcatttctaattctcaccagaagaattgaaattaaacagtaacagatgaattgggcaggcatggaatactaaatagaaactggcaaatgaaataatccagctatttgcttttacgatgaaaatgagaattgattctgcactgagagaaagaagtaaaaggaccaagagttttgaaaaaagccttctccac

SEQ ID NO: 335621 - DNA, 1000 bp, Homo Sapiens; identical to SEQ ID NO: 157437

SEQ ID NO: 335622 - DNA, 1000 bp, Homo Sapiens
tttttttttttttctttaccaaaaggtaaatgccctatatttaaatacaggtgtttttcatgaagatggtatgcaataattcttatgagagcattttgtgatatgtaaagtgcatgcagtccagtgtccaaggggtcatggttgtaaacagcgggtcgagggcgctgtccatggtactgaacccgggcagatgaggggaggaacatctctgagcttgtttggaagtgccagcagggaagtccagatagatacttgtatgcctttgactgaagcgtggtcctcctctatcagagaaggtcgtcctctcgtcctcttcaactgagcatgcagctttaggagggacacatatggggcagtgagggaggacggggacacccgcctgctcagccagatcaaccaaatcaatcctggcgatcaatggggtgatagatgttacagtcagagtaccctcaaatctggagcgtctttgaaaaatgagcaggaaagcctagcctgatatcatgacaagcccattggagcgtccacgggtttctatttgagaatctcccagcactgctgtctctcctctttctccttggtaagtacggggcttgtttcctgtacttacaatgggaacattgagttcccatggaaggctctcaatgggaaaatgctccaccaagcttagccggactgggatctcctcactcccagacttctcagctccatgccttaaaatgatgtcgtcattacctgaggcctctgaattcggatctttgtttcagggtctatgtgtctcaaggagggctggaaattactatagatggactccaggtggatggaatcatcatcttggcagatgtcaaagccaatgttttggaaggtcccaggagctggtccactgtcctcttcttgccacttgtataactgagacaatctgtacttttgccgtttcacctctctcttggagcggaaaacgagcatcaggagagctaccaggatgatcagcatcagcacgacc

SEQ ID NO: 335623 - DNA, 1000 bp, Homo Sapiens
ttttttttttttttttttttttttttttgtttttaaacactgtatttttaatttttcaaaaatacgacagtaaaggtcgtactatgcacagggggactgatgcctttcatgtgtcccccttgcatttctacctcaaaacaagactaaggcataaattactccactgggcgccaggcacgccccttgtccttggggcattatcactggtcataccacttgtcctgggggccggcagatgagatatttgccaccaaggctgcacaggctccgggagtccttgcacgtgctttattcagtgcattccagaggggacccctcaacagcgctggccaagcccttccctgtgcactggcgggcatgagggaaggatgggaggcagtgtgtgtgtgtgtgtgtgtgtgtgtgtgtgtgtgtgtgtgtgtgtgtgtgtgtgtgtgtagggagggggtgatacagggaggggaggctccctacccctacccctgctgcccagctgcagccaggccggtgcgtccatgtctaggggcaggctgcagcaagaagacgtgggaatgcacagccccagggattgtgtcatccacatgcttcccatgaggtacctgggaacaaaagtgacccgggagggttggcagctgagagcaaggggctgcagctggtgggggaatgtgtgagttgcggtcaatgtgaatgcacgtgggtgcagagcccggctacctctcatctcaggacagcgtccagtatcctggtcccacttgcctggccatcagtctccacatctcagagtctttcttcatccctggcttgcagctgtcaccatcaagcccttgctcttgggttcattcttcgggagccccaggggcctatctatggggaagggagtgggtgtgacttgggagccaatggaggggtgggatgggtgagagaaaagggcagaattcagatctgttttgtcttggatccttctggaactagaggcctggagtgtgcagattgggttcgt

SEQ ID NO: 335624 - DNA, 1000 bp, Homo Sapiens
ttttttttttttttttcttttttttttttttttttgatatttaaaatctttattgataccattttgtttatgaactaatctatttacatacccttccaaattgtatccttacaacttgaagtcaagtacttttctcgatatttaacttgcagaaagcatttaaatacctataaatatcaggtacaattctaagttctgaatcaaaaaatatttctagtgtaattaatattaatgttgttcaagacatgaaatggaaaaacctctaattactttttaaaataaaagccacagtaattaaataattactatgtacattacaacttgcttatatcaaattaccaagaaaagcatcatgccaattgttaggatcacctctacttggaaggcaaagaaagttgtacgtgacaatcatcaaattaatacacttaggttttgtatagtctgatttatcctttgttgttaagctgctagactgaaataaggattctttgtataaacatcatactttgaagttatatagatgatataattattactttataatattttataatactaatatggtattcattaattttgttggaagttattcacaggtcctaaaatactaaatgattggaatgtcacactaaggaagttatccttaatatataaatgtctaataactacatatcagaaataaaaaggcattgtttaatattgccaaatatttagtacattttgtgattaagtttctactgcctctattaattttagctaacctaatctaatcatcagtttttctttttaaaagaaggcaagcgcttagtttttatccatgatgaattttttttttttggttctttttgaaagacaagaataatttgatataagtaaagaggaatgctttttaacttttatatcatcttgtctttggaaacttatggataagcttccaaaactaataacaggaattaaaagatgatatggagaaagaataattccttaaaagatatggaga

SEQ ID NO: 335625 - DNA, 912 bp, Homo Sapiens
ctatgggatacagtttctgagggctagggccttagagaccgtcctgctgagggcattcttcacctcgttatttctcaggctgtagataatggggttcaacatgggagtcataacagtgtaggacaatgatagcagcttcttgccctcaggtgaattatttgatttaggccggaagtaggtgaggcttaatgatatatagaaaagagagacaacaaggaggtgtgaggaacatgtagaaaaggctttattcttccctttagctgatgggatcttgaggatggcagcagcaatgtgagtataggaacacaagatcagcaagcaggggatcatgaccaccagaatggttccgacgatggcgtagatctcaaagagtgctgtgtctgcacagaccagcctcagcacaggtgggctgtcacagaagaagtggttcaccttgttggtgccacagaatggaaaactgaagagccatgtggtctgcacagtagctacaggaaagcctgggaaccaggaggcagcagccagtttggcacgagtcctttggttcatgatgactgggtagtgcaagggactgcagatggccacatagcggtcatatgccatggtagccaggaggaagcattcagccactccaaagaagaagaagaaatacatctgagtggcacagccaaggaaggagatggttgtgtcctgggcaagcagggtccccagcattttgggcacaatgactaggttgaagccaatctccaggaaagataagtttctgaggaagaagtacatggggctgtgtagcatggggtcagctagggtaaccagaatgatgaggcagtttcccatcagggtgaccaggtagatggttagaaatgtcagaaagagtaatgactgtatttcagtaggcagggaagagaagctcat

SEQ ID NO: 335626 - DNA, 936 bp, Homo Sapiens
ttatttcctctgaggatgtgctactttgtctctaagtttcaacacagctttcttcacctccttgtttctcagggtgtacacaacagggttgagaaggggcgtcagcacagtgtagaaaatggccacaactccatccatggcatccatggagcctggcctcagataaatgacaacacagggaacaaagaagcaaaggaccacaatacagtgggaggcacaggtctgaaaggctctgcgcctcccatctgaggtgcggatccgcaggatggaacagacgatggacacataggacagcactatcaggacaaagcagcctgaggccactatcccaatgtccacaaagatgaccatcacgttggctgaggtgtctgcacaggccagtttcaggatgggcggtgcgtcacagaagtagtgctggatctggttgggtccacagtagggcaaatggaaagtcaatatggtctggacagcagagtgcagagagccactgagccaagtgccggtggccaggagggcacacctgctcccactcatcatgctggtgtacctgagcgggtaactgatggccaagtagcgatcataggacatgactgtgtagaggaaacactcggtgctccccaggaagtggaaaaaatagagctgagccacgcagctgtggaaggagatagccctgccgcttggggacaccaaggtcatcagcattttgggcaccgtgacagtggagaaccacatgtcaatgaaggacaggttggtgaggaagtagtacatgggggtgtggaggtgagaatccaccctgatcaccagcaggatgaggaggttccccagcacagtgagcacgtaaaccaccaggaagattccaaagaggagggcgtccagccctggggcatggggaaggcctgtgaggatgaatgctgtcacgaggctggcgttggacat

SEQ ID NO: 335627 - DNA, 1000 bp, Homo Sapiens
tccatgttataaggagaaaaaatgaagatgagaaggattgaatgacttgccatcattgcaaaatgagtggggaagctttggtcaaaccaaattttggggctcatctcaaaatactctttagccacctcctttggtgtttggagacattgttaatcacctactgcattatattaaaattattcccattttaagatactttgtttaggcgacttcacatttgctaaattgcagtttgaggattcctttcatgtgaagttggaggatctggctgtattctttgggcatctgatggaaaccatgtttaggtagcttgttgtcataatagtgatggctgacaggtatgtcttctacagttttagagaagggccagaatccatacagcttcacatttttacacagttccactgcaacacttgtgatcatcaagccggtggacaagcggtatgcagtcacacctttagttctccagaaaagggccagatctttcaggtacttgggatggaaaaatagaaccttttgtcttgctttagactcttcgagcgtgtagtatactttgaaagaggtacccgtgttggccctgaaggaaaatgctggcagaagaaaaaatgcatctccataggttgcaatgtcctccagaaatagggcttttttttcctttaagttcccatatttcagagttatgatgcttggatttatagtcacaagatttgttttactgccaacatctttactaacatctcctgtggttgggggtaggttacacctaaaaacgaagtcggatttatctatttcagttccacagagagacttattcagaattcccccatttccgaccactgcacactgattataagggtagtccacaaaaggctgggacactggaaacatatgaaaaatgttcttcttaattgggatttcttttttgctttccacctcgtaactcatattagtcccaactggagtgttattctgagaaacaacaaagttttgaacagcatca

SEQ ID NO: 335628 - DNA, 996 bp, Homo Sapiens
ctatgggggtgggctgcctgctgtagactctcggaagctgctgcacaaaagcctttgcagagcatgcttcacctccttgttccgcaaagtgtaaatgaatgggttgagcattggagttacgattgtgtagaagacagcaggggccccagctcctgcctcactggagcgaggctgcaggtagatacagacaggtggcacgtagtacaggagcaccccagtgagctgggcagtgcagggggagaaggcccgctgccggccctgggctgtgcggatgcgcaacacagctgccacgatgaagatgtaggaaataacgatgaggatgaggcagcctgcagccacgatgccaatgctggcaagcatgactagctcattaatggtggtgtctgtacaggcgagctttaggacagggggtatgtcgcagaagaagtaggcaatgtggcaaggcccacagtagagcaggcggaaggtgagggaggtgtggattgcagcgtgcgtggcacctatggcccaggtgattccagccatttctgcacacatccttctgttcatggccactgggtagtgcaggggttgacagatagccagatagcggtcataggccatgactgtgtacaggaagcactcagtgctggccagaaagtggaagcaataaagctgtacggcacagccctcaaaggagatcaccttcccatccagagtcagcaggcctgccatgaccttgggcactgtcactgtagacaaacaggcatccaggaaggagaggtgccccaggaagtggtacatgggtaagctgaggtgagagtcagagcccacagttaggaggatgaggagattcccagccacagtgatgctgtagatgaggaggaagaggaggaagaagaggctagaatgtttagcggtgtacctcaaaccctccaggaagaagtggctcaccacagtctggttggggttctccgttgtcatggtcatcttctcacacacagagcggctagtcat

SEQ ID NO: 335629 - DNA, 993 bp, Homo Sapiens
tcagttttggctaactgttaaccccaggactctctttagagcatctttcatgtctttgtttcgaagactatagataaggggatttaagaatggagtcattgctgtgtataccagagtgatgatcttctgcattcctgctgggttccctgatgttgggctcacatacatcaccataagggttccatagaatagagacaccaccattaggtgggacccacatgtggagaaagctttagttcgaccagcaccagagggaatacaaagcacagctctgatgaccagagtgtaagatcccaagatggagaggaagggcccaaagataatcatcgagttgaaggtgtaacagataagctcagtggaaggagcagagatgcaggccagtgcaaacaatgggcctgggtcacacaccaagtggtcaatgatgttgggcccacagaagggaagttgggagataagaacaatagggactggatagcagagaaatccgcctacccagcatacacagaccagaattatacagaacttcccagtcatgatggaggggtagtgtaatggacgacagatggccaggtaccgatcataagccataactgataaaaagaaacactctgttgtacccagtgaaaaaaagaaatagaattgcaggaagcaaccagagaaggagatggttttaatctcagagaggatattgactagcatgtttgggacagtggaggaaatgtaccagatctctagaaaggcaaagtttcccagaaggatgtacatgggtgtgtggagccgcctgtccaatttcactgcacagacaatagctccattccctagcagtgtcaggagatagagaaccaggatgaatgagaagaagcagctctgcatctccctttgaccatggaaacccaggaggacaaactcagtcacaaaatgcattgttctgttctggggtcccaaagctgttagaaaaacagaagtaaccaaagaatgaataataaagaacat

SEQ ID NO: 335630 - DNA, 993 bp, Homo Sapiens
tcactgcctatgagagaagcactttctcccaactagtttcctgagagcccctttgacatctttgttcctcaagctataaattatggggttcaacattggagtcaccgctgtatagaacacagatatcattttatccagttcttttgtagtcttggagtttggtcgcatgtaggtgaatattcctgacccatagaagaggacaacaacaataagatgggagccacaggtggaaaaagccttgagtctcccttccccagactgcatctggataacagtggagataatattccaataagaaccaagaatcagggagacaggggccaggaggattaccacgcccattgaaaagatggccatttctgtgctgtaagtgtctatggaagccagcttcaggagggcaggaggttcacaaaagtagtgattgattatattctgtccccagtagggaagatggaaagtaaagctggtatctactaaagacactagtgccccactggcccaggacctgaaggacagccagagacacacccgttgtgtcatgatggtagagtagtacaggggcttgcagacagccacataccggtcataggacatcactgccagcagcgcacactctgtacacccaaccagaagaaagacaattatctgtgtcatacacccataaaaagaaatggttttcctctttaccaagaagtgaaccaacacttgagggacaatgctagtagagaaacagagatctgcaaaggagagatttctaagaaaaaaatacatgggagtgtgaaggcgagaatccaggaagatgagaatgatgatgagctggtttccaagcacggtcagcagataaatgatgaggaaaaggataaatagcaggatctgggtctgcaagtcctgtgaaagacccaggaagataaacttggacacaaaggtttggttttcttctcccattgatatttttgcctgtttacctgtttggcacaagaaaaaagaacacat

SEQ ID NO: 335631 - DNA, 945 bp, Homo Sapiens
ttattgaattaaaatcctttctgattgtcctagccgtctcttcagtttcctcatggccaacttcatttcctgattcctcagcgtgtaaattataggattgagcaaaggggagatgacagtgaaggtgacagagatggcagtgtctgtggggagggcagtgaagggccgggcatagacatagatgcagggcacgaaatgcagggtcaccacggtgatgtgggaggtgcaggtggagatggctttcctcctgccttccccagtgtgagacctcagcatcatcaagatgaccgtgtaagatatgaggagaaagaagaatacaaaccaactgactaacccattatttgaaatcatcaggagctccagagtgaaggtgtcagtgcaggcaagtttgaggacctgggggacatcgcagtagaaagtgtcaagaacattgggtccacagaaagggagtgggagcaatagagaaatctgcgctatggagtggacaaagccccccacccaggaagccacgatgaggcctgtgcatcgccccctactcatgatggtcatatagtgcaggggcttggagatggctatatagcggtcaaacgccatcacagagagagaaaaaacgtctgctccccccagaaggtggaagaagaacatttgagtgacacagccactgaaggagatggtttttgtctctgatagaagatctatcaggaccttaggagctgtgatggaggaaaagcagatgtcaagaatagacaggttgcggagcaggaagtacatgggcgtatgaaggtgagattcacaggtaactgtaaccatgatgaggaagtttcccattagagttgtcatgtacaccaaaaacaggaaggtaaataagacctggctcagttctcgggactgagtaattcccaggaaggtaaattctttcactctggtgtaatttctctgatccat

SEQ ID NO: 335632 - DNA, 1000 bp, Homo Sapiens
ttttttttttttttttttttttttgtcataatacttttttttattacaatatccaaaaaactgggtatgcaagtttaggggatctcaagaccccttcttcaatcgtaggaatgtgccatctcaagacgttatatttaaactataaagaagttcaaatgtaaaggaaaaagaaaatgcaatttcttcataaacattctgtgtgtctcttactaccaatcacatactcttttgtaaaccctgaaaaatttccctgtaaataatatatatatatatagtgtgtgtgtgtgtgtgtgtgcacgtgtgtgtgtgtataaagtgttggtagctcccttccccaaagatcagctgttttccttaatcatctgtattagtgtcaacaaacggctacagatacatatttctttgagaattaaatacataattgtgagattcaaacaagccgaagggcaagaggaaaaagcactatgtggatggcacatttggggtaaattaccaaaacatctgtctttctgagtcaccggttccctcttttgcagactgcctttccaggaaattctttattgcaagcacagccccaaaggcactgggcagtctcctcactgccatcgcacccggtggttccagtattgctatcagcaaacgtatcggctccctgcacagtccgggagccatgtaagggcacaggacatgggcgagggctgctaggactggggccatcgcacctgctctgcccagcacgctgagtgcccaggacacgggcgctgccgctgggtggccttaggctcgctcctgcgctcacaggtgccctgcgtctttttaaagaggggttccatgagcgggaacgagttgaatgcacgagcgccacttccgatggaaaaggaataatgtgaactcgccctgctcctcccctcctctaaagctggccggccgggtgggctcgagtgtgggtgtgaggcctggatggcaaatgggagacgaaccgaccaagcgacctgaacat

SEQ ID NO: 335633 - DNA, 1000 bp, Homo Sapiens; identical to SEQ ID NO: 157440

SEQ ID NO: 335634 - DNA, 951 bp, Homo Sapiens
tcactgtttccatcttcttgagattatttctttcatcagaatttttcttaagacacttattacttccctatttctcaggctataaatgaaaggatttagtaagggaactactattgtaaataaaattgcagctggtatatctttatccccttcttcaagcaaatttggtctaacgtacatgaagaaaagagatccatagaataatgaaactgacaaaaagtgggatgcacaggtagaaaaagctttggcccttccctctttggatttcattttgaaaatagtaagaagaatatagagataagatattaagacactacctatggtaaagacttgaactgaacctgagaagatgaatagaaccagttcattgatataaggatcaacacaagagagtctatacaagggaagaatatcacagtaaaagtggttgatgtgattcgatccacagaaaactaacctaaatacaagccctacatgaatcatggaatgcaggtttccagctatgaaggcccctgtggtcatctgaatgcagagtttcttggacatcatgatgtggtactgcagtgggttgcatatggccacatagcggtcataggccattgctgccagaagaaagcagtctgcagtttccacagtgcaaagaaaataaaactgtactgcacattcatagagggaaatccttttgttctcagaaaagaagttctctaacattttgggggtaatagcacaggcacagcaagaatccacaagagccagatttcccagaaagatgtacattggtgtgtgaagccgacggtgtgtaaatatcagtgccaccaaactaatattccccaccacggtgatcagatagatggcaaagaacaccacaaacagcagagtcttcagctcagggtgatctgtaaatcctgtgaggataaactcatttttcatggtatgattttcttcagccat

SEQ ID NO: 335635 - DNA, 1000 bp, Homo Sapiens; identical to SEQ ID NO: 159526

SEQ ID NO: 335636 - DNA, 945 bp, Homo Sapiens
ctacatatcctttcttgggaatactcccaagatgctctcacggatttgcttggtcttgacaccatagattatgggattgaccatgggtgggaagagcagatagaaattggcaaggaggatgtggacatgaggggcagcatggcgggctacacggtgcatgactgaagagatgaccacagttgtgtagaaggctaagatggcacctatatgagagacacatgtcccaaatgccttgtagtgggcctcctgagaggcaagcagtagaactgcctgaagaataaagatataagacaggataacaaggagcaggtccaacaccacaataaacatggccacagcgatgccatagatattgttgaagctagtgtccccacacgccagcctcaccacagccatgtgttcacagtagcagtgagcgatcactgggcctcggcagtagtggaaacatctcagcaggaaggggagtggagtcattagtgtcacagcccgggccacagcagccatgccaatcttggtgatgagggacccagtcaggaccttggtgtagtgcagtggcttgcagatagccacatagcggtcaaaggccatggccagcagcactgctgactccatgatggagaaggagtgaaggaagaacatctgggccagacaggcaaagaagtttatctcccgatccctgaaccagaatatggcaagcattttgggcagtgctgaggaggaaaggaccaggtcgatggctgccaacatggccagaaagaggtacatgggttcatggagggctgcatcagcctggatgatgagaaggagagtgcagtttccaagcagggccagtgtatatgctaagcagaaagggatggagatccagatgtgcaggtgttccaggcctggaatccccaccaacaagaaggcagttggatgtgttaaggtgatattggaggctgacat

SEQ ID NO: 335637 - DNA, 853 bp, Homo Sapiens
tttttttttttttttttttcccgtttaaatgccctttattccttctttattttccaaaaattaaactccagattccttagcacagggtgtcaagccttccagaatccacttcaacttctttctccagagtcagctctcacaccctgcctcccacagtctgcaattcaaccacatggttcggaaaggcccccaccaacccccttttctgtcttcatagctttcacatgcagctcctcctcagtgtaccagtatgtgctaggctctcttcgtgacttctccagtctttgtttggagaaacaagttgacacaggactgcactggatgataaattttcattctggaagcttctgtaaatctcgtttaaatcaggataggccatcaggttaatcctgctgaacaatgcttccagatgtgaccagccaaatgtcttctccagttcactgagtacacaatacatcactcttgtcactgggaccaggtttctaaaagcttcttgaaaatgttcatacatctgctcggagatgaaggagcggtctcggaggcccataaggaaaggaaatggccttgttattgcacttgcaatctccaccttgttttctctgaagaacctgaaaatgggctcagggcaaacctgctcctgcaggttctgaccctctacgttctggatctctgcgaccatcctgaagttgagattgctgtctccacttgccatctgcccctgctggccctgctgggccatgagcttggcctaggatcacacccgattcgattttcactgccccgttccttcctgcagctctgaggtgaagctgccaactgcccctcggtgctcagtcaaagaggaaaagaaaag

SEQ ID NO: 335638 - DNA, 978 bp, Homo Sapiens
ttaactactgaaagccccatttccctggggcccacttcctctgcaatgtatggtctttctgagggctgcctttacttcatggttcctcagacagtaaatgatggggttgaggagtggaacaatgacagtgtagagaacagataccactttgttggaattgtaggcatacatgagtttgggacgggcataggtgaaaagtgtcatggaatagaagagaattacgacggtcaggtgggaggcacaggtggagaatgccttttggcggccctgagcagaagggatcctgaggatggtggcaaggatagcagcgtaggatgccaccacaacacaaagaggaatagcaatgaccatgagggccaagaagaagtccaccatctcagcctgtgaggcatcctcacaggagacgttaaggagtggagagatatcacaaaagtagtgattgatctgaggcatgccacagtagtgaagttgtgctataaaaaccatcttaatcatggcagtcatgagtccacagaaccagcatcctccagccagtgtgccacagagctggttggtcatgatgactgggtagcgtagtggattacaaatggctacatagcggtcaaaggccatgatagcaagaaggatgtactcagtgcagacaaaggtcacaaaaaagtaaagttgagtcatgcagccattgaaggaaatactcttgtcatgactgaggaagtcaacaagcatcttggggctgatgactgtgacataccacatctccaggaaggagaggtggctcaagaagaagtacatgggcttatgcagctgcccatcactgtggatagctaagatgataagaagattctccagcagtgtcagcagataggttgccaggaaaatggagaaaaagagaagctggaaggctggtcgtgttggaaaccccagaagaatgaaacgtgttgtcactgtatgattatctacttccagaattatggtggtcat

SEQ ID NO: 335639 - DNA, 939 bp, Homo Sapiens
tcatggacaagagtcggccctgctgaggagtctttccagggcccccttcacatccttgttcctcaggctgtagatgaaggggttcagcatgggggtgaccatggcgtacatcactgaggcggtggagctgctctgggaagaatgggtcacagcagaactcagatagaccccaagtcctgttccatagaacaaggagaccacacagaggtgagatccacaggtggaaaaggctttgtacttgcccttggtggaggacattcccattaaggaggagacaatctgagagtaggagaagaggatcccagctacaggaaacacacccagcagtgccgtggccacatacaagacaatgttattgaggagggtgttagagcaggccaccttgaggacctgagccggttcacagaagaaatgcggaatctcagtgcctgtggagaaggtcaacctcttcatcagtagaatatgaaccagggagaaccagaaaatgatgaaccaagatgccagaaccaggaggccacagaggcaggggttcatgatgaccgtgtagtgcagtgggtggcagatggccacaaaccggtcataggccatcacggccagtaggaaagtatccattccagcaaacatcattaaaaaatacacctgagtgaggcaccccatgtaggagatgtctttgctccgtgcctggatgctcactagcatcttggggactgtggtggagatgaaacagatgtcaacaaaggacaggttggagaggaagaagtacatgggggtgtggaggtgggagtcagagctgacggccagaatgatgagcaggttccccagcaccgtgaccaggtacatggacaggaacagcccaaagaggacgggctgcagttcaggatcatctgagagtcccaggaggagaaattttgataattctgtaaggttttctgcttccat

SEQ ID NO: 335640 - DNA, 1000 bp, Homo Sapiens
ttttttttttttttttttcagattgttaatctacagattttattttttaaaatttggatgtaagtagagactttcagtatttgttttctcttgattttgaagtcatttcttcttctcacgtctgtgacaaatggttgaaaaggagtcaacatggccccaactatagtgccggaaccttttcatcattctgaggctttgccccacacatggtcctcactcatatctgtcaccttctgaagcctagatcttgttaacccatcaggtgcagtgtcagtttcaaatcaaattatcttccactattttcatctgtattgaagctgagatcttcagggcctatttgttcaccatcaggaaaactggaatgtgtatcttcatccgggggctgtgtcatgaccatgaaggagtcgtgaaacccgcccacactggtatgctcttcctgctcctcattctcagtgtcacattcaatgtcactgtcgctactcattccttcttcaggggcagctgaagctccttcaggtagtacaggctgtaactctccagtttcagaattattttccaaatcagtcatctgcagtccttccagatgacctcctttagcattagcccccaaggtgaccattttcctccttttctcaaccgcaggcaagccactgaaaactgcaaccacaacagcatctgaatccaaagctttacactgccggtcttcagtttttggcagaatatcaccgatactgccatgtatcaaggctcggggagaactgtgcctgctcccagactgagagcttcctggggagccttcagacagagtctgacagtctccctttgaacgactattttctccagggtccactgctcttcgaagtgatagactacctgctacactggatcgagctggcttgggcgaattactcttcttatttgtggagtttcgtatgtaacaattggcaactgatgactttgccaggagttccattcccaaatcctgcaatctgccagagtt

SEQ ID NO: 335641 - DNA, 1000 bp, Homo Sapiens; identical to SEQ ID NO: 157441

SEQ ID NO: 335642 - DNA, 1000 bp, Homo Sapiens
gtcaggattatagtttctaaaagttcctctccaagtatttaggttgctggcctggcttgtagagaacaacttgagttcaccatccttggtcatcacagaaggagagagcagggcacagttctgcttcggatgtcacagggccagggatttgtcccagatgctgtaagaaagattcaggggacacaggttcaagtacttcaggtctagcaaagtttctgaagactcttttggttgactagctcagggaagcacgagtgagggatgccttcctggaagatgacttattagcctccttcattcctttcaggctttccaggaggatgggctgatagaataccgctggagcttggggcaagggaggtgtggaaagcccctgttttaattctcctcctggccagacttatcagcatgttggactgtgccttgatgttcttctcctaaactgcagaggttctcacctatagctttcttgctctcttagtatctcttgcaacacacgcagcagggcttgagcaggagtggttaacacagcttcctttcttgattcccaaagatcttacttttcacatgactgccaccatggccaccattgctgatgttttatctacacattgtaaagcaggagtctcctattcaggtgttacctgtgtagtccctgtttcagagcctgcaatttgccctaccgtgagcatagttcaatctgtacagcagatgggtttggccgccttctatttagcttatccactagcacattcatggatgctgaattccagggccccactacccagccttctgaggcattctcttccccaagcacttgagaaagcactggaaagagaactgtgttagggttgagccccaaccttgccacatagcaagtcatatccaaccttgagactttttcccccatctgtaaaacaggattactgatgtttgatttacctcctgcacagggatgtgaaaagtcaaggagaatgatgcaaaaatactcatgaactat

SEQ ID NO: 335643 - DNA, 1000 bp, Homo Sapiens
ttactgacatttcatcctgtgcatcaactttgccaaaccctgcttcatgtctttgttcctcagactatagataaatggatttagcataggagtcagtacggtgtagataattgttgctatttgatccttgacagtatagttggacaggggctgaaaatagacatagctaatgcttccataaaacagggtcaccactgtgagatgagagccacaggtagaaaatgctttacgctttccagcagctgaaggaatcttcagaacagtgatgaggattcttaaataagagatgatgatgcatgaaaacggggtcattatgacagccaagccttctgtcattactgtgatttctttgacaaaatgggaggaacaggacaattttagcactggttgatcatcgcagaaaaagtgatggatgacattggaggcacagaagatgagctgattagtcagaagaatgtgcaggagggagtgaaaatgtggaatgcagaaggagagaaccagaagcaggacacagcatctgtgactcataatggtgatgtagtggaagggattacatatggccacatagcggtcaatggccatggctgctagcaggtaactgtctgtgtttccaaaggctaagaaaaagtacatctgggtcagacactcaccgtaagagatggtctttgtctctgataagaagttcaccagcatcttagggataatgactgtcacatagcaaatgtcaacaaaagacaggatgcttagaaagaagtacatgggcgtctggagacgagtgtctgagcggatggccaggatgataagcaggtttcctatcactgtgataaggtagatggggaggaacacagcaaagagcggcttctgatcctcaggtcgagaggagagtccaaggaggatgaattcagagggtcttgttaggttatttcttcccatagttgtgggttcacctaaagataaactaacactgtaacagattcttccaacatctgatacaatctgt

SEQ ID NO: 335644 - DNA, 1000 bp, Homo Sapiens
tttttttttttttttttttttttttttttttttttttttttttttttttttttcattttgtatttaatattatcgaaggctttattaatgccttaaaaaacacaaaaagttctgaacacacatttattatctggaggaataaatgcactccaaatgcttatcatcagaactctggaaaaagacatataaattctctccagtattttaaaaattggtatctaaataatttcattttgaactaggttagcaacctaagttgtcttcattcagcttttaaaattgaaaaaaaattgcttcaaatataataaagacttaagtacacattcaaaatttattttctgttacagttttcttgccaaaaggagttgaagaatttttttgcttatcttacttaggacaaatgttgtcagattaaaaaaaaaaataacagaatagtagttgtaaagactaactctatatgaatggttttaatcatagcgcagttaaaacaacatttaatgtagattcatttcgctggatgatgtcaaccatttaaaatatcagtatttctcatatcatttctggatggtcttgacacattcttacatcttcttcaacatgacttcttcacttttcttctctagagttttcttgagttaaaataatggcttgaagaagatcatatgagatctagtggctctgtgatatttcttaaatggtgggcaaggctgggctggctgataatgtaactcattaacatgagccgtattttcagtgccccaggctggccaggcagtctgatagaaggccttagttcctcttgcagataaagatagagtccattctttcactagtccagggcagtggccaaaaaagtccaggaaaggcattacatagaatgccatcgtttagaagagatttggatttaacggcgttgttataggtaaagtatctcctgagaaaaatctcattgactcagtgtttgggggaacgttaaattttatcatcacagttgcctttc

SEQ ID NO: 335645 - DNA, 1000 bp, Homo Sapiens
aactgagccagtgaacggcacctttattctgaggctgaacagcagttgacttcctccctcataactgctccaccctccacgtggggagaggtaggggacggtaacatgcagccacccctcctcgtcccttcctccctcccagggctcattttcatccctctctaaagtccccctcctctcttcaaagctctcttccccacaaaagttcctaaaggccaggcaaggctgattctccacttccacatgagacagagctgattctgcagggaaacggctggggaggctccacctctttcctccccacaaccatttactgggaagttgtgtatacttggcagtgtgggaggaaggtacttggaagaccctgccagccatctcccacccagacttcttctcaccagcacagtcttcaaggcttggtgggaaaggtgtgtgggagtggagaaagacaaagggcccttcttgaagagaggagctgcagagaggggcaaaggggttcctagcccagtgatggcccaaggggtggggaaggtggagggctggcagcaggccccagcgcttgagctgggggtcggcctcggggacggggcctgggtgaagggcaggcctgggatccagtcagtcgtctatacagatcacctccccggctcggggctccttccgatccagcccgtctgacaccaatgcccccaccatttccttctccttcttcacaagcactggagggccgttggtggcggctgtgatgaaggaccctgcaggcatctggctgtaattggcgcctgcggcggccagggcccctacgggtgcggcgctgaaggccgccccgtaccccggaggtgtagcgtagggacccggcgggtaggccggtgtggggtgaggctccgtgcccttgctggccagccggctgaggatgctgcgctcggacatctgaaggcgggctgcgatggggggtattcgggacagcgtggctggcaggcgggtcacgtccgccttcatg

SEQ ID NO: 335646 - DNA, 1000 bp, Homo Sapiens; identical to SEQ ID NO: 335645

SEQ ID NO: 335647 - DNA, 987 bp, Homo Sapiens
ttaccgcctatttgttgccttagaactaggaataaatatgttcagtgtgggagatactctttttctaactatacttaacttttcacaccagagatttttcatagcatttttcatctctgattgtctcaacgagtatattaaaggattcaacatgagtgtgataattgaataaaacacagtcattaatttatcaaagggaaagttggaaacgggtctaacatacataaaaatacagggaacaaaaacgagggcaaccacaatgatgtgggagatgcaggtaggcagggctttatgcctctcttcctgactgtaagttttaaggaagtttaggatgactccacaggagattagcagaaaggtaaagatgaccatacaaattattccaccattggcaaccacagtgagtcctataaagtaggtgtcaaggcacaacagttccaacaatgggtacatgtcacagacagagtggtcaataacattggggccacagattggtagactgtacagaaagacaatttgaaccacagagtgcacaaaacctccaatcatggccaccaccaacagaaggatgcaaaccagtcgattcatgatgttcaaatagtgcagcggcttagagatagccacatagcgatcataggccatcaccaccaaaaggaagacctctgcaccaccaagtaagtgttctatgaagagctgacccatgcaagctgacaaggaaatagcgattttatcacagagtaagtctatcatcaatttgggtgacatggcagtggaatatatggcatccataagtgacaagtaggcaaggaagaagtacattagggagcccaaggaggggctgccaatagtagtcacccaaatgaggaggtttcccaccattgtcacaatgtatatgagtaaaaacatgacaaataatgtttttttcacatcaggatcttgagtgaggcccaggaggacaaattctgtaacattgctgcttggtctcat

SEQ ID NO: 335648 - DNA, 1000 bp, Homo Sapiens; identical to SEQ ID NO: 157442

SEQ ID NO: 335649 - DNA, 1000 bp, Homo Sapiens; identical to SEQ ID NO: 157444

SEQ ID NO: 335650 - DNA, 942 bp, Homo Sapiens
ttagtatgaaaccttaacatgtttttttaacatttttgtgaatgaaactgtgacttgcttatttctcagactgtagatgataggatttaacaaaggaatgatgacagtgtagaatagaggctccaccatatcttgatcatctgcttgcggagatgcagggcccacataaatgaagagaaggggtccatagtataaagagacagagaagagatgggctccacaggtggaaaaggctttccttacacctttatcagatttcttttttaagattgcgaagagaacaaatgtataagatacaagaatagtcacaatgctgaatacctgaattgaacctgagaaaataaaaaccattagaaaattaatagaagaatcagtacaagaaatcttagacaatgggatagtgtcacagtaaatgtgatgtactatgttggagttacagaaggttagtctgaataaaaatccttcatggattaaagcatgaagaataccacctacatatgacaagattaatagccggatgcacagtccattggtcataatggctggataaagtaaaggtttgcatatggctacatagcgatcatatgccatcgttgccaagagaaaacattccgtggttacactgattgcaaacgaaaaaaactgtatcttgcattcagagagagatatcatcttactcttagctaagaagttattcagcatctttggggtcactgtggatgatatccaagcatccacaaaagctaaattcccaaggagtaagtacattgggatatgaaggtgagggtctttccagatgacagcaatcagaccaagattccccatgatggtgatgagatatattaccaagaatgccaggaacaggggtattttccactgtggttgatataaaaatcctgtgagaacaaactctgtcagcaatgttgcattttcctcttccat

SEQ ID NO: 335651 - DNA, 910 bp, Homo Sapiens
tttttttggccttacatgaggtttaattaagctacaaaatgctcgacgtgtccagtgttgaaggaatctctgttttgtaaactaaaacttccaagttattattattctttttttatgttagcttagccatcatgcaaaatttactggtgaagcagttaataaaacacacatcccattgaagggttttgtacatttcagtccttacaaataacaaagcaatgataaacccggcacggtcctgagaggaaattcctttgcttcttaaagctgccagtcccggctttttgggggctcatgtgttataaattctggaagctcttttagctgcagtttgagcatcaggcaaatcttcttcctcttcctcggttcgcttgtgttttaaaaacaagtcagactttaagaagcggctgtagctgtcgtacttcatgagattaaagatctggtcctggagtttctggaacatcagagggtgcggttcttccaggatcttctcgttgagccgagactgcccctccacgttgacctgtgatgaggccttgctggacagaaaggtcatgtagatctcctttgccttttcctgcatctgcgtcttatcttgcattttcttaaaatcttcacatgctagccaaaacaaaacattttcttcactgaattccttttttaaaaattccctaaatcttttcacgccttctgggtcttccagcagattctccagggatgccgcccatttggctgtgctcttgaggctctggtggctgctgctggaactgccatcgctgtcgtggatgtctgacggcggccgcttcctgctcagccggctcacggcgcggttgaacatcgccgcgggcgcccgaggaggaagaaggagcagcccggcggcgcggcggctgagccggaggaaggcgaggag

SEQ ID NO: 335652 - DNA, 1000 bp, Homo Sapiens
ttttttttttcttgtctcttcccacactttatttttcaggaaggagagaaaaagaatgtcatgtctaacatatagtagatggttttagttacaaacagaggtgaaatccttactgatcaagttgccatgaaaaaccagggacctcatctttggaaagtcttaatatatgatttcaaatatgtgcagcgactgtacaaaaatttggaaatatacacaagagtgtcactcagcatcatgcctggtatataaaaagcactaactaaatgtccatggaataaatgaatatatgaatatcattccttcactcagccaagcaaagtaggttgtcaccaaaatactcccacccatttatgagagtagtattttttctgagtctagcaagtgtgcacatcataccacaggcttgggcctgttattgttccatcaggagttcatgagtgtgtattgaagtgggattcagttagcttggaacatgatcttagaaactggactacattggctttatgcatacagttacatggaaagctgaaagtatcccgcctcttcttgcagttaacctgggttaggctctaatcaatagtagcttctctccttactctcgggacacagtgtttctatcctactagttacctaagactttataagtgaaacataaaaaataatgaaaagaagccttgctaagttgcttttatcagtttcacaacatggctgaagctgcctgcagtataatccctctccccatctctaaaatgacatttaacctataaaaaattcaacttccccaaaccacaatatctatttaacaataatctttaggaaaaaaaggttaatagccactccagcacatctcacatcaatggcactgaaaagtgagcttcagaaacaaggtcgaaatttaagaaactcctttaaattcttggtttttgagtagcggatccttttcctggtttcccgggaagaacacggcttttgcacggttgagaaagacactcaggccttt

SEQ ID NO: 335653 - DNA, 1000 bp, Homo Sapiens
tttttttttttttttttttttttttttttttttttttttttttttttttttttttttttttttttttttgagctgagaccaggagaaataactttatttgaataggacccaagacagcatattgggctaaggaggagaggtaaggttccaaaaccgcagtcaaagctcatcaaccaaatggactctacttcccagcaaccttgcagttagtgcaaccaacaaaaggcctgctggggaatgtatttgccactaaattccccaagtatgccaacattacaaaaaagataggtttttcatcataattgaatttccacaaacctccccaatcacaagtattataagtggaagtaaaaaatcacattttacagatctcaaacttgtcttcaacatttagttcatcatcttcaaaaaatagctcccctgcctaattcattagctatatgatctaaccaagcagcaacaagatggccaggccatggcaatcctcttcccatttcccctagccactcagggctcaacagcagggtgaggctcaggtggaggtagggggtggggagcacaagggctacattcccccagtacaacatggcatctgaagcttgatgggagagcagaactggtgagacttgagggaagggtccagggcctgtattcagtcagaatcactgctggaagaggaggaggaagaggaggaatgcttgccatgcttgtggtacttgtggtgcttttggtgcttgtgcatctttttatgagctttcttcattttcttctgcatcttcttgtctactatcactgctggtccaaccatgccaggagccaagggattcacaggagggattccaggggcaggcggtgggtatggaggagggtagggacccaacggttggcatcctggataccctggctgtggcacaggatgagggggcccacctggggggaaagctggattgccatggggagctcctgggggaggaggacaggggcctgggggaaagggtgg

SEQ ID NO: 335654 - DNA, 1000 bp, Homo Sapiens
ttttttttttttttggacttcaaaacagtgtttactgactctgggcttaaacttctagtccactcctagaacagaaaccctcaaagttcaagagtggttttttttgtacaattgtttatacaaattcaacaaaggtaaaatcgcatcagggaaggtctaggaaacaccaccttacaacaatggcacttataaatgcagaactttacaactaggaaatagccatgttacaaacctaaatgagaactcaactcacacttcagaggagagaagcaaaagcaaaagaaaggctatgtgggagcatttattctacgtcttgactcactgtataaattagatctatgtaagtacaagagctcatgctggagcagaacctcctgagtgcaaaggctgaagtcgaaattttaaaatttgagaaaagtgaattctctacagaggaaacttggcagagtatcttactttgactataatttacatttatccacaacatgctcatgtaactcttgaggtacaaagcagactctcaacttccagttaaacatgcttttaagtggaaggtcttagcctactttgttagatctgggcacatttgtagatgggttgtgtcgatgaagtacacgttaaattctctcctaccttaaggaaatcaggaaaattggcaatctcaaaacaataaaaacactggtatgcattcaaaccttgcataaataacttttaaacaatttgtacaaaaatagttctgcataatgtaagatgtaacaaaaccaaccaaacaaaaaaaagtgtcaagacggcagcagatgtggtgtgtggtccactttatgtcaacacccaaaacctcggtgttgcaaggaatgaagtgtccaaaacaccactaccactaacagaaactcctaagctcatgcttcagtatgagaatttctccgaagtccaccctcctctccgacaggaatgtcttcttgtaaaggccgccttagaaatggtccagaaagcagtgcagtta

SEQ ID NO: 335655 - DNA, 1000 bp, Homo Sapiens
ttttttttttttttttttaaagaacaatgtctttggaccccttgctgagcctggacaggcgcagaaattcctggcagctgggaggccgggggagagaggacagcagggaggatgtcccagccctggccaggaggccgaatcaagggagaggagaaataaggaggacccagctgcttgtaaaatagtcttcccttttattttaaatcaacccttttccaagttagtgccacgagttgagatcagggggtcagagcccactgggatgtggcaggggcagcagggggactcatgtcccccacccccagcttagtccctccaaggatgggaccggcagccagggatgaagggtgcgaggcgaggctgtctgccccctcccctgccagccctactccctagtctgccccctcagctactcccaaggccaaggacagaaatgggagcacagtggccaagagcagggaggcggtcctgtgcaggctgtccatggccaagagtgttagtggtcagagcccaggcaggctgggttagtggggtctcctccggcagccagggaaggaacgaagaggggagccaggctccagtccagccgggaggaggggctcagatagacgactgccactgcacaaagcgcttggattcctgggtgggaagagggcccaggctcggggcaggctgcagagggcagtggccagcgctcctgcagacagcagggagaagagtagcaggaagagcaggccttccagggcgtcttcgcacaggccccgcagggctgcaccatagtccttgtgcaggctgcggcagtgtagcagtgccaccaactggtggaaatttccttctgtcacattcagagtctcctccaaggacagcagaggcttctgcgctgaagggaactgaggcacagcttctcgctccaggcccagcagctgggagtggatgttggccagagctcgctgggacagagtcagcctctgttggaaggggttggagacggcccggttgc

SEQ ID NO: 335656 - DNA, 1000 bp, Homo Sapiens; identical to SEQ ID NO: 157445

SEQ ID NO: 335657 - DNA, 1000 bp, Homo Sapiens; identical to SEQ ID NO: 157446

SEQ ID NO: 335658 - DNA, 1000 bp, Homo Sapiens
tttttttttttttttttttttttttttttttttttcgcactgaagacaggtttattgacactcctgcttcggatcgagctacatggggtaaggagggacagttgtggagagcaggagggccccggggttctggggagcagcagagagggagacccagggttgctggtgccactgtgagcacaggcctgcaccacacgccttcccaggaaggcctcccctcacccagccaggccctcctgctcccttcccacatgcagggtgggacgggcctgtgcatggcccccagatgaggacccaagctcctgcaggggcggtggccttcagtcaagacagctgggaggcagcagatccgtgattaggctgggacgctggctcccaggctcgggtggtggtgcagcggcctctccagccccagcccccaggaccattcagactggtggtgtcatggatgaggagcacctctgcctggcccagacatgcttggagcttaggatgggggctcctgggcagtggggaaggggcccagggcaggggggagcctcatacgagtctggctggcacaaggctgagcaggagcccggggctcacagtggccgaggcagggctaggaccaggcccaggtgggcgggcagcactcagctgctgtggtagatgcggaggcgctgggcgatgtcctggcggcacagcgggcaggtgcgcagtggctggcagcactgctggcagcagcagacgtggccacagttgaggaagatcatctgggcctcccgttccaggcacacgacacactctgaggcctgcacctccagctctgcagggggagcggatggcctcacagactcaggaggctcctggggggccgtaggggtgacgacctcacccattggtggtttcagctctggctggatcctggctgcatccagcagttcctggactctccggaggatctcgtgctgcaggccagcttctgagacgcccaccttggccaggtcccctgggctca

SEQ ID NO: 335659 - DNA, 1000 bp, Homo Sapiens
ccagccaatttttttttatttttagtggagatgaggtctcactgtgttgcccaggctgatcttgaactcctgagctcaagagatcttcctttctcaccctcccaaagtgctaggactacaggcatgagccactgtgcctgtccttccatgatgttttgatataggcacacaatgtgttagtttataaagtttgtaataatttatcacaggcagccctaggaaactaatatagccaagtttcctgtttcttctctatatcacatctgctggggctacatgtccaaggtggcttcttcacccacttgtctggtgcctgggctgagatggctgaaacatctggggctctatctccacatggcatttatacatgagtagcttgggcttcctcacagcatggtggtctcagggcagtagtacttttacatggcaaccagcttccccagagtgagcgttcgtgagtgccggtggctaccagacattgattcatggggcctcggcagtcaatgaggaaagtctcttcagaggagcatccatgggtgctgttccccttgcagctgtaacactggcggccattctgcggcagattttcaagctccaggattgggccctcgttgcatttggtggtgttgcagcatttcaggaagtggaaggtgtcgttgttgtggaaaccattggagcccgggcagccgggaaggtagccacagccacggaggtggcggtcatcctttggacgcccttcttcaccttcctggatccagtgggtcaccacatccaggcactgttcttcagggctgcggcactgcaggctctggtgccggcccctctcacagctcatgtctgatgagccacaggaaatgcattcgaggtaacggcttcgggaataggtgacagcccggccagagttgccctggttgcacaagtctaacccacacacaacctcggtaaggctggtgatcttcaagccagtccgatagctcagggtcctgttggtcttctctga

SEQ ID NO: 335660 - DNA, 1000 bp, Homo Sapiens
ttttttttttttttttttttgactttgaaaaaatctgattttattttctcaatcaaaatgaagtatttcatgttaatttagactgtttagctttccactgatatctcaagatactttccagatattaacagtactcagaactgtgtaaaagttaaccaccaaaaccatgttttaaagaaaaaagtttaaatgtaagactaatgtcttggggactttactaaatgtatttctaaaaaaacccttctcaaatgtagaagtattggcaattctaatttaaaaattttaaatttttaattattggaaatttaagtagcaatagtttcaagagctaagaatcagattgctttttaaaacagaatttttttttttcctgagggactcatacttgacaactccagttaaacataatactccacccaaatcccaaatttaaatgcattatgtcaccctggaatagtaaaattataaaatggtatttctaaattataatatatatacataatgcaccattttaactgtcacatttaccagcagaattatgaaatcaaaaacaaattctacattcaagggacaaacgataaatgctctttcattgttttaagagtccattccattctttgttgttttctactcccatattttaaaattatgaccaaaggagcctgaaggccaagtcaatcccatttccctgaacccaactgccagtaggtacgggccctacatacgcgtcctttaacaagccccgttctcaaaaggctgggggtatttatataagaacttattccaaagtgactctaagatccatgttcccaagatctagtacgggctattcatggttctgaggcatgtccagcatgcaggcaaacttatctgttcaaattgaggtaaaacagacaaaaaacacttaatattaacagaagctacataattaaaactaaccttctgctgcttatttaagctaatgatgtattcttaccaaacagagaccctcaagtcaatc

SEQ ID NO: 335661 - DNA, 1000 bp, Homo Sapiens; identical to SEQ ID NO: 157448

SEQ ID NO: 335662 - DNA, 1000 bp, Homo Sapiens
tcacatggcaagagtccattttgaacaacttttattatacgtttagtgttctctatacaaaagaaatcagtttttttacagtgattcaaaaaaaattcagaataatttggccttttcattgctcatgcagtcagtttataagtccatgtattagacggccctccatggcccagaagtcttccctgctgaaggtcgtgtgtgacaccctcagatacgcatctgtcactgacaaagttggttaatgcaaaataactcgcaaaaaaggaaagaacatgatgtgagaggggttaaaacaaggtctggcatggagttaaatgtttaaccaatggaaaaaagatcagaccaatttgtgtgtgtgtggatatgtaggaagggatggagacgctgggaaaaaaaattccccacgggaaagaacaaattggaatggtgggggatatgggtgtgtggtgggggcggggcaggaggtcctccggggtccagcatgggtcgggagtgggagcaggacagaaggtggccacgtcacaggcgactgatgctcagctcaaggggagtgtgaagaggttggcaaagagctggggagccgggcagagggacaacactgactgaggacattgcagttgggaatcagaaaaaaaggggcagctcaggggcatctgatctgcctcatttttgaaaaagaaacagagtaatgtacaaaattctggatatcttctcccagagttttgtgtttattgcttcactgaagtctttacatctgttgaactccagcccagcaaatcccagggtggcagcttgcatgggccctgctgcctctctgcaccctgtggccatgggcagaatggaccgagatgccctcacttctgaggaatacagcacactgaaggcccgatgtgttacaaagcaagagacaccattctacggggtacggtctagggttcacagtaacaaacaccaatcagctatcctattccactggcccagatctgcccttaattgcatg

SEQ ID NO: 335663 - DNA, 1000 bp, Homo Sapiens; identical to SEQ ID NO: 157449

SEQ ID NO: 335664 - DNA, 1000 bp, Homo Sapiens; identical to SEQ ID NO: 157450

SEQ ID NO: 335665 - DNA, 1000 bp, Homo Sapiens; identical to SEQ ID NO: 157451

SEQ ID NO: 335666 - DNA, 1000 bp, Homo Sapiens; identical to SEQ ID NO: 157452

SEQ ID NO: 335667 - DNA, 930 bp, Homo Sapiens
tcactccctccctggattctcctttttgctccacaatcttcttatggcgattttcacctctgcattcctgagtgtgtaaatgatggggttcagcatgggggtgatgaccgtgtagaatacagccacaagtttatcttcagtgaaagtggaagaaggtcgcatgtagaggaagatagcaggtccaaaaaacaagatgaccactgtgatgtgagaagcacaggtggagagggctttgtgcctcccctctgcagaatggttcctcaagttgaccagaatgacaatataagaggacaccaagatgaggaaggagaagacagagaataatccactgttggccaacacaataaccccctccatgaaggtgtcagtgcaggcaagcttgaataaaggctggaggtcacagaaatagtggtcaatcacattgggaccacagaagggcaattggatgataacgagaatctgaattatggagtgacaaaagccccccagccaggaaccagccaccagaaggtgacacagttgacgactgataatgttcatataatgaagaggcttgcaaatggccacgtagcaatcataggccatcaccacaatcaaaaggatctcagcaaccccaaagaagtggaagaagaatatctgagtcagacagccttccagagagatggttttaatcttggcaagtaagtctatgatgaatttaggggcgatagtggaggaataactgatctccaccaaggacaggcagctaaggaagaagtacatgggagaatccagactcttgctgatactgaccgtcagaacgatgaggccattgcccaccaccgtggcaaggtacacggggagaaacaccacaaagcatacactctgcacagctggatcctggaaaaggccagtgaaaatcaactcagtcacattacttgtactggccat

SEQ ID NO: 335668 - DNA, 1000 bp, Homo Sapiens
ttttttttattggtaccaggactttattaggcatttcactgaatacaaataaacttttattttttacattaagaacacaatcttatttaaaaaattcacattttctatacagactgtagccatggattttctttacaccacatttattaaagtatcaataaccagatcctaaaaagagaaggcacagatctgtctctctctggtgaatttctggtgtctaatgaaggaaatgtcaccagctctgcaaattcccatcctccagaaatgaagcaaatcaacacaaatgtgtgtaagcaggagtcatgagatggacatgttatattaaaggatttggattttcctctgccacttataggaatttcaggagaggaggtagctactgaaaatgtttcaaaattccatctgcattcagtctctgtcaaggattcactgttggaaacagtagtatttgaaagctagaatttaggaattccaacatggttctattttctgcattgttttagaaaccagcctttgatctcactgttcttattttagggcttcttgggttttcaattccaaaaaaaaatagtactggtcgttataatttgctttgacgagtctctctgccaggtgatagctgcatgtcagggtcagattctatcccctacttgcgcctgcctcccctgtcccccaacaatgttctgagaaggtgtcaccagggcagtgtctatacctcagactcttttattcttccagcagtgaagacagttcctatgtcacctttctacaattccgtagatgaccagttttaacctgataaaaataatttgtggtaagatgtgaatgggggaaataatgaattcgtttgttatctctctgaaagaaaaaagaaattgaatttaaaagaggtcctggtactgagttaggcggtgttgccacttttcaggagcatttctaatatgtcggtgtgtttttggttgtcccagttactgggaaatgctatataagggattaatgg

SEQ ID NO: 335669 - DNA, 1000 bp, Homo Sapiens
ttttttttttttttttccaaggatgaaatttccacatttatttttcttttatgtgaatagaaaatggcagtgaagtgtcctatgaacgaggcgaggaatgggcatggcgctgcggtaccagcctggacgttgtgcttccaaagtacactatgtgtggtggagacaaagggtgtcgcggtttgcttttaattgctcacagttccttgggcttctcatttgtttttgaagttgtcagtttcttcaaatctcttttcaagtgacacattgcattacaaatgatggcacttaaccaatgtggcatttccatatttacaccaacaaaagaaatttacaagacataatagcatacaatcttgacatttagtaatagcaataaaacatgggcatccattttattttttctgtacaaactatcagaacataactttattcacattaaaaaaatcatctttaatttgatttgacctacatatcccccatttcatttcacccatttctcaaacctctcatcacgtcacccacaccttcaccagactacagaatctataagtaattagatctaacacctaaatagagcttagaaagtcctctcccaaacatttcctcacttccctgataattcctcaaaaaagaaaaaaaaaacacacttcattcattccttccacttcactttcacatttcaatcatcaaatcagcaagatggacttttcacctcaatctgaacaaggttagaaagaaagagttcctctgttgggcatcttgatgctacacccatgagtctggggaccctgggtactgttctgctctataagaaggtcgtttagtggaataaaagtctacataatttgtggtcgatttcagtccatactgtgttgagtaatcagtagaagctggaaagtgaactcggtcatcaaaataaggatcttcatagctatgaggagactgcaaatacaatctgtatgcatcaaagttctttctgttggagtcatcttgactataa

SEQ ID NO: 335670 - DNA, 945 bp, Homo Sapiens
ctaaacatttctttttaccatttttgtgaatgaatctattacttgtttatttctcagactgtagataatgggatttagcaaaggaattatgattgtataaaagacagagtctatcatatcttggtcatctgcttgtggagatgcagggcgcaaatacatgaagataagtgggccataatataaagagacagataagagatgggctccacaggtggaaaaggctttccttacgcctctaacagacttcttttttaggattgtgaaaagagcaaatgtgtaagaattaagaactgtcacaatggtgaatacctgaattgagccagacaaaataaaaaccattagaaaattaatagaagggtcagtacaggaaatcataaacagtggtataatatcacagtaaaaatgatgtattatgttagaattgcagaaggttaatctgaatataaggacttcatgaattaaggcatggaggaagccacctaaaaatgagaaggctaacagccgtatgcatagtgaattgttcataatcactggatatagtaaaggtttgcatatggctacatagcgatcatatgccattgttgccaagagaaaacattctgtagttccaccaaatgcaaaggaaaaaaattgaatcatgcattcagacagagatatcatcctgtttttggccaagaaattaaccaacattttgggagttactgtggaagatatccaagcatcaacaaaggctaaactcccaagaaaaaagtacatggggatgtgaagttgtgggtcattccagataagagcaatcagaccaaggttccacacaatagtgatgagatagatcaccaagaacaccaagaacaggggcattttccactctggctgatatgtaagtcctgtgagaacaaactctgtcagcaatgttgtattatcctgttccatgtcctcattcgacat

SEQ ID NO: 335671 - DNA, 939 bp, Homo Sapiens
tcatttatttaaagaaaaaatcatcttctggaccatgctcttgaaggcttgcttcacttgcttatttctcagtgtgtatatgaagggattcaagagaggagccactgaggtattgagcacagctactcctttgcttaaagtcaccctttctctggcagaagtcttaatgtacatgaagatacagctactgtaagagatggagacaactatcatatgggaggagcaagtggaaaaggcttttttcctttgactcatagaaggaattttcagaattgtccggatgatgtttgtgtaggagagaataactaatgtcaaggtgaccatcagtgttaccacagctaaaaaaaatgccatgagttctagaaagtgagtgtttgtgcaagagagctgcagcattggagaagagtcacagataaaatgatcaattacattggaggcacagaaatccaactgcagcagaagcattactggtggaaagatgatcagaaaccctgcaagccaggagctaaagacaagaagggtacacactctggtgctcatgatgattgtgtaatgaagaggtttgcagatggccatgcagcggtcataggacatggcagccagaaggtaaaattctgtcacccccaagaagatgaaaaaaaatagctgagccacacacccattataagaaatggttctgtttcctgtcacaacagtgacaaggaatctgggaatgcagacagacgtgaatgaaatttccaggaatgagaagttccgaaggaagaaatacatgggagtctgcagatggggatctgaaagggtgagggtgataatgatcaggttcccagtcacacttaacatgtaggtaacaagaagaaatatgaaaagtacaacctgccactgtgggtcacttgtcaatccaagaagaataaagtctgttactgctgtggaatttctcat

SEQ ID NO: 335672 - DNA, 945 bp, Homo Sapiens
ctatgaaggcattgccttattaaaatttagaaacctatttttcagtttcctcatggctatctttacttcttgattcctcaaagtatagattattgggttcagagtgggagtaaagatggtataaaacacagacagaatcttgtctgtgagaaagctgcttagtggccacatgtagatgaagatgcatggcccaaagaacaagaagacaacaatgaaatgagctgtacaagtagaaagggccttagatgatcctctggaagaatgatgcttcacagtaaccaggacaataacatatgaattaaataaaacaataaaacaggacaacgcaattatgccacttgttgagatcataaagaggcccagaacataagtatccacacaagccaactggaacaccacaggaaggtcacagaaaaagctgtctacctcatagggaccacagaatggtaacgtgagggcaaatatgacctgactcattgaatgcataactcccataatccaggaagccaccacgagagcaacacacacctggggactaatgacagaagcatagtgcaggggcttgcatattgcaatatacctatcaaaggacatggccatgagtaagatgatctcagttccagtgaaaaggtggagaaagaatatctgggtaaggcagccatcaaaagagatggttttgtgacctgttaggtaatctgtaatcatctttggggtggcgaaagaagcaagagacatatcaatgattgaaagattggtaagcaggaaatacataggagagtgtaggtgagggtccactataactgtgatgactatgaggctgttacccaccattgttgccacataaagcaatgaaaacaccataaagaaaaacatctgtagttcccaggaattagagagccccagcaaaacaaattcagacatggtagacttattgcccacatccat

SEQ ID NO: 335673 - DNA, 1000 bp, Homo Sapiens
ttttttttttttttttttatatggatattagttctttattgagaatcagaaatattttaaatttactaaattcagaggtagtcatggcctctccccaataaactttacagtcttagacaatttgtgcattttaataaattcttagttatagtattaaagaaagtggctgggcgcgggggctcacgcctgtaatcccagcactttgggaggtccaggcagaggcaggcagatcatgaggtcaggagatcgagaccatcctggccaacacggtgaaaccccgtctccactacaaatacaaaaaattagccgggcgtggagacaggcaccggtagtcccaggtactcgggaggctgagacaggagaattgcttgaacccgggaggcagaggttgcagtgagccgagatcacggcactgcactccaacctgggtgttagggcgagactccgtctcaaaaaaaaaaaaaagaaataaaaaaagttaccaggaaaactggtaagatcagctataaaacatctataaaaggcaatggagtagttcatatgcaaaagtatgataaaatggtgagcaatactgtacagtatctgcttattagttgatataatgtaaagtctataacaaacccaaacttctactttagctacagtactgtggactttcaatgctctttaactagtctggtcatcataattttctcccccttcccccttctaaagtcatgaggaaaatataaaggatctatcataaaatatacatcaactgtattgttaccatatagaataacaaccagacttctcaataagcaacttatctattgcagtaagacaatatgctatgcttatctttctggattccccaggaagagatacttccaatctaacatcagatatttttactttctaaacagagctaacttgtaccatttttagaaacagatcacaaatgcaaatttgcttctggaacaaaacataacattgatttcttggaaagacttttggaaat

SEQ ID NO: 335674 - DNA, 1000 bp, Homo Sapiens
tttgaagtgaaaatatgaacattatttaataactgatcttctgtaataaaccatttgaaaatattttacaaggaatcacacacacgatattttacaaagtttcttgacttttttgtcgctgttgtttttccaacttgtctgtacaaaatagaacaacaaaaaaagggcagagaaaaggaaatggccccccagtcccccagcccaaggtgaggggcagccaggtcgggtgggtaatgagaaggattagacccagctgggggttagacagctacctgatggggattgttttgtctgtttttctgttttttaaacttaaaatatatatttttctgtatatgtttatattctccattgagcacctgactacactacagttacacgcacgcccccgaaggacacagctggcatccaggccgggtgcacatggacacccaccctggcaccagcagtgggcatggaccacacacacacactgagaaagcgacaagcaacatgacattaattaacgaagccattaattaatgcatcaccctccccctcctcccagtccatctgagccccatcactatatccccttgccctcagttccccactggcccccaggctgggatgcctttgggggaaatgaccagaatgaatggtgtgaagagctgtgcccagtccccacctgtgtgtgtgtgtgtgtgtgtgtgttcagcaagggagggacagtttggcctcctgcaagcagggagtgtgtgtgtaggggtgggaaggagatagggagtgggcacaggcctgagtgtgtaagggccagattggcggaaggatggcccagccaggagagacaaagtcacccctgctaaggcaaagggtgatgtctggtgggggttcctctgccgaaaggtgcaggcagtggcatgtggtcccactgggggcctgacactagtgagaaatggttacaatgagcacctggagaggtgagggggcacttggaggacactggtggctaggggtggga

SEQ ID NO: 335675 - DNA, 954 bp, Homo Sapiens
ttacttttttaaacgaaatgcaatttttttgagtgagtcatgaaaggcttgtttaacttgctcattcctaagagtatatatgaaagaattcaacataggtgatatggatgaaataagcactgacacacctttattaatgtttacctcttcttttgcagatggcttgatatagatgaagatgcagctgccataagtgatggaaaccacagtaatatgtgaagaacaggtagaaaaggcttttttcttttgttgaacagaagggaattttagaattgttcttatgatatatgtgtaggacagaactacacatacaagagtgataataaaggttaatacagcagaggctacaaccatctgctcaattaatgatgtgtctgagcatggtattttcagaataggcaatgcatcacagccaaaatgattgatgacattagagtcacagaattctagatgaaaacctaagctaagtggtgggaggataatcataagtgctgccatccaacaacaaataaccattgttttgcacactttgttgctcatgattgccatataatgcaagggtttgcagatggccacatagcgatcatatgacatggtagccaaaagaaaaaattcagttaccccaaagaggtctgcaaaaaatagctgaatgacacatgcattatacgttattattttgttcccagttgagatactgtataagaatcttggaacacaggtagctgtaaatgagatttctaagaaagataaattttggagaaaaaaatacatgggtgttttcaggtggggatccaacatggtgagggcgataatggtcagtttccctgttacactcaacatgtaggtgataaatagaaacatgaaaagcagaacctgcagctgaggatcttctgtcagtcccagaaggatgaatgttgttattgctgtgtgttttctcattactgacttctgcat

SEQ ID NO: 335676 - DNA, 727 bp, Homo Sapiens
tttttttttttttttataatagactcccgatttggtgaaacttttattcatgttgcaacgtttttaaaatttgttttcatttttctttgacccatatcattgttatactagagcttaacttcttatctcaaaatataattccttatttttcctgttctaggaactatttggctaaattatttttcttcatagtcattgggattataagtacaaggatgctttctacacatgtatgtttcagcttaaaatgaatagcccttgagcatgttgcatgatgtctgccttctccgtcactctgtaatttctctctttttctctctctcatcttctgtatctgtagtctcaactacccagaaggctgaggcaggaggattagttgagtccaggagatcgaggctgcagtgagctgtgattgcaccactgtactccagcctaggtgacagaataagactcctttgttctagagacctttcaaaggacagaattccttttctcaagcattgagctctctccatctttagagtcttttcagtctgtttcacacagtgtcagaagaaggttgcctcaaaagttggtagaattactgtaattccctccatgacagtagtaaagttggatcctggtagatccggaatgaaatgcagctggaggatggagcagattggaggtgggaacagggaacactcagcaggctcccagccccgaacacccctggagtctcaacagc

SEQ ID NO: 335677 - DNA, 939 bp, Homo Sapiens
tcaggttccaattctatgggtagtaaaaaggtgaagaatggcattctgaatctgcttggtcttgacactatatgttataggattcattagtggagggaacagaaaataggcatagctcataatgaggtgaacaatatgtggaacctgctttccaaaacgatgaatcagagacaatccaatcactgtgacataaaaaaccaggacacagcagatatgggagacacaggtaatgagagccttggccctctcctctctggaggcaatgctcaggacagtcttgagtatcaacacataggagatgaagataatcagataatccagcacaaatataaagactacaagcacagctgggtacagtcggttgaaggtggtatcagcacaggcgagtttaatgacatcctggtgaaggcagaatgcatgtgaaagaacatgggagtgacaatacagaaaaaaatagaggggcctgattgggggaacaacggatacaaatcccctcatcagaactcccagcccaatcttcactactcgagtattagtaagtacagaggtatatctaagagggttgcagatggcaataaaacggtcataggccatggcaagcagaatgccagactcgagaaaggaaagtgagtgtataaagtaggcctgggaaaagcaggccgcacttccaatctccctgtgatccagccagaggactcccagcaccgtgggcattgtggtcagggccagccccaggtctgtggcagccagcatggccagaaagaagtacatgggctcatgaagattgtgatcttccttaatgagaagaaggagggtgccattgccaaaaaggatggatatatacatgaacaagaaaaatacggaaatccagtgatgagcttcctccaagcctggaaaaccagtcaataggaagggatgggagctgctgctggacgacat

SEQ ID NO: 335678 - DNA, 1000 bp, Homo Sapiens; identical to SEQ ID NO: 157455

SEQ ID NO: 335679 - DNA, 1000 bp, Homo Sapiens
tcggcgtgggcaggactcatccccaggactgtcatcttctgacctgggttctgctcccaactgtttatgatctgctttgaccactggaaatcccagcactccctttgggacatcactgacagagacctgggctgagaggacagcttccatttcacaaacagtttttgcagactcacagctactgatgaatgcgtcctctttgccttttttcagtgtgtcggaactccccaaagaattttgtttctttgattgggtggcaacataagtatctgcaatattttgtaacctgtcgatactacaacccaaacttccagtcagtttttgtgattgcgttagtagtgaagaagtagggaatgctggtaggcttctagaacgcagcatatgggcggccatctgttgtggaataatattagaggaattctctccttcatatggtgaagcagtaaaaccagatgggcttattaccataaatccagggctcataagggaccttcctccactgctggaatgcctcaggtacatgattgaccgcactttctcctgaaagatcttgccatctctcggggcatgggtgtgagttgcccctctttgtattcctgcaaaacctgacaagtcagtagaaagtgatgaaccacttgagctttcaataactgcttaatattaaacatctgctggtggtgatctgctctgatgaggacttctagagctgctagcaaagtttcccaaacaccttgctctgctttactccatatcttccagtcaagcaatagttcctctaacagcttaacatcttggattatagcattagagtctacatccaacttaaactctccattctcattcatataaataatatcttcaccacagcatccttcaagaagggtcttcaaaatgtaaaacccaacaatgcatttttgtttgatcaacacctgatgaatcatagaaagtccattacaattttctaattcatgtactctttgttggttgtatttaattaatg

SEQ ID NO: 335680 - DNA, 1000 bp, Homo Sapiens
tacttcatatgttatctaaatgttaatatgagaactcaaaagtaggcagattatatgaatacatattcttacctctgctacaaataaaaacaccccaaacccttcatcatacttttataaaaatacagatattaaactgtagccttttatataccatttctgaaaagtatttagttgcataaatagatgccaggatctttttttttaagtattaattacttaaaaaaaggcttaagtctttcaggtatttagagagctctggaaggctttacccagttgacatacggtggtagtagaaatattaaatatgcaacacacaaagcctgcaacttgacattggtcactgaaacaaaaattgaattcctaaatccaagcaatcaaaagatgtttattttttatagaaagatctgtaaaaaaataataatttttcaaacagctttactttcatagagaaaactttctacagaagttgactaagattttaaattgtaccatcattaaataaggtgggacaccatatgaatttcattgcactggaagaaatgcaaagcattttttaatataaagtatacagagcattctagtcaactacagctgtgttacagctatgtgttcttttggatttggtccaaagaaacctgagtctgtttccagagagaatgaaaaatgttatagacacctgatcagttactcctcactgtaggatgcacaaaaatgacattccttgtagatcccactgaatccagtttcccaacacttgatactttcctttttcccttcccccaccccagttcactttgggtttcaggttcaattctcgaatcacaggcatccagattttcttcataacaaacacatcccatggtcagatgaactacccagttttccaggatgacatcacctcttctgctcccaaatttcggccatatttaggtccaaatctttaaggccttttaaggcttgaagatttccagtgtaaaaagctacatctgctgtgacc

SEQ ID NO: 335681 - DNA, 1000 bp, Homo Sapiens; identical to SEQ ID NO: 157456

SEQ ID NO: 335682 - DNA, 1000 bp, Homo Sapiens
ttttttttttttttttttttttttttttttttttttttttttttttttttttttttttttttttgtggttgtgttccaataaaattttattaacaaaatatgacagtgggggggccacagtttgccaaactttgccttggaggacatgcagaggcaccctcagaattcagtgaaaacctgctcccatattgctaagactcatgaagtataatctctcaccttctttctctttcccctgcccaggccctaagttagggttcccatccatataacaaagacttctggtcaggtggcatttgctatctctgggattccctgcccatgaaagccacaaagagatttcttcttttacacaccctgaagcatattatggccccagcaaggctaactaaatcaaactgtggtttaaaaacaaaacaaaccaaccactgtgaaatatttatttttgttttgtagtattaagcatgattaaaccagtgcagaaaaataccaagtacattgggtgaacgatgagctagctgttctagtatttgctttttgtaatccagttaagaccatcagcatatacaacatcatcactaactcaacaatgtagctgcagggtaacatgtggataccctgtgtgctctactggcctccaaaggcattcaggggatcatcaaagatgttggacaccttgtgttcaaatcttggttcaggtgcggcctgtgcagatcggctttttggtttggttgtcttagcctggataccagaggagaagatgtcatccatatcatcatcaaatatagacttggcttccactttctttttggacttttcttttggttttacagttaagtcagcaaagatatcaatgttatcatcaaataaattagattccaatgttttctccttctctctggttttctgagagggtttaattgcttccgtagcaaatatatcatcctcaaaaatatcttgtgttgttaatatgacatcctgctgactattggattttgtc

SEQ ID NO: 335683 - DNA, 1000 bp, Homo Sapiens; identical to SEQ ID NO: 157458

SEQ ID NO: 335684 - DNA, 1000 bp, Homo Sapiens
ccagtcattaatgatctgtccttttgagatcttttacttcagaggaagatttaggcaagagagcaacatataatagtcagtgatacaaagaagggcatggaacatttggggaacacaggggtttggagggcctgaagcacaggggtggtggtattagaaatgtgggaaatatgggccatgagcctccggacagaatggggtccaggaaggacagcatcacacactgtgctgtgagtttgtgatcctcctgtgggcaacctcagcagtctggttattggcccttttttcttacagcctggaaaactggaccaagtttcgattgatctcagcgaccgaccggcagcctgtaagggccatggaagtgtggaactcatttgttaaaatgttcaaaacttccttaacaccatgttcacccttgcaggcaaggccccataggattggtctcccaagaaaaatgcacttagctccaagggccagagccttcagcacatcattgccagttcggaccccgccatccaggtagacttcaattttcccctttacagcagccaccacttctgtcaaagcatcaattgaagcaagaacctcatcaagctgcctcccaccatggttggaaacaatgataccctggacattgtgcttcacagctaactctgcatcctcttttgtcaaaatccctttcaggatgatgggcaatcgagttatgctctgaaaccaggagagatcattccagcagagagaagtgctgataggagtcatctggaaataaggtattgcatttccctttttaggtgattgaagatctgttagtgttaagttcctcctcaactggtttcgaatgtcatgtcgcctgttgccacatacaggtgtatccaaagttattaccaaagctttgaaacctagggattctaccctctggatcaactgtttgttcagctgcaggtctggatgcacatagagttggaaccatcggaggccttcgggagctgcaatgacaatg

SEQ ID NO: 335685 - DNA, 1000 bp, Homo Sapiens
ttttttttttttttttttaatataaaacaaatcctttaatttttcaagtgtttaaaaaacaattttatacttaagccagccttgaagataagcacaaaatttaccagtttacatttaaaaaacaaacaaaaaacgacaacaactcaagcacccgctctgtgcatagcactattctaggtgcaataaaagggaatcttaaccttagaaatatgagttcactttctggaattgtattatctccttttccagagagtaaaaataaataaaatcaccattgtttactacagatctgccccaaaccacatctggttcacagaaaggctaatttctgccaaattaaagatgtaatgaactcagttcctgctttcccaaaaacacgaaagcagaattccttttcactgaaaaaaataaacagttttccatgcaagggcagtttgcttctaataagtattttttaaaaaatttttttttcctctagcttttctttaaattttcttcctctaatattgccttttcttgtacaaggcagaccaggtatctttttatgctgtttttcctttactaagaaaagtattgcatcttgaagacaaaccatttcccagagtagtgataaaaaataacactaaaaaaactttaaaggtgagtcacttacatcaccttgatgaagtaaaaaaataaaaagcagttggcactaagatagctaattccaaatatctgtgtctaaacaattttaaaaactgtttatttattttgtaagaatgtacccctagtccaaagtaagtatgttttaaaaaattttggccaaaaaatttacaaaaaccctttcagttcaacctaataaaagtgatatctagaaaatatgccacattattaagtctgtcttaaaaagttcagattctaaagcatttctaaggcacggtgttctggaagacaaatgtgcttctgttggcgttgtgttagatacaaagcatccctgacaggcttcaagtgagccccgaca

SEQ ID NO: 335686 - DNA, 1000 bp, Homo Sapiens; identical to SEQ ID NO: 157460

SEQ ID NO: 335687 - DNA, 1000 bp, Homo Sapiens
ttttttttttttttttttttttttttttttttttttttttttttttttttttttttttttttttggctgataatgcgtttattgcgttactttagtacagtcggcctgcctcgccccacctccagcagcccagcctgttcacagctttctgctcactgctcactacccaaggaggtggggtctgtctcccagggtgggcactccaggcacctcctcggccctggtcgttgctctggagctcggcttccccgtcccttccctccggctgaatcctgcgcccgacctgtgccgccctcccggggctgctacattcaagggttatcctgttaataaataagcccgcgcagctgccctcagccagggcctgtcggttggtgtctccatcggccggtgacccccaatgtgcccggccccaacccgtccttcttttcagggtctgtctggctcctctctcgcctgtcgtctcctgcttggttcccggcgtggggacagtctggtcaccagtgcgttgcgctgcgcggcccccgctcagcgcgaggctcaggggcgtgggtcctccggttacggccctttctccgcgactccaggggcagtgactgcagcgcaggctgcgggcggcacatgcgcagggagttcgcgctgccacctccgcccggctccaccagctgcagaaagtcccggtaccagagtttggggcccggcggcgcggcgggcgcagcctcctcggcccgcgccagtcgttcggcctgcgtagcactcaacacgtgcagcgacaggcgacgcagcggttgcgtaaagccctgctcgacggcggcgcacaagtacacgcccgagtcccggcgccgcagcctgcgcagcagtagtccccgggcggtgcgctcggtgcgctcctctgccagcacctgggtgtgggctgtcacccctgcgcgctggaaagtccactccacgcgcgcctgcagcgagcggggctcacactccagaaaggcgctgctgccctcca

SEQ ID NO: 335688 - DNA, 1000 bp, Homo Sapiens
taattttttattttattttatttttttgtatttttagtagagacagggtttcgccatgttggccaggctggtctcaaactcctgatctcaagtgatctgccctccttggcctcccaaaatgctgggattacaggtgtaagccatcaggcctggcctccggtacactgtactttgaaattagaaaaacggttaacagatccagctctgactccagccccacaaggacacagggttcctttccctggagcagatgcccctagctccccctactgggggccctctattgcttagggagcaatggacctttagacagcggccaaggtgacaggcaccttggaagaggcacttagagtgagcagtcttgggtcatcatcaaggaggtaccagtcttgggctggctgaggggtgaggccagaaggaaccatcgggaactgaccggtgagctgagtcaagcggagctggcgcagagcgtggctggagttggtgttatagttcaacatgacgaagatggcaaacttcccatcgtagacctgggtccctcgcaccacgcggaggttgggcaatggtagagtagagaattcattcatggccacgaggacatagcctgtcacttctcgaatccactgcaggaaggagaggtcggcattgtgtcccgtgagcacaatctcaaggttccccatcaccacctcacacctctcgtagagcttgtacagtgtctggtattggttctcagcatcgccggtcacactcaggccattcagagtcccaggacacactgcctgagagttgcccacctcggagccccgggccaggctgaaaagcaagcccagcacctgcagagcgtcgttcgccctcatgactccgcagagggtgaagggagcccagccaagtccggcccgggggcccctaggctaggacatcgaggcaagagccacctgaaccgctggcgaattggtggctgctgcggcgacggcagcggaggttgcaaattgcaatcgga

SEQ ID NO: 335689 - DNA, 1000 bp, Homo Sapiens; identical to SEQ ID NO: 157462

SEQ ID NO: 335690 - DNA, 1000 bp, Homo Sapiens; identical to SEQ ID NO: 157465

SEQ ID NO: 335691 - DNA, 1000 bp, Homo Sapiens
ttattattttattttttggttgcaaagtctcactctgtcactcaggctggagtgcagtggcacaatttcagctcactgaaacctctgcctcccaggttcaagtgattctcctgcctcagcctccctgtagctgggattaaaggcacatgccaccctgcctggctaatttttgtatttttggtagagacagggtttcgccttgttggccagaatgatctcgaactcctgagctgaagcgatctgcctgtcttggtcttccaaatgctgggattacaggcctgagccattgtgcccagccatatttatttattcattagagatggggtctcgttctgtcatctaggctggagtgcagtgatacaatcatagctcactgcagcctcaaatggcctaagagttcaaagcccagtgaaatcacagctcacgaggggtacttgagagaaactaggggaggaagttttaagacacagtctccagcagaataggctgtcatgaacccgtggagtaagaattggggttaggtcatgaggagaacaggtgcctttgcatatcatccctccctctgtcagtcaccctaggcaagaagccatccagagagactccgaggccagggactgagtgtgctcacacaccttgccctgaacctgcacttgtgtccctatttctgcctgtgcagccatagcagataccacaacagggtggcttaaacaacaccgaattctcagactcaagtgatccttctgcttcagcctcccgagtagctgggactataggtgcacaccatcatgtccaactaatttattttatttgtagagattatgtctcacaatgttggctgggctggtcttgaactcctggcttcccacaatcctcctacctcagcctcccaaagtgctggggttacaggtatgagccaccacacccagcagcctggtgctatttaaagagaggtttatttatttatttattttttcttgagaggttgctcagctgatagaaa

SEQ ID NO: 335692 - DNA, 1000 bp, Homo Sapiens
cctcaaaaaatttaattattttattcaaattttgaaactttattacagcaaaattctaattcaaagtccttgtcatttaattttagttttccaatactttcaaagaaaacttggctataatactcctcttggtaaagtttcttacgcaactttatgtgttgcaagaatactataaaattttaactaactagagtaggataaaatgccagtgcatataacatctgttgcatttataatacttcaatgtaatgtgcagacaatgaagttaaggtttgctgaagatccattgttccgtgaggcttaattccttttccaaaattataattggtatatgtggttcaaggtaaagtagttgaaaacttcacaattatacttattaaatatatttctgattaaaagtagaatgtgcctgtgaaaatctgaaatcaataaaagaaatgttagctattttagaatgccaaaattaatatttaaaaacaaactaagaataaagggaacaccgagacttgtcttaaagaagctgtttgtcattctttttttttttagattacaacacacatacaataagtgaattttatcaaaatacagcacatttcttctactatatccataaaaatcaattcctatgtaaatagtactgaaaatcaactaaaatgagttaaaatttacaaagagttgttaaagggtttcaatcaaaattattaaaactatacagtacaataaccaattgataacatcttgaaagaagtgcaatatttgagttcacatatttttaaaagtgctgcctacttactctgactagcaagaatggaaagtgagtccaactcacttttgcaaaaataatgttggttggtgttttaagctagtcttataaaagtcttaattaaaatcaaggttgataaacaaagcataacagattaaaaattcccaaattgcatttcttagtaaataaaaatgaagtgcaataaccaaatattgctctaatgaaaggttccagact

SEQ ID NO: 335693 - DNA, 1000 bp, Homo Sapiens
tcatggcaagtacttgcagcactgtttattcaaatatataataacaagcaccagaaaacaacatgcaacattctccccccacccctgatctgcaatcccagaagtaggaggctcatgactatgatagtgaaggaaactcatgtccaggaaaggtcctaggtgggcaccctggtgctgggttagagtctagtgggacaaagggcaagtaccctgcccattagcctcctacagcagctggagaaaccagacaccttcttctacctcaggccccactttgcaaagcagtgatgccagccctggttggagagaacatgagtcctatgaggcacttggccctgcccagccctctggaggtaatgaggtgaagtagcctttcctcttagggtggccatagagagtgaggccgtagcctaaatcaaggctctcctgatggagaacaagagagcctcttgagaagaaagagaacgaggcttccttgctctaaagagagtcctgggctgggagtccttggcaggagtgaatataatctccccccaccccctgcccgcaactgctttccctagctgaaggcccagttgctaacttcagcccccaaatgagaacactacccagcacatttcaaataaattataaatacagacacagaatccaaacaaagatccagtagaagctgctcacagacccccacagaggccggcttgaagaaaaatgaaggtcacccctttgttctctgtgtctctggagctgtaggcaaaactgtccccccttgtccttgagtaaccatggggacagctcatgacagagagtttcagacttaaaaaccctctcaccccatctcctttctttcctcctcaaatctcttccccaaaatcttaaacaaacaaacaaaaactaattctttcactgagggactcaagcatttggggatgtaaatctcaccctttccccatcgggaggaaatgactggcctgaagtcaaaagtcctgactcctaggtaccc

SEQ ID NO: 335694 - DNA, 671 bp, Homo Sapiens
ttttttttttttttttttttttttttttttcgagaggtacgtagttgttatttgaggctaggttttcgaagtgggacatagcgtgttccgaacaaaccgacgtttggcatcactgattgctgtctggagcagtgcttcgcaaaagtttggcacaattaccggtgctggtccttaaagagactatagaccatttctttaaatttttgtacagtagttcctctagttggcttatcaaatagcactatttcttttcttggttccaattcagttccaaaatcaagatgaagcgcttgttccatttgacatttcacaacacctggtagattatcccaaatccctaaatacatctgattgttgggcttggtggataaacattttccaaagtaaagagtttctgtaacacaaaggctgttacatgcaggcccatcaataactccagtcttgtacttgtcacatattattttcttacagtcctttcctctgcataattctgtataggtagaatactgcacatatataatccagcttccaacaaaaaccactaaccaggaaaagaaaagatatttcatccgcacatatgagaagcgagcctggaggtaatagggtttccttagccaggcccccggacagagactcctcgccatggtaatcacacatcgccccgccgcgct

SEQ ID NO: 335695 - DNA, 1000 bp, Homo Sapiens
tttttttttttttttttttttttttttttttttttttttttattaggagataagtttactgttcattctacaaagacacttaactcatggaacactgagtcactctaacccttgacttcattacacaaaatgaaacacttctgaagaaatacagaatttcttaactcacggcaggatcaaagaacaaaggctcctgctttggcatttcaaagttgaacagagttctcaataagaaggccacagtcaaatactaatggaatctcaactctaaattaaaatgactaatcattaaactgttcaacttagagtaataaaagatttctagatacagaccccgctggcctatagtcagtctgggaagggctagaaagaaccaacccattgtgtggcttccgtatcttccttgcacaagcaatgaaacccagcagggaaagcagtggagctggcagagggcagggtgagaagacacccagtgaggactgacgggagaggagaggccagggcagcctcaggtacagctcatacctgaacttccttggcctcagagagggttgctgtgattgcccatggctccctacaggccaccagaggcccttggtctggaaatgagagtgagagcagtttaggctggtgtctggcagccctgccataggtgtcccgggaaaattcaactcctccataatgagactttgatgggacacacatccctgaaaataatgtaaaaaataagaaacaagaaccattgctttctacagtggtccactcagcggccccagtgtcatttactgtactggcttggaaatgggcaaattctggaaactatccatcccatgaggattttccccttcatataatacaggaaagggaaaaaccagtttgaatgggtggtgtttattcaaaataatcttgtgagagccttaggaactaaaaagatggtatgtatctgattttcatatcttcttttttttttttatttttgagaaagagtctcactctgtcg

SEQ ID NO: 335696 - DNA, 1000 bp, Homo Sapiens; identical to SEQ ID NO: 157467

SEQ ID NO: 335697 - DNA, 1000 bp, Homo Sapiens
tttttttttttttttgttgcttcttttttataaaacttttattattctagcaataataatgtgtgttaattttaggaatatagaaaatacaaacaagcaaaaggagaaaaatcattcataatcccaccaccgagaggctgtactttctttcatccttcacaagttatgtccatatatgtaatatacaaatgtactttttacctttcaaaaatatgatattcacatattacttagcctttttccattttatatcttaccaagaacctcttttttacaaatgtgtaaagttcttttattaaaagacagagacttgtagattggttcaaaatacaataaacaatgagatgcagataacaagagatacatctaaaaccattaatagcaacaggttataagtagaaatatggacaaaggaatatcaggaaatgctaataaaaagcaagctatatggtattgttaatatcagataaaaatcaaggtaaactacattaaataggggtaaggatggtttcgattaaccttccaacgcatcactataagtttgtttctgactctccttatctcatctatttcatccacttctctaaacatatcttcattgcttaaatgcctgttgtgtatatcttctttaaactcctggagagattgaatcagcctttctctaaaagttccttttgctttggcctcctcctctagcttctcctcctcttctggcttttcctcaggctttggctcttcctcatgctttggttcactctcattttctggttttccttccattttttgacaggatttcatcttgtatctgtctacctctcttccttccttcttttctttcttgcttattcttctttgaatacaatgactgcaaaattcccgcaagtttgactccttccacgggcctcagggaccaccgcctgcgctgctgaaggaagctggtatccagacgggaacaaggaccagattaccaggacttctgcacacgtcgactcctggtcac

SEQ ID NO: 335698 - DNA, 1000 bp, Homo Sapiens
ttttttttgtggaaataaacagtcatttattttaaacaattgtaaaatagtttatggaaaccagtggggtaatgcattcaaataaatgccaaaactggttgatggggatccagggtgctaaatcacactgcagaggaatttagctgtggggaacagacagtaaatccagagtgacagaatttcccgtgatggcaaaggtttctgacatccagtccagtactcaaaacccacagcagttcaaacccattttccttaacacagccttgacagccagtgaaattagtgaatttagtcacaagcacctgaaactttctgggatccttttcttcgcttcactgccttcagtaagatttccttcatggtaacctttgtgttgtccacctgaataagggagaatccatgagcagcatttattcgaacaaagagtgactctttggatgtcagaccaggagatgagtacttttcaaccagggccaaagtactgaagccaaacttatgaatgggctcattggaatccagcggggggaaatcggtgtccacctccccatcatcctcagcaatatgcaggcagtaggcactgacattgtcattgagcttcggctcccgtccttcgcttgtatactgccagcagatgagcccgatcaggtcctgcaccctggcgctggccattgtcaccacggtcattggcagcagtctgtcctggctcgagtgcagagggaggtagacatcgatcttcttggttgctgttgtacctacatgacccttgccatcaaatttggaatactcgttaaaagggttattcagctgcagagggcactgttctaggcgtacagataatatcgactgcttcccagaaattggaggcttctctttgagagattttttttcaaacagtgactttaactcctgggctgattgcttagaatttctttctttccactgaatatttttgcatttgatctggttttgtctctcttttcggagtcgttctaatctttga

SEQ ID NO: 335699 - DNA, 1000 bp, Homo Sapiens; identical to SEQ ID NO: 157468

SEQ ID NO: 335700 - DNA, 1000 bp, Homo Sapiens; identical to SEQ ID NO: 246398

SEQ ID NO: 335701 - DNA, 1000 bp, Homo Sapiens
ttttttttttttttttttgtacacaatcatttgttttatttgaaaacatgtctacactgcattgagcaccaacacaggtgtgaccaagaaacccacagtcctgtccccgcaggcactgggtccagtgtatgacttggggtggactgttatttttcacagtgaggggggaagaaaggataggaaagaaaagatggccattatcccaactcctgttcaggaatctgaacaatgagttatttaaactcatccagctcttctcattccccttctctcaatcagctggtgttcaaatatggaatctgaggccgagcgcagtggcacacgcctgtaatcccagcactttgggaggccgaggcgggcagatcacgaggtcaagagatagagatcatcctcgccgatacggtgaaaccccatctctactaaaaatacaaaaattggccgggtgtggtggtaggaacctgtagtcccagctactcaggaggctgaggcaggagaattgctttttgacatcctgacacatgtataattgccgggaggcagagttgcagactacgtttcacacacacacacaaaaaaaatggaatctgagctggtggggccagctggatttgggaacacacagacacactgtttaaaataacatccagacatcattgcaaaaaatgggaggaatgggctgtgcttccgaatgatagtttactttttcctgttttatgaatgcttacaaatttagaggataccagaattgcacaaccgccatcatgacagagcatctgctcagtgtaaaaactttgtttaggaaaaaaaaaaaaaaatccaatggatatatgggaagagaagtgccaggctggatggtgctgagacagaatgaccccttgggctcctttattttgttcttttcaacaggaccccacagatatttgcggtatgtcatgaggactggggatgtcttctatttttaaatcaggtatttagtcaagctgcttttaatattaagact

SEQ ID NO: 335702 - DNA, 1000 bp, Homo Sapiens
gaggggtgaaacgtccattttcatggctgtctctggctagctttagtgaaagtcctgtaggttttccctataaacaatatagaacagggatgtacaaaatagtggcataacaagaagaaaaatggtgtgacctagttggggtttctgtttgtttgctttctcttcatggtgggaaaaagaaaggcaaaaaataagcatttattacattccaatcctctaaataggaccgtaacaaaagaataaaatatgcttaacactccggagacaatttctgcatccttctttgattttctttttttatgtccccattgtatagtgcctatttctttatgtttaagtctccatgtttaccttgtaactgtggcatttccttctcttaaggacacatgagaacaacaacaacaaaagtaacaaaaaaggaacaaggttattcctcttgtgcagagactgataaaattgtagaatcagaagcccttcttcaagagattatgagaaacagtgtatagtttcttaaatccacgatcccaacatgtttctttcattgtctcattgctcctaatactgacagtttataaggtgcaatttttgcaaactggagcctaggcgtgataagtgtgtcactgctgggctcctgaattgcacgttttgtaatcagactataaagtgcaatggcagagattttaaaactaggagctcgtttatcccttttattcttctcaagctccccttgcccaccttctatctttttcaaagatattttaccttgtagcgcctatgttcttataatgacacatgagaaggtgtttaaaggtcttcttgaaggtggcattgcaaagtgcatagcaggcagggttgatagtgctgttgatgtaacaaagccagtaaccaattgtccacacagtgttggggatgcaaggtgcacaaaaggtgttaatgagcaccatgacattgtatggggcccaagtgatgatgaaagccaacagaatagccaagattgtcc

SEQ ID NO: 335703 - DNA, 1000 bp, Homo Sapiens; identical to SEQ ID NO: 335702

SEQ ID NO: 335704 - DNA, 1000 bp, Homo Sapiens
gaagttgcttatccattgtattgctgcaactggaacacattttgataatagtagtaacaataataattcacctggcattaatttgttacttctgagtcctcagctgccaagcctgcaaagctgggacattgttggcacaaaattcttccattcgtttgacaagtctcaaaagtccactttctgaactgcagccgaatacagttcccagcttaaaattgtctcttggccaagtcaattgttcttactcctgtgatcatcagtgcctttattattagctccccaacaatggcacaggtatgcctgtttgtggcttctgtttaaaaataccatcatctctttttttcttatcaatgaaaatgcatatatttcctatcatatggttgcgcatatttaccgattgctcacaaagtgcaatgcgcggcctttgccgcacaatcccgagttccttactctggagtttattaaaagcttcattttgagagccctctcattgggagacgccaggattgccagaagcgaacagaagcgctggcgcatcccagcaccaggcatcgaacttccctgggcagcatggagaaaagctgccgcccgcgggtgggctcctggcggggacgcccagcggcggggcggggcgagacgcgggcggcctgcagcgctgcagccgcaggagccctcagggctccgcacagcccggcccgttttccccagagactccctcccctcatgcctaaccccaattccagttttcctcaggcctttcgggttgccccagggtttctctctggagtctaggctgacttcccctctccacccgcagagccctgcgtgggccatggccatgaccctggcggtggctgcaggcgtcccgggctgtggagcaggggctgcgcgccggaccgctggagggtgtgtggcacagcgtggggactggtcgctgtgtgcttgtgtcgctggctgcgtgtactaggggatgggcaaatcacacggctgccgcataccc

SEQ ID NO: 335705 - DNA, 1000 bp, Homo Sapiens
ttttcatataaaccacagaatatatttaattcaaattaaacatgaaactagaataatgttcggtccttatcaagtagcaattacattgtttaaaaaaaaaaaaaagaacagtacatttctgtctacattccgacaatccaacgaggcggcatgggtcacatccagtttgatgaggtgacagagccagcagtcaccatccatgggcatggttctgaggggactggggagacacagaccatacatgatacaaaatgattctgcagcaagtctgaaggagcgcagcctccctcctaatacataagaatgaacgtccaggtagcagagagtaggcgacttgcataatgagcgcattttattaaatagatagttaacgcactgcttcttactcattccaagttgctgtaggtgctgcccgcattaacagcagggacaaaagcttcctatgcgcgtttcagcaggaatactctctccactccaggtacttctttgttttggatttttttggcatgatttccttcccatgtaaagaaagccaacttcttcaagacacaggtcattcagctttagtggtggcctccaggttctccttgggccgtgcagaaggccaggtcccgcacagtgaggccctcctttgtcctccactgaaagcttttcactgttcggtctgcaaagaaagaggttcgcctgcccctgctccactcgccagggtggaagtggtggagggctgggaaagggctttcttcacagggcagtgctctcggtatcattgtctatatccagcaggatgcggccaggcacgtctttgctggctgagtctgagtgcatttcaggaaagatgctgcgatgcggttctgaaaccctggaattggagtctgttactatcttggaagctgttggtgctgtgttggtgaggctgctgtccccagctgagtggacaccaggaggttgggggggtgggggcacgctgggccggttccttggctttggtactggtctcggt

SEQ ID NO: 335706 - DNA, 1000 bp, Homo Sapiens
aaaaattgcagtgggtactttattaagaatttattttaccatctagccattcaaaacatctttacatcaacaaacacagcagtttgactattgaaatcataagcgatttatcttgaaaaggttatatttgtaggtggatgcaagtatattggagaaatatttctatcaaaatcactggttttgttaggagtattttgatttttctatttttacgctgggaaaaaaattaaaacaagtatgtcagtgttcattttatgggatagttggcttcactgtgtttgtcatgtttgtccgaattacagctgtttatcttgcaactttaagattaattaaatgcaaatgtaactctgtgaatcatgggaatacctgccagacctcttattaataccttcacttaaaaccccctgtgcctgagagtcattaatttgctaaaagaaaagtgctaaagcagccctttgcccacaaacaattctgcgatggctgcccaattaatcccaaagcattctgatcctcctttcaggcctcgtggccctttgaggacacaagaaggctccgatgataacctggcaacctaggtagaaacccagccaagtgtgagcgtttgaagctgcagtttggctgccatcgtgtcggcgaaaagaaagaattcaggcaccatgtcatccagtacaaaggataaaaacggattcaaccggaaattcaatgtggcaccacatatgggatacatgagtgcggttatacaacaggccacatattttttttgaacagtctcctacatgtgatgccgaggacatgtgtaaccatcataacgtctctaggaatctgtatttaatttgagttggggtggtggcagggattggagatctgaagccgccacaggtttgtggcagatggctctgtgtcagctatgacaagcagccaggctcagcttcctctgcagattttcttttctctctgatcaggtaaatatgggcacactctggaaagttcttcagattct

SEQ ID NO: 335707 - DNA, 1000 bp, Homo Sapiens
tttttttttttttttttttttttttttttttttttttttttttttttgctttccaaaatactgcagtttaattctgaaaaactcaaatgcaagaggcccagagctgtctatgggattggatctcctgcaacctgccttgggccccagaagagactggcaatgtcagcctcctccctgctctgcctgagggaggccacggagaacttccttatcgggcccaaactggagccgctgactgctcagagcaagatttctgccttgaaagcaaatgcagtagcctcagaaatgtgcagcgcatacttcttcctccccctctccccctccaggccggcagagctgcagtaaagatgcctgcaggtcatgacctcatgtttcctgtccacttcccatggcagggatcggagctttgggagatatgtgaccaaggaggacacatgaacttgctacccctctctctaccccagacatacccacatgactttgttttactcatattgcattggtttaactcggaaatgggtgacctcccaccacctaacctgactcagtaggaggggaggtaaagcagtttaggccctggtatctgtttgagaagttaaaggaaagggcatgggtggtcagggaggaggcagagcttggggtcaaagggatacatgtcaggggaggtttgcttaatcttgtctcccaccagctccaggagccagggatttctcttttttttcacaacacattccaaacctaggaaagggatttctccttatctggctcttaacccaggagggctaaacacttcagctgcttgaagaaatcgcctgtggagctgcatgcctgccaaaggattgggataagacacatctagcctgggcatggtgccttctgcgtgtaatcccagtactttgggaggccgaggccggcaggttgcttgagctcaggaattcaagaccagcctcttggaataagccaggcctgggagggggaaggctgcatcctgtgtgcctcc

SEQ ID NO: 335708 - DNA, 1000 bp, Homo Sapiens
cacaacacattccaaacctaggaaagggatttctccttatctggctcttaacccaggagggctaaacacttcagctgcttgaagaaatcgcctgtggagctgcatgcctgccaaaggattgggataagacacatctagcctgggcatggtgccttctgcgtgtaatcccagtactttgggaggccgaggccggcaggttgcttgagctcaggaattcaagaccagcctgggcaacatggcgaaaccctgtgtctacaaaaaatacaaaaattagccaggtgtgatggtacacacctatagtcccagctacttcggcggctgaggtgggaggatcgcttgagccccagggagtggaggttgtagtgagcggagattgcactactgcacctcagcctgggcgacagaacgagactccatttcaaaaaaataaaaacaaaactcttttcctagttctgacctgaggtttttaggtgcacaggcaggaaggtagctaagccagggattcaggggggggaggggctcccccaggatctgaagtccagagaacaggagcctggaaccaatatttccaggtgccccaatgtgcttgtgtgctggagaaaaggggcatgcctccaggggggtgttagtaaggccagagatagccagctagaccctactctctgccccttgtcctccccctcccatctccatatctcttatcttccctgaggctttggtcttcctcacagcacaagggcccacttatttgggagatggggcgaagataagctcctggagagcgggagacagtgaaggctggggtcacctgagcctctgtccagctgaactgagggtgcgatggagtcattacctgccctcacccccaaagtgcatctgtgtcccctggggctgagctggagcaacaccacctttgttatgcttaggagggagggccggccccccaagtcctagaaagcaaaagggccactagctcccagcctcggttttttggggatcc

SEQ ID NO: 335709 - DNA, 1000 bp, Homo Sapiens
ttttttttttttttttaaagttctgacaagtatttattaagtgccacattgtcgttataagctgattgacagttttcttcaaaattgtgtgattttttcattatatatttttgcaacacaagtaaaacgtttgtcctgaaaaaatgagaaattcagataaaacaaaaatttaaaaaatcacctattatcttaccacacaaccactgttatgcctttgaagtctatacttttagctttttctttgcatattaatatataaatatacattttttttacaaaaatgggatacaatatataccatttgaaaattgcttttttcgtttcacaatatataatgtacatctttcatgcaaatgtgtagggctcatgactgaaagagggaaacttgtagattttagggggaaacctcaactttaagcgagttacatgctaaacatctaaaataaagcctcacaaaaagttaaaattcagaatatgggaaaaggcattaagaaaatgcaaacagaaagtccaggtggcaatggcaatactattagcaggcaaaacagaattaaaggccgaacacattaaataggataaggacggctccgttttgccttccagtgcattatcatcagtttgtttcttactcttttcatctcttctagctcatctgctgcctgtatcatctcctcattgcttaaatttctgccatgtatgtcccctctaaattgcgggcgagaacgagccaacctttctttaaagcttccttcttcaagcttatgttttcctactccacaaggaggctgctccatgggagggcgcccctcaaacaggtccttcctggaaagaccctcctgcggagggcgctcctccgagaggagcatctcaggcaggagctcaggcaagagctcctcaggaaagaactcctcctccgaggactgctcctccgaagactgctcctcgggggactgcttttcgggagagtgctccaccggaggcctctcctcatcggtcttgg

SEQ ID NO: 335710 - DNA, 1000 bp, Homo Sapiens
tttttttttttttttttttttttagactcaaaactttaatcagagaaccaacaaatatgcacacacggagggcgtttctaccttggcctgcagcaacacaggtgactgatttacagactgcccccacacccaatggctgccagttttccatagagtccctattgtgtcacagccctgcaacactttgtacactcttttggtatacaacatgcccatctccccgacaagacagagctccagaggacgggaaccatgtgcgagaagttaaatgttgcaaccatttgaaaaacagtgtaaggccccaatggttagccaacaggttcccagtttcaactaagtttaacaaacttaaccagcagaactccaggtgcaagagttgaaaagcccaagggtgcagagcactcactccctcaccattttcagcacctaaaatatgaaaggtattcaaagtatgtgtccagtgcttttcataagactactgtgtttcagcaaaggtgtgactgagccacttagtggcagggaacaaacacccagagctgacaagacactggtagggaactggttgtgtggttccatctcactggactctccaacaatccttggtgatcccagaacttcctgtgacatgagggaatgtggcattttcaagatgtcacttgtcaactaacagcaatcgtcgatgaaaatgggttcatttctgattccagaagcttcagagcagtagtgcatagtgtatggatactacccgcccccgagcctagcaaattgcctggtgagcggccatcctggataaatggtgaatgatgacatcccagtggtcacttccacacaccacaggtttgacccctaagtatgtcttccatatgggttgtttcatatgcggttaacaccctgatcaatgcagctttcctgatggaatccagctgtgttttggtgtcaactcccatgaaaaattgggtgtcttattgcataaccaacactgttaaatggaggaaggtca

SEQ ID NO: 335711 - DNA, 1000 bp, Homo Sapiens; identical to SEQ ID NO: 157469

SEQ ID NO: 335712 - DNA, 1000 bp, Homo Sapiens
ttttttttttttttttttttatctgtaataattgccagtttattcctctggctaagagatccagaggtaatttgaggtttacatttctttttaaagttctttcatcaagagtttaggtgcccccattgccctcataagctggttgcaaattatttgactcttacttgtaaaaaaaatccttaattctttttgtgtgtgagacacgtgttcattaaaaagtacatataagcaaaaagaacaaaaagaagaaaacaaataaaatttcacaccacacagaaataagcttggttaagtttgtgatatatgttatatggatgtatgtatacacacacgcacacacacaaagtttggaattttatcctacatatgtgagctgatattaaatatgctgctttgccataacctgttatgttttactttacaacatggaatgaacatattcccatgcaaatgtgtgaaagtttccaattgaaaaatagacctggaaaatgggtcaaaatccaaaatccaatgagatgctggtaccaaggaaattacctaaaacaaaatttcatcagatgattaaaagtaaaatggaggtcaaagatacatcagaaaatgctaacagaaagaaagctggggccagattttaatattaggcaaaaatgaattcaaggcctaaagcacacaggataaggacggctgcgtgaatgtctttgcttccaatgcatcatcacaaacttgtttcttactcttcttatctcttccctaagcctttcaagctcatctactcctcttatcatttcttcagggtccaaatgcctaacgggtgtgtcctctttaaatccctggccaggctgattcggccctcctctggggtttccttctgcttcctggcttacgccttcttcggaaggttgaggatttccttctgcctcctgtggtacatcctccaaagggcgatcttcctcggcctttggcatgttctgtggttttccctcattttcttcacaagactttt

SEQ ID NO: 335713 - DNA, 1000 bp, Homo Sapiens
ttttttttttccaatactttatattttattatttttatgactaaagaaatctgtttttaggagaaaaatggacagatgaacaaaaaagaacagaaaaaatcacccagagataaccactgttaatcttttagtggacacagctttcagaattgttttctatactatattactaggtaagtatctttgtagttttacaaaaatgtactgatgccatatatttggttctgcaagttgtgttttttaattttacaatgcaccatcaacattttttccatgtaacagatgaacatttcctactgagaacactgcattgcagataggtcaaaaggctgctagcaacaggagggatgcctaaagtaaagtattaccgtaacgttaaagcacatggcctggtaaatgcctgccagggacactacacataaggaatgtcttcaatgtcccttcgtggggccctgcagccacccctgaattcccttggacctctagggtagaaggggtcctgtaaatttctttgcatccacaaaaacgcccccaatttctgtttgctttttctcttctcatcctgcaccttagccatattgtcaaattctcttatcatgtcctcattgctgaaattcatatcatgtatggcctctttatactccttgaggtaatgagccagccccttattagtttttcttttggctttcctgggtacatcatcctcagctgggcgctttcctgcagcccttgtttcactccctggctctccttcactctctggctttccctctatctctggttttccctctctctctgatcctccctccatctctgactctccctccctctctgactttccttcttttgcctctccctcactctctggctttcctttatcctttaacatttcctcatctcctgttttgcccttgttttctgtctttccctcgttttctaacttcttgtcttccagagtacaagttacttctggctttctctcgtcttgtggctgttcttc

SEQ ID NO: 335714 - DNA, 1000 bp, Homo Sapiens
tttttttttttttttttttttttttataaagaaaagaagtttatttgagtcatggttcttacaagctgtacaggtgccggcacctccttctggtgagggctttggggtataggtgcttccactcatggtggaaggtgaaggggagcaggcatcacatagtgagaggaagagagagagaggagagggaggtgccaaggtctttttaacaatcaattttcaacaggatctaatacagtgagaactcactcattaccaaaaggatggcaccaggccattcatgagggacccacccccatgaccttccattaggccccacctccaacactggggatcaaatctcaacatgaggtttggaggagacaaatgcccaaaccatatcagtatctcattatacctacataaatttatcacagactactggcattgagatgtactagtctgagtgaaatgtagaggcagtaagccttttaagtcttaaagtcttaaatatttagttgtctataatatataatctgtaattttcttaaatttttttctatatacattttaaaaaccacatcaaatatttcccaaagtcattttcacacacaggtgggctaaagctaagggaggtgaagtgaatttgagaagcaagtcggtggcttggccagctccggcgagcctggtttccagaacatctcacttgccactctgtcttctcctaactgggggcttctcctcttcagagtcgtttattctgttagctgagtagtcttcaagattttgccacagctactctaggaagatgtcaagcgtattctccagtcttcccaggagtccttggccatggaattgggtgagatcagattgggaaagatggtctttctcggtgtcgtcgtggccatgttcttgattctattcaggttgtcccgggcgttttggcattttctcaggcaagccgcacacagatccttctcctccacaacatacaagttctccagcctcctgatggagtctatga

SEQ ID NO: 335715 - DNA, 1000 bp, Homo Sapiens
tttttttttttttttattttttaatgacatttattgagcatttaccacgggccaggtgctgggctaagcaatttcattcctctcatttaagcctcctgagaggacctcaggcaggtactattattcccattgcaccagggaggaaactgaggcacagagagggaaagttctggaacctaggctttcgacggccacactagcctgcctctgagcttttgggatttctcttacttatagaatgtgttccacttttctaaaggcaatgaagagcctccagctctgggtcctggtgaggagcgcagggccagagaggcacttgcctaaaggcccacagcacgtccccggcagagctctgatccctggatgggtctgaggcaggggaagctgggggaccaggacgctgcgggacggagtttctccgcctacctgcctggttcgtggtgatgttgaccacagcggcccggcggggctcggggctcaggtcggacacgccattgacggcctcgatccagaaggagtagttcatgtgggccagcaggttggccaccagcaggctggcctgcaccaggcttgtctgctggggcacaaagcgggtgccgctcccacatgcctcgcagcggctcagtgcccaggggcagcggcggcacacggcattgtaggtgatgtcactgcggccacctgggtccaggggaggggcccactccagagtcactgatgtcccattcacactggagatcaggttcactggtgccgagggtggccgggtgcaggctgaggacggcgggtccagggctgcacggtagtagctgaggtcacagtggcaggcttgggcggctggagctgcggagtggctgtggggagggcagcgggcacacagctggtccccaggggctgacttgtagaagcccagctcacaggccacacaggcatcccgccgctcctcgtagccggcactgcacacgcatttgccgatgggcacgagccactcgccctccgcgct

SEQ ID NO: 335716 - DNA, 1000 bp, Homo Sapiens
tttttttttttttttacacttttacagtttaagaaatattaaatgtgataactgttcaggatctactttttacacaatctcagtaacgtatgtacatagtcccaaaaaaaaaaaaagcagcatttgcctgggaacacatcactataagcaaacaaaacatcaaatggcctgaattctaaaatacctttggattatataaaattacattgtaaagttacaaatgttgctcattcttgagaaatgtttgaatgtttaaataatgttgccataatacatattatttcacgacattaaaaaaaacaatggtgaatacaaggtatcatcattttaagggtaaagagataaagcaagtacatatacaaatccactggaaaagctaagtttggagctgatttcctctcttgaattgtaaaatttcagtaatacacagtcactatctactgctggaataatgcctgagcaatttaggtaaagatacaaacaataacaaaaaccctgcccaaatattcaaacttggagaattctagttaaaataatagaaaaatataaaatttatccttccaaaaaaaggtatctaagacaaaggtatagataccccatgtaaattattcacaagtcatatgtgaatcaaccttttctgtattccttaaagttgtacaatcgactgatgaaaaaacaagcttcatattcaaagacactttcagaacacacctacaattaacttattaatgctgaagtatattttaaaaaacagctatttcactgaagtctttacaggagattttatttttggtgcatcttcttacgcatttcttcaagagctgcttctttctctctcagcacctgcttaagtcttcttattttttcatctcgaatggtttcttctaactccggtggtgtcactgggaaaatatcttcggtataatttttattgaagaaatgactttgttcataagctgcatttgaattcaaagtgcctttctcttgcttctcatgggta

SEQ ID NO: 335717 - DNA, 977 bp, Homo Sapiens; identical to SEQ ID NO: 157470

SEQ ID NO: 335718 - DNA, 1000 bp, Homo Sapiens; identical to SEQ ID NO: 157471

SEQ ID NO: 335719 - DNA, 1000 bp, Homo Sapiens
tttttttttttttttttcacatctaagcagttcctttattcattgtttctttgtcttgccaatagcagagtcaatcaatactgaaacatacagtttgaaccaagcatatgtgatgcctactgcacaatacactgaggttagtaacaaagggatgaaggggtacttcaccttccaggaggtgaaagggaatacaaattcacagcagacttccagaggccccaggccaagcaggtagaaagtttccatccaattaaaaagaggtttttcttttctgggaggcggaggtttcagttagctgagatcgtgccattgcactccagcctgggcaacaagggtgaaactccgtctgaataaagtcttcagtgacgaaatactatatatggtgaatagtaacatgagtaagattttaatgggaagttctggtgcagtgaagagcagaggaaagagggaataatgtcctgttgtggtcagaatcagaaaaatcgaagcgtctcctgcttttcccacagacaaaaggctcattgggagaattgctagaagtatggctttttcatgaacatgccacccaaacataaaggagctcaaggcacaaagagttagacatcggagaaagcctctgggcccttggggtttaaaccaaagacagaaaatagagggcaatatggcaatcagtgtgcagatgagggttgccaagggagtcactgagggaaggactgtgtgttggaactgctgaaccaaaccacttgtcattgaggccttgggaatattgttgggatcaagaaatttcaatttcaaaccgatgacagacagcactttgtccaaagcattgtacaaagcccagaagtttggagcccaatatgcatgacagaggcccctcttgaaaggaaagagtcgggaaaagacttgaggcagctgattcaaggccaggaaaggacccaatgaaagagcagaaactaagaaaacaaccagtcccagggaaataacacgaacaaagctgaaa

SEQ ID NO: 335720 - DNA, 1000 bp, Homo Sapiens; identical to SEQ ID NO: 157382

SEQ ID NO: 335721 - DNA, 1000 bp, Homo Sapiens
tgacttatatcttataggatttatcacaaaatgttactgcccagtgcatttttgcaaacaataacaattcactgagagtaataacattcacatatgtaattagagtttaaaaatgtaaaaaacttagggtaacaaacactttaaacttattttttagacattcaataagcccattctcccacaaactgtttgattacaaagaagcacaatgggttaactgtggcaaaacataagaaataaggcaggggaggcagatacagacttgagaacataaggatatccaaacaattttgtcaatatcaaaagacaaaatcaaaacatcttttataatataaaacaaatccatataattaaatactaattaggtgaaagattatagggtatataacatttattttctctacataaatttgcatatcttaaatttaatgcaaaacatcatgtttcaacttcaacttaacatcataacatgtagttcttggtgagtctagatgtaatggaatgaatatttaaatagacttcaaagatcctatcaagtttttatttggttattgttgctttaagtccttaatgcttttctttatttattggactaagccaattttagaaacaaaatccacaaccaacacacatataatgcagatgtttctgaaaaaactaaatagtgttatctttagtatatcattaaaatagtggttgtggttaaacaaacaagcaaacaaattactgcaactcatttatgataagcttacaaaaagtaacattttaaagtttcatctggtgtgtttgcactgtaggaaaataaatctggatgtgagtaagatgtgcttgactgaataaatgaaacccccagttagcactgggttatgttccagagcagtgcattcgtcctcacttattacttcgggaatgtgtgatcacaatccaccagctgcaggttttaatttactaagaaatgaaaggaattaatcctggtccatccactgcttcctcccttgtt

SEQ ID NO: 335722 - DNA, 1000 bp, Homo Sapiens
aacatttcaaacatctactatttattaattccccatagccatttgatcgccaaagacagttattactttttaagtttctcttacatccccatactactttgcttctgtaccatcaacatcctggcccaaactaccaacatagttctcttggaattttgtaaaagtttttataactattccaactacaacagtgccttctataataggaaaaaaaaagtgaaagttcttagtcctcaaatctgtgaaggaagcatagtaaagtcttaagttagtttcccaagtgcctgtagaaattatggtaattactcaaatacacaacaaagacatctatccacattacacattatcattaacaatcaccagctctggtttgattagagtaagtcgcttgagaaatggcagagaaaatggtaaatgacaagcactatttccatctcgctgcatcttctgctctgtctctgatctttcaaaaccagagtatctgatatgacttttctcagtcagtcttttccagattattctggggtcatctgaaagcctgggaaagtcttgatgtgcttctccaatacgggtgagaaagtctttggtatgaagatgttcatctattctctcttggagtagaaatgactccagtaaagtcttcttttgtttcagaaaggcagacagggccagctccgctcttttcctgttacaatagggacactgataagatatgtgttgcttagctgctgcctcctgttttggcgttgtcctcatgtttttaaagtagattctgttcaaaagttcatcgggtacagtacaactaaaggcatctctctctgaagcctctacatccaatccaagatgcagctttttatgtctgctgctcgtcttcttcttagaatcccctctacgatgaatcaaatttatcttcatggtgcaataagactgcagggcattcaattcttcatctgatacccgagtgatttctgttggaagtttggtgtctggttggtgccgt

SEQ ID NO: 335723 - DNA, 1000 bp, Homo Sapiens; identical to SEQ ID NO: 157475

SEQ ID NO: 335724 - DNA, 1000 bp, Homo Sapiens; identical to SEQ ID NO: 157476

SEQ ID NO: 335725 - DNA, 1000 bp, Homo Sapiens; identical to SEQ ID NO: 157477

SEQ ID NO: 335726 - DNA, 1000 bp, Homo Sapiens
ttttttttttttttttttcattagaaaataaagtgtttattaagaaactatacactgaacactcctataagtctctgtggaaacacaacgccccattgtcatagcacaaggtgaggaaaatggcagaataaaagatgctgggatggatggagcctgggaggctggaaatgaggtaatgatttacaataattaaaaaacatcatcctcaagcttactccttaaagccacacttgggaggaggccctggacccaaagcatcagcagggcacaatggggaacagcctgacatggagcaatggggagcaggatgaggagagctggagggggcgagataaacacacacctggagccctggagagaacctgaactcccaggtgatactctggaggctgccccagatactgggcaagaacttggaaagcctcatgtttttaaaccccatggaggcatttgcagaatcgggctgggatcctgacacgaagaaccaccatccacaggacccaagaagtaaaacccttaagtgggaatccaaactcccagttaaatttgccaaaggcatagactctattctctactagtgtgcaacaccaccccaaaacaacggtgggttaaaacaaccacctttttcccccacaagccccccacaggatgctcccagtttcatgctctccaccattaggtgggcagcctatgctgacttcatacaatggaggccccatgggccagtggagctgggagccagaagtctactccaccaatgagtcagcaaatacgggagagtttcaggccctacaaatgtgcctttcctactgaagaagggaaagtcacccccttccctctcctcagtggatcaagttgaaaatgggggaagcgagccccctctttgggagagggtggccatggagtaaggcatgagtcaaagcaagcaaagtaaacacacatattgaccagagaacaggaggacacttccattggtgccatgagaggggctggaggaggc

SEQ ID NO: 335727 - DNA, 1000 bp, Homo Sapiens
ttttttttttttttttagacagaggttgttttatatatggcacaaatggaaatcataaggaaataaacccttttgaccctaggcctaagaaaagctttccattaacatatggaaaggcatacagttaaatgatggatgaagaaaggctaaacaaaaaatagtataatagaggcagggtgcggtaacattggttcatgcctgtaatctcagcacttttggaggccaatgggtggatccctcgagtccaggagttcaagaccagcctgggaatggtaaaaccccacctctacaaaaaaaaatatgataatcagctgggtgtggtggcatgctatagtcccagttacttgggaggcagaagtgggaggatcaattgagtccaggagttcaaggccgcactgaggtgagctgtgattgcatcactgcacttccccacctctacaaaaaaaaatatgataatcagctgggtgtggtggcatgctatagtcccagttacttgggaggcagaggtgggaggatcgattgagtccaggagttcaaggccgcactgaggtgagctgtgattgcatcactgcactttatcctaggtgctctcgagtgctggtgtatcccaaggagctgctgacttcatactggtgcaggtgggggtgtgggatcatcaggatgttggcactcttgcctagggagctgtcgtcagaagcctggctcctcacttcctcagtgggcagtgtgcggcttggtagggaagggctggatgaaacatcacaggagctggcactctttcgactgtgactctctcgctctcgcacagatctgcaggtggtgaggcactgggcccgggatgggccgggcagcctgaacacttgagcgtcataggcgtcataatctacttggatgggaagggcgttctcagattcttttggactcccgagagatgtatcacggccattttttgctttctcagaggcgggcttctttcctgccagttttattcgtggggtga

SEQ ID NO: 335728 - DNA, 1000 bp, Homo Sapiens
tttttttttttttttttttttttttttttttaatttttgctttatttgaatataattttctcatcaattttgcttgcataaatacagtttgttgcttgttctggtttagtctaatagtaagttggagaagtcctggagaatgggcatcctggtggggtggcagaatggggttctcgcttcagcagatgcagccccccaaacacagcactccatggatgaggactcaaaagatgaatgtcattttctgcccctgtgtctcagagatgccctgaggctgtctgacaaggtgagctgttccacacaaaaaacaaagaattaatcacaccttagtccagcctgagttggggccagtctattgcctgggtcctgagatgtgctgcctcaaatgtcttcactggacgtggtcatgcctgagaccagaatggaataaaacaatccatttgaatacagcgatggatggtcagagatgtccacacacatctctgctcaccctcaccttcctgcaaactccattcatttatttatggggaaatttgatgtttccctcaaatgtcctttccctctcagagaataattttgtttccccgtcatcagatagcactgagaaaggggccagagttgggcctctctggggctgtccctgcagtactcctgggacccttaagcctcggtcttgggttccttcatggatttgacaaattccttgacttcttcttccaaggccttgttcctcttctcaacatcctcccgggagcgctccatgttgcggaggctgatctctagggctgcagacttcttcttttccttctccagttcttcattgagcctcaccactttagcccaaacgtcataattttccttctcaaggtttttaatctgttcctcatacatttgcttctgtgtttctatttcctttcgtagctcttggaccatcctctgcaaagaatcaatttcctcttctccagagttcttttttccaggcccagtttcagagtttgga

SEQ ID NO: 335729 - DNA, 1000 bp, Homo Sapiens; identical to SEQ ID NO: 246399

SEQ ID NO: 335730 - DNA, 1000 bp, Homo Sapiens; identical to SEQ ID NO: 157479

SEQ ID NO: 335731 - DNA, 1000 bp, Homo Sapiens
ttttttttttttttttttgaacacaagggtcagtttcttcaattcatgagcagtcagaacaggagatgcttaggaaggaatcgtggctggtgcctcttctccatgctcatcccataccccagtgacaggataccgcttccctgaagttaaaaacatgcaccacacttccggtaaaggctggagccacagagggcacctagcaagcttgctttcaaggtcccatcaacaaatgagaagggcagccgaggacagattgacagaaaccccactatgttgcttttcttttttttttttttttttcctgagacagagtcttgctctgttgcccaggctggagtgcaatggcacaatctcaactcactgcaacctccaccccctgagttcgagcaattctcctgccttggcctcccgagtagctgggattacaggcgcctgccaccatgcctggctaatttttgtatttttagtagagacggagtttcagcattttggccaggctgattttgaactgctgacctcaggtgatccacctgcctcagcctcccaaaatgctgggattacaggcatgagccactgcgcccagccgagagttttaaagaaggtgaaagctcttcccttttcctaacctagcctggccttgattctgttaataccaagcctgtgtgaattggagtggaaagcagaagtgctgaagggagccattgccagagggaagaacacaaacttcaaggccagatgctcagcggagctctcagaacagccaagccaggaggacagtcaggaggaccataggccaggccaccaggaaccctgcagtgctaggggttccattcatgacaccgggagactgtgcacctctccgagtgatgggccccaaatctagaacccgggctaggtcgatggccggtacttcactgcggacttgacttcttgagcaagaaggctggcactgttcattaagagaatcacagagatgaatctcacaatgcaggaaaactag

SEQ ID NO: 335732 - DNA, 1000 bp, Homo Sapiens
ttttttttattgtaataaactgtttattcaacattttaccaactagtatactttaacagaaaagccctggaggtttattagactatttctgaagaaaaagaaaattaagacatctcagatacagcagcaacaacaactaacatttgtgtagcactttacaattcacaaagtgctttcaacatacattagctcattgaatcctcacaacaaccctgtgaggtaggtatttttgccaatttacaagtgaggtaactgaggctcaaaggttccaggacctttaaagagatccacagcaaatgattggtaaaagatggaccataaaaccagatcttttgactccaagtcccatttaatgccaagtgtttatttttcaatgtagaattatatcatacaatactaaagatgaaaggtcttacaactgatccaacttttcaaaaatggaagcttttataaggaaaaagttctttgatttatatgaaaattcatgacttgttcagttttaaaattaatttggccaatactaccatgactttagtctctatctttaggaagtaccaataaattatatagctttcccttcattgtaggatcacagaaaatcctctactgaagagcacatacgtaggatctgtgactctgaacactaattcaaagtccatccctccttgacctaccagcaaatgcactaagaaaaaaaagtctgccctcctctataggagatagcagcagaacataggtttgaagcagtcacactgtgccagaaattagtttcttcataactcaaagaagaaagggaaggcatcatactaaacctctactgagcctcgggtgccccaaactaacagacatattgcattttacatgaatggattcattaccactatcatgaccaaagagcagttacaaggcatcctcctggggtaccagtacaaaacaaacagagaatacgcccctaccctagggcagcttgctgaagactcttctaaggtctggccagttc

SEQ ID NO: 335733 - DNA, 1000 bp, Homo Sapiens; identical to SEQ ID NO: 157480

SEQ ID NO: 335734 - DNA, 1000 bp, Homo Sapiens
ctatcctttccaagtctgaactgggatgtgagctaacttttggattttagcagttatttctttgataacctttccttcgtcatcaagttccaggcagcagttagtaaggctgaactttccgcatactccctcttcctgggctaggaggtagtctaaggccagtctattttgataaatgacatttctcatttttgtggcttgctgggcaagcagattcaaggcccctgcagtttcattggtaatgatttctagtactgcctgcaatcttataatgcggttaagcatgtaaactggggtgcggtatccccacattccatcttctgcccaggtggctgggccataatattgaattattctttcaggaggccattcactgtccttccaatctcctatagttatgcctcttttgcttttccttttagtttcatcatagatggggtatcctaaggcttctccctgttttaggggcattaggaagaaggacggcctaattgtccccagtacacaggcccctgaccatttagctggcagttgtcgatatgcttgtggcccacagatccagtagaggccagagggtgcctgccaggtatttggagcttcaagttggtaccaagaatggtttaaagatgggaaacgagagaatgggcttgggtgtggtgattcagaattattgcttttgcccctccataaagtctttcctagtgtctcgttgtaatattgttgtcctaggcaagttaactctcctactgggtctgtaaaggcctttccccagcgagcaatacagaattttccaataatggaggtttttaagaaccagatgctctgacttgatggtgcaggttcgagggaagaggcggttagtgtgaaattatcttggggcattagttcccttgcttcccatggccattggtctcccatgttcattcccccacagacataacatgaagcaacgtgcaggctgctggctatgttttcagccagttgggcgaataaattactg

SEQ ID NO: 335735 - DNA, 1000 bp, Homo Sapiens
tttttttttttttttttttttttttttttttttttttttggagcttggtaatgagcatttttattaaattccccaagtacaagccccggtgtacacaataagcaatttcagttttgagtaactgccagggaaggaatgtccccctttctgtttgttgactgccttctgatttgtttgaaagcttttttcttcttgcattatcttgaccattcctggtatgaaggatgttgtcttgtttctcctcagtttcatcttctgcagaagaagaaaccatgccaggcggcagtctcttactgttcatggcttccatggctttactctgttccctttttctctcacaagtcatcagctcagatctaaaaatactctaagggtaaatccactggtgaataaaatggttccaatgtgccatattcctttctttagaaagcaagaattacctccatatatgaatctaaagaatcaattgttatctatgctagaaaaataaagaccattaataagtgcaatattgaaatgggtgaacatcaatttagagacaagtactaaactagcaaagtttttgctaggtttcctccagaacataataccatttatagaccttctaggacaaaccatcttttattgacattaacagaagaagataatcacattttttataaaggcaggcaaggttttcattataagctgttctatagtatttgtatatgtggtttttaaccttgtgcatatgctactttgatttcttcgacagctgagaatgaaggagaaaaacctcatatctagatcaatgtcttatattttatttccaacattttggactaattttgaagtaagagcaaataaagtttcacatttgctgagtatttgttatgtacaaagtgttactttaaaggtactactggatatgcactcattcaaaaagctggaatatgttccacaaagattggttccacaaatatcttttgttccacgaagatttcaaagtgtggaatgtgtt

SEQ ID NO: 335736 - DNA, 1000 bp, Homo Sapiens; identical to SEQ ID NO: 157481

SEQ ID NO: 335737 - DNA, 1000 bp, Homo Sapiens
ttttttttttttttttttaaggttttgatatttttattaaaactgaaaatacacatctccaaatggggaaaaaaattatatagtgttaatgttaagaacaaagttgattccaacctcttgagacataaacacaagcatgaggattatggacagaaacaaatccgtattccaggaacagccgttgattatcgtgagggccgtaacagatgaatacctcttcatgctttctccaacgtgaagtcgttctaatttcgtaagaatgagtttcttcattaaacgctgcttttacctggacatgtgggctatgattcagcaggtccaggtacggagcgagtgcacaggtgtccggctctgcagaaaggcattcccgctgcctgggcctcaggtacacggctctggtgttgacggtgcaccaagcccacagcagggcactgtagctgaagatgctgtcaacagcctccgcaaacagaggctgcagagaagagaaaaagtctctggaggaagcaaagaactcctgcacgtgggctctctgctcttcagcctttgcttttaaagatttgggaagaaggttcaccacttccggctccaaacaaacagggcaggtatacgccttgggtaaaatctccaggtaaggcttccaaagagatcggtgcccagcatgcttttctgaaactaaaaaggtgcacagcgccagcagaggagatggaggaggcttccacttagtaatgtatgcccctaagtagcttcgaatcactgtgtccgtggtgagcaggcaactctcaggcaacgaaataatcatctgtccctcctgcagggatgtttgactcatcagccctcttcctgtacctggaaaacaagcaggcgctaagtttgaatcttgaaacttcctagctttcagccacttcctcagctctataaattcagacttgtggctctcattcactcctcttgattcagaacttccgcagagttttcgtcttctgatccggcttgttctccc

SEQ ID NO: 335738 - DNA, 1000 bp, Homo Sapiens
aaggttttgatatttttattaaaactgaaaatacacatctccaaatggggaaaaaaattatatagtgttaatgttaagaacaaagttgattccaacctcttgagacataaacacaagcatgaggattatggacagaaacaaatccgtattccaggaacagccgttgattatcgtgagggccgtaacagatgaatacctcttcatgctttctccaacgtgaagtcgttctaatttcgtaagaatgagtttcttcattaaacgctgcttttacctggacatgtgggctatgattcagcaggtccaggtacggagcgagtgcacaggtgtccggctctgcagaaaggcattcccgctgcctgggcctcaggtacacggctctggtgttgacggtgcaccaagcccacagcagggcactgtagctgaagatgctgtcaacagcctccgcaaacagaggctgcagagaagagaaaaagtctctggaggaagcaaagaactcctgcacgtgggctctctgctcttcagcctttgcttttaaagatttgggaagaaggttcaccacttccggctccaaacaaacagggcaggtatacgccttgggtaaaatctccaggtaaggcttccaaagagatcggtgcccagcatgcttttctgaaactaaaaaggtgcacagcgccagcagaggagatggaggaggcttccacttagtaatgtatgcccctaagtagcttcgaatcactgtgtccgtggtgagcaggcaactctcaggcaacgaaataatcatctgtccctcctgcagggatgtttgactcatcagccctcttcctgtacctggaaaacaagcaggcgctaagtttgaatcttgaaacttcctagctttcagccacttcctcagctctataaattcagacttgtggctctcattcattctgtattcccagcatttgggaggccaaggcgggaggactgcttgaggccaggagtttgagcccagcctgcccaa

SEQ ID NO: 335739 - DNA, 1000 bp, Homo Sapiens
taaagttgcctctttattttaggtacagtgttcttatttaggtcatttaggttatcatgtttcttaatgtgacagtttgaattttgaaatattccatatatatatataatcgatttaaagaaatcatttgataaacaaaactaatcgagtaaagaaaaatcctttgaagtcctaacatcttcatcattacaaaatggctcactttctaaaaagattttacagtgaatttctttaataccaagccagccatgtaccaagggggtaggggcggtaggagagtccatcccatgtgtgggcaatagtgtattgtctgaaaataatttaaaactaacaatacagctaactaaaagttggtctgctttttattatcaccatctgcttgaaattctaaacaatgttggtgattaaaatactcctcctcgaaagggtaggctcacccccaaccttggtacaccactgtaacaagctctccataccaattaaaataattttcttcacaagtacctttcaataaccatcaattacataaagaaaagaataccatgcttccattttattacaaactctggtttttatgagtagcaaataagaatcctaacagcacagttcatcatggaaacatttccataactctattgtgcttttataacatttagaaacctgggatattttccagtaaatatggttttggtatgcaatgactaagtctgtgaacacaaagttccagccaagcatcttcctgctaagggtaaagataaacatgttattgtttgtttttatttttggtgttctgggattattttaaaagacaaaagggtaaagaaaagggttgcaatgttgtttttggaagaaatggctttaggcttcatgctattttttctcagaaaacgtatccaaggagagttttctggctcacagatgccattatcatcagctttaacaaccatgtatttatttatgtcctctcctctacccaaatcacttactgttaccatcaaat

SEQ ID NO: 335740 - DNA, 1000 bp, Homo Sapiens
ttttttttttttttttttgtctttatgacgatgaatattttattatagagatggactgaactcacttttgcataaagaatctctgaattgggtcagggaaatccacccgctaagaggtcaccacccagctatccctgcctctgcctcagcccccacttgctgtttacatctcagggtcactagaaacagcagagcctgctgttcccagggccaggctggtggggttgggccaagggtcagggatcctggctgcctgccagatcagaaccgccccgtctcccgccccagtcggttgtccagaacctggagctgccggaggaagcctgagttagggcagatattgcggtgggcctgcaccgtctggatggcctctaccagcgtcatgttctcacagatcatgaggaaggccaggacaagtgtggcagagcggcttacccccatggcacagtgtaccagcacgcggccttggggaacactgagggcagctcggatgtatcgagcaacaggcagaaagtagacactgaggtcgaagaaggggttgtcgtccgcctcgatgccatagtactccagggacattccacggtagaatttggcacctgtgtccacctggaacttgcctgcagcggcattcacaacgtgggtgattcccagctggatcagcttgctcttgtcccgggctgcgtacgcatctcccaggaagaggctgggccagacctcatcgatatggttcagtgtggcagcctgacggacccacagcaagcgctgcagcgaagccaatgtgggcggctggtagggagatgcctggactgccccatggatcttgggcctccggaggtcctgcttctgcagtgagtccatcctgtgggagtatctggcccaggctgtgcacttctctgacgggcagttcgtgctgctggctttcagccgcctgtctccgcacacttgatgctgtttctgtggagactgaagacagtggctgagagggggtgtaggcgccagg

SEQ ID NO: 335741 - DNA, 1000 bp, Homo Sapiens
tttttttttttttttttttttcacatctcaaaaaaagtttattatgtttgatacaacagattctcaatattagcaaatcattccacttacccccaagcgccagatcttgactgtacagtctaaaaacatttgtcaaagtgagaaaaatgttacagaacatctcataaaagaattaagatacaaatagtatatacagatagtagattgtaacaaagtggaacgtacttgcaagacatcacctagctaaaatacttgattccctatgaggacaaactgaaaaataaaatatttcaagcacacaaagaaaggacaaaataggggaaaccaatgggaaatataaagtttaaacttatttttaacatttaaaagcaactacacttttccatttgagccagttcaaaaaggagaagtcaaataaagactttagaatcctgtgaccaactataatttgagcttgataacatgaatggcatctgaaagatgcaagccaagtatttctagtactgtgaccttgagagataataactgagcaacctgctaggttaaccttgaggggtaaatcatattgatagaacaaactgaataaagtgaatgatacaccagacaattaggcaccaattaggctcacttctccattttccaaacctaccaaaaaatatctgaatagacagatagattcagaccagggagtgagcaaaaaataaaaatgattgctaattaggcaattatatactaaaagtggaccttttaaggccagagttttcatcccaatcaccagagatccccataatttcaccgtattcagattggctatctctacttttaaattggcactgtctaaaaattcacaaacatttatggaatggtaaaaattttgagcttcaaacaattgaataccatttggtgatgcaagaaaatgctaattttaaaaatagcttctgattttggaattatggaagtctaaatataatgttttctcactttaaaatggaaaaaactt

SEQ ID NO: 335742 - DNA, 1000 bp, Homo Sapiens; identical to SEQ ID NO: 157483

SEQ ID NO: 335743 - DNA, 1000 bp, Homo Sapiens; identical to SEQ ID NO: 157484

SEQ ID NO: 335744 - DNA, 1000 bp, Homo Sapiens; identical to SEQ ID NO: 157485

SEQ ID NO: 335745 - DNA, 1000 bp, Homo Sapiens
ctgaaatgaaaatcttttataaagcaataccagaagcataaaaaaatccagttactacaaagactgaaggaatactatatcacctgattatagtacacatgctaaatacacagacacgcatcacttgaagtataatcttaatcttatacatgcaaaaatcccccacgagtttgcaaacagatttgaaaaagcactttttacattcagttatgtctagtaagtaagccttgttttaagacacgagttttatgaatacagttattatttgaggtctccattcacttacatttctttgggaaatacaggttgaatatactttttagaagtaacaaaaatgtaagtcacaataacaaaactgtatataatattatttagtatgacttatggcttccttgaatctttaaaataactctcttgaaaaaaaattaatctgaaacaaactgaactgcatgttcttaacatatgttgatctttcttaaagtccttccactgtaactgtatttctaaggcagatgcttaggaaatgatatgtaataaatcttgttgaaaaaggtgatactctattcaatgcacattaaactattattcctaagatataattaattctcagtgccttttttgttatcttgacacttttcactgtgtatagaggaaattctagggtacacagatgttcatcaagactgaactgatgtgttgaccttggttagtggtcccacaaactttttcagactttaaacatcattaaatatgtcactgcgagacatcgagagatatcgtccaccaggctgataccttcctgattcagattcaagaggatcatcagtgaatgtttctgcattaaaatccaaaggttctgcatcttggagaagttctatccggtccctttcagtcctgttattagccctggtatatttgaatgcagaacggttggtattaacatctgagaagtttgactctttggggtcagtatgaatatttctgttcctagtggaatctt

SEQ ID NO: 335746 - DNA, 1000 bp, Homo Sapiens
gagacagagtctcactctgttgcccaggctggagtgcagtcgtgcgatctcagctcactgcaacctctgcctcccaggttcaagcgattctcctgcctcagccttctgagtagctgggattacaggtgcctgccaccacatctggctaatttttgtgttttagtagagcgaggtttcaccatgttggccaggctggtcactaactcctgaccttaggtgatccacccacctcgtcctcccaaagtgctgggattacaggcatgagccaccgcgcccggccaaataaatgtgcctttatttataattgcaaatgggtcaaagattcagtatgtcgtacaaaactcaaaaggtacaaaaaagaacacggtgaaaagtaagtcttcctccctcctctgctctcagcttcccaattctcctcctcctcggaggtaaacactcttattagtttcttctctatccttccagaaatcaaatattctcttctaggaattttttaaaaagcattgtttatcaagatgtggtctacagaccccctcagtcagaatcgcccacatcacaaacattcaagttggagaacactgctttgaagaatttgccgggtatcatcctgtgatgggaaggatatttccagatggccttatttccccacatgatctcggctcgccgcaacctctgcctcccaggttccagcgattctcctgcctcaccctccagactagctgggattataggcacgtgccaccatgcctggctaatttttgtatttttagtagagacggggtttcaccatgttggtcaggctggtcttgaggtcctgatctcgtgatccgcccacctcggcctcccaaagtgctgggattacaggcttgagccaccgcacctggcccagatgaccttatttctaagagaggagactaaggctgaacctggtcaaattcatgccaggtctagaactagttttcaacactttctgccacactagtgttttgcagaacctgtg

SEQ ID NO: 335747 - DNA, 567 bp, Homo Sapiens
ttaagggcctgtcccgggcagcacattaggggcaaacagcctggatgcccagctgtggacccgcatccatgcctggaggaggaggttgcctctgggagcaggcgtagctgctggaactcttcttcccagccttcttttaatgctctccggcacctccgtgatttcaggcagctcctcgttggtctggtccttggctggagctccctccagctccagtgctctctctggaggggcctcttcccatgctggctctggctccgccgctggtgctggcagtgctcttacttctgcacatggaccaggagcaagtgtctgtgcctcaatgagctcctgaatctcctggacaaggacagtgtgcagctgcagccccaatgggatctctggtgtggcctggcctgctagggcctgccccaggctgtcctgtggtacctggatgcgccttattacaacgggcgacaggcgtctggggtgagggatgagccttcttcggcatcgtcggaaaaggctctcactccctccattcctgaagcagcaacctctcgaagtggggaagcaacacgagaacat

SEQ ID NO: 335748 - DNA, 1000 bp, Homo Sapiens
atagcatagtatcatttatttaaaaatttttaaaagcatgcactgtacattttactggtgtgtgcattaccccagaaggtgctgatggggtgaggagtgagaagagcacacccgcaaggacccaagggcactagcgctctgaacgagtcagcatttcctactctgtgtccactggaacaaacaggttttggaagcttctaggcagagcccacagcacgtgctcactggattccatgggttccaaagtgcttgagtgtgtggttccctggaggacacaccaatgctggaagagacagcagcaggccccacagggtggccagggatgcggggatcctgctgagggtctttgctgaggaggggcagagagagtcctgggctggagggtggcacaggtgcccaaataccaaacctggaggcctattctaactgagcgcttctacaggttggattgagcttaaataagctcattttacaaggttgcatgcatgcatgtttgaggactcacagcaaatctactagagggcgggcccaggacagtctggggaggagaaaaggtgccagtatcagggttgaagggcaaacagaaaaacaagaaagtaaagagaaatagcaaatagaggggccttgcatgagtccaggaggtgtactctgtactgaggaatagtaaacaacctacatctgagactcttccaaaaacttaaagtccacagctggctgggctccaccagacatgtctctgattgttgggtgggtctgggtctagagggctgattagcactcaaagaggcggcggcgggccctgcagggtgaccgggaggaggagcgggagcagcccgggtccagctgagaatcttcaatgggggaagggggcagagggcggagctctgaactgcagcagggcaaaggtgcccaaataccgaacctggaggcccattctgagggaggggctttgcatgtcttcaagtagggagctcctctggatggcccctctacggcagcc

SEQ ID NO: 335749 - DNA, 1000 bp, Homo Sapiens
tttattttttctggcaataaaatactttattggtactgtttaataaacgtcaaaaacatagtaacatttccattggttagcttccatctttaaactaaaagctagtttaaaaacaataggaggaaaagtaaactcatttgattctctcgaaaaacaagctgtaacttacctttgcaaataattacgttatctcactttaaatattataattcactggtctttgtaatacacaattgtattaatatataaaaggagacagtggcctgattttgcagagaatatttcacacatctttaaaaaaatccctaaacactaccacaactcaaaacttgtaagaataattaggtaagagttattataatattgaattaatatagcacctagaaatttgaaatttgtaatatttcagatgatatgatttactgagaaaaagagtaatgatttttcttcagtgaattttcaggggtttacatactaatagaattcaacataggtctcttttaaaagctgaaggttaaaaaatttatgcatgctaggaattgacctgatggtaacagatccatgtgtgacaaataatcacacatagtgcagtcctatctgaatataatttcttcttcactttgtctcattaatttatacctcaaaacattctatatgcaagtgatatatttctctaaaacattccatatttcagatttccattcagactatcttcccctcctcctctcttttctcaaatcagagtgaccttgtggtataccatttgctttttctccccacaatgaaactctttttcaactcaaagtattatagtaatgcaaatacaaatgtagcatatattaatatattagaaaaaaggatagcaaatacatatgggtccatgccaaatgagaaaatcgaaagcaaaaacaaaaccttgctatgctcatctattctgaaccaccatgggaagaccctgatgtagctggcgcacataaactaatgttcccagacacagcta

SEQ ID NO: 335750 - DNA, 1000 bp, Homo Sapiens
acaatttgttctttttaattgggtgacattaaagagtaccttctaagcagttaaatgtgccaggagtcatattgacacagggccacagacatgagtaagacaatgcattcacagtctcataaggcagatcacagacttatacttagcctctgggtacagaaaagttacttcccacatttttctcattgaaaatgtttcctctcagaatcttggtgtggttttacataaaggaggattcttcagatcttttttggagactgagtctttactctggcaaccaaaattgtatttcccctgcttctaaactttcctctaaactcctctctatttagccttctgtctccttagtcctgagatcctgcagtagttgagcaactggaacgtcacgtttataaataaaccaaagtcaagggatgttgggctctccagaggtggacttcaggtggacaaagatgacactggagtaagagtcatgccttgaggatccagagaaactccaaaggatcttatcttggtaaaggctattgacacctcagtcactagcatttgagggtctattaatctcataattcattcacaattcagcatggtgagattatatagctgaggaaatgggagttgtggtaggtaaagagggccaagaaagacataaatttttgcagaaatagttggtatcctgaagagggaataccacattaaggcttccctaggagacaggcacctttgccttcatgggcccatcctgtattaatacttaaattgtgtttccattgccatgatgtaaacacaaagatagagctggatggagtcattattacatatgcattattattgtattcatttttcttctgattttaatataaattaaagagaacgttatgatgggcccctataggtttgtaggtcctacacactgagccttctagactcataggcagtgggccctgagtgctagacccaggcacagatagtaagggccttcaagaattggattcacaat

SEQ ID NO: 335751 - DNA, 1000 bp, Homo Sapiens
ttcacatcataaaatatttattaataagtaaaatgattttcccctgcctttggttattaaaaaatgagtatcattgatgataccaattgccaacactggttttacattattcagtcatgaaacagaatagaaagatgatcgatagatatctatagacataaatgtgtagaagaccataccatacagcgatttgtttaattacaaaatactggttgtgctagcagttggaaatgtacttgcacatccttaaagttatctttttttatataagtaaagaacacacaaataaattcacttgaatttgataatttggaacattggcaatgaatacagtgcctgttgaggcctgaaagagagaggaaatcaagaacagtgtgggagaagaaaggcaatccttcgttgaaaagcttttctcttaacaatccttagtgcctgaaaaataagccattttgataacaagagtataaaaagccttatgatctgcaaagtaaatcgtatctggtttaaatttcatcccaagtctcaggttatggctgaggagctatactaagtatctttgtaacacatttctttgaatttttataactaagacaagaaaatttttttatcagatctaggcagaaatactgatcttcatttacaagtatagtaattacttgcactcaggactatatagacatggggctctgaaaaccaaacagaaggaaacgccaaaccataaccacaaggcaaaattaaaagtaactcagagaagcagcgggtgatagtttatgatttcaatataaaaaagaatgcattacctctcagatgtcaccttaaagccagaaaattaagatacaatcaagaaggggatgaatggttttatgactataccacctactacttcaagattaaaatcatcccagagttctgaaatgtcttcattagttaagtaactatacaatttatttcagtctctttttaatgtagaaaatcactttgtaataagatctctacataa

SEQ ID NO: 335752 - DNA, 1000 bp, Homo Sapiens
gacagagataccaattttactcggaaagttataaagcaataaaataaagtgttacaaacacaatggcattaccattgttgctatcacctttagtcttctggaaaggttgaaaggacaaatggcatcttggaactgaaactggcaaagttaagtgaattgactggattgccttggctaacagtattaccattggccttgatggcaatcagattcccctctcagtggaaaatgtaacttgaccccttatgaaacagtcactgggccgggcatggtggctcatgcctgtaatcccagcactttgggaggccgaggagggcagaacacctgaggtcaggagtttgagaccagcctggccaacatgggggtttcaaccccatctctattaaaaataaaaaattagctgggtgtcatggcacgcgcctgtagtcccagctactcgggaggctgaggaaggagaattgcttgaacctgggaggtggaggttgcagtgagccgggatcgtgtcactgcactccagtcctggcgacagagcgagactccatctcaaaaaaaaaagaaagaaagaaaagaaacagtcactggaaggcctatgcccctaagaatagaacctcatgtatcttctactcttataaactctgctatgattcagtagtgcaaggctttaatgcattatgccaaagcatactttcactaggttaacaaaaaaaaaaaaaaaggcaggccgggcgcggtggctcacacctataatcccagcactttgggaggctgaggcaggcggatcacgaggtcaggagttcaagaccagcctggccaagatgatgaaatcccgtctctactaaaaatacaaaaattagccaggtgtggtggcaggcgcctgtaatcccagctacttgggaggctgaggcaggagaattgcttgaacctgggtggcagaagttgcagtgagtcaagatcacgccactgcactctagcctgggtgatcaagtgagactctgtctca

SEQ ID NO: 335753 - DNA, 1000 bp, Homo Sapiens
aaagaggaactggtggtggttgctattttatttaaaacttttaaagaagttgtttattgccaataattaaagagctcaaagggaagtcatttaaccatgagattgccaaatagaactctacaacagctgattcaacctttttaaaattttccctggggagagacttcactactatctctgctgatggactccatagttctcatactttacctgaaagttcttcctaacatctgatctcaacctttcttgccggggcattggcctgttttcccagccaagccttgtttttgtttttgaggaacgaacagcttttttgggtacagaccaggagtccatgggtcttgaggacctctgtgtatttatcagttttcttctccacattctttttggcctgtctccatagacttgtgagccccatgccttgtttaagggggaaaaatggcatttccctacaaattaaatgtaagaatccatagagaactggaccccattaaaaatatttggaattcacatggccacttgatcatattccgctggctcagacagagcagggttgacaaaataccagaaactgggcttgtgtctttctggattgacattgacataatctgtgatttcctttatgttctcatagtccagcggggagtcattttttagttctccagggtcagaaaagacgacttgtgtgtaatccacatcctctgtggcctggcaggcaggaggcgaactgcaggagctatccaagctatctgagggtgtgtcgctgtcatgcctgtaaagggaatcagacattgggatgtctctctctgtctgagtctccttcatctctttgacagcaggtggatgatggtggccagggctgggcctgggaacctggagactggccgctttcagtatctgttcactcttgtgggccatgtgcctgctgagcaggtagttgatggcggtgaggaagcaggcctgcaggaagagggacaccaccgcgatcactaagccatgc

SEQ ID NO: 335754 - DNA, 1000 bp, Homo Sapiens
caggattcctgtcccccagactctctgaatccaggtgataagaagtcacacatcccagctggaagtcaagagtccacatccccttcaagcacccaggattaagcccaggcatcccctgtcagagtctggactcccaagccccctcccactcctcactgggcaggctcagggggtgccagcacagcctcagcatcagcccgcatctcatcgagagcctgcagcaggacgccgtgagccgctcggtagcccaggccacctgtcgccgctgcaccacccgcaggccacaggaaggagagagcccccagtgctgcgcccccagcagtgccctcgcccgcccaggcgcccagtcttgcttccacctcggcgcgcgtcaccgggcctgggaaatgagcgcgcgctgccagctctccagaagccaggcccagggcacgctcacgtcgagccagtgccgtgggttccagccccaggccccgtcgccactccgccagctgaccccgcagaagtgccacgtcgcatgcccagcccagccctgggagtggtgccgccgccgccgccagactagccagcagagctggcctccacgccccggctcgcaacgccgcagccttggttcgggcagcgctgggagatgctggtggcaacgccagcagcagtgcccctgcctgggctggggggagcgctcgccgcagccattcgcatagccctgggagtccgccaggccgtagggggaacactggcggcggcgcctcctccagcacctcccacgtctcgtcctccgggcttaacgcagcggcccgctctgagtcgccaccacctgatttcttcatgccgacaacctgctgcaaaccctcgctgccagctttcccaggaccttccccgctgcctgctttctgcgatccagcgctacatttctcccttcccttactgagtgcattctccaatccccctccacctgcgttctttaagctctcgcccttgggattctccatcttgccttctc

SEQ ID NO: 335755 - DNA, 1000 bp, Homo Sapiens; identical to SEQ ID NO: 157319

SEQ ID NO: 335756 - DNA, 1000 bp, Homo Sapiens
ttttttttttcaagggataataaatataattgctatgacgggaccttgcctagagaagcaggaacatcctctactcccagcccccacctgtcccttcccacatgctgagggtgaattagatactttgagatcaccctggggctgctgggagctatgggggatgctgagggcaggccccagtattccggctaaccactcccagcccctgggccggccccctagcccaggacatccaggtagacaggaggtgcctgggccagggcttgcagccgggcgtgcacatccttgatgctgtggcgttgctggggctcccgctgccagcagccccgcatgatggcgtagacctctggtgggcaggcacgtggccgctccaactcacgtccctgcgtgatgcagtcgattgcctccgtgttggagagctggtaccagggctgcttgccgtaggtgaagatctcccagagcaccacgccgaagctccacacgtcgctctcggtggtgaacttacggtacaggatgctctcgggcggcatccagcgaatgggcagcatggtgcggcctcccacacggtaatagtcggtgctgtagatatccctgctcatgccaaaatcaccaatcttgaccaccagtccctggcccactagacagttgcgtgtggccaggtcccggtgcacaaaatgcagacccgccaggtacaccatccccgcagcgacctggctagccacggccagcagctgccccagacccagggggcctggagccacatcctccccaccagccagcagcttggcatcaggtccatgggatcggaggaagcggttgaggtccccgtgccgcatatactcaaagaccatgagcagggggcggccctcggtgcagacgccgaagaagcgcacgatgtgctggtgctgcagcatggtgagcagctcagcctcacgctggaagtcctgccgagcactctcggacgcctccttcagtgccttgacagccaccagcatcttgt

SEQ ID NO: 335757 - DNA, 1000 bp, Homo Sapiens
ttttttttttttcaagggttctgcatctcgtttattagcacagaaataacaggtttagagtatattacaaaaagagctcaaactgttcagatacagcaactgggcttactaggggacagaaggggaaatacgtcagactactgtacagggacacaaagactcctcatcctaaacaaagtattaaggtacatagacaagtttcttgtaagacagaaaacagagaaatccacagtaactctaacacatcccttaaggaataagcatgtatttgtaggaagcaaacaaagctttccatagagaaaccactttcacaggatgattaggtggacttgggttttgtttctgcatctgtcacttggcgaatgaagataccatcttcaggatgttctgtgtcatccatttcatacatatatgatgacgctattgcaagcgtagtcccatcattactgaaggcaagtgatgcgatgctcgtggggtaccgatggaattggcacagtcgctttttgttaaatggatcccaaatatttacaaagccatcagaaccacctgtggcaaatgtattgtggatattgtgaaaagaaatggcattgactgggtaaatctgctcaatattattttcttttagtctgtgacatttgaaggcatacttcttcttctgtacctcagggcttgggtccaaatactcaactgccactcggccttcaatagagcttaatacataaccctgcttgtttggaaacgctcgtatgcagcgagtctggtatttcaggctggactccctgcgctgctgcacgtaacccatgttccgtaagtcccacaccaacactctgcggcctgctgttcccacaatcagccggtctccagacactgagagggtatataccttttcaggctgagagaaggtcccagcattacaaggagttctgggatcccacagtttaactgtctgatcccaacttccagtgaccatcacattcacttctggacagtattcaacaca

SEQ ID NO: 335758 - DNA, 1000 bp, Homo Sapiens
tcatataactgaggcatagtcttcaagatcaagtgcttggttatagtcagccatagcttcctcaatcagacctattttaccacgaacttttgctctaaaattatatactagagcatcattaggcttcaaagacagggctttattaaggtcttcctcagctagttcatattgctttaagcagtagtagaaatgtgctctattaaaatatactgcagcccaaaagggacagctttcaattacatttgcaaaatcttcttttgcttcttcatatttctttaatattgtatttgtaatagctcgattcatgagaacatattcattttctggatcaaattttaaagcttttgagaagtagtcactggcctgggaaaactgcctgtggtgaaagtagatatttcctgcattaaagtaagccagcgagtacttggggtttagagtaattgcatcttggtagtctttcattgcattctgtttgtggcccataaactcatgaatcaccccacgatttgttaagaattctgctgtagtactgatcttcatggcagcattaatatcctgcattgcagcaaaattattacccatctgaagacagaccacagctcttccttcataggctaggtagttctttggatcagtatctatggcaatggtaaagtggttccaagctttctggaattttccttgggcctgcaaattatagccaaaactaattctggcttttatgtatgctggattaatatgcagtgctttcagaaagtctttctgtgcttgcttggtggcttcatcatgaccgtattccatgtaagaatttccccgtccaacataagcatccagaaaacatgggttaattttaagagcccaagtaaagaaattgacagcttcttcaaactcattaattctgtgatggcacatggcagtggcgtgacaaaggctcccgttagtccggcttatcagtgcagcttgtttaaaatcctctagtgcaaagccatactggcctagt

SEQ ID NO: 335759 - DNA, 1000 bp, Homo Sapiens; identical to SEQ ID NO: 157489

SEQ ID NO: 335760 - DNA, 1000 bp, Homo Sapiens; identical to SEQ ID NO: 157490

SEQ ID NO: 335761 - DNA, 1000 bp, Homo Sapiens
tttttttttttttttttttcccagtgtaagaaaacttgtttttatttttaaatactttggaaagctctttcagagcaatataaatgagtgcctgggaggaggaggttttgtgccagagccttgccccctcactcactcttgggggtcctgatgaactcttggaccctgtggaagataagagttagagacctcggcctcctggtcagtggagcccttggcctcatgcctggtgggctaagcgggcccagctggggtttgaggtaggggaggccttggcttggccccagcagctccagggccctgagttcctgccagaggctggagagcaggcagctgctgcttttcctggtccttggtaggggagggtcctcaggcttgcgtgccaaagcctgaaggattctgcttctgccagcgccagagatcctcacacatcctgtccagccctaaggctgctgtccaccccagctcctcttgggccaggctggggttggcgtaacaggctgccacatcaccttcccgccgtgccaccaccttgtacgggatcttcttcccagaggccttctccatagcctggaccatctgcagcactgaatagcctgtgcccgtgcccaggttgtagatccggcagccacactgttctttcagcttccttaaggctgcaatgtggcccttggccagatccacgacatggatgtaatcccggacacctgtgccatcctctgtgtcatagtcattgccaaagacattcagggcctcccgtcgcccgatcgccacctgggagacataaggcatgaggttgttgggtatgccctggggatcctcaccaatgcagccagaggcatgggcacctgtggggttgaaatagcgcagcagcactgcgttccaagtcttgtctgcctggcacaggtcccggatcatttcctcgatgaagaacttggacttgccgtaagggttggtacaaccacccgtggggtgggcctcatcaaggggcaggtactgg

SEQ ID NO: 335762 - DNA, 1000 bp, Homo Sapiens
gctgtacaaggtctttttctttgttgtcatggttgattttgtacatttcagcatttgcatcatacaaaggggggagcaacagccatggcttttggtcaggttcaggggggctgagggggtgctcctcccctccccccaggcactgacacattgaaaggaagcagagcaacaatgacacagcacggatgtgggaaaggggatcccccacgggggcaggatggtccatctcaccggggtctcaccaggactccccgctcccacccagggccagcacgagcacctcccgttttctccccagtgcagagcgtggggtgacaggagtgggactggagcaggggacatttggtgggaggcatgtcctcaggcctgggagaccaggctggccccagcctccctgtgcggtcaggggcctgtggaaccctagaggatggagcaggtggacagcaggggtgggcaaccctgccagctgggtactagggctattggggctggagggtctaccccactgtactctagccacaaggctgtggggtggctgctttgcccaccagctgtccccctgataggggatctgggctgcaatacttctgtatcctccctgttctctctctctctcttacacacacctgggatggtgtctcgacttcctgattccatctggaggagtaccctgcacagctttgcagttaaggacaccttctgggagcttctggatttggaggggaggacgtccatgtttggagatcctgacctgtcactggtgcccagcccagggcgatccacagccgcctttttgcttctctctggcagctcctcccaggcatgggatcctgggcccttccctgagagcacacacgctcacctcacctggtgcacgctcccttgaacctcattcttttttcacccatctacaaatgattgctccttcctattttctcatctgggggttctctcccttgtgtgttgtgtgcgtgctgaattctggggccactcctcccct

SEQ ID NO: 335763 - DNA, 1000 bp, Homo Sapiens
ttttttttttttttttttcttgaaaatccattccttttattgattttattatgttgcatggaaatatagtttcacacaccatacttttactaataaatgtaaagaacaaattacttttgaacaattaaaataaccaaatattgattttcaataaagtatattttgaaataattctgaagccataaaagactaaaattcactttatgctaaaataaatcatattctcccataatgcaattatttaatttttttaaaaaaagaaaccacccaataagagtttaattcattcggaaatttttagcatttataaatgcaatagagtgtttctactatacttactggcatcattctttaccttatcacttatcttcacaccggaagaggtgaaccaggtgattatgccccctgctggggctggttcttcctctaaacagtgacttggcctggcaattaggtgcaaaattacctacatttaccctaaagatttcttcagagctgtcagtcttcctaaaactaccctagcaaataatactttttcctttctgcaaatactgttattcaaaccactgtatttaccccattccaagctttccattctctgttaagaatttctcaggtgctcatgaagttttaaaggacaagactcctctcagaagtatatactactcataagctcaaagcaaattaggttattttacaatccttgctacaggccagaaaatgagcattgagtaagtaattatcctaatttgaaaaggagaaaacaagtacaaaaagagattgagcaattttaaaaaaaaatcctccacatttgtactttaaggattaaaatgtaccatacagtctgatgctcaaaacaaactctttttgagaacagacatcattttacaaataaagacactgaggctcagagatatgagtcactgcctaaggtagtacaaatagaaatctatattattagaacttaaactcaggttgggtatagtggctcatgcctgta

SEQ ID NO: 335764 - DNA, 1000 bp, Homo Sapiens; identical to SEQ ID NO: 157491

SEQ ID NO: 335765 - DNA, 838 bp, Homo Sapiens
ttttttttttttttttctttttactataatatttaatataataatatacacttatacattggtattatttacacttcattaaaaaaaacccattcaacctgaaattaactaccttaaacacactatttaactttcagtgctaatgtattaatttcttaaatataaatcaaaatagctcaatatctaaattactgataactagatgcagatgtaaggaccatgaatcaatacttccattaagttaaaaatatcaataattttttgcaacatttcttctttgtttttcttctttgtctagaatagtctgttttaagctcaaagtagcatcttgaaatccaggatttaagtctaagaccttcttgaaatcttccaaagcatcatcaaaatatcccagcctatacagtatcaaccctctgttgtaatatggaacttcaaaattgggttggacttctatggcagatgtgtagtcatccatggcttcataaaaatcaaccctgaagtacttgatttgccccctgttgttatatgcagtagccaaatcctcagggctgcatttgctcccgggactctcgtcgctggaggccgcgcaagcgcaccggcgaatgtaagcggagtacagtgcctcggcctccgcgtactctccattgttgaaatgagcctgggcgagtgttagggttgcgtggctttcttgccgctgtccttccatagcagccaaggcctagttttcggtgtagaatgggggttgacctccgagcggttagaggtggcaccacaaagccacttccacaccctggaatctaccttgacagccaaccttggcgctaggtttgtgcctcat

SEQ ID NO: 335766 - DNA, 1000 bp, Homo Sapiens
tttttttttttttttaagacacaagactaattactttattaggtgcattctataagttgaagaggagaatttttggcaaataaataaataaataaataaataatcaaacagagactctggggcccgaggagctcaggaaaacggaagcggagtctttgcatagttctaaatgaacaggaggtggcagcagtaggcaacgcggattctcggcggaaatgcagcacttgcaaaaaccagggacagaaggctttgagaaagaggagaaggtcagaaggtgactaactatttctttttcgtagagaccatggtgtggaacattcgtcctctctaccaggggcaggatgccgcgtcctacatgatctgcctgggcatcccgtaccctgtcatgcccgcctgggaggctcccttgttgctgcccatctgcaggcctattacgttctgtccctggcgaagctgctcctcggaaaagcctctccgattctgctgggctttcctgtgaaaccaggatggctctccccgatagcagccatcatccttggtgactgcaacgctgcctaaagccatcagggtcctctgcacagctgccatgtccttcccttcccatagatccaccgtctgaaagatgtcggtggttctgacaccataggtctccgcagcttttaggaactgggagatttgctccatctgcttaaaagccatctttgactctgagatcttgggtatgggctcttgtcctggtgggtataaactatttatcagcttgcacaggaccgtcccgtccattaaccatttctgaaaatgggccctgccggggggcgggtgctctatgtcctcggcgcactgcaggatgatccagtccaccagcttgttctccaggtccgcatcatacttctgctcgatcttctcctgcacctctcggcttaagccatagctcgggcccctgttagccatctctggaaagaagagaagacacgcgcggcatccacacaatagcagcagc

SEQ ID NO: 335767 - DNA, 1000 bp, Homo Sapiens
ttttttttttttttttttttttttttttttttttttttttttttttttttttttttttttttttttttttgttttgtaatcaggaaatatatttgtcattgactcacaaaacaaaatgtgctttcaaaatcttttgaaacaatttttctgaaatttatttctaaaagtcagagacaaaactttagaagtgacacatttatactaagcatacatgcgtgagcaaaaaaaataagcacagaatacaaaaatgaaatagtaaaattttaatacagtattctgaatacaagtagaataccactagataagaattgtatttacctaagaaatctatgatagtgtgggtggagataaaccagtttaggatagccacttcactattcacattttaatcagtgctgaccagaagctaaagcaatttcttttaggctaagattggcaaaaaatcatagacccaattttccttgttatgaatcaaatgaacatgttttaaggtgatttgtcctcatttaacggtagctggggtaagtcaaaccacagagagcccttacaaagactaagcaccaaatgatgaactgtttgtggcttttgttttgggccatcttaagttttgtgttttccattaacattcatgtgcaaattcttacaggcaaaagttttaacgtggaagtttcagcttggagatcttgccaactgtacttacaacagttttaaagcaattgatactttcagaacaatctcaagcttaattggttaccattataagatgcagaactttttaatgttttctggtccctgaaaattcaatagggccaaatgcattaactggaaatagcatttttttaaagtcttaatcaaagatgataatggataaaacaactatataggctctcatacacaatctttcttaattttcaccttgtaagaaatgattacaatgtccttcaggcttgttatacacccccacagaatcaagaagaaagccaacaaagaattgaacatt

SEQ ID NO: 335768 - DNA, 1000 bp, Homo Sapiens
gactaacactgtgtttaatttttcaatttttagtcatagcacacatcggacatttggaaaacagcagtggcaacaactgtatgacacacttaatgcctggaaacaaaatctgaacaaagtgaaaaacagccttttgagtctttctgatacctgagtttttatgcttataatttttgttctttgaaaaaaaagccctaaatcatagtaaaacattataaactaaaaaaatttgcctagtctggacagttattgtctcaaatttatactaaaatcacaaactccagaggatatgaagtaataaattacaaggggtcacaatgtctgtcatacaatacataaattctgttctttaaaaaaggatattgaagaagcaatgagcactttaaagaaaggataatatacagagagaagacagaagtagagtaatacaatttcttcacattagaaaaacttggaaaagcaaagacaaactgtagagctttaaatacaacagtcattttattctagtaaaaactataccagaatttcagttacataatttcactactgaaagcacttatctacattattttaatctgttgtttttttccaacgtctcttctgcttttcttttttttggctggttgtcattttctaaacttagtaaattttcacttttatttagttgattcgtaatgaggctctgccagtcatcatcaccagaagtatttttagtcgtcttgattgcctgcaaatggctttgtagtggagttgatatcagaggctttgttttcacatgttctgtgggaaaagaggaatcataaaaagtctttgccattgcattcttctcttcactgggttctcccttgggatctggatggatactccagttattcaaagtgtcagcaactctgttaatgctggtagtatctggtccaatatcctttccaacatcatccacaccaatatttttacaaagagccattgaaatgatctttttgttttctgatggatctagtgg

SEQ ID NO: 335769 - DNA, 1000 bp, Homo Sapiens
tgcagtttcacatgtttatttttggcaggaaggaaatcattgcaaaccttttgattgacaatactcgcccctggaaacgtgcacattccgcatgtagcatttcctaagtaatgctggattgtttatcacattcaaatgtccagcagaaatccatgactacccagacaccagcatctccactacccggggtgggggagggtgtgtcagtctgcagagaagctcctgggagaatggaacaggaacagacatgatcaaagttacagtacagtaggaacagaggcagccagccaattttgcacagttaactgcaagtacgtcaagccattcactcttctcgaaccctggcatgccaactgtccagcacagcacctttaaaagcagaggcacaaacgtaggattgtttgaccatagggctgtgtggttctggattttttattagaaagccatctttaaaaatacagggttgtaaaatgttgccaggttacagacttacaggtttttttttttaacaccaaaagttcaaatgctgcaaccatgacaagtcagcatcattagggcatcctcgtgtccccagagacatctcatcaaaattgcaccacgtcaaaggagcttcctcaccatcaactgtggcaggtggcattcctttttcagtatgcaaatgcattatttacaaacagctaatgcatggaaccacagaccaacacgtaggattccagaacaaatggaagacagagcattaacaacattgggagtgcctgtgcacttccactggaggcctggccagagaagtaataacatcatagtgggctgcagtccacaaacccaaggtgtcctgtcccagagctcaatgtcaaaaatacttctccagaagactacatttaaacctggtacagaaaggagcatggaaactcaggaggtcagggttctcttttggctaaagagttgggggtattttggtaacatgggaagtatatggcacagagaagtggctaacaggttt

SEQ ID NO: 335770 - DNA, 1000 bp, Homo Sapiens
aacaagagaaaaacaagtaattttattaatatatgcaacgtacatcacacaggagaaaactcaatgaaaaggtaaacacaagtagtggcttacaactctggactatatagcatcttccacaaagaatacatttcagagaagtgtgacaagacgaaggaaagcagttttaggcttccagaggcagaaactgtggaaggtaaatatatgttaagaaactaatagtttcttgtttgtagattcctctggtgctgtctcagctgattagagccatcttctcatcttggtatcaggaaagcatctttatcaaagaagtttgtatggcttgctacaggtaggaaaggacagttaaaatagccatttctgcaactactgttagtcaagcacctttagctcgaaataatcagtatgccaaatcggcatatttgggggtggcatgttcaaatttccttcagataaaaagaacagaaaggtcagaatctggcccttacatagtaactgcatgacagatgttgcacttgaaaaattgatacttggaggaacagctataaatatgtaaaaataattaaaacaagattccaaaatcatgccataaaagaaaacaaatttcagttggactaaacatctaaatgttaaaaacaaaaattttgtaacttttggaaggctgaataggactatttttatgacatttcctatacaaaaaccagaaaaagcaaatcattatgaaagattggtaaaattacgtttttaaaaactcaagatttcataaccaaaatatgaagacaaaccagactaaaaaagataattggaacatacataacagatcattagtattcaaaatatgtaatatctaaaaactgacaagtaaaaaaaacaacatagaaaaatgagcaaaaatgcctgtaatcccagtgctttataggaggaggcgagatgggaggattgtttgagtccaagtctaaggttacagtgagctatgatcctgccaccacactccagcctg

SEQ ID NO: 335771 - DNA, 673 bp, Homo Sapiens
tttttttttttttttttttttttttttttttttttttttttttttttttttttttttttttttttttttttttttttttttggagaacatcagactcatgtttattagggagtgagggagcacaaagggaggtctccttgcccttgttctccttaacacagctcagagtccccaagcctgggcccgtccaggtaggggtgggaggtgggcgagcagaaggccctagttctagcagcaagccaagaccgacaggtgtgcctgcctcatcacagaggcccaggacccaatccgcttctccgaccctcgccctccggcaggctcagacatcaatgggctcccgacctcggttctgcctcttcaccacaaacaccctctgtcctgacaccgtcaccagcagtgtgtgttctccaaagaccacagacaggcgcttgaagggcacattcatgccgcggtgcagccggaaaccgcaggctgtgctgaccagttcagagatggcactggctgcctgctcatcattctccaggtccccagatgacgccagcactgcaccttcactcagtaccaggtagccgagctggtctgggattcgctccagcccctgggtcagtgcagaagtcatcgcagtcttcggtgctgggggagctccctaccagataggtagcttccggcttca

SEQ ID NO: 335772 - DNA, 1000 bp, Homo Sapiens; identical to SEQ ID NO: 157493

SEQ ID NO: 335773 - DNA, 1000 bp, Homo Sapiens; identical to SEQ ID NO: 157494

SEQ ID NO: 335774 - DNA, 1000 bp, Homo Sapiens
tcaatccatgaaataaatatttatttatgtaatacaatttgctaaacaccaccattattaaggagagtactaggaaaaactaccaaacacagcatgtgaaacagttgggcacggtggtaaagggcacagactctggagccacagccggctaatacactgcaatattttatgtttagcaaattatagctggtctgtgtataaccagaagagcggtatctgggggatcaggatatctaaattctagacttacagcctggccctgaatctaactatcaatgttgccttggaaaaactgctcaaacttttgatgtctaaagtttcagacttgtaaacttgagagggttgaggtccaaggtcccttaaatgtaaactttaaaatgcttttttgggaatctttcaaatcttcaagctcttcaaagtgcaaccagactttctccttactatacagtctgaacaactttgagaatcactgtattatcttagtttatatagtaatcctgacctaaattttattattctcattttggagacaaggaaatagaggcctaggctagcatggctaaataagtgataaagctgggaatagattttaactctgcccattttaaagctgtgcattttctatttttctgtaagttattctgacattagacttaattttcacatagtaggctaggattccaagcactcaatatctatatatttatccagatagctcttactttgatatttctaagtctatactttgagctaacatttgctctgttctctcctatttcagcactcccttttcttgttatttatggtgttgtcagcccatatggtctaactctcatttcatactcctgttgaatgtctcctacatgtctgttttttagcagtaactcctgacttttatctgaaataaaatttttaggtacttgctcatttcatccactttatgatgaaaaaaattagctaggtgtgaagttggtgctaaaattataataaacagaggatg

SEQ ID NO: 335775 - DNA, 1000 bp, Homo Sapiens; identical to SEQ ID NO: 157495

SEQ ID NO: 335776 - DNA, 1000 bp, Homo Sapiens; identical to SEQ ID NO: 157496

SEQ ID NO: 335777 - DNA, 1000 bp, Homo Sapiens
ttttttttaagttaaggataacaattcttaatatcttttattgtaaaagccatcagactttcaaatgaattttaaaatctttcaatattatttaatgaaaaagtctcacactgtcatgtataggatatatcaacatttactactcatctgtcatgttaggaaaaacatcattattacacgcttggaaaatcctcaaacccatctctagtggatgtccgtcataatttaaagggtattttccccattcaaataaaacaatctcttgtaaagctacaatagttatataccaaagcaatacctagttacatgctttacacagtcccgtgaaaaaataatttaattgctcctaatccctgatgcaaggcacttcaaagcacccgcacaaaacgtccatgtaaacagcagtacagtacatcatttaaataacataaatgacttttacacagcttgacctaggaaaaaataaaatccatcatagccacagctaaaaagcatgttaagattcacaataagaatttgtttctcttattataaagagaagagcaatcatataacctcctgggggtgggggagacctcataaatattttatattgattgacaaaacagcatgctccctgggtacgtatgaaatcagaatattcaggagtaactgagaggatgcaaataacatttcttagtacccagctttaatatctaccagacctggtagtctggattatttgtagcaccatggaaaactcattagaaaatcacaaaggtatacacctcaacctttccatgaggttcatttaatttatagtaacaaacagcaatgatgcagataaagaatctttaaaattattggcttactggatttacctagcaagaaaaattctatattacttattttagtacatctcatgtacataaagcaccagtttaaatgagagtatcaaatatctccagcatctttttgcttagcctagaagttcatttcttatcactttccatggcacact

SEQ ID NO: 335778 - DNA, 1000 bp, Homo Sapiens; identical to SEQ ID NO: 158358

SEQ ID NO: 335779 - DNA, 1000 bp, Homo Sapiens
gaattaagtatttcatgtttttatttcaaaagaaaaaaggataccaagaagcagaagaatgaagcagttaaaaccagcaaagctgcaaagtaggaaagaaagctgagggagagattgatccgatttcaacgatgtggccacttaatgcaaacacaggggtctgatgctgcaaacctaagtcacatgagtccagtgacttcagcaggtccactgatccaccacagtgacagggccaggccccttcctgctgaatcctaactttacacattctagacacatgtcatgcacatacaggttacactttatggttacatgaaattgcatgcaattcacacagagaatcattttgaaggcactgtattttgcagcaggagctgctactttctggcaagtccttcctaggttggctcacaagtggtcctcctttttatttattcctatatgaaactttggtccaaaaatcaggtgcagtctgatcctaccctcccagctgttttagtttcatgtctcaccttctcttccacgttcccttcttaaacgtagatgtcaagcttagaagatgtttcctgacaatgagatcctgtttaattcagattttcaaacaacttgagtcaagcaagcaggagcttatagtatgttgatttaaaacaagttgttaccagtttcccttacccttgaattcggcaaggcccattaattcacaaattccatgataagatacatgaggttctgtatgcatagtaaatgatttctagttacaattaaaatacagccttgtatatgtttaagtcaaccttaacttttaaaacatgacttcagtatacgcaaccttaggctcacttccagattataaagtcccattcatggggtgcaaatgtttacattgttagcaaagaaaatagctctgcataatcttttgacatacatgcacacttctagttctaaaattcagagcaaagcaagatgacaagagattccaattccagcatatattatgaaa

SEQ ID NO: 335780 - DNA, 1000 bp, Homo Sapiens
ttttttttttttttttttttatagcaaaatgatagaaattttattttgcacatttgagtgtagggtcctaaaatgggtacctgctacccaagtgatgagctactgcctttgtttgttaactgctctttcctccctcagcctctagccttctcctttcatccagcggtgctagagacctggtgttgatatccacattcataggctctgagtgatctggcatttttaagatggcaaagcacttttgcatcctgtgggctgttgtctgtagttctggcatattgcatgcctgaaggcagagctagcactgctacctccaatacagatgagaaaactgagacccagagagattaatggtaaggttacacagcaaattagaaggagtgtaggactaagacctaggcttcccaactcccggtccaactcctgggtgggtcaggggtgcaggtagattgcagaggatctgggatttggggaagattcctggaatttaggcttgtgcaagaggtcattccaggcttcccagcttaggggagcaggccctgtcctccacctgcaaggacaagaatcagagacatctgtgcagaagggatgctcagcggatgacctccctgagaacaggaactactcatcctgggctggcatccaaagcagccacttttgcagtggaatcttggaataacaatatcactccacactgggccttgccctcactttgcaaaatactctcatgtcctctcagagcctcctgaatgctctttgaggcaggcctggctaccttcattttatggataggaaaactgaggctcagacagaacatgtggtttgcccagcgtctttgcatggaaatagggagttgaatgaaagctcaggctttcgaggacagagtgaggctagtcttccagctggtcccttttcatatatcctggaaagataaactgaatgaaaggagctttccgtcctacttttcatttgtgccagaaatgacaacatccctttccca

SEQ ID NO: 335781 - DNA, 1000 bp, Homo Sapiens
aggagaacccaagggaggtttcccccaattttttgggaggttgagcccattcccaccccaaaaataatattttgccgtgtttttggcttgtggccatattttaccccaggtggaaaaataaaaccagtttatttttaaggagccatttcagttccccccaagggtagggatgaaagctttgtgaataggtgtaaatggccctgtaacaatatgatgcctgcaaaaatacattcaactgaaaattaatgtctgttctttaactagtaaggaaacgggaagctaagtggtcccacttaaacaataaaacaaaacaaaacaaaaaccactgtttatcctttctggaaagactaccaaagcaaagaacatccaataatattataaatttaaaactgcatacttttactcatctttacaagtaggaaagatgcatacaaactactcatgggctttataaataaagacactaagcagaaataatatttgggttatttctctgttcgtaaatacacagaaataaaacaattaaaaaacactaaagtgcagacctataggccaatacaggcatgataaagaggtgcagccaaatttgcatctacatttacacttacatacccagaaaatgattcttgctttaaaaaaaaaaaattgtgcaatttaaaaactagtcagttttgtttgtgctgtaatacaattagaacttgtctctgcccactagtgaagtgactgctagaccttagatagcacactaggctcttgacaatcacgtatctcattagaatcatacaacattgattccacctccagaaaatgttagggtcctcttgttgtagaatgaagagccactggtatttggttgattgcctttaaccagagaagatttcagttccatttcacaagctacaatagctgcattcaattccacttgagctcgatgaactacataaaacatgaggcctatacttataataatctgtaaacaaaacacaaaatatccactaac

SEQ ID NO: 335782 - DNA, 1000 bp, Homo Sapiens; identical to SEQ ID NO: 157498

SEQ ID NO: 335783 - DNA, 1000 bp, Homo Sapiens; identical to SEQ ID NO: 157499

SEQ ID NO: 335784 - DNA, 1000 bp, Homo Sapiens
aaacttttctttttatttatttcataaacaataacaaaactcagctaggtaacattatgacagtttcaccgtacattcagtcacaaatatttgaaaccttcgcaacaagaacaacaaaaccagaagtgttacaagaataatttacaagaaaatctataaaacagcaagaagctcacaaatgttcattttttttgcacaagatcactacactctttcacaacatgttttgtgttacaaaatttccaacaaaagtgtattttttttctttgtattgtggtttctaaaaccagaaactttgaagtaaatatccttttattagcacctagtggtgcagaaaaaggaaaactctcacatacagacacttcacagcacttttctaagaaaaatatacacttacaaaatatgttacaaattggcacacttaaaaatatacaagattttgtagacgtcttaagagtgatccttaagctttaaacttcaattgattctacagattatttataaagcttaactctaaaagaaaaaaaaaggcaaataatttcctaacatttttaagttgcagtgtcatatgtcaaacagaaacttaggttacattcataaaaagggcctctaacgcttttattttaaattttcttaaatgcttaaggggcttggggaagaagaaaaaaatgggaataatcattttctttagcaccataaatcagcaacttactaaagaggtgcattcagttctatggaaactaaggactagtacattcaaaactctgtaggcagcaaactccagtcagtgctacaggtagcccagtagagcatcttaagatttctactctcctcactgggagtgaaaaacaaaaggcctcttctagttttcattctaagcctttttttgtgctgtaaataaccagtcatctctcaaacaggcagaatgatttcaatatctcttttcttctttttgaaatgggatgtcattctgagactcagaaacccctgagcttgttag

SEQ ID NO: 335785 - DNA, 1000 bp, Homo Sapiens
ttttttttttttttttttaagtttaacatgtacttttattaacaacttaatacaagactgtacactgtaggtgctgaaatcaacccactcctgaaaactgaaaaaccagcatttctataccactttgggctttggttataagtgccatcttctacagcaaaatcacgtcttaagaacaggaaaaacgttccacgggaatggagagattatctatgcataaacagctggggatcatttctagctttacgtgattcactacacgctctggaatgttcagttcccttttctacagtcctaccacgagacatacagcaactaagaacttggccacaggtcctgcctagacacacatcaatatgaaacaaaaaaaatttatataaataagtcaattaaacttcacaaaaactaaagaaacacaagacaaaaatccaacaagcaataaaaactgtacaatattggtcagtcttttatatctgaaaaatgtgtaacttaaaaaaaagttatttatcgtataaaaaaaagtcttttacatctgtgttagctggagtgaaaacttgaagactcagactcagtggaaacagatgaatgtccacctcgctttcctttggagaggatcttgaggctggaccctctgctcacagaggtgagtgcgtgctgggcagaggttttaaatttggctccaaggaaagcatagaggatggggttcagacaacagtggaagaaagctagggcctcggtgatggaaatccacttgtgcacagtgttctcaaactcacacccttgcttgatgatttccaggaggatgaaggagtcgatgctgatcccaatgtagtaaggcagccaacaggcgaagaaagccaggatgaggatgactgtggtcttgagggccttgcgcttctggtggcccttggagtgtgacagcttggagatgataatgcaatagcaggacaggatgacaataccaggcaggataaggccaaccatgatgtgctgaaactgg

SEQ ID NO: 335786 - DNA, 1000 bp, Homo Sapiens
ttttttttttttttttttcagtaaagtaaggcacaaacaaatgagcctctgttcactttattcaaagagtatttttttcctctgtgaaactaggtagaactgaggaggaatcaaagaaagcctcatatattaaactcttaaatagattctttgaattcaaagtaagggtcaataggagaggcacaggttgtgggccttgtcccagcaaacaaagccaccaaggcagtcctgcaaattaaggaggatggcaaatctgtctcttaaaaaaaagttcttgaggggaaaaatataaaatacctaagtttcaaaagccggactacttccatacccttcattctctaccctggagtgtccagagatagagagtttcaaggtacgttttcaatgattcagcttttgcaaacatatgcaaatacattcctcatcagcagtcctgttttggcgattaatagcaagcaatatgcttggattagaggtccgatttccacttaaatgcattttcttctcttcttggcaatgaagtcatttgcggagatctggaaatcacgagcttcctaagtgggaggaggtgctgttctggttcacctgaaaatatcctttcagattggctggtgttttatagtcccctttcaagacccgctgtgtgttgttgatgacgaaggggtcagggttgccatagttgggggggtttgcataagggtcatagccgagctgagccagcatgggggcgatctgggccatgtcccgcaccacatccccagggatgtggccagtccacttggagagcgcttccaggttaacaggcttgatgacctggtccgtggaccgctcgatcttggacagggagacaccaccgggcttgccaatgaggtcttcatggtggaggacagcgtcgctccaggcgatgccgaggaagtcgaggatgagcttgagtgagcgcctggggtgcagcaccagctgctcgtagtacacaggcaggcacttctccttgcctacctcc

SEQ ID NO: 335787 - DNA, 1000 bp, Homo Sapiens; identical to SEQ ID NO: 157502

SEQ ID NO: 335788 - DNA, 1000 bp, Homo Sapiens
tttttttttttttttttttttcagggtccgagaacacctttattgtgcacgtcccccgcagagcagcctcaggcgtcctggtagtagttgttgaagttgatgcgcagcagaaagtcctccaggtggggctggtagccgcggttcaccagcttggtcaccactttgaagagaaagtgggagtagtacttgaaggtgttgtaggactgctgcatgagtgcaaagttggggtgctctgcaccccgcgggcccccagggggcccccaggcctgggagatgagctggctgcggaacttgagcacgaggctgaagatgctgtggatgacgttcatgacgggcgccgccttctccgtgagcaggcccctgaagacggccttgtgcaggtactctgcgtgcgcacgctggatctcctccaggtcgcccacggtggccaacctggccctgaactcgcaccaggtgacgtgcaggatctggttggcgatgtagccctggatgaccttcacgaaatgctgcatctcgtgcttgaacagctgcagctgacggaactgcacagagccggccatgtggctcagcagggctgtgcgcttgaggtggaagcagacgtccttgagcgcccacatcatgagcttcagctgcagcaggaaggagaagacgccgctgtacttgctcaggcagccctcggtgatgacaatgttgagaggccagtccaccttgtacctgagctccaggcagctcagcacatccggggcgttgggggcaaacacctcgggcaggtacttgagagcgagggagaggttggaggcgtgcggggtgtccccatgcaggctgcactgcagggccttgctcagcacagagttcagcaccagcgggttgagcagctctccgggcgtttgcccagctccaagcttctcaaagagcaggtcgctgagggactgggcgaactcgccgtcctccatcagcaggaagtgccgcagtgcctcatagtgcgcctccaggtgcagct

SEQ ID NO: 335789 - DNA, 1000 bp, Homo Sapiens
tttttttttttttaccggctaaagtcagatgagtgtttattgtttgccaggctttttgcatacattagtccatttaattctcagaaacgaccttcatatgaaacaggtactgattttattcctattttataatgagagaaccgagttactgagaggttaaacatctcacatttcttatccactatgttatgctgactcttataaaatgattgtggaaggtgtgttaatacatttcaactggaaaaaaaaggtcagatcccccgaaaatgttgttaggagttgggttaactgctttggaaaaacaatggaaatatttaaattccagttgtactgaaataccttttaacatccagcaggtggcagcactaagtaacaattccatactaggtcatctaacagaaacattaatccattctgcacaaatcaagacttctgtacactccatgccttgatgatttcttcagcagcatccagtgtgctgtcttttttaatgaagcaaaaacgcacaaacttctcaaactgtgatttagtctctgagttacagaatgctgaaacggggatggctgatagtttcttatgtttagtcatccatttcacaaacttatagtcataaggctcattattcttcatatcagagaggtctggatctagcaaagacacatcagcgatgatgaagtatcctccatcaggaactatgggttttaggccaacactttcaagtaaacgtaccatccgatctctttttacttctaactcttttggcaaagaattaaagtaacattctgggtcatccatgcgcttgatgtcaatccagaaagcttgagccaaggcttcctgtaaaggagttgcacaagtataaatcgtgttttgttgaactgtctgtaaatgttttatcaaatgatttggaccaatggaccagccaagcttccagccagttacactgaaagtctttccagcacttcctattgttattgttctctcccacatacctggaaaagta

SEQ ID NO: 335790 - DNA, 1000 bp, Homo Sapiens
ttttttttttttttttttgaaggtgatctaaaaatactgtttatttacagtacatccctcttaggggcaagtctctgactggttctggacctgccacagttcacttggccatgtcgatcaggctctgcagtgaggtgggcacccacgtcttctcgccctggacaaagaccactccccggtcgatgtagatcacaatgcggccaaaggtgtagagctgcttcccttcgtgtcgcttcccaatgacgggcatgaagacaatgttgtgctcctcagccttggtctcaatgaggtccttaaagttcatgggcacagagctagcggccacgccaatgcccctctgagccatgttctcagcctcccgcctctcctgcatggcctcgtactggaagtccttcctccgctccgtgtgggtgagataggcaatgttctcccgtgctcctggctgcatgtaggcaccaacgttggaggacaccgcccggttcatgatatcaagtgcctcattaaatttgtccttgacagatggatgtgccagcacttggtctgagaacatcgacttccaacccaggtaccacttggtgatctcctcataatttgggctgttactgagccaagagcacagcacctgaagccacttggggaagaagtgcttttcaagaagtcccaccaggctagagacagagatcatcccttcccagtcaatcacccaatagaatgcatccatgtgctgctggtgggggttaatgactagctcaccaagacacatccccagcttgggcactatgtttttgaccatgaatgcttcccaggagccaggagtgaagacatccttccagggctggaggatgagcttggcagaggagtcgctggggtgccacttctgcagggcgctggacagcttactacggatgggggaatagagtggctccagccgtgcctgcataaggggcagccatgggtggatccaagagtggatgggaacagtgtctgtgagcgggttcca

SEQ ID NO: 335791 - DNA, 1000 bp, Homo Sapiens; identical to SEQ ID NO: 157504

SEQ ID NO: 335792 - DNA, 1000 bp, Homo Sapiens
ttttttttttttttttttaaatccatcaaattcattcattcattcataataaagtgattaatcattataaagagagcaatagtagtttacatatatatataacagtacatttatctaaaatagtagatgtgtgtgtgtttgtatcctttgtccattattgagcttggcaaacaggagtacatagaaataaaagcagaccttactgacatgtaagtcaataatgaatgccttttccttccctcatcttatcattctctccattgttaatttaaaaacaattgcttttgccagtattcacaaaaccacgtaaactgacaattgagtatggtaattaggccaaatcctttatggttatctcccctgatgaatgcttccacgccatctgcaaactacagtctcatctgcaaactacagtctcatctgcaaatggcccaggtgagaataaaatctgcatatgaaacagaatatagtgtgaatcatatctaattttaaatattttaatttatatgctttcatgaatataggtcaataagaaatccacttttcagattttatttcattatagaatatatttgacaaggatacatacaaacagattcatcttcaataatacatggtgtttactggtgccctgcacttctgcagtaggctggtgatgtcatcaaaaatgtttttgaaagttgcacttcatcagtcactctaaacaaccagtgccatagagctcagataattccattcatttacttgccttgaatgagtaaaaatcttaatatttgctttaaagtctgtttattactcttctatttaaaaatttgagatacattccccaatgtaaacaataaatttcaatctgtcacacaatcgaaatggataaggccttcttgacaaatttctgccacctccgtttaacgcatcagaactcaatcttatctcatactgtaatgggtcgcccatgcacaaaagacaggaaaagcagctgcccttggtacctggtggagcc

SEQ ID NO: 335793 - DNA, 1000 bp, Homo Sapiens
ttttttttttttttttttttttttttttttagttttccatatagtaaaatgcctttatttaaaaaagaagaggtacagtacattataattccaaggaaattttcgtattttaaaaatgccaatttttggctaaaaactcaaaagatttcatttaatacttgaataacaaggaaattcacaattaaggctgaaatactgttcatattattgtgtatttctaagcatgttattttaagcttgtgtattttaaaccatggttacagaattgtataggaatatattgaaggcataaccttatatttattggaattttggtttaattgtttagaatttcaaaatagtattgggatgtgaaacaggatgattatcactctgataaaaacaagactgaactgagtccttcactgtatttttctaaagaactcacttctagtgagtaagtgttcaataacataaagttaggaaatctttatgttattaaaatttgaatttttctttcactgtatcccaatattttaaatatgtgtttcaggacatttccagttaaaataaaagtttaaataatatcctcactacattaaaaataagatctttaagtaaacgtatttccaaatcatattgtcattgtgcactgaagttaattctctgaagactaaattatatgcaattgaggttctgtttcccttctaaacgttcctttactaatttttccaaagcgaaaagatgctcatctgcttcttctggcacaaggttcctaatagaatttgcaagttcaaaaagatattctgtatttcttccacttggaccagctgcattaaaaatttgttcagcaatgtcttccagaggtgcaggaccaagataatcaggattatcacatgttccaatatatagcaatacactgaatggttttgttgtgggatcttttggataaaaaatgactgttgtggttctgtagcctcctttttctctgaagtcaaggtatgcttttacttcttcttcc

SEQ ID NO: 335794 - DNA, 1000 bp, Homo Sapiens
ttcttttttattttttataatgaagtatttattagtgtgtctctttggaatagattttcccattccgggcctgaaaagaaattccatatagaaatcattctcaaaacactttttaaattcttaagagtttgtccttctttctcatctcatgcaatgacttgttaatgaggaataattaaaatagattattgttaataaggtgagaggggacacattgcatttcaaaaatacttttaaatataaaaccttcaagtacaccaatgtctgtaataaagaaattaaggtctagtacatttcaatcaatggggtagcaacaaaagatttgcttcatgcaataggtcagcctaactgaacagagagaattatgatctgttaatatcaacgtgaaccagacaaaacaccatccctcttatatgtatgtgactatgatagttctgcatttctttccatcctggattctcagcactcagttctatgatccaaggactttgagattcccccaaaatgtcccagagcagatttcatgagttgttcaactggaaacagccagcagcttcaggttagaacgtcattttggttgacctgagaggaaatccgcccccagtaaaaccaggaccatttggtttgaccattaagaaggtgttatccatgggtgctgtgtccttgtttttttgaagttgttctttacgtttctgagcgaggtatttcttctttaaattctggagctcattggtaagtttctctacctcatatttatattctttgctctgtacttcatacatattcaattctgaagacaaaactttcagctgctgcttcttgtcatgcagcgtgcgtcggtacagcttcagctgttccgcagcctcaggtccaggctggcgggccaagacgtgctttagttccatgtagagtttctccttttcctggaggagcagctctttttcaaccacctcttcagtcttgctgatgagacgcttctgcagggtgtgaattttctgta

SEQ ID NO: 335795 - DNA, 1000 bp, Homo Sapiens
ttttttttttataaaaactggcagatttattctgcaggggcccattttcaagaagctaaaggtgaaggtgggaggggagaagtttcctccccttctcctttctccctcatcttatttcctccaaggggtaaaaaaaatggcctggaccccaaaacctacccaaataaaaaatcaaaaaactgaggttccaaaaagttacagcatcttatttcctcatagaaaaggggaaggagccagagggaaggggagtccctggggtggggggatatctcacccccagcccggtgagacatcccctccccttaaatagctgccccaaatggggcaagcccagggctatagcatttaaaaactcccacatcccattttatcaaaaccaaagagaaaaaaaaatttcccttttcccccaaaacccaaatatatatatatttttttttcttaaaaaaaccaaaactttgaaggcattaagcgttaaagtgaatctagaacaagggaatgtgaaattccctccttccttcccccttcctgtggggttcattggtgcatccccagcagagggaccggccccaaggggatggcagaggggaaggaccaaagggagaaaagggcgggggcctccccagccaatcagcagccagtgtgggtgtgagcagggaagccacacccccttggagttttccaagtgggatggggagtgggaacgatgcattcctgtgtagtcttcagccaattccaagtcaagtagaggcagggaaagcagggtgacaggccgggtgtgcggaaaggagaagcgggtcttctgggtccctgtggtcagggagaaccccgcttcctcagctcctggacgaaggcttcaatgatttcctctttcactttctgcaattccttcttcacctcttccagaagctcctgtttcaccctctgtaggtccgagtaatcactggagctgggcgtgcagggttgggtctcggaagtggtcaccgaagaagacgacttcatc

SEQ ID NO: 335796 - DNA, 1000 bp, Homo Sapiens
tttttttttttttttttttcaagttgacatgtgtatttattgcacaaatatcccctagaactgggaggttattataatacaagtgtacatttgagaaatgtatacagaacaagaaacagctatgtacatatccaacatctaagtaacttagaaaaagcagaacaatctcataagacatctaccagaagtaggcattatgtaaaatctgtttttttaagtgatcatccccagagtatgccaattggaacaaaacaaaatctgtactagtatgtttttattgcacttaacattttcaaactcaaaattaggacatattaataaaagccagaaatatttaaaatcaaaccaattagtttatatacaagaaaaaattagttttaattctataatgtaaaagatcccttttttatttcctgtttcaataaacaggttttttttgatatgtaacaactgtctgtaccataacttgtaaaaattatttagaacaagccaaaactcttttcacattcatcataatgaccacactttaaagtagcagcagctcattccttgggctttgcgtaaggaaagaatgactatggtgaaggtaatagaaattatagaaggattaggaattacaaaactcaggaatgggaagcagtggggaggaacaaaacagtaactcaggaatcctataaggattaatgattctttaagaaactataggtcatttccttcccagcaaagcttagctttaggaacaacaatagcatgagccacccacttattgaggactagaatttctaaacggtaattaaacattttaaataaagaacagtttgatggttaaggagacacccagacattatccaagtgctatacagagctacaataaaaaaaaaaaaaagtacaaggctgggcacagtggctcacgcctgtaatcccagtactttgggaggtcgaggcaggtggatcacttgagttcaggagttcaagaccagcctgaccaacacatggtgaa

SEQ ID NO: 335797 - DNA, 1000 bp, Homo Sapiens
tttttttttttttttttttttttttttttttttttttttttttttttttttttttttttttttttttttttttttttttttttttttttttttttttttttttttttttttttttttttttgcaaaatgttgagttttatttgatctgaaccatttgctagagagtatttggatagattcagatgagggaaggaaaagaaaatggctttgccagcgacgtgcagtgctcagcggagctcgggggagtcaggctcacccagtgctcagtgccccacatagatcacctttgtggagcacatagtatgtgctatgtgtgagcccctcaactctcacattctgaggggaggcactgctattaatcccattttacagagggggaaactgaagcatagagataaacagtctgacaagagccaatgttcgtacccagcagtctgacttcagacacttttgggtctcaagagtctcgatttctagttttaatttaacagcatcactgtaattggtgaagtcttttgttcttctttagatctttggaagaatgctcagcttcatgatgtcacagagaagcacagttgattgtgctctacctcagtgtcattttgatcttccatgttatgaaaagcgttggtccgccaaccatgaattttacctgagcccttctatgcgccactcacagtgccatgtgtaaagcaattgtatgccacccccatcctctgcctgacattcaggaattttacagctgatacattgtttagggtatctgcgtttcctttttctatttttctatagaaaactgattccaaatcacaacttttttttcttcccccaatcccaacatgtatctgtaaatgtgtaattgttgtgagtcacattgatacttcttttagagattcctgtgtatattccaattcttgaaagagacctactcaaaagattgcctcatggacaaatggcataacagccttaaggatcttaaggaaaagcaaaataaaattaa

SEQ ID NO: 335798 - DNA, 1000 bp, Homo Sapiens
ttttttttttttttttttcagtagcttttcaagtttatttaaaaaaagcagaacacacaaaaatacatacaacaccccagataatgtcctttacagaatcccagtatgtacaacagatacagcagagcctgtctgttggaaggtgggaggccctgcagccctgtctccctgcctcctgctctatcgccacacccccactgcagcctacaaggttcctaaggtacttttggaaaatcctaggcctctgaggaacagtttgaaagactactttagaaaatctttcaagactaacgttcaactctatcctaaattataagataaagaggttgatgacaaactggaaatcagcctcatgcagaagaaaacaaacagggtctaaagcaccctagggagaacacaatgtacacaaagcacaaagacactcaagctctgagccccgctcactgtgtgaccctggggacatccttaaccttctaggccttagcttcctcacttgtgaatttaaggcatcaaattaagtcaccttttaggattttttcccaaaatacttgtgtgcttttgtatgtttctatgagctgcttcctctgaaagtttctggggatagaagagagacccatttaccctaggcaggtgtttgggtttggtgggacctgtctgtaagcagtgaggcagccagcagggtgccagggagagaggagaagcctcgtaaagctgaagctgaaagctatgaaaagccgctgtgaggacagtcaatacaattcttagctgcagggggctgaaacagcacattggtctcagagacagatcctaggatcacctccagcgaccccaagagacgtactcagaaagctgagagagggcatcggtgaaaaaggaaatgatcgtgttcttcctgggtaaagttctggtggaatgaagggtgcctttctggatggagggtggaagcacaaagtcaatcttcaattcccaacagctgacagcaccaagagattctatgtta

SEQ ID NO: 335799 - DNA, 1000 bp, Homo Sapiens
tacatgatctaatttggtttactgaacttagaaaggtagactttcaaggaaaaaacatcgatttccaccaatagtaaaagctactgcatcagacctgtcactcaacagcgctccttgaggcctagctcctgagatccctctggcgagcccttgcggctccacatcctcgggacggcacgctcccacgggactggagcaaaggtttcagagactcgggatacagccagatctcttcggtgaggagactcagtcttactcgagtgtatgtgatttttaaaaaagacattgaaacaactatggaaacagaggcaaaggcagcaaggctttgggtttgcgactgggaatccgtgcggcctccctttggtgaagacctgaccccgtggtgggggtgaacagggtttccttgaccccgtcccagggttcccttcaggacagatggatttcactaggggaagcgtgatgctggtagcctccactctcaggctgggcagggtaggctcccagggaggcagctcccagcgcagcctcttccatcactccggctggagctagaaggagagaagtgagctgaggctctagaaagtgctgcactcctgcctttctttttcccaagggtgctcttgacatctggagtgcagtcagcaggcctttccgagtgggctggctgcctcagatgcctcagtccctgttgctggggatgcttcggtggggcctcctcactgtgggccttctcttgggtcagtgtgatcctcgtgtcccttccctgtgccagcgacactcgtgggcttcacgtggctggcccctgctcccagggctcttgagatgctgcctctgactgcagctcctgccacactggcacctgtgtggccgctgctcccctctgcacctgggaatagctgcccagagacttcctgttttgaaccttttgccttgctcaggcagccagcaagggccctggcactcacaacagaagggccctgcagtgctgcggctctgctgg

SEQ ID NO: 335800 - DNA, 1000 bp, Homo Sapiens; identical to SEQ ID NO: 157508

SEQ ID NO: 335801 - DNA, 1000 bp, Homo Sapiens; identical to SEQ ID NO: 157509

SEQ ID NO: 335802 - DNA, 1000 bp, Homo Sapiens
ttttttttttttttttgtcaggtatagttaatgcaaactttatttataaaagactcttaaattagttgtatcatgccatgcattcatacagaatacagtgacccttcagggcgacagagaagagctcacaaactgaaaggaaaactattaaagagtttctaatattaactattaaaaagctaggaaagattaggacaattttacaaatgagcaattaaaaagaaaagaaaaggatctgggaactagactgagcagagagggggcagctgtttacaagtctgtacactaaactcatccacggacagtcttctagagcagcaggacgctgacagagagaagcagagtatgtacaaatacttgtgccacaatgactcctccccctagctccacggcatgatacatacaaccagtttgtatacactaggcctgctgaggccattttaaactatgaggacttctagtttagtaaactaaagctgcagggtgccgggggagtggggcagcttcatttgcgactgctctttattctctccagtctttttttcaagtcgtctatgttagctgtggaggaggaggaggtcacagttcctgaagagtgagtctggttagaatccaggtctgaatgctggtgctgctcccgtgactcccggagctgagagagtttgctgtggagcatgtctgtggaagaggcgacagtaggaactgctggtttggagagcaaagaggtcaaaggaggtcggtcatcttgctttgtgttgtccagaccacatcgctgtcggaggatctttagcctttccaagtagacagatggccccacttcttccccatttgtgttacctatggaggacactgtgcttgtgggcgtgggcacacatgtgacttccatctgaggggagatgcctgttgaagtggaaatacgacctttgccctccctctccatctcaatcacccgaaggcctctttcgacatagctctggaagaactgtgaggaatttttcag

SEQ ID NO: 335803 - DNA, 755 bp, Homo Sapiens
tttttttttttttttggctgggactgccccaaagggcagacaggtttattgggcagcagctgggaaaatcagcggttggacttggccacacgctccagctcgtccttcttcttaatggcataggagttcgaggagcccttggcagcattgatgagctcatctgccaggcactcagcaatggtcttaatgttccggaaggcagcctcacgagcgcctgtgcacagcagccagatggcctggttcacacggcgcaggggggacacatccacagcctgtcgtctcacagtcccggcgcgcccaatgcgtgtggagtcctcccggggaccactgttgatgatggcgttcaccaggacctgcagagggttctcgcctgtgagcaggtgtatgatctcgaaggcatgcttgacgatgcgcacagtcatgagcttcttgccgttgttgcggccgtgcatcatcatggagttagtgaggcgctccacaatgggacactgagctttgcggaagcgtttggcggcataccgccctgcactgtgaggcaggtacttggcatacttctccttcactgcaatgtaatcctgcagggaaatgtcattgatctgcacatcatcggtgctccacttcccaaagagcttgatgtctggggtctctgccaccgctggtgctgctgtctcccactcggtcatcctgagaacacagcctgagcgtctctgtcactcggcgtagaccacgcgccgccctggtacagacaggaagag

SEQ ID NO: 335804 - DNA, 1000 bp, Homo Sapiens
tttttttttttaaagggaaaaatgtttaattttattgctgactatgaacacattgccatttaatccagattattttaattctgatgctaaggccatccattgtcttttgttaggagtcaaacaaaattttagtaaccaaaacatattttcaataaaattttatatgtatataagtaaataacaaaacaacaaaaaacaaaaaaagaacaaaacagcaccaagaacctatgtaaaatttcatcatacaatttctatgcaagctgcttgattacagaaaactgttcaaactgttcatcaaaaactgagtgggattttccattgatatttcagatattcaaatcaacccatattctgagtatcaatctgaattgcacaggttaagatgtgaacccttcacatagtgttgaagatgtgttgaaatctgtacttgaattggcattgttttcctcagagttaggctgccttcatgagaaatatcttctatccctgagagatcagctacatcaagatggctcatcagctaaatcacgttggtcaaaataccactaagagcctcacttcagagcaccttcttgcaagctgccgaatcagtgaatgagcctcaggtaacaaaggcttttcaagacaagccaataaagcataaagccatcttcccaattctggagtaaagtctctttctccaaaccaattactcagatattccaagacactagttactgttgcctgattcattctgctaacaatactaagcaagggaggaaaaccaatttgtacataatctattccaggactttcatttgtggctggtccaacagccccgtcagcacataacttttcacccagacaaaatttcttccagccttcttcatcttcagattttggcattgtcacattactatccaactgttgtgatttccagtgacttctatgtttgttcacattctgtcgaacagttgaaaactgtgccacttgttgctgttgccattgaagtgttggggaa

SEQ ID NO: 335805 - DNA, 1000 bp, Homo Sapiens
ggtgtggtggcatgtgcctgtactgtagtctcagctacttgggaggtgagacaggaggatcactcgagcccaggagatggagactgcaatgagccatgattaagccactgcactccagcctaggtgacagagcagaccccgtctcaaaacaaaaaggaaaaaaagaatttctgaattttcatttttcatgaatgaaagtaaaaatcagagagaaaattttcacatatgacaatgtggattgtcatgtttaaagactctgaagttacgtagactatgagttatcatgttttcttttagcatgattctatacacctagctttaatttttgaagtctgatttaattgtgattttgacaatcagttactgaatgaggtagtccacattgcctagatatttgctgcatctggttactgattcacaaataattaagtagaatatatcacttatgtttttcctttatgtttaatagttctgtgaacattgacaatatattacttttagtggtacacagttcttgagaaaatgtcttgatttttacattgccatttgtgatatttttagcagtccaccacaatatcatttttataataaaaataaaatatactcattgatgatagagaaaatattgttaaagacctcttgggacaggaaaaggctcagtcataaaatcagatgcttattcattttcagctgtgtcattttgactcattactttcaagaataactataatattgctagacagttcattacactgagaagaactttccttgaacttcacatggagattgagtaaagctcttctatttgttttttgaagtactctctcagctcaggtctcttagcttttagtgttggtgtcagcaagccattttgaactgagaacatgtcagaatggatgtgaatggctttaacctgctcaaaagaatggagtccactttcttttcctaacctcaccatatcttccaaaatggctttcttcagatccttatttgtgcagag

SEQ ID NO: 335806 - DNA, 1000 bp, Homo Sapiens; identical to SEQ ID NO: 157511

SEQ ID NO: 335807 - DNA, 1000 bp, Homo Sapiens
tttttttttccaggtaaagaatcagtctttatttggaggatgatgtaacttaaacagtgactttcatgggtggtgtgggtatatttaaccttttacaatctccctctacatctcagctgagctcaccaaaaggctcactcaatcagacaggtaaacacatttttgactattaaagtgctattccggggcaaagtttttctcagtttcgtttaacagcagcttcgttggaaacaaacaaaaaaagctatctatggaaataggcctggggaatgaaaaaaaaataacaagcctcgtaactactttggaacatgacaaatgtaatgtgacttgtagatatcagccctggtactggtgactgataccaaagtctctgaggtacgtgttctagggaaacataaggacaaaagtggcaatgaggactaaaccagaaagaacaattagtattaataacaatgaccccattataaaggaaaagcaaaattaaaactgagaagaaactgcaaaaaacccacgtacgtgcgtttgctattgtagcagacctatactttttaaaaggaaaagcaatgcagggggcactggacagggttcttgaactcagaatatcttacagtggtgtactctttgccaagaaggcatcaccaattaaggtatttggcagagatcagcctctgaaactcattatcacatagacaccttctgtctggtatcaattctgcaccctgatgtttctcgcacccttctctactggggaaattccagtcccattcactgcaggcaggtgtttctccttttaaagtggcatcactcctacctaagggatgagagtctcctggtaaggcttagcggcaagtgcgtactacatctgtattacaaggagcagcccctgattttcttgatatgcatagcttttcggggttggtattagacatggctttcgtaaataatgcaggtgtttttgtcatgtgtcactgctggctctgtggcttccaggtaagctggc

SEQ ID NO: 335808 - DNA, 1000 bp, Homo Sapiens; identical to SEQ ID NO: 157512

SEQ ID NO: 335809 - DNA, 1000 bp, Homo Sapiens
ttttttttttttttttttggagttagttagaaccagaactttattgtagcggatacactttctgacctatcatgagtatacacatctgcgaagggaaaccgcgcggcgacagcgtgaggacatcccctgggcgtgagcgtctgtccgctgtctaaacagagcagctacagggacgggacatggaggatggccacacatagcacagccaccagtgtcctcagaactagcagtcagggtcacagaacagtattcaaaatgattgcccacctgttttagaaatctaaaattttacatgtaactaagagcaaagtgctatgtgggttttagaccatgactgtttgtttgctctcctgccctaccaccaagcaaagcagcagggctcctgggggagagggatttcaacccccctgatggcagggggtgctctggggaggagagaggagagaacaggctgttttggaaaattccagcactttgacttcgggccatgcgtctctcctggacgttctgagtacggatcgctcaggcctcctgccgtctccaaaaggagtggtcagccggtctgcaggacacctctcagtttctccttttaccagcaggaaaatgtacatttaagcataaaccacaaggctgcacacggtgagaccaggccactgcccagggagctgctgtcggaggaggagtgtggaaaaggggccagggaccccgcaccccacaccaaattaggaacaggtagaatcccaaaggcaaggcccggccacttgtagctaccctgatccagtctcttgagcagcacagctagaggcctgtggcccccgactcccagccatactcagacctgagcaggggctggggcggggctgggcggggtgggcctctccctctggggtctggggagggaggacccggcgggaagagcccgtgctcagagctccgaacttcactttacattccagtcccgggttacactagcacaaaggacacaaggaatccgatttat

SEQ ID NO: 335810 - DNA, 1000 bp, Homo Sapiens
ttttttttttttttttttactaggtcaaggagacacaactttatcttgaaggcactggggagccactgaaggtttttgagcaggacggagacaagatgaaagtggtgctataggagattagtttcttctctcttgtgtagcggatgggccatagcagggcagggccagaggcagggagaccaggtatgaggctgtgacagtcatccaggggaaaaggtgacttggtgaggcactgccctgactcggtggcaggtgcctccagggttctgatcctgagctggagaagggtggaaggagctcaaccttcctgaggctcagtggtcaggggaaggtggataagctgagagtgagggaaggtggtgatgcatttaagcccctcccaccctcctcctctggcctccgcaggactcctgaccttcaggctcagtgtggctcggtcatattcgaacacccggatggctggattgttggccccattgaccactccaggtaatgtggttttccatggggtgactccaggtgtgatgaacatggcgcttatggggacacctgcatcatcatagagcatccgaaagctgtcggtgtggtggtgcccgaagaactgccctgctatgacgcgatgatgcttccggaccaccttcaggtatttttcattgaagccctcccggaaccatgccttgttttgcgtcttctcaaagaaccccgggggcacgtggccgacaatgtacaccatgtccccagctttggatgcatcggtcagcacatcttccagccactggaactgctggccagggtccgccatgtctgctgtcagcgcattgctggtatagtacagattggtgttgaggaccacaattcgcccagccccgctgggacccggcagcttctcacagtagaaggcaccttttttgaagagagcgatggactcattactaagccagggtttccatagttctgctatctgattgtagatgttgttacttccagctgggaactggtt

SEQ ID NO: 335811 - DNA, 1000 bp, Homo Sapiens
tttttttttttttttttttaacattattaaattttattaacaaaacattttgtacattttaatacatgtggaattttacatctaggtaaaataacaacacattcaaaatttaccatttatacaaactgttacagaataacaaccagtgggttaaataagtaaaataaaccacactgattttttaaattatctacaaaagatttgactttaaaattcccctgaacatataaaaataaattaattttacttttcaattaaatctaccaattagaaatattacaaatcaaaatatcaatgttatcttatgaatttgtcacaatacaaaacagattcacaaaactttatttacagaaatgaggtaagaactgtgcaatgtttaaccaagaaacatattgcagaattaacatgttcttccagctaagtacacagtggaggtctaattacagctgggtcttttccactaataattcacacaccaaagaagagtttgatgatgacatcctcagtgggggaatcactctgcggtactgtcacatcaaaagcgtggctccccaaagtggaagggctgtcatacaggtttcacctgtttcaggaactctagtggtgagcttttaatggtcagtaatgggaagtggtttaaataaaacaaatctctattcttaccaaatccactccttttcttgtgactcattagtggataaatacccaggtaatagttttgcctgagctatctacagtggcacagaaagttctgaataaaggcggaagcatgggaaggctgcaggtgacgggatgattcctgctgctcggaggactgactgtcccaccctgctgtctacagcccttgcagcacaatggaggcacttgatcaagggcaaaccccaccagcactttccacagtggcccctttctgaaagaagtatttagctttgaattgatctggttcccccagcagcctcagaactcacttaactcaagatttcttcaaaatatgagtagg

SEQ ID NO: 335812 - DNA, 1000 bp, Homo Sapiens; identical to SEQ ID NO: 159840

SEQ ID NO: 335813 - DNA, 1000 bp, Homo Sapiens
ttttttttttttgcggcagagtctcgactttattctcaaatattgggaaagtagcctggacaacatagcgggacctcctctctaaaaaaaaaagttttttaaattagcctggggtggtgctgcacgcctgtaatgccagctagtcgggaggttgaggcaggaggatcgcttgagcccaggaggtcgcgactgcagtgagcggtgatcgctccacggcactccagcctgggcgacagagcgaggccctgtctcagacaacaaaacaaacttacaaaaaaaccgggaaaggtgagcgtctggactgtgggccggaagaggcccaagtggacctccttcctccaccctggaactctggccagaggcagagcgcgaggtgaggagtccagggccccagagcccaggattggcggcggctttgtcttcaatcgtccacctgtatctcctcgtctgacaggtggggccgggagtcagggccggcagggccgaggcagaggccgggatctggagcgccttcgggcagtgctaagctgcacaggacttccggggacaacgcgcgtagcgaggcgacgtcggcgcgcatctcctccacatcgcgcttgagcttggctcgccggttctggaaccaagtgaccacctgcgcgttggccaggccgagtcgcgtagctagcccgtctcgctcggacggcgccaggtacttctggaagacgaagcgccgctccagctccagcacctgttgcgcggtgaacgcagtgcgtgacttgcgccgtttgcggccgaagggaccagggcccagcgcgtccggacctgcccgcctttgggggcggcaggcctgtgagttgttttccgccctggacgctgttttgcaaagatctctgcgcgcccaccgccaccctcccgggcgtgcgggccgggaagcagccagcggtgggaaactccgacgccctcctcgacacttttctccccccaactccccaagactcacttctagggaagtcctttt

SEQ ID NO: 335814 - DNA, 1000 bp, Homo Sapiens; identical to SEQ ID NO: 157514

SEQ ID NO: 335815 - DNA, 1000 bp, Homo Sapiens; identical to SEQ ID NO: 157515

SEQ ID NO: 335816 - DNA, 1000 bp, Homo Sapiens
ggctgcataaatgtcttcttttgagaagtgtctgttcatgtcctttgccgactttttgatggggttgtttgttcctgtaaatttgtttgagttcattgtagattctggatattagccctttgtcagatgagtaggttgcgaaaattttctcccattttgtaggttgcctgttgactctgatggtagtttcttttgctgtgcaaaaggtctttagtttaattagatcccatttgtcaattttggcttttgttgccattgcttttggtgttttagacatgaagtccttgcccatgcctatgtcctgaatggtattgcctaggttttcttctagggtttttatggttttaggtctaacatgtaagtctttaatccatcttgaattaatttttgtataaggtgtaaggaagggatccagtttcagctttctacttatggctagacagttttcccagcaccatttattaaatagggaatcctttccccattgcttgtttttgtcaggtttgtcaaaggtcagatagctgtagatatgtggcattatttctgagggctctgttctgttctattgatctatatctctgttttggtaccagtaccatgctattttggttatgtagccttgtagcatagtttgaagtcaggtagcgtgatgcctccggctttattcatttggcttaggattgacttggcaatgtgggctcttttttggttccatatgaactttaaagtagtgtttttcaattctgtgaagaaagtcattggtagcttgatggggatggcattgaatctataaattaccttgggcagtatgggccattttcatgatattgattcttcctacccatgagcatggaatgttcttccatttctttgcatcctcttttatttcgttaagcagtggtttttttccttgctccagatgggtgatgaggtctggctttgagacaacaataccaagaaagaccaggtttctgtagttctctaacatcacatccctata

SEQ ID NO: 335817 - DNA, 1000 bp, Homo Sapiens
ttttttttttttttttttttttaggattaagtagtaaatttattttttaattgtaacaaatatatgccattagtatgttcttaagttttgggtcacattggcaacagtgtctttattttttttttgaaattcttttcaggaatcctaaggttatagttcccttaaaaaaatatttgctgttttacctcttttaagactgtaaacaggacaaaaaggcatggatatgagaattagctagtgatcactggctattctaaatagtcactaaggcttgaattgtctcttcaccagatgcctgtcagaagtcccaaaggtttccctgatcatattaataactttataaaaaattgatcattattcattaaatattagatattagtaaggaaaatataaatgaagtctaaaccaaaactcttaaccagactaacttcaatgttatgaatcacaaaatctttttgattgattgctctattgacaagctcttatatgcttttagagaaagattaagtcccattataagagatgataaattttagtcaaagactagaacacaacttacagaatacataactggacttgacagttaacaacttagttatttacactgtacaatggaacaaagaaaaatcttaattcttctgcctttattgctgtatttgaccattcaggaatactttggctttcatatttacaattaaatctccttgttcaaacgtaaaatatgtatatttcctatatgcaacttttaaagataatgtttccattaggaggaaataaagaagctgaaaaaagaactggaaaattttgatccttcattttttgaagaaattgaagatcttaagtataattacaaggaagaagtgaagaagaatattctcttagaagagaaggtaaaaaaactttcagaacaattgggagttgaattaactagccctgttgctgcttctgaagagtttgaagatgaagaagaaagtcctgttaatttccccatttactaaag

SEQ ID NO: 335818 - DNA, 1000 bp, Homo Sapiens
tttttttttttttttttttaagttttcaaattttaatatgggtttttaaacgtattataaacttctgtggggcttttaaaaacctgtacctaggccagcacggtggctcatgcctgtaatcctggcactttgggaggccgaggcaggtggatcacgaggtcaggaaataaagaccatcctggctaacacggtgaaaccccgtctctactaaaagtaccaaaaattagccaggtgtggtggcacgtgcctgtagtcccagctacacaggaggctgaggcaggagaatcacttgaacccgggaggtggagcttgcagtgagctgagatcacgccactgcactccagcctgggcaacagagccagactccatctattaaaaaaaaaaaaaaaaaaaaaccctacctatatcaagttcttctatgctttagcaggtctcaggtctcaatttcccattttcagatggcaggcctgtttttaaaggaccaattcatactttaaaatatgtgtacacacacacacacatacttacacacacagagacatacagaaagactatatattttttgaagcaccatttcacatctaccaacaagaaaaataacaaattcatattctcattataattctgttatgaaggataataatgaaatatacaatgccatatttaaaatataaatgctatcagtaaatgaaaatactgacagagcttaaatctctgttcagaaatatttttaaagtaaggctcaaataaacgtgtagattacaaacactatttcctgatcaatcctaatatttaaatgaatgcaaaagaatttatttcaagaccaaataaatagaatgaagagagaatactaaattaaactcagctgatgaaacatccattgttaactgcacccatgcaaaactccacaatacaactaactgcttttacccttatgacctgatgcaaaatgcaagcacaaaacggagaatatgtatgtacttaactttttagctttcta

SEQ ID NO: 335819 - DNA, 1000 bp, Homo Sapiens
tttttacgagatttaaatattttattccaacctgtgtaataggggtctcctcctccttgaactgtcccgattggctggggtcacgtggtgagggtcctgggtgaccaggcctagccttggccacatgagtccacacagtggaaaaggcttggctcctgtggtcggcacacacgagactctggttgcgcctgctgggtgtggaacaggcgcaccatcgccatgcctgcagctcacaaagctcctgctggcctgggatgcactgggagcagctgccatgggtccgtcagctgaagtgaaggaagtcctggccctcctgcaagtgcagtgacctcaggttgtcctcaaaggcgccccctgtgaggtccagcttcacgcagatgacgaagggtggccgggcggctcggaagtgcaggatggggattcggggcttgggtctttcctgagagtcctcgtggcaatagaagcctttcctgatcttgttctcgtccacgtcacagaatgccaccaccttgcgctggctgccggcagtcaagctgcggtacagccggcgcccctgcttgccagcgttccagatggtgaaggccgcccagcggggcagggcctgctcttccaggaagcggacgcggtgggtccagatggtcgtctcgaggacgcagtgcgtggccgcctgtgggtggtggcgatacagcaggagactctggtccacgcggatgacgccgccgcccttcctgaggtgctcgtagaagaacagcaggtcctccgggacgccctgacctccctcgttaaaggggcccacgtgggagaaccacgctcgcgagcagaaccaggtgggcatgatcaccgtggggccatttgaggtgaaaacctgggttaggagctgctccggcgtcagctggttgatccaacgtgtgtatcgttcggtggagttagggggatctctcctcactctgcaaccaatgatgctcgacgggtgctgaacggcagcctcgtgttgcagcct

SEQ ID NO: 335820 - DNA, 1000 bp, Homo Sapiens
tttttttttttttttattcttgtaacaatctttattgaacaaaaataggccatctttcagcatcttttattcttcatcattcgactgttattatataacacaatccaaatgaacacatagtttggggaaatttaggactatacacacgactaagaaaatgtctcctaagtaaacagtatgtgttttcttcattgtctaggtctggccagttcaacctactctatggtactctacggtgtcaataattatttcagtctctgctgcaattagtgctaattacaatacctgagctataaaaataaaagatttcattatagcaaagttcacaaatatcgttttagttcagttatccacattgttcatctaaaataatacattttctttacatataactgtcttagacttgtaattgaggatatttgatgaaacagatctgtatctgaaacagcactatgatgctaaacatttgcataaggaatgaaaaaagttagcaacctagttttttcaatattcagatatttgagattacacagaaaactacatccagatgaatgactgaattattcacttttcttctgagcattttggcattggatagacacagcattcaagtttaatgcattttaggaacaggttcagtttacatatttaacgcacattaaaaaaacacaaagccaaaagaaatttctaatttagaaacatatacatcaaatacatagcattgattactattttaaaataactatagagaaatacaattgttggttctggttgtacctctattaaaacaagttactccattggaaaatatcttttttcttaataagaatcaattccatgtttttcaaaatgtaaataatctttcaatgcttatcattacaggtacataatagaattatactatctatagtaaagatttaggttgatattttattctatatgaggatggttgggatttaagtgttaattcctttaaaacaacgtctgtttatttagttgt

SEQ ID NO: 335821 - DNA, 1000 bp, Homo Sapiens
tttttttttttttttttatattattagtacagacggggtttcaccatattgtccaggctagtcttgaactcctgacctcatcatctacctgcctcagcctcccaaagtgctgggattacagtcgtaagccaccacacctggccgacaaatggagtttcaaaagaccagggacacgatatgccctggccaatatctcagataatgcccccttgtgacaggggctgtcagtccagaagtctcctgttctgttcacccacagatttgtaggccactactactaagcatcatacagggggtctggaatcccatgagggtgcatgtctgggaaggcctatgtgttgttttttacattatagtgccatgtgtcagggtggttacccagagcctgccattcccagcaggactttcaaccaggaggagacgctgaattctgaaagcctcccctccatatggcttccaattttcttagatcatccttcttatgtctttttctccaaacttccgagctttcagcaattacaagtatggtgttataatatttgagatctcccaggtatggtccttttcctctgcttttaaaacaggaggaggcatttgctattacccggccaacttttcctagcctgagggtgtgaggcttatctttggggaaagtgttttctggcaccagggaggaaatgctttcctgggaggagttagttactcagttgaaagtgttcccataccatgttccatttatgcctgacaagtctttaatggctaaaggtaaagctaacaaagggaatgctaagacagtaaataccaagtcatcaagaggttccttagtgttactgaactgagcaaaccgctcaggacagacccagcaatttgtcttgtataaatgggacatggctgacacagtagaggctaaagggtgtgacgtattaccaaacccaataaaaagtcctagcagactcggccctactgggtagaggcttctttaaatgagggaccattgttg

SEQ ID NO: 335822 - DNA, 1000 bp, Homo Sapiens; identical to SEQ ID NO: 157516

SEQ ID NO: 335823 - DNA, 1000 bp, Homo Sapiens; identical to SEQ ID NO: 157517

SEQ ID NO: 335824 - DNA, 1000 bp, Homo Sapiens; identical to SEQ ID NO: 157518

SEQ ID NO: 335825 - DNA, 1000 bp, Homo Sapiens; identical to SEQ ID NO: 246401

SEQ ID NO: 335826 - DNA, 1000 bp, Homo Sapiens
tttttttttttttttctcagcattaccaaacttatttattaagaggttctgaggaaattgttcagagtaccgccacagaccccgttctcttctcttagctctctggcatacaggccaatgacttcataccagccagcctataccacggatggcacaatctccatgccggtatcttagcacaactggtcttcagcactggggcctatagttcagacagctgctcagcggaagagggtttgcactgcaggcccctctcttgacagaagtggaggtgaggcttgtctctgcttcaaggactctttctgccaacttccaacagcaagctgtgcgttcggtcataagcccccagaaagatgaaacctcccagactgatggctgccattcgagggaagacacctgcaaataatcctgccagcccctgtgaccgccagaccccatgcaggacagagagcacattcccatcagcagtgctggagccagcctttgccagcgtaattcttgtctttgccacgtctagaggggtggtgactgcagcggcaaatccacctgcaaaagctccacagactgctgactgccaagaatccaccacatgatcctgcctccaggaccagagggcttttaaggactcccataagggaaactggaccaaagaaaaaggaatctctcttaaaactgtgcttttatagcctcgatacaacccttggataccctcttcatataagatgttagagaaaatctgaaatgttcttgtagaagcagatacctgtgccctctgcttaaccacttcagatggaactcgaatcaggcaggcaaccacttctccagcagaggcagccaacatatgtttcataggtgtcaaatatgaagatgaatcagcatgcaaaaaccacttcacatattcataggtgataaaaaatgcagcagcattaggaaaggatccaatagcagcagaaggaacgccagcatatattccatgaaaaccaccagccttattaaatcc

SEQ ID NO: 335827 - DNA, 1000 bp, Homo Sapiens
gcagtcagacagctcttttattgactttgtctgcttggtgcgggggttgggggggtgtcgaggctctagaagcggccatgcccacagaagtggtacacagaagcaggcacagccagctccgagggccttgaggctgcctgggccatacagcacactcgcgcgtgcgcgcgcgcacacacacacacacacagtcaccttcctccaccctgggagccagcccccaggaggagtcttttcctctaaccaccctggggtcctctgacatgcctagtcctgctacttgcccagacctgatgccagcaggcctgggcgctgctctcttgctacctggcctggggcaagggaggatgacaaggcctctggggtgatgagagtgcctggcagacagctgtgcccccagcaccggcccaaggccaagctcgcatccaagcagcagccgggctgccataacgccaccacacctaccaagcgcagcaggtgttgggggaggccagctctgggcgcaggcccctcagccctagtgaaaatagtgacatacaaaaatatacacattttaacaccatataaattactgacacgagacacacagtgagacggtgcagggagtacggtaggaactggagaggtaataacttaggggcagggtggcggcggtgcaggctaaccctccctgaagccagcagccttagcagtgggggacatctgcccagggggtggggccgggcacagcccgctgtacctgaggactcggggaaataaattagcatctcagaggctagaaaccgtccaatactgctgtgtccttcccaagggagctggggaggggaccctgggtcctggttggccacacagcctctttaaagtgctgaagcccacagacagacagatgcccctgcctgctctctggggaacctacgtgcagccattctgcctggccctcggccttgacagcggcagaaagtaatactgagcggtgtccactccgactccacggcccacc

SEQ ID NO: 335828 - DNA, 1000 bp, Homo Sapiens
ttttttttttttttttaaagacacacacttttattgagagtaagtcagacacagcagttctttatttaaattgtggatagtttggtaggtagggggagagagagatggtagcaaattctgtgccttcaatgtagcattatatgaaaggtagattttatattggcagagaaatagagctattattagtttctatttatctagcaacagaggaaaacaaaaaatcatgtaagaaataccagcatttgcacaataaattaattctccctcttccctggtaccagagtccttaccacccctgaactttgaatcacaaaagctcaagtaaaccttcatgtgtagctaccagtttgtgttcttaatcatgttccccctgagtttcaaatatgttaaaaatcccccatgcaatctgaatcagacctttgtctttcctaggttacaaagactcaaatggccaaccatcaccattatgttacctgaggtcacttaactctgtggctttcaactctgtggctttcaactctgtggctttcgtgtaagatggcggtatagggccatggacaccaatgccaaagaatagtttcagggtttttttgcaaaaacattgtgtcatccatgaacatgaagcatttaccaactaaacataccctaaaatagtttctgttgactaaatctttcatagttcattcattgtctggtgagagcacagagctaagaggaccagcgttagcatatattagagtcccttaagaggtacttgctttgccgtgccacataaccataggtcacccacctctagttctacaggaatccatcatctctgttggaataactcaaaatacaggctcttgatggtaggttaaaaacatggtcctgttatgtgatagataacacaatactgtgttttgaagttaagtcgaaaattgtaggggttatcagtaacctagaaaagaaaacagcttgtccatgtagaaagattagaggatctaaattaaattggaaa

SEQ ID NO: 335829 - DNA, 1000 bp, Homo Sapiens; identical to SEQ ID NO: 157519

SEQ ID NO: 335830 - DNA, 1000 bp, Homo Sapiens
tttttttttttttttttttcatgggtaacaacgtttattaaaatctggccattttctacatctcaaagaggagataacccaccagaggcttaggtaacataattgtgtttaacgtaaatatacacagataccaataggcggttaagccatgggacagggccgcagatggagactgctcaaggtcaaaggggtctccagctgggaccctgcacctggttcgtagcccctctgcagacgcacagtgcctcacgcctgctgcaacctggaaccttgaggccttcatgtcagtgcaggacaagagtcatgtctgtccatagattggggctggaaaggactttctgccactggagcttcgattgtgagcatgcatccccgccaacagctgtgtctccctttgaaccaagtctggttcctccaagcaagcggtcgttcattccaaagagggcctgatcccagacagttaactccaagctcgactgcctcagctgagctggggttacgccactgaagacaaatgagtgtttccactgggggcaagcctgcttcctcaggactggcgacttcagtctcagtttttgttggtctggcagagtgagacagcccttaacaaatgagttcaaggtgccatctggccgcacaggtaaattcttggctcctagcactaccaaacaaagttgaccatgaagtgatggctgatctgtcccttcttgagcctcttggagttttctgggccgtgaagggagaaccagcttagcccggactgtgagctctccattactctgaggaacgctgtcttcgtatttctccgccttggcccggagcggatgccagcggaaggactgtgttgtgctgtcttcaaagtcccacgtggccagaggaatgatcacttctccaagaaacactctccgggccagcgtgcccagatgccacaccgagacctgcagctgccgggtcaccagctgggcaggggccacctgatacttcaaggtctcctgaaagg

SEQ ID NO: 335831 - DNA, 1000 bp, Homo Sapiens
ggctggtaccccagctgcgtgtgctagaggaatactctgtcccctgtgcacatgctgcccatgtgacaggcctcaagatcctaagcccaagcatcatggtctcagcctccattgatcaacggctgaccttctggcgtctggggcatggtgaacccaccttcatgaatagcactgtgttccatgtgcctgatgtggctgacatggactgctggcctgtgagccctgagtttggccaccgttgtgcccttgggggtcaggggcttgaggtttacaactggtatgactgaggtatcctgcggtggctggcgtgctgggcatggggcctgctcacagacagcatggagcagggatgggctgtctgtgcccatgctcagcatgccttgaggggaggaggtggtggccgtgggttcctgatgtcggtgcaggagctgaaggtgagtggagtgctgccaagaatatgcccgactccccatgacaagacagaactttgtaacaaacagtaccaatttattttggccgtgggtttttgctttttttccagttgatgactttgtgaacattcccaggtattggagcctctgtggccttaaatgtggctcagtggagggagacccagcatagccaggccagtatggagcacctcacgcacagctctcagaagctgcaggcggacgaacatctgaccaaagaggtgtggtcgaggctcccccaggatgtgtacccggttgtagtaggagctgaaatccatgctgagctgtaccaggaacttgcatatcatctctgtgcgtacagcaatgtggagccccggggctgtgcagtccagcactgctgtccggctcagcagatccggaaaggggaggatactgttgaagagcaacaaccactcaccctcatcatgtagcagtgagaagtccagactgctcacaggaggaaaagtggggtacagaccttgttccatactacacttgtaactctcaaagagtgtggcaagacgggcaca

SEQ ID NO: 335832 - DNA, 829 bp, Homo Sapiens; identical to SEQ ID NO: 157520

SEQ ID NO: 335833 - DNA, 1000 bp, Homo Sapiens; identical to SEQ ID NO: 157521

SEQ ID NO: 335834 - DNA, 1000 bp, Homo Sapiens
ttttcttggaataatgtttatttaaagttacatttcagaggaaactatcttcaggagggcatgaagcctatattggctactgcaaaacaaccagaagttttataaaatatttctgatttaaattactaaggcactatagatagacacctatattacatacaatcttcaaacatttttaaaagttgaaactatgtattagttgatatctaaaatattaaagcccctgacaaactgaacggctaagaacttgacaaaatgagacgcctgtttcaatgattctgttgccagcatattaattaaaatacaatttgagattctaaattacacgatccagccttagtccagggaccttgtgatgatagttgtattagacttcaaaacaccctttccgcaggaaagggcatttttcaagatggcaactgctgtgtcatcattttcccttttctggactgtatcagaaatccttcagaaagccctacccttaaatgcacagctgcttttcccaactgcagttttctcttttcccattagatggcagtaacgcaccatctctcttcacacagggtcagcggtggagggtaagttgaacagaaggcccactgcacagcaggccaagtttctctagtccacgttagtggggcacaaaaattggaaatgagaatacagaagagtgattctaaccaggtcataaggccaaactagtgctagttatggaaaaataggagacaactagtgaacgagagatctgtgaagggtttcagtgcaatcctgctgagtgtcaaggggtgcggggaagggaaatgaaatcgacatcactgcactccctaaaccctggaaggagggagaaacaaggggctaacctttgactgaaaaagggcatctgacagaacagaaactaaccccacttaacccgcaactgaagaatgcctcacagttattcttctgaatatcaagatgcatccagtaacaacagccaataacagactagtaacagagttac

SEQ ID NO: 335835 - DNA, 1000 bp, Homo Sapiens
tcacttggtcaatgcagagtctctttgtatttcatttcttaagacaaattgcgcctctcgttctgatttggctgtgggactcagggggagaaaggctgtgttttcgcttgcactgtcctcggtttctacgctggccagttcgtagtcttctgaccgtctggcatcagtcagaattcggatctgctcctggacagtttctagcaatattttcacttcttgttgttctgctataagacaatcgctgactggaatactcacattgacaacgtcagctgaataggagtttttgcaccatttgatgcttttgacttcagaaatccctggcatttgcaggcaggtttcctctaaacccactgaagggatgatgggcacagaactggcccttgtggatgaatagcccaccaggtccttttgctccaagctattaaaataggggtttgtctctcttgaaggcagttgcatatttattgatgtatttcgttgggtttttaaaccactggatgaatacccttggcaaggtatcgtatcctggtctgggatccttgattcttcgagttgctgatatgctggtcccacaattccacctagcctacttcggggtgacgggggtgtccttctgaaggcattcctatggagcatgccacttctttgccctgggctgcagcaagaggatagactcctgtggtgtttgacagactggcttcctctgtcaggagaagggacctcagggaatgactgggggccgacaaaacttgactccatcattttctccaatgcagtcacaggatgcctttccacctttgaataattttgcagctggacatggctcttcaccaagttctctgactttgccattgtgctggatgctttgagactgtagcttttaccattttgtggcactttcagctgctcttggatttgtttagcttgtttcttgcttttgaagtagaatgctgcacagaacatgcccacgatgacaattccaaagatgatacatgaa

SEQ ID NO: 335836 - DNA, 1000 bp, Homo Sapiens
acactttggaaaatttcaactttattgttccaaacatgagaaaatccaacagttgcaaattatgccagcagttaaatgtgaatcctactcaagaacatgttccactggtagttttgattaaactctctactctgatttaactgttctctcttccatttgaaaaatcagagtactttttaatcagtctttgctaaacagcagctattgctattcaatggagacggtggccaccatttcccctgcatcgtctctcctacgtaatcagtccctgatgaactctcttcccataaaaatccctgtgtcctaaagtcatggcgtgctctatttcatggtcatttgtagagcacagcagcactgtgcctgtcaggaaaagtgtgtgctaactgcaataagcatgatgactgccatcacggttttgttattctctgtccacctccatggtctctaaatcagacaatctttaatctgaaaaggcagtgtccttattcctccaggaaactggatagaaacgctcctcatctaatgaagtcagccctgtcatcttactgattctttcccagaccacagtgaaaggcctgtagggaaggcacatgaagaaatttcaaagttcaggttgaagtcataaaaactagccttttttttcttttgagacagggtctcgctctgtcacccaagctggagtacaaatggcaagatcagagctcactgctcaaactctcaaactcctgggcttgagcaatcctcttgcctcggcctcttgagtagctggaactacagacacatgccaagggcctggcttattttttttattttgtagggatgggccttgctacgttgcccatacttatcttgatctccaggcatcaagtgaccctcctgtcttggctttctattgtgctgagattataggcatgaaccactgcccctggcctttcaaacccaaataatttttttttttttttgagacggagtctcgctctgtcacccaggttggagtgca

SEQ ID NO: 335837 - DNA, 1000 bp, Homo Sapiens
tatcagataaacatgtttattgtagatttttcatacacattttatgtacctattattacaaaaaagcttataatctgatggtagtagactgattgcttacttgaaaatattaacttcatacatatcaaaatacaccatcctcaactatataattggactgcaaaatgcttgatatgaagtatgtaaaaaaataagcagtttattataccttacaaccttataaagggttgctatctagtacaaagataacatttatcttataacaaaaatttgatagttttaaaggttagtattgtgtagggtattttccaaaagactaaagagataactcaggtaaaaagttagaaatgtataaaacaccatcagacaggtttttaaaaaacaacatattacaaaattagacaatcatccttaaaaaaaaaaacttattgtatcaatttcttttgttcaaaatgactgacttaagtatttttaaatatttcagaaacacttcctcaaaaattttcaagatggtagctttcagatgttccctcagtcccaatgttgctcagataaataaatctcgtgagaacttaccacccaccacaagctttctggggcatgcaacagtgtcttttcttttcttttttttttttttttttttacaggcacagaaactcatcaattttatttggataacaaagggtctccaaattatattgaaaaataaatccaagttaatatcactcttgtaaaaaagttgagcacacttttcacaaacaatttatgtaaaagagaagaaaatacacataattttacataatatcttaaactcttttattccctaccatagacattttgtcttgttttctttcagttttctacaatttccaacttgtacctgtgtttaatactgctttagtgtgctaaagacattaactgattgctttcctaaatctaaggattatatagttttagtataaatatatatcatatattttcgtaaaactttgacaaaacc

SEQ ID NO: 335838 - DNA, 1000 bp, Homo Sapiens
ttttttttttccatttaaaaatcattttattattaacatcatcttcccatgtagccaagtgtctgtcatgtataaggaatgtcggtaaatattccatttgaagcttctttgtacatatttccctcgataaataaactctgaattcacataaaaaagttaaacttaaataactcatatttccttctcttgtaacaggcatatattggtaaaatataaatattctcggactcaggctttgttctaagtgaggacagtaattgatcacatggtacaattattgacagtaaaaccaagaaattgtcagctggtgtcctggcatggactagtgctgaggtgggagacaggaagttcacatttggtttctgggccaaagtggggcaggaggggtggtggggagaaaaggacagttgttttctttacagctctgataaaaataatctgtgctgccactgaattttaactttgaatatattcttctacatttgctgattaattccataatcattttactgaaaactcagatgtcaactaacaaaatatggcacatgatccattttgaacaatgtcaataggttcagaaactaccattgggctggcaaaaaaaacaagagaaacgcacatggcgagagcgatgattcggggttggtttggttggttcactgtggcccactgaacactcgtccctggcctcagtgtggcagattcatccccttggggcgatggcacaagccctggtgcccggcagggcctctgaggcctgagcggcaggtgaggctggcaggcgcctgctcagagcacgcgggggatgatggtgaagggcacggcggggctgctggcctccagctccaaggctgtcaggaagcactccgtagccgccgcatcgttgccctgagcttggaggacctcgcccagcccgttccagacctcgtgggctgtcgagttcacctgcaccgcgtcccggaggatcttctccgccagactgtagcggcctagctggtga

SEQ ID NO: 335839 - DNA, 1000 bp, Homo Sapiens
ctatggttcagtgcaaggtaattcctcattctcttcaggggcagttatttctggagcataatcctgtaatcctgctgctttgacaaattcagataaagtcaaggaatcagattttatcccagtatgacctttttgctctaaatataagccgataatatccctatagggaaggctgatggagcgtttgaataatggctcttcaatttccaggagctcctgcgtatgccgagaaattgccttcatgtcctcaaagtttgttatccccatctgagggaggtttgagcagttgacgtgaatgagttttcggccactgatgaagtttgtgataaaacactccttgtattgagggaagcctagctggctaatccactctgcaacttcctctggatcccaattaagatgctcaaattgtaactcagtccctttttctggctgggtttcgtcatcttcagagacccgttccttcaactcttgggacaaatctacaacttccttttcatgaacgaactcacttaattctgtctgagactctgagggatctgagtatgagcattcttcactgacattaagcaatttttggagtggttgcaaaaactcataatgtgtaccaattgattcttcactttctctgagagatcctaatgcgtaatattcttttctaaatttgtcacttagtgacaactttcctcttttaggctcacggtgctctagctcatcgtttcctacagaatacttagactttattggttctggcctgtcttccttggaaaattctacatgtgtctcccttggtttggtttcatctggtaactctagaattttctcagttggctttgtttgtgttttctcttcaacttgtgggttgatctcctgtggtagcactggaccagtctcctctggtggctgtggattttttttctcatttgactttcttatctcttctggactttctggtttcatcatttctgattgttctagaattgtttcctcatttgttttt

SEQ ID NO: 335840 - DNA, 1000 bp, Homo Sapiens
tttttttttttttttttttttttttttttttttttttttttttttttttagagacatgcttttgcatgaattaaaaattttatttaaaaacattacatctcttatacaagtgtacatatgtaaaagagagaacaaattttcgttccattgcaatttctctgaggaaattaaaagcctgccttcaaaacaagaggctgaaacagaaatcattctaaaagttaatgtcctaatgaccagcagaagagggcaacttcagttaggtagagaaaaacttgtgagtggctatggaaactgagaaaaactttcaacttagtagggaagaaaaacatatcatggaagaagtgagcatattgttgctaaaatagttttacctgccactgaaatttatgctctaaagggaaaagaagactttatcatcttttttgaggaaagctgctatttatatatttagttcttttgaggatagcaatggcccatgactgtttcactggggagagtttgaaatagtctttaaactcaaataaatggaccaaattaaatttgtcagtatagatttagtaaaataagattgctagccaataattgcagaaagaaaaagtatcatatttgttcacaaagtccaatattttgttcatttaaaacagctttgagtggagctgttacctgtttatgtaatttttcttgttgaaatgaacaaaataaaattccctaaaaactgaaataaaatcagagaattgtacacctccttaccagagactataaagcatctagcaaatatggtgaaactgggaccaggtcaaaggaggatgttgagcatatcttctgtaatctcaaactgagtctagaactccaaaggacctacccaatattttaccttatgcccactcttaggattaaatagaaaagaggccatcctgttggtttcacagcagtcacccatgaagaacagctgttccttctaggtgtttgctgttggtctgctggtctcattcataacatt

SEQ ID NO: 335841 - DNA, 1000 bp, Homo Sapiens
tcaggagcccaggtccagcaggagatcagggttggctgtggtcaggaagaggcagatgcggcgggagaggtcaggccccaccctgcggggacgcccgccttcactgggcggcacaggaaggtcggccaggaggcccatgcgctcccgctccgtgctgcaggcctccagcgcctgctgcagaaggcggggggaggggaaggctgtgacaactgcatcagccacggctgggctgacccgactgaactgcctgatctgcctccgccaggccgcctgcagccctgcgccgtctcttgccactggctcgccggctgcccagcgccctgctgtgcagaaggagaaggcctgggattcccggtactgccttgaggtgatcctgccccccttcagccttggcatcacgcacttgaggggatactgggcgagagccttggtaacggcgcacacgtgccgactcagctcctgccaagaggccaccagtagcacgtccaggtttgcccagagctgcaggagtaccagggcccagctcagacaggccctcacctcttccacctccggccagctgacggccacctcggcaccggccaccttcgggctctctggctgctgtgtcccccgggaaacgtgctggcgagacctgagcagaggtgaccattcctccccgctccccatggggcctgccctgcccgagcttggcctctgccagagcccacctcccctgaacccccgtcccagccagccctgctgtgggcatgagagtgagcggtaccacaggtaggcatccagcccgatgacagccaggtggggccgggcggtggtctcgggggagatccagggcacccagtgggttgggccagagatctgggtcagtgtggcgacgccctgcagaaactcctcgggctccagcagcagcagcaattcctgttcacctgcagcccacacttcaggaggcaggctgcgggggcaggggtcgggactcgctcgggtccaccgcaggctgcgg

SEQ ID NO: 335842 - DNA, 1000 bp, Homo Sapiens
taaaatatactgtgtactttattttcattggctataagcattcaatacatggttgaatgaatgaagaaatgaatgaatcaatgaaagatggaccagagctcagccatctcccagtttttcttcagcaggaccccctgctattattgtccctgagaacttctcactgagagagtctgacataaaacaaaatgtattaatccttcatttctcccacaaatgccgatgcgcacaaactaagctagcaccatcgccagggaaatcaaagacggggacactggagatggtcagatgcccacagcccagacagtcacagtcctagcttgggctccctgccccagggttggcacgtggagcactgccctgggtctccatggcccatagccagacagaccctttttcttacttttctcaaaccaaggtgttcacccaagacgttcaaaatttaaacactgaatctctaaatggaaactaagaagactgacagcaccaagcgctggcgaggacgcagtatgacaagaacctggcacacttctggtgggaatgtaaatgctgcactcactccgggaaaatgtctggcagttcctagcaacactgagttttcctgccctgtggcccagagctccaccccaggggcttaccagaaagacaggaaaatgtatgtacacacaacctgtgcaagtgtggagatgcagagacccctgaataagaacaggcaaacattccttattcccagcttgctaaagtaagggaatcagtcgccatcactcatattgggtggagatgcccaggctggccagaggagtgggagagcttccaggtgagacagggacggctccaggtgagccctgatggagtctgtggcctggggaactagaggcagctcacaggagtgggcctcccatgagattggtgaaggaagtgtctgcctccatttgtgctgctacaagagaatacctgaggctgactcatttacaaggaacagaggtttattggctcacgg

SEQ ID NO: 335843 - DNA, 1000 bp, Homo Sapiens
ggtttttgagtaaatttatttagtctggaatgatgtcttttgtagtggaatttcaactgaagacttctaatcaagagttgttttgttctccttaataacaagattagaaggtgttttctttctttctggcagaataaaatctgcatgtcctggtgaaagcttaggaaaggtataattgatgtatttttgaaatgccatcctggtttcctgtaattcctcctctaggaaatctttccaatttgtcatgattcccagttgttttgctatagacagcagctccccctgggtgttagccagtttatccatcatattgccaagagtggcctgatgtgttttctctgcttcttgaagcacttcctgtacctcttcttgcctctgcctctgagctatgccatagaggatgctcatttcatgttctttttccctcatcagtcgggccacactggtcttctcatccttaataactgtgacaccagtattcacaatttcctccacggctttgcttttctgggcctggattgcttcctgggcgatgtgtctttcttcagccctggctttctccacagcttcgaccttctctctgtggcattccatcataatcctttggattctgtggaccatgcgcagttctgcagccaagtgctctctcttcatttcgtcatccatgttttgatacatctctgtcttagttttagctgtcacttcctgagcccatacttcagcttctgctttcgcaatgtgttctctgagtatatcttcttgaaactgctcttcttttttcagaatatttgccccaatatctgtgtatttgaagagcaatggtcacaaacctccaccgactgcttcctggctttcctttccaccattatctagttatttatgagggctatttaggagacacgtccttttaggagatgccagtatatatatttcaaagatacccattgaaagagtaagattttctctgattaggagggaattcacagcactgtcaggcctg

SEQ ID NO: 335844 - DNA, 1000 bp, Homo Sapiens
tatttaaggataaactttattcaaatcttgtattagaatacttccaaattcaaacagaatgttagtcaaatgtttagacaaacaggcaaagattcaaagtcaagacaaaaattctgaaggagatcctgctaaaaagctatcctaagtagaatcaaataatgtacttgtcatgagcccttatttttctattttaatttaaacactgtatttgaaaggtaccaaaatagtttttgaaatgtaatgtgttagtaaactgtttagcaaaataaatcctcccaactaattagaaacgtaagacaataaagacgaaagatcccagatctgtatatataacaggatcactataaacacaccccaccatcaacctgagacctaatttgttttccacctatatagaagtttttgaaaatgacaacttcttgtggttacatgttttcaattttctcaaatactctgttggtctgcgtaagatgccacttgttcaagggcagcttctgactgattggccacagctatagatccacggttaaatctccatcacctccaaaccccttttctcaggtggactcttatccaatttgggtatgccattccagacattctcagggttcactatctcctccataccatttgaaaggttcaaaacccttgttccttcttcagctgtttctaaaatctcacatttagaccatgtgtttcttagacttgaccacacaacacatttagatccaacagtaaaggctttcagagtgtaggtgttctgtagttgagctgagatatgatctggtaaaccattattgtgcttgcttccatcactgctttcttcctcagagaacaaaggcatcaatgccgaaatggcatccctgtttttatactctacaaattcttcttcacatatattcatttcattctgtgttttaggatcacaatctgctccatgtagatgcaatgacatcctgcgctggtcatcaaaagattctacacaacttgactttctcat

SEQ ID NO: 335845 - DNA, 1000 bp, Homo Sapiens; identical to SEQ ID NO: 157522

SEQ ID NO: 335846 - DNA, 958 bp, Homo Sapiens
ttcagagttactaataggattttattatttaagtgtaaaatcagtttccccccctttcccatttctctgatttctaaggaaaaacggcaccaggggacccaggagggtggtcccattggggtgaaccctaactccacagccctgcttgcagactcttcctccccaccctgggcgtccctcctctcccatgccctagggcctcagtcactcttctccgtgggctgaggctggtgcactggacaaaggctgtccctccacaggtggtaggtgagggctgaagtcacggtgagccaggctaggtagggcagcagtaacagggcagccagtttgttgatgggatgccagatcagtgctgtgctcaccaccagcccatacagcagcagcaggtgcagcagggccagaccagggttgtggactgtgaaaaagagaaccaggacagtccagctgatggtgagctgaacagcatagaggccaagaggcagggccaggggccaccccaagccccctcccaggtccttccacaccaggtaggaggcatagcccacgacagagtagatggctgtctgtacaagcaataagactttgtagaatgggcaccaggacagcatcctcgggccctcacaccaaccagacatgtgatcacgagtgaacagccagaccaggatgggccccaggtggggcaggagcacaaagatagccccttgaagccgcattcaccttgaagaggcaaaatcttgcccatctcctggcttccatggacttcttttctccacagcactcctctggcacttggaggacactgcccagcactggtaactgcttctaagtgaataggccttcctccaagtgcttctgagtcctggagatcaggtcccgggtgatgagcttttctgcagtgggcagcgcttagccaggtatgtagctggccctcaccgagaactgttctacctaagctgat

SEQ ID NO: 335847 - DNA, 1000 bp, Homo Sapiens; identical to SEQ ID NO: 157523

SEQ ID NO: 335848 - DNA, 1000 bp, Homo Sapiens
ttatgttatacaaagacttggcaaatccaacagcatacagtgcaactgaaaccttccccaaggatctgagaagtcttgccgatggaatccttggacatcaagagccaggcgaggagcagtttccgatctgctgagattctgctccgccttcacgcgaatcagcatagccaagtgccccatccaccagccaagtccttcagtgctgaggacgcacgcatagccaggacagtcacgggcaaacgtgacatcaaatccgaagggcggctgtcggctcccttcctgtctcaaccactggtccgcctcgctctcctccctcaggtagcaccagatgatcagcgccacgaggaagcagctgaggggcagcaccttccaccagggccgctgatgtccctttcccatggtatggcccaccgaccagcggtgagggttggctttgctggaggaaaactcaatggggcggtcagggtcgtcctcttcctcggcggcagggtgggcccgatcccgggaaccgggcaacggatgaaggcttcgggaagcccagcctatgagcctcagcgcccggacggccctggaatcactgccaaaccagtccccctgtagggacctgggagcacccactgttgtgggaggagggggctcaaagtgtggttggggaggactggtcagcctcatcctggtgtgcagcccaggggggcttcctgaaggaggtggaaatcgaagggccctctggttagccatggagcctttgggttgggctggtgcaccttcctggttgttgtggttttgggcagttgcgcacaagctgccccaggacagcagagtcaggggcagagccttggcgtccaggacagtgaccagcaccgacgaggccgagctgaggtccacctgcgcccgaagcctgggctggccatttcctgccgcccgcgccggggcgtcggctcggcttctgcctgtgaaggagcagtaaggagaagccgtaactggtggctgtgccgatgct

SEQ ID NO: 335849 - DNA, 1000 bp, Homo Sapiens
caaatataaggcttttattagtgcacaaactggagcaatgtgaggcagccattcaccacgtggtgacatggaggctggaagaatgaccaagtgtcatgtgagaccaagaatttacatgaagggaatccttgcacataagtgtccagcagaaccaaggctgggccctcctgacccaaactgggtcacacgtatgctgtgatcagtcagaaaaaagaatgaattttctctaaaggcttagactgctcaagatttcctccaaagacttaagagaacacacagatgtctgccttgtcttagcacataggagtgaccagtgcccactgtgcaaggtggtagagggtagatggtttctaccagagaaacaaggaagaatgaggttcaacttcaggcagatggctccctcacaaaggctctctactgctacaatactacagagacagcactttccctgtaggtctaaggctctacttaagtgtggactttcaggagctaaatgatgatagatcttgagttgaaggcgcttccacatttgctgcattcatgaggcctctatgtgttatgacatttttggtgatgtatgaggctggagcattggctaaaggaattcccacatttgttgcactcataaggcctttctccagtgtgaaccacttggtgttgaatgagaccagacttttggctaaaggactttccacactggccacactcataaggccttgctccagtatgaattctccggtgttgaataaggatggagctttgactaaaggatttcccacagtcaccacacttataaggcctttctccagtgtgaactctctggtgtttaatgagggtagctttttgactaaaggatttcccacactggccacactcataaggctttgctccagtgtgaattcttcggtgttgattaagaatggcactttgactaaaggaattcccacattcaccacacttataaggcctttctccagtgtgaactctttggtgtttaaca

SEQ ID NO: 335850 - DNA, 1000 bp, Homo Sapiens
tcaagatgccttctcacctgtgtgaatgttcttatggcgattaagctgggtgggaagactaaaaacctttccacattccttacattcaaagggtttctcaccagtatgcaatttctgatgtcgaataagttgcatatgaagtcgaaaggctttcccacactccttacattcaaagggtttctcaccagtatgcaatttctgatgtcgaataaggtgcatatgaagtcgaaaggctttcccacattccttacattcaaagggtttctttccagtatgaatacttcgatgttgattaagatttgaaccacgacgaaagaatttcccacattccttacattcaaatggtttttcacctgtgtgagttttctgatgttgggaaagttgtaggtaaagtctaaaagccttcccacactccttacattcatagggcttctcaccagtgtgaatactctgatgttgaacaaggcttgagccacgattgaaggccttcccacagtcttgacattcaaatggcttgtcaccagtatgaattcgagaatgttcaataagttggcaatgatatctaaaggccatctcacattccctacatacaaaaggtttctcattggaatgaattttctgatgctgaataaggtgtgcaccacgattaaagcctttcccacactccttacattcatatggttttataccagcatgaatactctgatgttgaacaaggtttgagctacgattaaaggacttcccacattccttacattcaaacggtttttcacctgtgtgaatgttcttatggcgattaagctggttgagaagactaaaggccttcccacattccctgcattcaaagggtttctcaccagtatgaatcttctgatgtcgaacaagctttgtcagaagagtaaacgcctttccacattctttacattcaaagggtttctcaccagtatgaatttggcaatgttcaataagttggtaatgatatcgaaaggccatcccacat

SEQ ID NO: 335851 - DNA, 1000 bp, Homo Sapiens
taaacttttaatatatgatttttattgaacatgttcacctttacattattacaaacattttacaaataaaaagtttttgtaaaaaaaaaaaaaaaaggaaacatttcctgaattatcactggatagttgaaacaaagaaataaaatatataaatatgaaggtcattctccaagtattagaacagaatacggatggaatcacttcagtaaagttattcataaacatttgcatggttacccacatactgtatcaccttccaaaaaatcaaacacatgagaggaaggggaacctcaaatgagatgtcttttctccatgggatttggtcaacgcatatcagtaagataatttctttgctatatacacaacataaacatttgaaaatgcagaatacattgtgtaaattaaaaattttgtcagctttgttgtatggggagtaactacacagaccacccacacaaacatttaaaatatactgtgtatatattatcttacaaaaatcgcatgtgtaagggaataaggcctttatttccagagcatcttaacataggattaatatgggtatattcatcttttatattttagacttcaaattctttaacatctcagctattaacattatgcgtagtacctaagacaacatgagtagtggcataacacaatttcaactacagtgcttggttgcattcacatgacgtaccatctagaactgaccaaacagaatttcagaactgcccaatttaaagacctgttaagaaaataaaatgcaaccccgtcatatgagcccagtttgtctctcagagcgttgctatatatactggaagcctgacacttcagagtatgtacttaaatgaagtatttggtaataatgtcagcttcagcctgcaaagtgttctagtcagcatagaaatctgaaagtctaaaattacttctgtatgttaattaaaactaactgctgtttgaatttgagtatgttttgtctggaggctagttggagattttt

SEQ ID NO: 335852 - DNA, 1000 bp, Homo Sapiens
aaccttaaataaatttaataacatacaatttacttcacacactggggttccacaaagatttcttactacaaacagcgttctgcttctcaacaacctatataatttgataaccacagatgtagcataaagtcattcatttttaaactctaaattcagttgcttattggggttttcaccttggatctggtacaaattctaactagagtaagagttcctggatgtgtcaaaaatcgtcaccttcccaactcttacatatgtaggacagtgacatgactcctgcccacagaagaacacacctgtcctgccctctcccaacaatggaatgttacaaagcaggacacgcctgagttaaaatgagtatccctgaggttgataattcccaccatgcaccttgaagatggttcttgaatctttcattcagcccgatgaagagaagattcattgtagccagtgtcacattaggtgagaaaaattcagaaggcaacagatttgcgctgctgcaccagcgacccaaaccagcccgtgagtgcatagctactgccagcacttgagaaaggtgagccgttggatactctgggaaaccgagaaagcaccttctactgcaagcgtgaagaacatgatgcccacagaaaacacaacagaaacaagaagtgagactcttgaaggtaatttccagaatagtacagcatactggaggcttcaaatgagaaaacgtttccaaaaacttcatgtttgctccaaattttgaaccagaacccccaccacaattgtgaggagccctttggtaaacttacagaggtcaagtcttaaagatggtgggtctgtgggaatgttcatgccataattcttcttctctgtagatttgaggctgctgagctggggtgggagggggaagaggaagtgatgtcagtatttaaaaattgtgctcagtatttaaaaattgtgctcatcttcaagaagggcctaaagtggagtgtaggttttggcagagagggtttta

SEQ ID NO: 335853 - DNA, 1000 bp, Homo Sapiens; identical to SEQ ID NO: 157524

SEQ ID NO: 335854 - DNA, 1000 bp, Homo Sapiens
ttttttttttttttttttttttttttttttactttttttttttttttttttttttttttttttttttttttttttttttttttttttttttttttgagatttgagatttttattgagaaaatagctattttgacattatatccagtttctcatttatcagaataaattctttacaatattgatcaccatcaccactttagtgtatttgtacatagtctctgagtaaaatatattcacactcggcaaggctagaatattgaaattatggccaacattgcttactttaagattgtttactttataaagaagctagagtagttgtgcaactagaacagatgtttttaaaatgtttgccattcaaagataggcttggtgggacaaaactaatatgcatactacatacatatatttcttgtcttctttactgtcaatctttcagaacagtaacatgacattacaaacacctcaaattcccacttcaaaatgaacagaaaaatggaaaaacattatttcccatttcataaaattaaaaatcaagtcagaagagaagtaaaactcatttttatgcatttaacttaaaagcttgaatacacgactcctcctagagagaaggaagccagaacttcagaagtagccagtggtccaaagaataaatggccccatgaccttctctatggttcatgacttactgagggctgatgcaaactctggcaagttatttttcatgatttccaaggatctgggatatgtaaacgaaatgattaaaagacatttctctgaatttgcaagaagacgactgaagaatcagaacaaagatccaacggcctttcacgtggctacatgttcaccattacaccacaactcaaaacccacaggcgagctttctctcaaatacacattcaaaatggtgttccaaataatccaattgtatacattgcaaagacacacaaaatgcctccttacacacgattagtaatctggttttagactctgaagtgat

SEQ ID NO: 335855 - DNA, 1000 bp, Homo Sapiens
acaaaggtttaagaatacatgctgagatcagttcttacaaaggttaagaatacattactctagtgactatcaatattttttgtcttcataccccttgacactctttaaaaagtattgatgtttccaagaatttcctgtgggttatatcttccagtgtttgtcgtattacaaattaaacctgagaccatttatttatttattttaattgttttacctcacctggaccatgtgaaacctgagcccttttaaaaacaggaatgtacaaacacatattccattatccataaccctcagaacaattatgcaattgcatgttatttagcctctggaaaatcctgtgagtatctttcaataaaaatgctaatatttctacctatgaaatttcaagcttgattttcaagattgagattttgcagttgaataatttcttacatgtgtatgtatatacacacataacacagaaaagtgtaaaattagtcccatataaggggtgtgtgtgtatcagtgtcacataaaaccaggctaattttatgtttattagtcataatcatcttcctcatcttcatcttcctcagattcttcattctcagctgcgagtagaactgcttcttgtgcagccctgaaagcctgctcctcctccacactaggatcatccatttctgtaatttctggtccactggggtattcttgataaactggtggtggaactgggggtgtataattgtctggactatacttatgaccccagcctatgtagaaattttcaaactttttgccattggagaaggcatatgctccaggccaaaggttggattgaaggactgcaatagcatattgtggaatgagatttgaggataaccgtgttgtccaggggggtatattctgaatctctaaatcttcagagattggtgtcaaaagaggaagccccacttcctgttctatgtagtcagaatcgtctttttcttcatcttcttcctcttcttcttcctcatttttttgt

SEQ ID NO: 335856 - DNA, 1000 bp, Homo Sapiens
gagacatgagagtacatctcagggagtatttggtaacttttaattaaaacacattttatatttttgtttatttaggaaaacctctttttttagttcctgacttcagcagctgttttcaaaactataaacttctctctgcctatttaaaattgccttggagttcatactacccagcatatacatttgtgtgtgtgcattatttgtaattatgcatgggaaaatcttagtttagaggtacaataattcatttcttattctctaaaagtaaaaattccaaggcatttttgataaagaaaaccaaaagtttctctgaaaaggcaacagcaattgtatttcagatttcctgaggaagaaaaactgtatttaaaatattattgaaaaggtcagagaagaagttcacacctccaggatgtccttcgtaagacaagacccttgggacctaaatttgaagaggttatggatcccaaaaagctctccttgatgctctttagatccttgaactgcttcaaaatatcgtttggcattttcacttccaaccaccacacagtgaagttgctgcttgtatatctgtcgtaaatacatgatttcctccacagttcccaaggatatcagcctaagcactttgacatctctacattgtccaatcctatatgctctgtcaatggcttgaagatcattggctggattccaagtaggatcaaataatacaacaacattggcaccgacaaaattgaggcctagtccaccagccattgtagagacaaggcaaatgttaacatcttgtgtactgttgaactcttttacaatcttgagtctttcctctgattttgtacttccatcaagtcgtcggtaatcaagcccagacgccatacagtactgctgtagcacgtcaagcaacttggtggaaaaagaaaagagaagaactttatctctgtttttcctgcaatgatttaaaagctgctgaaggaccttcatttttccactgtatttagggtcagaa

SEQ ID NO: 335857 - DNA, 842 bp, Homo Sapiens
tttttttttttttttttttttttttttttttttttttttttttttttttttttttttttaaggttgaacgaagacatttatttgtaaaatcaattctcaatggaggagagattgtatccatagaaagtaaaccagtgatcgttcagagggccacatgcacgcattagtgaaaccaagggaaaaaccaaaaagacagcactgctgcggacgacccgcgtggctactaatcctgccaacagaaaagcaaaatgtcctttccgcttgagaacgcggatgcaccaagatgtcctgtgagaaggcaatttggtctgacatccacgatgaagtgatcagggaacaagtgggggagcgtttttttctattccgtgtggcctgcttgtttcccgcagaaactggctgaccgcttccgttgtcctcccgcctccagtgggagggaggtggtgtcaaatccctggctttctcacatgcccatccttatgctctgaatgatctgaaagatagctgagccacagacaacaaaaacaaacagtgccaacagccatggtcccacaggatatttctcctcttgcggcctcagggttttggctacgttccccctctgggtgatgtttttgctgtgcttctcgttagccatccggatccgctgtttggccaccatggcttgtgcgctctgaaatgctcccacctgcaaggattccccctgcgttagctcctgcgacagggccgagcgcgtcccgccgaggcccccgcggcccacccgggcgctgcaggtggcaaggcgtggccccgagccctgcgcaccccgctccccgagccccggctagccgactccagagagaggc

SEQ ID NO: 335858 - DNA, 1000 bp, Homo Sapiens
tgtttttttttttttttttgtgcaagttaatgtatttatttgctcaaataacacggtacaaaaatgagactcagatgccagcatcaggagcacataccaaatactcatagggcttaaagaacatcattccaaataagaaactatgtacaaaaggttcctgaccttcatttcataacttattctgatccttcatatttaggtgctatgattgtgaacactgcctaaaacaaatccacaaatagctcacctctcccccacttctcagaagcagcaataaaaactaaatggctttccggataggctgagttgagcttatgaagccagtgcctcaggttggaggccagtcccatataagcacccagggcctctccgctctagactgctcctcctccccagtcctaccccatggtgcgacagcaggttcaacacggcaataccatgtccccaagggtcacaagatctcacttgccatccaggtttaacaccctttcccccatgaccacatgttctgggcagtgtccaagggagccgactgtctgtctacagtcttgtccttcctgcacatagatatgaacatgtggcaaatttcacacctgagtcaagctattgaaactgttgagctatacagaaggcagagcctctggcacccccacacttcacctttgtgcaaatacaaaaaatagcccttttctcaagacatgttactgctaccagctgcaaaactgtcatgataaatctacaaatccacaatgtctaggacatgaatagtacctcctggagtatggtgctcttgagcagtgcacccctgtgcaacaatccatggcagtccagcccattgaagccctcctccacttcctgaaaactacccaaaagaagctatagtgcctacatggacatggcactaggtaattttcagaactcttcacatccattttctcactgactcctagccaatcccatgagatgggagaggtgcaaggtatcagctccatttctctag

SEQ ID NO: 335859 - DNA, 1000 bp, Homo Sapiens; identical to SEQ ID NO: 157525

SEQ ID NO: 335860 - DNA, 1000 bp, Homo Sapiens; identical to SEQ ID NO: 157526

SEQ ID NO: 335861 - DNA, 1000 bp, Homo Sapiens
ttttttttttttttttaaaattacatttttattatcctattcttacatcacaatatatttaatacctttttacatagtttctaggtaagatctttataattctttaccaaaaattgagtgatacatcaatgatacagcaatgactaccagttattcacactttttttagatttttaaagaaagcatttttcaaaactatgtaaggacatatgacttacattacagtaattagcaacaattcagtaataatccaaaacatgaattttcctttttaaaaagtacttagtatatttttataccttttatcttcctgtatgtgtgtgtcattatttttaaaattaaaaagaatacagaatggggcatcatttgtgtatttgctaaaggtttactattttcattagggtcttctcttttgagatagagtctcactctgtcacccaggctgtctcaaaaattaaagaaaaaaaaaaaactgagtttctaatcaaattaatcataaaattattccaaagaactgagtttctaatcaaattaatcataaaattattccaaagaactacagaggtgggctgggcccagtggctcacacctgtaatcccagcactttgggaggccgaggcgggtggatcatgaggtcagggtcttcttttaaggcatcaaagcccaaataacttacaagatgttaacaaatacatgacattaatgaatactctatcagagcactagggactgaatgctggtgtcccccattaaattcacatgttgaaaatctaatctccagtgtgatggcatttgaagctggaaccttcataaatgggattagtacctttacaataagaaataagggagagatggtttctccctccaccatgtgaacatatagcaagaaggcattcatctgcaaaccatgaagaagaatcagctagcaccttggaacctcatcaggaacttaattgtctagcacctttatcttggacttccctgcctccagaactgtgag

SEQ ID NO: 335862 - DNA, 1000 bp, Homo Sapiens
tcaagaaatgaggatttattgatatcattaattgattacttttggcctcgctttcagtccaacctgttcccccacccaaggctacaagtgccccaaagattccagattagagatgctgaggtgtctgcctcttcagtagactgcaagctccaagaagacagagttcatcctgctccccatgtcaggtccagttcaggcagctgagtatcccctcatgtggtcctggagcatagaactgaccctccatcgtcacggggcagagaaagcatcacagagcttcacgctgggcaagttcttttattggaaaaagaaaaaaaaaaaaaaggccatagcactgcctgtgcccagccctcccatgggagatgcacaggtcagacacaatgcccagccccacaggggcccagggagggcataggccgtggccaggggctgcggtggagcccactgaactgcggctctccagggggatccttggaccaggactcacttgggccgaggacttcctgaggctgcaaggactaggctgactctctctggtctctgggtaggcccttgtatcctacatgctgctcccatgtctggtagaaaagcaggcctctctttgactccagagagctacctccagtggctggtcttgcacatccacttctaacacctcccgccaactgagataggcagcccccttcatttcatcttcgggacaccagccccaggggctgctcccatcccacctgctcctctgggcctcagaagccgggcatcattggctggacatctcctttccttgcaaggagggagtttgcctttcccctgcaggctgctggcacctttgaaggtccatggaaacctcacctacaaagccttaaagagccccagcccctgggcaggctgaacacacagtgtctgcagccccgttgtcttgtcatggggagctgagagggggcaccaaaggccaccaaagtttggctcttctttcctagaaccccggcttctcttccac

SEQ ID NO: 335863 - DNA, 1000 bp, Homo Sapiens
ttttttttttaaaaattaggaagtttattttcaaccttcccaaatctccaataggtgagcatgaagtttattacacttttcaatatcaagacaactggaaacacagtatgtgaaaggacttatatttagaaatgttatatatgatttctattagaaagcccttgataatttacaaccaaagtaagatatgcattctcttaattttctaatcaaagaatggtagttactaaaagtacaaatttaattgttctcaaattccaaacaaaaatattaattattcactattgtttgaaaaataacaaattatatgagtctaaaaacacctatggtgcagtttgtcaaggctgttaggttaagattcgctgtggccttcaataaccaaatgtgggtcttagaaaagtttctgttcttatctgcacaaacaggcaaaataaataaaagaaaaactgtcccataaaactttagacattgtagataagaaatgatattaccacaatcaaatcactaagcaatttttaggacactagaaatcaggattcattgttacttagaaaaaatgtaaggtaaagtaagcttaatcagaatataaacattgaaaaaactctaattttttttgttctaaagttgactcacaatttattgtcttcagaaacactttggtacaaaatcaacaaatttctccacaaaacataaaataattatgagataggatgttagctaacaaattttgtacagagtatgatctatggatgaagttcaagcattactattaaattcctatgtaacattaaccagatagcctgtctcttcattttgttaaaggaaaaataatattgttcctgtatacttaatacataataagataaattattaaaatgtgagagcccttaaagtaatttttatagatggtacaactataagagcatcattctgatgtatactaattaagaatcactttggtttcttgtcagccaaatttattatattacaattttattgt

SEQ ID NO: 335864 - DNA, 1000 bp, Homo Sapiens; identical to SEQ ID NO: 157527

SEQ ID NO: 335865 - DNA, 1000 bp, Homo Sapiens; identical to SEQ ID NO: 157528

SEQ ID NO: 335866 - DNA, 851 bp, Homo Sapiens
tatagtaacacttccattgcatttattaagatagaaaatcatcaactgctacatccatttttcattagtcagagatgctgattctatacattatttttaaattggcacaataggcccactagtcaagggatagagtttctgttttacatctgaattagcataaatcccactctcatcatgccaagtgttgatgccaaatcttttagaaccatttagatccgtgaactgagaacggcattttctgtggactatggaataatcatcttgacagggataagcatgtggctgataatcatatggtggaacataatcttctgagtacgttgtcaatgcacacattttgctccaatccggtggatgtctaggaaagacagctccaaaacctgtggcaggcaatccggtgaccctttcgataatcccggagctcactgtttcctcattcaataaagccttgctcttcatttcaacccattctgtgtttaaacacatttgtgacaacttttcatgtgtttctgatgtccaaattggggattcatcggttcccagtcgccgatatgttgaattacacagttttttaactttctcaggaccctctatatcataacctttgggaaaagcttctctgtcacggtgccaggaatacaccaacaccggcttcgagtatttcttgtgatgggagcggagggtcagggagcccttgcgctccaccaagtccggtggtccgatctccaaccagtgttgcttcctgtcgcaccagtcctggcaggatctgtcaaggctatccatgggagccctcgaggtacagacctctgaggagttccctatgcacctgtcctgcccggcaggaacgt

SEQ ID NO: 335867 - DNA, 1000 bp, Homo Sapiens
aactgaagcaatgctttattgcaaccacaaagcaccaattcaacaaggcgttgacacacagagattgaacaaatgtctctttgaacagagatgtagcaagcccactttttccaagctcttaaaaacaagtacttaacccaggaaccgaacaaagcataggacaattaaaaaaaattacaccatcatgaaggaatatatataaaaatattctgtactagtaacaaggctttttgacctgtaactctcggcaaatttcttcagaaacaaattattataaataaaaccatgaagttaaaaaaaattctttcttcagaaacaaagaaccaatttaaaagaaaatctatgcagaaaatatcattaccccatttgaaagctagctgaatatggatggatatcctcagtacacaacggagcttctcttttcagagctatgattctgctcctgaaggggccatgatgcatgttcatttcaaacactgcagcatatcccaataaaaccttaataaggtcaagtggagaaccctctataaaaaagggtgttggcaattccgtccaagtaacacaagctctaaggaacagaggaattcaagggagacagcaatccctttcttctttctccccctccccaaattttcttgtttttactcatcctaagtctgtaaccaaaagactgtcatttaattaaattcttttttaaaagattttgggaaagctataaagagatgaggaaaatccttatgatttcaaagcctttgtggggaggagtgtctaatcgtgtcaaagatcatctatttgacaaaatccatgaggaaaaccaccctgtgcgcatcttgtccttgctcctcctggctgatttcaggtgagctgatgaattgcctagtctatccaataggataacgtttcatttgattgaaattctttacatatacacatgtatgtattctgtttacaaagtttcattacatgaaactaaattatgtcattatgtatttttttgagg

SEQ ID NO: 335868 - DNA, 1000 bp, Homo Sapiens
tttttttttttttttttttttttttttgagctcttgacacctttattggaaggatcctcaaggctgtgggcaccgaggtctggaggcaacagaagcagcatccacccacccaccacagtggcagagcacaccccgtgcaaaaacccatcacagagagaaggaccatggagcccctgcaaagccatcatggagagaaggaaagtccccactgtccatcagccccggccaggcctggtccctcaacccctgtagaaccccaagcaggccgatgtgggaggcatcaccacacgtgggttccaactgcttctccaaaccctgtggtctcacatgaggcagggaggaaatttgaaaatggcagcagcctgggcacggaggctcctgcccataatcccaccactttggaaggccaaggtgggtggatcacttgagcccaggagtttgagatcagtctggacaacatagtgagaccccatctcgacatttttttaaatatttttaaaatataaaataaacagcaatacaaagaaaaaacccccaagctgcagtgtgtacacaatgtcactttccagcgttcctgatgggaagaccacaaagctcacaaaggccgagggcaggtgcgggggtggtgctgtgcttccccggcgtccacaggaaaatagtcctccgtcctatacagtgtgggcagctcgtacgtcacgggcaccggtgcaggtgacttctctagccggtccactttggcatagatgccacgcatttctgtcagtttggccttaaggactgggatgttttcctccaggatctgtgaagtatcactcctgatcaggtcagccaggctgcaaaactcttccagcctgaggagcatgccctcgatggtctcctccacctccttcgcctcggccccaggctcgggggtcaggaagagcgcgagctcgcgcgccccgctgcgcatgggctccggctgatcagcgtccacgagcagcatcaggagggcgacggggtc

SEQ ID NO: 335869 - DNA, 1000 bp, Homo Sapiens
ttactttatccatgtaagatttattaaacatgtaacttcgttggaaccaacaaagctactttcatgtttttatgttgttctttttagatatttagattaaccagataatcttaaattatcttagaaattagaaagtttctgcagtattgttacatttgttccaagtatacaagttgtttctatgcactaccttctcaatcctgtgaaagaagtctattaccaaagcaatttctaacacattgctcaaaagacacagtaacgttgtgaaaggcattttgttggatttagtcccattttagtatccccttaaaaagtttgactgatgactctggatattcagccaacagtgttgtgtcaaaaacttgcttgaatttatctaaaaattcatagtcggtgctgaacctgaatttgtttgcccaaagcagcaccgtccctggctgggaaaggtacaccatggtggtgagcagcttgtccaggaagtagtgatggtagaccacatctgaggctaggacgtaatcatagtaaaaagctgacttgggaaagtttttgtccaggtcttccccccataccagttctttcacttcaggcagatgtgctgtacattgtagtgtgttttttaaaagattgtattgaaggtttcccaggacatcaggcaaatctgttgctgtgacttgagctcctaaaatactggccacaatggaaacaaggcctggtccggcaccaatttcaagtatttttgcatcttggaaattcaattcctcggcatgttcctccaagtattgacacaaagccatagcccctggccacaccaccgctccgtaactctctatggattcctggatgacaatctcctttcctgcaaaccgataatgctcctgagtgtagctggcgtaatctgtaggaacaaatttctggaggctatgaagagatggttctatcttgttggattcttctaggactcccccggtgctgtctttctgcggagcccccttcttctcag

SEQ ID NO: 335870 - DNA, 1000 bp, Homo Sapiens
gatttaaacctttttattgtcagatatttttctttaagcatttattagctttgattgtttcagtggccaaataaggcagcatctgctaagaaaggcacctcatcagaaacaaaatacataaccacgtggtgagatccctgcatgagaccagctgctaactccttgagagcagcaattgtgtcttaatgtacttagtagcacctcaacttgcacataggaacccttcttacaggatgtttattgaatcatcttcattagtcaaaaacgagacactcaaatccttttatttgactcgccctcaccactccatctccccttcttccctccaactccaagccttcatttagcaaaagaacatataccagagggtaacccttagaagactgcactgtgggcagaagagtctagttttagggttgaaatatgctttgagacagggtctggctccgtcaccccggctggagtgcagtggcgcgatctcagctcactgcaacctctgcctcccaggctcaagccatcctcccacctcagcctcccaagtagctgggaatacaggcgtgcactaccacgcttggtcaatttttgtattttttgtagagacgaggtttcgccgtgttgcccaggctagtcttgaactcctgggctcaagtgactgactgcctctgactcccaaagggctgggattacaggggtgcaccaccacagctgccccaaaacaactttttcaagccgaatatgtttaggggagcatatttgtttatggcttgagccctcaaagaaatggctttgctctggttagatgccattctaccccttgctccttgggcctaagtagtagcttgaatgaagcaggaatccttagcacttggatgtgttgagaaggggctcttttggccgtgagcatggatgcccaaaggagttagaagtggcttttccctcaccttcagcctggaagccagaaccctgatctctactcaaacacatggacaaacccgtactc

SEQ ID NO: 335871 - DNA, 1000 bp, Homo Sapiens
ttttttttttttttttttttttttttttttttttttttttttttttttttttttttttttttttttttttttttttttttttttttttttttttttattttttttttttttttttttttttttcgtgttccaatacaactttatttatcaacatggaaatttacgttttatataatttttacatgttatgaaataatattcttttgtgcttctttatgaactatttaaatataatgccattctggccgggcgcagtggctcacgcctggaatcccagcactttgggaggccaaggcgggcgaatcgcaaggttaggagtttgagaccagcctggccaatatgttgaaaccccgtctctactaaaaatacaaaaattagccaggcatgatggcaggcgcctgtagtcccagctgctcaggaggctgaggcaggagaattgcttgaacccgggaggtggaggttgcagtgagccaagatcacgccactgcactccagcctgggtgacagagtaagactccatctcaaaaaaaaaaaaaaaaaaaaaaaagaagtaatggcattacttttgagcgtcatctttgtcatgctctgtcagcaggtagatgggccagacgagtctaagaggcagctccgggcatctctgagcattgacttgcggacgttccccagccctggagctccatccaggctgggaagagggaggacgtggagattttcatgagtgtcccagcagtgagaatggactcttgccgggcagacagacacagcaaggctctcctgggtgctgggggaaactgaagctgtcagtgtcagctccgaaagctctttggagaggcttcccaaggtgggatgcacgtggaccaggctccaagtatcgtcagaactactggaagattgttttcaagataatctgggtgagcacgttgtccttctgggtcagattctcaacaatttcaaagtggtccacatcgtggagctcttcaaatgaggctttccactc

SEQ ID NO: 335872 - DNA, 1000 bp, Homo Sapiens
tttttttttttttttttgcacaaatggtattccttttattataatgttttaaacttggcttaaagttcaaaatactatttccagataactttccactgttacatcaactaggcaactttgttatgtttatgttatatgtatcagttacttatcagcacagaattttaaccactctgctaaattttgagaaaacagctaaactcaatataaaatttggcctacagaattatagtggctatttgttactaaaaatattccaaaagaaatttacttattttactatattccatattctttaacttaaaatctgctgccactgtttagtaaaagtgggacaaataaaattctttaaaatatagaaaatacagttcctgttaagattttgcaaacaaaaaaattaataaataatacaatttgagtactctaaaacaatatactttgtagtctagattgtggttttggtcagtatgtctgacactatgaagatttacatcagttcagggaatgagttctaatactattaataaatagtcaatataaccaaacacctgacaggattccccatatgaatatttttaggaaagtatacaaataaaaagattaacaggtttttaaaatccttaagagcaagaaagaacaaaagtatctaaaacttatacacgacaggcagaacctgggttacagtatacctaaggcaagagtgaatgtagcaccctgagacacaaaacatcttaaaattacaatcttatatgcgtatatataaaataggacactttctattggttatgtgaactagattataacctacaaatcttagtattaaccagaacttcctgactggctgacatagcacattagtgagataatacaggtggtacttgagactttgaaacctttttcaaagactttcttcgcttttgactttgatgctgtcaccttcaaggcaccagtccaagtgctcattaatctgagactccagaacttcattctgacaaactgg

SEQ ID NO: 335873 - DNA, 1000 bp, Homo Sapiens
cactggggaaccacatatttatttagatgaatccaaaccagacatggtgccgaagctccttgaggacacagtctcaccactggcgggcttcctggaggcactgaaaagagggagcactttgtagccatgacagcaaatggccagaggacaccaggctgctgagggcaccgttgtcatggtccctggctcctgtgccatgaattcacttcattgctgggcactggctttgtcagagtacgatgccttcttaggtgtcctcaattaggaactttcacatccacccgacagtccacagatgcctcccctagggggttcaccgccttgcaggtatagatgcctccatcaaagggacccggcttgcggatctctagggagcagattcccaggtgagtcagggctctgtacttagggttgccttggatatccatcttgttcttcagccagatgatcttgggccggggagaggcgcggacacagcagaagagctgggtattatagccggtgactgtagtgcagttggccagaggctgggtaaactttggggcttcagagaagtctcgttgggcaaaccccttggtcttgtaaacagtagctgctttctggatgtgggcgaggtccgtggtgatgggggctgtttcactgagtccgcactggttttcagcaaagacacggaaggcataggagttgccgatgatgaggtcagagacgatgcagctggtgcggtgatagtgctccagcaccgtgaaccacagcccggattttgtgtcagccttctgcaccgtgtatcccagaagtgctgtattccccgtatcttggggcggtgtccattccagtgtagcgctgaagccccaaacgtccaccagcttaatactctgaggagggcctggcctctcaatcaccaggatgtcaatggtggcggtggcctccagcccacccagctgcacgcggagttggtagcgacctgagtcagcacgttgggcttctcggatgaagaggatgg

SEQ ID NO: 335874 - DNA, 1000 bp, Homo Sapiens
ttttttttttttttttttatcaatcatatcataccaaagtttattgattacatcaaacaaaaatttctgtaatggaaaaggcaagttgcagtcataaaagatggcattcacattcattttagaaagcaacaacgtagatgtaaaaaactgcttaagtgaaaaatgtaatattgcagtcccattttgcaagctgaaaaatgattttgtcaacacgcataaaatctgcacatttatatactgcatgttattaaaaaattccatcactaaattattacgaattttgcaaagttaggcttacatttatactgttgctggtgtatgtgtaagtagatatggaatgaatgttttcagtttagtaggtaacatcctcaaacaatggacagcggttgtgaaaattacaaagacattttgatagctcaaaattattcaaattataggtagatgatcttattatatttttttccctttctctgtcacaaatagggtgattacattgagtgctaggaatactgcacggtctatttcaagttattcgatctgctaaccccacactggccagtttttagctcttcagtaaaatatcttttaaaaaggaaagccaggtccctctcaaggatctaggccatgatatcatgtatcattgccattctgaatttgagctgcagtatcacaatgtaatgtgtagctgagacataactctaaatcccccttactccttgtctttctttctttctggctggaaggaattttacatgcaaccagttatttttctactagattattctgttaactctccaatggtactgcattaaacaagcctctctactgtggctctcttgtctgtattcacagttcccatagattttatgtaaaacagcaatcataatacagcaacaacaaccataagaacaagaaaacaaacacaaaatatcaaaagctttcctgggttagacttttttagctctttggaataggcaaagaatatagagacttttgtttt

SEQ ID NO: 335875 - DNA, 1000 bp, Homo Sapiens
ttttttttttttttttttttctttttttttttttatgattaagtatagagtttatttgagcacaaagcttgagggtaaccactcaggaaatacagacacctaatgactggagtcagcattccaaaatggggaagttaagatttcacttacataggcagtaaacagggttgcagcattttccacataaggtcagtacacacgttatagcaatttgatcggttactacttgctatgctccaagaaagattgctttaccattccatcaggagggatgatactttcagggggtcttatgtctggtgccacaaggcctttcctgatcatttacaggaaaaagcagaagttgcagttgcatgctacataactcaggccacacagccacattcctctcaaggctcaaaataaggtaaatttccaacagctttaagtttgcattatttaatttcatagtcattctatttagttataagaccattaaatggataatggtgacctctatgttaaaatatagggttcaggtcagcagccagcctcagagccctctcatagcacagcaaagcatcacttacttctcctttcaatttgtggataagcccaaggaggctgacactttccacaacccgtacattctggtgaatacatcttttagccaatttctctaaagcattgagaagtttttccctggaatgggacattttttctattttcaaaccttttaaataatgggtaattgctttatcttgagatttcccatgatgttcttggaaacggccgtagtggtaatgaatctcttgctttagctgatcttcaaagatcttcatgcgtaaccctttctgaaaatgttcctcagcctttctgtggtggcctatttctgcatacgtttcagccaggtcaacataggccatctcaaatgttcgctttaacattatagtcttttcaaatttgcatatagccaattgaaccaatctgtccacagtttccctatcttgccctctaggct

SEQ ID NO: 335876 - DNA, 1000 bp, Homo Sapiens; identical to SEQ ID NO: 157532

SEQ ID NO: 335877 - DNA, 745 bp, Homo Sapiens; identical to SEQ ID NO: 157533

SEQ ID NO: 335878 - DNA, 1000 bp, Homo Sapiens
tcatttacaacaatgcagtcatttatttattgagtatgtgcacattatggtattattactatactgattatatttatcatgtgacttctaattagaaaatgtatccaaaagcaaaacagcagatatacaaaattaaagagacagaagatagacattaacagataaggcaacttatacattgagaatccaaatccaatacatttaaacatttgggaaatgagggggacaaatggaagccagatcaaatttgtgtaaaactattcagtatgtttcccttgcttcatgtctgagaaggctctcccttcaatggggatgacaaactccaaatgccacacaaatgttaacagaatactagattcacactggaacgggggtaaagaagaaattattttctataaaagggctcctaatgtagtactgcttgaaaatggtacatttttgttgtagattattttaaacataatgctatagtaatattttgaagatttgagctgttatttccatttgtttttacactgtgactaaatgattaggttttagttttagactctaaacggaacctgaattaataggaaataaacacggtactatagttgtcctatggtgcccctatgggtgatgggttccaagaaccccctaggatactaaagtccatgatgttcaagtcccttatagaaaatggtgtagtatttgcatataacctatgcacatcctaccatacactttaaatcatctctagattacctataatagctaatacaatgtaaatgctttgtaaatagttgttatactatattgtttaatgacaaaaaaaagtttgtacatgttcagcaaaggcgcaaccatccatttttttccccaaatatttttgacccacagtgggctgaatcacagatgcgaagcctatggacatggagggccaactggacaagcataagcaggggatactttttaggttgctacttcagcaggcaacattcagaccatggaagtctagaga

SEQ ID NO: 335879 - DNA, 1000 bp, Homo Sapiens
tttttttttgtcagagaattgtttattttacccagttatactgtaataagtcctggatggcactgtgtctagcctcaaggaaacagaacaagtacaaagctaagttaaaggcaactttattacaatacttttccaaacttcaaaatgcatttattactaaatttagctctaatatataatacactatattacaaggcagaaagcatttctggtcatatatttagcttccatgtattgcccaaaacacagcttcctaggaatagcagcagtgcacagtagtttacgtcactaagtaaaatatttctctgatgtctcacaatcattcatattgtaatttattttatgttcttctgattaaaaaaagcaaagctatcttttccatatcttattagttaatacctagaaattgtctatattctaaaaatatccactagagatatttcctttgataggaaataggatttgcaaatccaaccaaaccaaagaatactgtatttctccattgcaaataggggtaaaattctcttctttcctttttcaggagccaaatctggacctcctcctcttcatagagccatcctgaatagtacctactttaaaagatacctaaatctacaatgcacgcactcttctttaataaagtctttgtttattcttgcctccttatatttacttatttagaataatttacaatcaactttgaatgtaacataataatgaacttaaaaagtaatcttgggagatgttaataatataaagaaagtattttccaaattagacaaggactttatttgctcattatcctctgcttcaaccaaccaactaaccaaattcaacttatgaaaataattcgttttccaagattactaccctaatcacaacaaaaacagatacaaatccacaaatagatctagtcccttaattttctatttttttttttttttggttttacatttgtgagctaccaactagcacaaaacatgttcatcttccttttctc

SEQ ID NO: 335880 - DNA, 1000 bp, Homo Sapiens
tttttttttttttttttttttagagctgagaataaatcatgtgaaacctgtaacattttatttgttaaaaatgaacagcttcagaatagatctaaatgtaacttttccaaaaaacaccaaaaagtacagtgtaaagcacctcctcgttaaatacaaactttcatttggtgatgcacggcaccaatgttttgcatataccttgatgcaaagaaaagtttaagttgcatcctgtttttaaaaaaaaccgaaacttaagaactgaacaaggattacaaccacattccaataaagaaaattttccttcaacaaagcatattgttttgtttatatacaatatgtgaccaccaagagttttaatttagttgtaccaaaggcaaaacattatacttaaaattaaattacagatgcatgaagaataaaagtttaatgtatcaaagataatttgttatttaatgcactcaatgtcagtatttggggcaatttttaaagttttcccaaaaaatggcatgaatagctctatacaataataggtaagaacaggaaaatgaaaacacctttataccatattttcacaaaccattctaaagacagcaaacttgagctcagctgcttttccttgctttaaaataagctaccagtaattctaaatcagactaaaatgtactgttcctagaccaaatacaggcattcatccttgcaaaaatgttttgcaatgagttcttggcctatatgaaaagcatcaaatagctaaggagagactagaatttatttccaaattctgtgactgacttccaataatcccttatcagtacgagtaccaggaaaatatcagatattaaagatcagatttaattctttggtataagcatgaaactgttactgatagctttccatggcgagcataaaccatgaagcaactcaagaagcatgagagacaacaatgaaatctagtatacaatgcagggcaggccaagaacgatgtctgctttacaggaaaagt

SEQ ID NO: 335881 - DNA, 1000 bp, Homo Sapiens
ttaacagaaagaattatttattcagatttaatttctcttacattcacgaagccaaggaaatccaggtatgcatatatattttttaaattttacagaatagactgaggcataaggcgggaattaagtatcttttaatttatctcacctatttcacggtgaattcacacttctaaatacttactccactgctgttattatgtcccaaattcacaaaatagaacggatttcccaatctgaataaaaaacaagactcttactcctaaactatattaacagcaatatacgttaactacgattcataaacttggatgctgaagttaattcaaccatccattaaaaggaacatttcaacaattgtaaaaggaaacagagataaatctccaagtcatccaacaaaatagaaacccactactaagaacactgactattttcttcaaacagagtgaagaatgggcctcatgttacacgaggcaagggaagctgctgcacagggctgttagatgcactggcccagccctgccccttccccacagccctggctgcaactcatgctcagactccctcttcctcctctaacaaagctgcttcacgcagggatgggtaggcaatgcgaactcttgcattgaccctgaccacatgctccaggactttcacatagctggtttcagccagagcccttggaccccacaggaactcatagcgcgcaggattactgccgggtacctgccggtactccaggtagttttcctgcacccaatcttgggtgagcagtttcctgggctccccatagacagtgtgctccctcccatcatacacccccatcacacccagctcctcccagatttcctcctcagaggcgctgtcgccctccattgcaattgtgcccaggacgattatcagaaggcctgtcttgggaaagatctgattattacccagcaggccatcataggaaaggcccaggcaggtgacaagggtgtaggtgttgctggcggggtccact

SEQ ID NO: 335882 - DNA, 1000 bp, Homo Sapiens; identical to SEQ ID NO: 157535

SEQ ID NO: 335883 - DNA, 1000 bp, Homo Sapiens
caggttcccaataaatgtttattgaatgaataaatggaagaaggagtgaacaaagtaatgaacaaaacagaccccagatcagaggaagagatggctttcttgttaattctggagcagattcaagcagcaaatatttactgaacacttgctatgtgctggaaattgttctaggaactggagttacagcagtaaaaaaaataacatttgtattttcataaatttatattctagagggagaagaagataataagaaaataagttatacagtgtcctattaaggagaaattatagcagagtaagggggtggagagtaatgagggtgacattttagacaggaggtcagggaagcctctcagggaaggtgacacctgagcagggacttgaataaagtgagtcggggaaccagacatatacttgggagagagtgttctaggcagagggaacagcacatgcgaaggccctgaggcagagtatgtagctggagaggggagggaagagcagtagaaaatcagagaggtcaactctgtggaatccccagcccaggaatttggggctttgaagctctcttatgttcagaaaggcaaatcatctccaggtccaaagttgattaacattctttatttcacagtatttttgatcagaagtcttagaaatcatgattcatctggttacaaatcccatgagtttctctttgaatgaacctcttgcttccagtcccatacaacgcatctcccaccagccccagtgggttgtaactgtgattcaacactgagtgctcacttggaaaggaggtggagctcaacttccaactcagagggcctctcccactgctctcagggaaatgcccatgattcacttatgctgtatcaacaacaagtgcagctgggcgctgccttcccagctggccaagcgctcctaggggaatctccaccctcagaggcttaggaaagggaagtgtgacgagtcagggcccctgggctggtgtcttttccaatactgg

SEQ ID NO: 335884 - DNA, 1000 bp, Homo Sapiens; identical to SEQ ID NO: 157537

SEQ ID NO: 335885 - DNA, 1000 bp, Homo Sapiens
ttttttttttttttgagatacttgaattgatttaaaatttattcaccccagtgttcactcccaccttagccccattccatgcgcccttacccttactcatcgcagtatcaaaataactcccaaatgggattgctgtgcttgaacacctcccatcatgcctcttaccttctgcatgcatttagttagttcctgaagcatacagccccctcacctgcaagccccgcctcagcgcacacccttgccaggttggaggaagtcctggtacccggagcagtttgctttgtttttgcagtgtcagtgatctcacaagcacttggttggccacacagtcctatcgataacttccagcagataacccaagtgggtgactggggggtggaagccaggtctcggttcctgtgtgtgacccaaggccccccagcacagggcccaccctctcatctggctcagccaggtcttgcagaatgggctctgctgagatctaaccagacacatttgctatctgttaggtgagctcattcctggaacctagcaggtattccgttcatggctgactctcaagggaatgaagggaaaaggaagagcgggtctgagatcctttggattatctttacgaagcaaaagcttctgtgaactgtgatcttcagaacgaatgctgggcctatccaggtctgtccgcagtacccaaagtcgtagctccgtgatgagctatgatgtagcccagccacactcagtgacggctcctggttcctcacttgccagggcagcttcagttcctgccgcggtgtcagtgcagattgattcccgctgcgttactgaacgaactcctgaccctgggctctgagctgatgagctggctccagaaggtgttaatcatcatcactcaggtgtgctgtcctcacagagtcctggtgcacctgggatcccagtagctccacattttctttgctgccttcgaggttcacatcttcagggtcccactccaggtcggagttgatgg

SEQ ID NO: 335886 - DNA, 1000 bp, Homo Sapiens; identical to SEQ ID NO: 246565

SEQ ID NO: 335887 - DNA, 1000 bp, Homo Sapiens; identical to SEQ ID NO: 246565

SEQ ID NO: 335888 - DNA, 1000 bp, Homo Sapiens; identical to SEQ ID NO: 157538

SEQ ID NO: 335889 - DNA, 1000 bp, Homo Sapiens
ttatttgcatttgagtgctttattatattggaattgcagtgatattaacatttgtacaaatgcacaaaatcttgtctcttcttgctagaaagagatgtaaaaatctgacctagttgaacagtcttaatgaactcattgtccattggtaacaataaatgtgttcacgatgcaacaaaaagcttaacacaaaattaaacatattaaatgctgcagcaagtatttacatgtatgtacccctttttttctccttccaataaggaaggtggttgctttacaaatagacaaacaaacacaaatgctttgctgtttacaaatacaaagaaccccaagtccagaacttaaagtgacagcacctttttgggacttcctcagttaacacttactttacacagtgctaaacttttttcttttaattatatttttggacaatatttatattccaattgtcctagaacattgtatttgaactgagctatttttctgggccttttcagaggatcccaaaccctatgtcctctctagagagaacatttcaagcttatctgttctccaagacagttctcaaaggcaacattcctttctctatgaggcagatgtgatttagcagaacttagaagggaaaaaggtgagtaggttgtattttctactggctgctggttgggaagggtcctttctcttaaactccctccactcaacacaactgatacctttcattatctcctgtagtgtctgtggcattggtattctaaaggagaaaactagaatctaatgagcttattgtgcataagattttaatgatgtatttaaagctaatttattcagcttccacattctcagtcctgaggctaaattattctattgtaaaatatccaatcctataaagttctataatatgaagctcaatgtaagaatatcttaaatggcttagaaggagctttctagatcctggcttctaatgagctagatattgtaagttggtctaaatacaacagttggtaat

SEQ ID NO: 335890 - DNA, 1000 bp, Homo Sapiens; identical to SEQ ID NO: 157539

SEQ ID NO: 335891 - DNA, 1000 bp, Homo Sapiens; identical to SEQ ID NO: 157540

SEQ ID NO: 335892 - DNA, 709 bp, Homo Sapiens
gtggtatctataagtgcttcgtccctttattgtatttggggtgaggttattttagggcatggtccagggtgaattcctataaggcctgggtgccctgcctgctgtgagatcaaaggggaatgggactaagactgcagagccctggctcccccactgcctgccaattgcctgcggtttgtggtctcttccactttctctggcctgggaagacgctggggtgtttatgatcccaaggctcctggtgggtggtgcgtgtattttcagtgccggagggtgctgtgggcactgggggaaacttaggcacctcctccaaggctctcttggtgcctcctcatctgttccttcagcttctggatcttgagcaccagggcttgggcctcccaggctccctcctgcccttcaaggagggcctggtacagctccagctgctgctccaacaactcttcagctcgggccagctcagctgtgcggtgggtcccagggcccctgggaggggacgtcatcttcccatttcctctggagttggtctgctcttccatgcttgctttggggttttgggagcagcacccatgggagccctggggtgccaaggaccaggagggcagaaggaggcgaaggaaatggtaccgagagagccagggcagagggaggaccatggcgggtgacctggccgggagctgtgtgagctgtccaacggccaccaggaact

SEQ ID NO: 335893 - DNA, 1000 bp, Homo Sapiens
tttttttttttttttttttttgacagacaaatggcttttacttggaagcactaatgaacattcaattatcctgttgcatattggctgacttaactcagccaaattagaatacattttatattgactattttgacatttgttttatttggcaagtaaaacaaaactgatccgatttccttgcagccattgtaaaccataaactgtacagcagaggtgataaaatacataagccttataaacatctggttctgacgcactaccctccaaacccaccaggctgccggtggctcggtgttctcggctgtcttgcttcaggtgcaagtgactttgctctcacagtcaccagcaggcttctgagagctctctctgctttatctgagagaactggtgttctttctttaaccacagaaagtcaaaacctgcctgaggtggtgcccatttctgggcccttctagaccacatgatgtcagcagggagcagctgtaacaacttcagggcaactgctcctgtgggggctttccagcctctgcaaggagcccacacttgagctgctccaagtacaagtgatgggcctcagcacaggtgatggaggaccccgacacacaggtgatggacttagctgactccccagcacaggtgacacacctgatatagccttgagcacaggagacagtgaccctcagcagtgccctccagggcggagctgacagcgctctggctcagaagtgaggaacaagtgctgatgggcagtgcgaacctcacactcttgaacccaacagagactcaactgttcaccctgcaactctgggaggcttattagagattcctatctttttatgccaaatgaaactgaaaactacttctaaagtttcaggcaattccaggggtagttaagtttaaataccactcttggtttgtgaaactgtcatgagaaggaccagattgtctttatagggggatgtcccagaggacagagtcctcagggctttggagcctcatt

SEQ ID NO: 335894 - DNA, 1000 bp, Homo Sapiens; identical to SEQ ID NO: 246402

SEQ ID NO: 335895 - DNA, 1000 bp, Homo Sapiens
tttttttttttttttttttaaatattataatattgttattgcaagaacaaagggttacccaagtgctttacaaatgaaatgctgccttgaggctaaatacaaattcaccatagagcattcaagacccagagagaggagtaattctcctgtggcagggactttggaggaagggggctataccctgggttgttgaacttcaggtcccattgctaactgatgaacacataacagataagctccaaaatctctcttgtgcacaccctgaacaccaaggaacaccttggaaatactagtgccatctcattagtttttattattactagatagacacatcaacccacaaggttataatctactatatatcatgcactatagtcataatttgtctcagcaagatttaacaacataacaaatagttttatataattttagaacaatgattattatacctgaaaatatacttcaaaaactcagcaagccagaggcttacttttgtccagtgagtttatacactcaacatacatttgcatcacctcctcttattcaggaaaattccaaaacagctctattttgtcaatgatatccagattcctacagatcatagtaattatcttttgtcccagggttcagtgtgtttttaaggtgcagttagatgaacattctacacagaaaaaaagcaaacccgtacttgactctgagtaagacccctgtaaatgactaagtcatttacaagggtcaaatttggtctggatgccaggtggaaggagacacttttcttcattgctcctactaaagaaatccatcaagactgtatctgagattagcatggtttcaggttctggagaatattaggtcccataatgtcttggctacagtaggtagatttatatccatatttcccagatgtatttatcaccatttctgctcccaacttattctgagaatcttcaaacaaatgttttttccagatgaactgaacacttgtaatgtttccaacgtt

SEQ ID NO: 335896 - DNA, 1000 bp, Homo Sapiens
caaatataaattgtgtatctttatttttaaagtatttgttactatgttcactttcaaaacactatactgagcaaagagcagctttcctttaaaaaaaaaaaaaagcaacaaactttcctgaaaaggggcctttaccaactgttaatggaggtagggtttttaaaaatacagtaattagagccacaaaatatattccaaaccaaatactagagcagaagtagagcatattcaaatgaaaacaacaacagattcctacagttttcacagagaatgaatcttttttcttatgggtacctaggttttccagttaaataaattatctatcacaggtttactgactcaattgaaagcaattaactgtaaaatttgttacattgcactgattggccaaaacacaatgtaactaataaacatggtggctgttaagaaaacccacagaactcattccaaaaaagattttcatttcccccttttgtttttctggcagaagaaaagcaaagctcccccaagaatttgctcatacaagtgaaaataaaataaagcagcttaaaatggatacaatgcaccttgaaatttatttccaagaccaagaacctgaagtgaagcattttaagaaatgaaagcaatgtgaatccaaatcaagtgggaaaaacaaattcagctactttgtaaaagctgttcttcgcagcatagcagtaattttgattaaataaaatcatatcaacttacactaattttctattcttttccaaaacttcccttactctcaaaagaaaaagtgcatctaaaccccagcaattcccggctccatcaacttttcttatctcttttgagccatttctcaattttccaagtagattcaacttgttactgtaaggaaaaagggacttctaaagtaaaccattctttcattcacctgaaaaaagtatccaaattataaaaatctgaaataatttatcaaatttagaatttaaataaaaacaaaagtttgcttgcaaag

SEQ ID NO: 335897 - DNA, 1000 bp, Homo Sapiens
ttttttttttttttttttaaagacacatgcacacgtatgtttattgcagcactattcacaatagcaaagacttggaaccaacccaaatgtccaacaacaatagactggattaagaaaatgtggcacatatacaccatggaatactatgcagccataaaaaatgatgagttcatgtcctttgtagggacatggatgaagctggaaatcatcattctcagtaaactatcgcaagaacaaaaaaccaaacactgcatattctcactcataggtgggaactgaacaatgagaacacatggacacaggaaggggatcatcacactctggggactgttgtggggtggggggaggggggagggatagctttaggagatatacctaatgataaatgacgagttaatgggtgcagcacaccagcatggcacatgtatacatatgtaactaacctgcacattgtgcacatgtaccctaaaccttaaagtataataataataataataatataaaattaaaaaattaaaaataaataaataaacaaagtccccaccacttccaaatgccatcaacatacaaatttggagattaagtttcacacacatgaaatctggggggcacattcaaaccatggcaacaaggtatctaaagtattcaaactcatagaaacaaaaaattataatttcagttgagagagacttggggaaggaggaaatggggatttgttcaataaatagagaatcttagttttacaaggtgaaaaagtccttgagatctgttgcacaaggtgaatacagttaacactgatgaactgtacactcaaagtgattaagatggtaaattttatatgtttttaccataattttttaaaaataaaaataattttaaaatatgatttagatacaactattctagcacaaataggattaatataattatatgttaagagtgcattaattcagaaaagctaggaaataagtaaataatgaaatgtcagacctctcagatg

SEQ ID NO: 335898 - DNA, 1000 bp, Homo Sapiens
ttttttttttttttttttgctactatgctgagttttattattactgactatgtgtacagaaatctcctttaatttgctttagaatatcctgtccttaccgaattattgcggtggctttttgttttgttctggtttgcttttcactgggaaacgaatgtgattcttgctaggcaaatgctaaaatggcacataatcagccttcaagtagcttctccagccatttgagtttcaaacagcccttgagctcctagaaggctctgcaaagtggggagaaggtcaggagaggagggggagaaactgaaaagagggaggggtttatgcttttgcttttggtaaatttgttttcttcaatacaaataatcagataggaagaataattgctttgtgttgtatttgttggttggtttttgtttcacttttagatttgtttcatttaattgtttaattttccctcttctggtgcaaaaatcaccagagagttttgcatgagaaaacgtgacagtacttaatgaaactcagcacctaagggcataaggcagttgaaggttttttgtttgtttgtgtttgttttgttttgttttgttctttcaatcagcaccaatcccataaatgatctacacttggtgtaaggtaaaaaactttttttttttcttttggagtggagataactcctccttctccaccctatgaaccatagcgtgggatttttcaatactgtttcttatgtgtaaaaaacaaaagaaaggttttctttttgtttttacttacaaaacatagagaatatctttgtatacatacagcgactggaaagaaagcttatttgaaggggttgtgacttattaattcttttttttttgtagtggtggtgttggtgtggcggtgttggtggtggtggcggtggttctgtgtattgggggaagggagggttatatttcttgcaagtgctgtttgccgcaaaccaaacttaaggtccccttctcaacttggtcaagatgctctt

SEQ ID NO: 335899 - DNA, 1000 bp, Homo Sapiens
tttttttttttttttttgctttacaatttaatctttcacatgagggggagatgagctgttctttcccactaaaaattgctgctgtagaagttggaggtggagctgtgactggctgagctgctgtggccgggctgggcagtgtgccccaacagctcagtgctttcctgacactccagtgtctggggtggttgaggagcgagttctctcttcctcccagaccaagttcctccctcgggtttgccttgagacgtgttgcgtttttgggccccgtggcctctccctgttaggctgccacaggccctgcttctggaaggtgaacagctcctggctgctgccgagagggttctcgttggggtcaccaaagtgtgcccggctgctatgaaaaacgttgggaatcttggtttcagttttttattctatgctaggttgtacagacttatttatatcatcgttttgagggactaatggaggcttattgtaacatataatattagtgaaaccatggaattatatgaaaatgatacatgagaaataaggaaactattttgctgattgtaaatttttgtgggaaattttgtgataacttgagaattatacttgtttgaatcaaggcaactcttctagaatttattgttcaattctgtcatatttacttctaattctactctcagaggtgcaaaaagatacttatctaactggacacttttactgttttcttctcacttccaatgacaccgtctcatacacacgggtcctgtgtgctgggatgggggctttggtgaagtgcacggagctcacggacaagccgcaggctctgggaagcgtggaggtagtggccgttgagtactgtcttgacccaagggagttcactgttgctgggctggggctggggcagcctggtttgggatgattttgcccattgtcacggtgtgtggaggatgctgggtcctgggttcaagtgcacatgtgagggaaccccagtccgtgggaaggtgggctg

SEQ ID NO: 335900 - DNA, 1000 bp, Homo Sapiens
ttattttttcttctgaatatgttcatttatttggttatatctgaaagttgatggtagagatatttcttatctgctcctatctaatttaggtaaatatttaagggtaatttatcaaggttttacagtgcttctctataatgttaaaatattctcagggaattttgcagataagttaataatgaagtaattcaaagagcaaaaatgtataaaacacttttggtttatcgttcctgtaaacagttcaaaataatttccttgactctgaaaaacaaaacaagtatcagcaatattccaagcaaaagtcaaaaagtttgcttcagctttctgagttcagtccatttagttaactcttgttttgcttgatattcttgagcatttcagctctttatgtgtcctgtacattttcttctattccaatgttaccatctccaaagttaccagaagcctatatttgagagtgcctgttaaagtcatatagcttattataaaccatcttttgaaaaggattaaaacaagacaattttctgtgaatagaaaaatgtccaaggtacttacagttagaaacacgatggaaaaagaagtttggttgtctccgtggtttacaataacttaacataacaaccttaattacgattggtagcaaatacttagacattagaattttagaagtcccatacaattttggaacatatattagcattatttaccaagatataacctaaagaagattgaacatcattttggcaatccatgtacctaaacatgtcaaataaccctgtttacctctcttttctggacacttcaggggccctctgaagtattccaaaagccaagtgccagggaagacagttttgaaaccaaagtttgattttgggaaggctgtcaaacatgtttgaggtttaaaacacttgatattatgaaacagagttccaaattgccattaagttatttattttgccaaaaggatgactcagaaatttcaaagaagcaaaaacctttt

SEQ ID NO: 335901 - DNA, 1000 bp, Homo Sapiens
atcttttaagaccaattttattgagatataatttatagacagttaaagtcactcatgttgtgtataatacaattagaattttgacaaatgtgtacatatagttgtataattggtgccacaatcaagatataaaatatttccattacccataaaaagtttcctcagtcccttttgtggccaatgaatccccaccttcctgcaaccaatggttttctttcagagactatagttttttgttttcaaactttctgtgaatagaatattacactgtgtatttgataattgttttctttcaatcagcatggtgtttttaaattcatctatgttatgtatattactacttcatcctctatttttgcttagtagtattccttttctagctagaaagtagtatcaagatactaaaatatatttgttcatcacttgttggtaggcaactataaataaatttattgccataagcatgtgtatacaagctttctgtgagcatatgttttcatttttcctgtataaatttctacaagtgagattttggggtcatatggtaaatcagtaccaaagtattttccaaagtaatgtattattcttcattttcatcagcaatatgtgggagttctagttgttctacatctttactaatatttggaatcatcaatcttcttaattttagtcattcttttttttttttttttttttttgagatggagtctcgctttgtctcccaggctggagtgcaatggcacaatcttggcttattgcaacctctgcctctcaggttcaagtgattcttctgcctcagcctcccaagtagctgggattacaggcgcctgccaccacgcctggctaatttttgtatttttagtagagacagggtttcaccatattggccaggctggtcttgaactcctgacctcatgatccgccctccttggccttccaaagtgctgggattacaggcatgagccaccgcgcccggccttgatgacgtctctctttcact

SEQ ID NO: 335902 - DNA, 1000 bp, Homo Sapiens
tcacaacgccacgtaggagcggtcattcatcacaaaggtgaagtccccgattgtgaccacatcaccaccttggaggggctggtggggaagctggagggatcccccagaggcctctttctcctcggtctgtgggtccagcatcctgggggactcggcttcagtcttggccaactggaccaccaggggctcctcagggccacttccttgctctgcacctgccatcttgtggaggtgggccacgttctgggtgtctgtgatccactcctggaagttcccttggtgtatctcaaagagcccggggaagatggatttcgggtctggcacgctgggaatgagaaacttcctcactctccataatttccataaagacagaaggaggagagacaccatcagaaggatggccaggctggaaattaaaataaatttggacagctttggtttgggaggcgttggtgtctctgcacaggcatcccgaatctcgcctctctgccagcatgtcacctctgaccagtcgcttgggtatgtgtctggcccatatacatcctccatagccttcaccctgacccagaaagagtaacacttctcggcatccaagccttctatggtgacgttgcaggtattttcctgtttggactgccactcggtgtcgaaggggctccggtactgaacctcatagaggagatccccgtaggacaggtcagaacacgtcaccgtcactgcatcctgatgccacgaaaatctcacgtgcttcggggaactgggtttcaggtaataaaccatccagcgacttgcggtgaaaacggggtgcgtcccattcctgatggagaaatagagaatgtcgtctcgctgctctgcgtctaggaggcaccccgaagtgtgaccttcctggagaaggtagttggtgcactggtcataggcctcatcaccgttgaatctgctcctccttgccccaaagccatccagcctcccagcagaaagacggcagctccccacagcagaa

SEQ ID NO: 335903 - DNA, 1000 bp, Homo Sapiens
tttttttttttttttttttggaacctggtgctttttatttacaaaagaaaaacaataaaagaagagtctgaggctaatcagctggagacacaggagtgaaggtggcaatggggggtagggttgtttttagagagaggaagatggggaggggctctggatctagggaagcctgaggttctcagcctctgctggcttcacaaaggccagccctatcctccctcaaaggctcaaatcaatggcccgcagctgagcctcccactgcccaggtttttccaggagcctgagttcccagctcaagggggctggagtggcaggggaaacaggccggagagggcccacgagtcctgccaccactcctcactgtggtgtgatcttggcagcctcagccctgatgagggcaatgaggtcctggttgataaggaagacgaatcgcaggctggcgatctccaccacagagttgttgctgaggcgccatttggagccacagagcaccggccgtccatcgatgtagatgggccgtcgaccctcattggcaatgaagaaatcaccgttgttcttcagcttgatgacaccttgtttccgggatatcttccaggccggaccctccagagacaggtccacatcaatctggttatccttggttgctctgcccagggtgatctcacgcgagcgcatcaggtaccgcaccatgcggccccgcagcactgccagtgtctggttgtcgaagtccggagagctcatgcctgtgatgctgtccactagcacctgccacttatgcagttcctgttccagctgccgaatctctcgcttctggcgccggtcagccaccatcagctcatgttccaggacctcatctcgcatgtccttgagcttactgtcatcaatcaggtcctctgcatcagagaagttcagcacttggtcccctttgggcagcggctgcactgtctggtcctccagcaggtaatactgcttcatgagctgccagtgggcctgcagggcc

SEQ ID NO: 335904 - DNA, 1000 bp, Homo Sapiens
tttttttttttttttttgacaggcttaattttactgcagaaacgggttggctgaagggaacaggccagcgaggtgggctcaggacacccccaacagccaggatgggggcacggcaggatctggcgcccagaagtcagagggaggcccaggaaatttgcgccagttttcctgccttgtggctgcctgaggagccctcactcccagttctgtgggtgcccagggtcacccagagttcaagtcagggctgtgccaagcctgagagcccccacaaagacggagcaggcggaatagggtggcagctcacagccctgaacatacaggggattcctgcggccccacatgggcacagccttctcacagcacccctcaacacgcacagcggtgggcttgtgggaggtgctggtggtggcactgtctcagctcctggtggcctctggacgggctctggccctacacgtctgtgctcctggcactgaagatggatgctggggtgggatgggcaggcattgggggccgagagcctgcccccaccccacccagcctctgccttccatgccacatcttctcacgcagcctctggtacttcacctccagaaccttgttcttcaccgactgagggatgtcgggcacgaaccaggcggcgatgagcttgatgcacaaggccacgtgctcaaagaggatgacgaaggccaggcggatggccaggaggaaccagaactgctcggagaagttgtaatcggggggattgcggtagtccctgtatctgcacagagtcacgttttctgagccctcaatcccatcagggtcctggaagtccttggtgtggaagacggacaggctgtggttgacgtagcccttgaggcagtcgacagtagagttgccttctttcaggcatgggctatagcggtacttgtagaccactcgggggatgaactcagatgtgaaggcaatgaccatcccattggcaatgaccgccagcacaccgatggtctccagcacc

SEQ ID NO: 335905 - DNA, 1000 bp, Homo Sapiens
ttttttttttttttttttttttttttttttttttttttttttgttcatgatatacaaaatgattttattagatgccaaatttttattaacaccattttatttcttttgcagctttaatttttaacattataacatttactggctcctctgggtgactaaatatcttcacatgcccactagctaaaaagaatttctaagtagaactcaactgaaactgcaagctactgctctaagaaatgcatacttatgtttatttgctctcctatataatcctgtttacaaatagcataactgcaaagatttatatgtaatttctaaatccttcaggttgctctaccattcatcttcttatgtctggcaagataaacactcttagtgaacactttgctgcatctcttaaatgagatttgtctccagtttatttcctatagaataagggatgcacttggaactgaaaaattccttcaatttctaaagtttccacattcatacaacttttctcctgtaggagtttgcaggagattcctattgcctatagtctttcccacatttgctacatgtacacagatttttcctagtgtgagtatacttaggtcaattaagggattaatactgacaaaggctttcccacatttattgacttcatatgatttctctacagtataaactctaataaaaaaatctgcatcattgctaaaagtctcccatgttcaccaccttcatacaacttttccccagtatacatttttctgatgttaaataagggaggatctatgaatgaagtttaccgtgataaacactgcttctcttctgtaagatttctcacatgtatagggattcatatgatctaaaggcttttccacacttaccacactattgggtttctctccattatgtactctttgatgggcagtaagattcgagcctttgctaaaagctttcccacactcactacatttatatggcttttctccagtatgaattctctgatgtacagtaa

SEQ ID NO: 335906 - DNA, 1000 bp, Homo Sapiens; identical to SEQ ID NO: 157541

SEQ ID NO: 335907 - DNA, 1000 bp, Homo Sapiens
tttcctgtatgtggttttttgtttttttttttttcaagacaaggtctcattctgtcacacagactggagtgcagtggcacaatctcagctcactgcaaactctgcctcccaggttcaagtgattctcccatctcagcctcccgagtagctgggactacaggcacgcacgtacaggctggtcttgaactcctgacctaaagtgatctgcctgcctcgtttttcctgtatgttctaatgttatttcagggatcccctttgcctcactctggccattccaaaacatatatatgtttcatttatataaatccaaatgaaaatattaaaattgcaagtgagatatttttggccttaatctttgaatttcaatgttttcttatctgtagagctggtgtgctaactcctgtaattctgggcaatgcccatgtggttcttggctgcttcaagccatctcaggtctgattttcacacaagctcagcagcactgggctagaagggtaccgccctcccactctgctgccactttgaatagaagtccaagctttcgctttcttgccctgactttgattcttcacattgctgaggagcagtgattgaagcttaatctcattgtctacagtccgtctcctctatggagctgcactattctttcccatctcaattatttctgatgtaaccaaaacactctctctccccactgccttttttcttttgtaaagacttgcaaagggtcagttccagaggctcgagccctgtgttctgactttcacagacagaggcctgccactcttacatttacaggtcatcattctgagcaatacactttttttgaagagtagtcctaaaagctcactaaaaagttgcatttgtatttaacttaaatagagaaccttatgtgtagtccatgtttctggactctatacctgattttgaatcactggacttaaattattggacttacaacactgatacatcttgtaaatgaacctaagcaaagaatacc

SEQ ID NO: 335908 - DNA, 1000 bp, Homo Sapiens
ttttttttttttttttttttaattattattatttttaatagagctgaaatctcattatgttgcccaggctggtcttgaactccccagctcaagaggcagggccgggcgtggtggcttatgcctgtaatcccagcactttgggaggcaaggcaggcgaggaggatcacctgaagtcaggagttcaagaccagcctggccaacatggcgaaaccctttctctactaaaaatgcaaaaattagctgggtgtggtggcaggcgcctgtaatcccagctacttaggaggctgaggcagtagaatcacctgaacccgggaggcagaggttgcagtgagccgagatcgtgccattgcactccagcctgggtgacagagtgtgctccgtttttctcgggcgactctgagtggcccctgtgcttccgtcctgatgagtttccatacacgtcatcttcgttttcatccacatcttcatcatcgatgcttttcacatcaagcttctggtacccaaactccctgttcaaagacagggaatcaattttccacgagttgctgctctgacttccattggagtttggcccgaaggggctttcaaaggcggacatgatattgacagaggagtggtcggagttgtcctctgagctctcccctgccccaggtgtctttttaaacatgtccccagagttctgctcatcttcctcatcatcaaatgagataatgttggtcacttgctttttcttcttccgctcctttttgcatttggcatcagcactgacattcctggacacgacgggcaaggggtcggtctcctgttcaggtttgatgaggatggagatggcagaggaggctgtgatctccctgaacacgctgctcactccttgcgtggactccttcagcaaggtcacattctgcgttgactcctttaagaggtctgaaacggtgggagcaaacttactctgcccgttcaaatccttgttgtcaatgttaatcgcaaagagtatggagtt

SEQ ID NO: 335909 - DNA, 1000 bp, Homo Sapiens
ttacaaatttctcgaactttattggtacactgcacaatcacaaccatctcgtattcatcctgaattagaaaaggttacaactacaatgtaacatgcacaaaattcaggtagtatattcacccttgatacaattattgacagaaatcaagtcttcattgattttttgaaggaaaaaatacgaaagaaaataaaagaaaaaaagaactctagaaggctgacaaagtcatactcttgtatcgtgtgataaatttttaaagcatttgaacatagattttttttgaaggataattgtgagaatgggcacacccattgtctgacacagctataacggcaccattgataagtcataatttttttttaaatctaaaggactctgaacttgacagacacattttcgttcacccacacagtcctcacaactgcacttgacatgtcacgaaaatttccgaacgattaaaaatgctccctttaactaacacaagggcagcttgcagtacatagcattgttattactgatagctttataaatctgccaaataacatagaatgtagcctcaaaaggatggtcgagggttcgcaatctttctttctccacccagtggtgtggagcaactctgtgccttaaagagggcaccatggaaagaaacaaaaaggaatctctttcaaaatgctggaaattaggcttagctcactactttcaggataaagacaactgcatctaattaagtccactccacatttctttggactctaagtattctgcacctgaaggctaaattgaactggctcagccctatcttttttgccacatctttaattacaaatctatttcttcttcctttcatttacttctcttctcttaagtaagaaatgtgggaaatgagactggcagttttgtttgtttgcatgtggtgatcattaggcgttctcatcatatggtctctttttgaaaatgttgccttcctacttacacacctgtgaagttttactcaagtgctca

SEQ ID NO: 335910 - DNA, 1000 bp, Homo Sapiens
tgggtgttcctggcagtttaaaaaaattggttggagaatttaggtttttattagtaccatagtaccatttatacaaattagaaaatgttatttaacagctgaattatctatacatatctttattaatcactattgttccagcagttttcaagtcaaattaataatcttattagggagaaaattcaattgtaaattgaatcagtataaacaaagttactaggtaacttcatattgctgagagaaatatggaacttacattgttcaattagaatagtgttctgcaaaaatatttataaaacttctcaagatactgctactgtaattttatatgaagataagtgtatttttcaataaagcatttataaattagcctttgtttggttatattgagaaaagggtagtttcctgcataaatggcaaagaacaatcatttattggtttattttgtctctactaaacacattagtcatttatcatttaaataccggacttcattagaaaccgttgtaacactttttctccctcctgccataaaaatacagtaagtaatttgcttaaaaaaaacaacacaacactaggaacaagtgttctggtttcttctcactgaactaaagacatttctcagtgatttcagtttgtaaatcagtaagacagtgcaggctacaaatcagtgcaggctgaagactgagattcaaatgatcttccacttaaaagtgctgagctatggaacctgctctctctatacctctccatttcctaacatatatacaactgaaaccactgatttataaactattaagtagtgctgaattctgtctgctctattagtttaaatgaatgcaacttacctttagcattatattcagaaaaatacttacttaagcctcaaggtccccaataatttggagtactgaactagataaccaccctaagacacttctgacagaagtaatgcattacttagagacaggtttccaaaccctgctgttagaacctatgc

SEQ ID NO: 335911 - DNA, 1000 bp, Homo Sapiens
tttttttttttttttatttatattcaaaagaaaaaataaattaaatttattaaagttttaatacaaagcatcccatttgaagtatagttctgaagaaatgtttatgagctagggtcctgtcaagagaatattctatggcaatggctcactctgtttgtgtactcttacagatcctctcctgaagcaacagaaagaggtgtagattgaatttaaacaatatccaacgaaaccttcattgtatttgtttcatactttttttagaacgtctcaaatcctttttctgcttgaaaataggagaattcaaaaaacacaaatctgtaaaagggtcccctcttctcagtttcgaagcgagggtgggctccttatagttcacgctggctgtgcacctacgtttaggcagagccactgctgggcttgctttattcttttttggagaaagagaaagtcttctgattttcacaacaggatacaaggagacattggtgatatccttcaggctaagatgaggtgactgctgagtttcaggtggtgtagctgaatcaaaatcaactcccagtgtgtcttgaggaatagtaggtatctgatcttctatttgaaatgattctccttgtcctggaagttcagtttcttcaagaggaatttgcggtaaatccttcacaaataaatttctggagctgtcatcactattggggtccattccagaggaacatatttcctggttctgagcaggttctactgtttgttgtgatgtaagttttcctttcaatgcatatagctgacatgtgagatagtaacattcttttctcagctgtaggatgatatcttgggcttctttcactttggatttttcattttccaaagctaaaactaacattttgttgttgtcttggtaatttttcagcagtgtagaagtgttggtgattatttggcatggtgcagctataaaagacctgcgtttgccaatctctgccaagtttttattccttttctctttcattcg

SEQ ID NO: 335912 - DNA, 1000 bp, Homo Sapiens
ttttgcttcctccaggaaaactgctttccctctttaatattcactatcctcttctcacagcctgtaagcctcgctcaaattagggtgcagctgcaacccaaacccaaaataaaatgcccaagcacgcgacagggacacacacggctccagatccaccggccccgcccgcctcctctccacagcctggctgctagcaggcaaagaagtcagggaagatgctctccacctcgtccttcagggccaggcctgcacagtccacatccaggccccacggctccagagggctgtcctggagctcctgggagccaagctcagggtcccctaggaagcctggctctccaacatccagtggactgctctcagctggggcccatgcagggccactgcctcctcgaccctccagagaccctggaagcaaacaggacacatcggcagggcaggcatgtgctctgggagcttgaggcagacaggtggggtcggaggaacagagctcccacctcagtccgtctgccctgccctgtccccgctgcacagaggctgtgatgaggtgtgtgagctcatacctggtggccccagacccaggacacctgttggaccagaaccaggaacgggctcccaaacactaaatcctaaatggaatggacacacgccatgtcacagggccatacacctttgccggccagcacgggctggaccaggggcctcgctgacacagggtcaaggggaagaatacagggctccaagcaccgccagctctcatgcaggctcgtccacatcacgttcactcacacactcacatatcacctataacgctcaataccagacacggcccaacagctaagcaccaacggtggagaaaacgggggctcagacacagaccctggggccccctgacacacgctaggcctgagtcccaattccccagctcatatcaggtgcttacgcagggggaccagccctgaacccagggccccactcacccggccacgagctgggacca

SEQ ID NO: 335913 - DNA, 1000 bp, Homo Sapiens
tttttttttttttttttgtaaataaggtccatgtttattcttcaatataatacatatacatgattgttatacatctttagaaagcaaagaaaaacagctaaatgaaagtacgttcagaaatttaaaatatacatgatagacacaatcaccacgttatgaatcctttttttaatttcttatcaacaccaataaacctagtcagaaagactcactgacatctatcagctgagacgacagcaaaatacacattaggtaacatatgaacgctcacacagcagatgctttctgctcttctgaatgggtagtagtggttgagttataagccttcatggaaggtgaaactgcccatagaaagaccacttatacaaagcacagcgcactaaaatggaacaaaaagaaatatagaacacttctaactgagaaactgcagactccaagctatgtgaggaagtcatcttaatccaggaacccaatatctaataaatccagcacccacttccctttaggacagacggaaagttgactcctggtaagaaaatttcttaatctcaaaaaggctttcagggagcatggtgatggataagaagacaaacttggatccgaacttaagaaaaaggaaagaagtaaaaaaatgtaaaagagagtgcaaaagcaaaggcgaagctttgtggatattgggaagtaggccgtggtgatgctgcagcacacagggatgacaggacggccaggggacaggaaagaaccgagtccgaggaccacagccctccaggggcctgatgctgcctctcacttgtgcttttacaagcggactttcaaccggggttctgtcatttggcccccagcacacgcatgcacactggcacccgtgctgcgtggctgggggaggggcagaggaagcagaagagacaaaaaaggaatgaaataaagagcagattctgttcctagtatcaaatccatattttgattcttaaaagagaaaaaaaaattgctaagctaattt

SEQ ID NO: 335914 - DNA, 1000 bp, Homo Sapiens
ttttttttttttttttgcactttgcaacaacttaataatttattacattacagtagcatcacaccagcagtcaataatgccactttaggcaaaagtctttcagtatttccgttttacattccgcttacaagaattcataaattggtaaagttcattctaagaaaacttggcaaataaagctttggactggaattggcatttctttctctacttttccttcccaccgtttatttcctttacagtattcatattttaaaatgttttaacttatttcagaacattaagatagcagttacattgtttaatagttattttaaaatgactctttcagataaagttttagagaaactatagtatggatagggctgatttacattttcaaattttctaaaaatcagctttggttttagagctgatttttgttcatttctggaaaacctatcagatttaatccaatactttaaaaatgattattatatattgcaatctttaaatcggtgatttgattcttcctacagaaattcaaatttattgaattgaactcacattttagaattctgtttctgatgaactctaaccttccaatgttgccctctaagcaaattgaaagctgccttataccgaatgaggaagaataccaatacttggctgaatgaggtatcgcaaaagactgcatgcactttgaagaaagacttaagttatagtcatgcgatttccattctttttagctttttcttcaatatacgacaaatatctacacaaagagtggtatttccgttaatacagtcaatttattttccagattgacattcagcttaaatatgccagtatgtgatttaatccacaggcacctgatgaacacattattgtcagattggttacagatgctcgtagttgtctttaaactgaactcaaagaatgcaaaaacatcaagttcagaaaataaaaggcaaggacaggactttaagtgcattttaaagccacgggcgagaaatcgtac

SEQ ID NO: 335915 - DNA, 1000 bp, Homo Sapiens; identical to SEQ ID NO: 246403

SEQ ID NO: 335916 - DNA, 1000 bp, Homo Sapiens; identical to SEQ ID NO: 157542

SEQ ID NO: 335917 - DNA, 1000 bp, Homo Sapiens
ttttttttttttttttttaaagtaaaatacaacaaaatgtttaatgagcaaattcgtcttagcaaatatgaaactgccacagagagtaggagaggggcaggggccacggggctgggcgcaggtcgggggagactaaagaggaaaaatcaactacgtaagaaacccaggaggggaccagagaggaccagaggccgaaggaacagagctgtggtcctggtaagggagagggcagggcactgagggccggacaacaaaattcaaaatagtttggccataaaatataaacacgctatgttcctaccgtggggaaggggagaagaaaggggtctatgggagaaggagaggctgttttgggaggggctggggtcctaccccgccctgctgtgcaccctgtccccatcccaaccccttccctctgtgtctgtgtgggtgcgtgttgtctgtgtgggctgtgtgcgcacttccccagtcccctccctgccctaaccccccaaccccccaacccccgccccccacccttaattgctgccattccagttgctgccggctgtcgtgtgtctgcggctgtcactcctctgcccatcgtcttcagagggggataaggggggggcgggagtggggagaagcccccagccagccctgcccccaccctcccccagccgcctctaccagaagtcccggcggtgataagagtcggggtcacagtattttgtgacaaccactctgttggcgaacttgcggcccgtcaggccctgcatggctttctggcagtcaaacacagaggtgaactccacaaagatctttccgcagccgggcacctcgacgccgtccacaggccgggggatctcgatggacttgacaagcccgtacttgctgcactcgtcccgcacatcctccacgatctcctcatactcctcgtcgtccagcagctcctcaggcagcaccatgttcatgaggcacaggacctcagtcgggtggccgcccatctgcacctgggagc

SEQ ID NO: 335918 - DNA, 1000 bp, Homo Sapiens
ttacaagtcaaacttcattgccatcagagatcagagaaatgtatttgtatttttttttccccgagatagtgacaatacaatcagactcttgctaaagtcctgcttggctctgaacacacagattatttcatcactgtatgaggctaaggatcaaccttctaaatcacttgaaaatgaccataaatttcaaaaaatgtattcattttcagccacaaattggccccagtcatcagagtgcttcagcctagccccttcatgccctctcctatgttccttttgaatggtgtaggtggaaaatcccgacggaggcagggtgtgaggcaggtggagggaatcaagagacaaacaccaggtagccacaggtgtgcagaggaaagttagaaacctcaagtctcaacccccagccacctcacagccttcccctctggtatcagtgtgggtggcaagaggtgtgctgatgccccagcgctgccagacttgagtgggaagttagcatgtgccttaacaggacgctctaacccccactggctcttcatcagtgtgacatggagtttggtcctaaaaggcctctactgtttttctgagatatgaaaaggagagtagcagttttctaaagaaagggcagactaatcaacatgtatcagttcaggtcactgcaggtggctctcatgaaaggggagcgcccagcaggctgctggagaccacccttccaggccatctgagacactgcaactgtcagcaggaggtgagtgtcacttgcagcttgcctgaccctctcccccgtagagatggcagggactgttcagaaacgtactgaagtcctgtggagctgacagactcaacatgatccaacaaaaactaagataaagctcacacttccgagtgactgtttctcacagctcagtggctgggagtgcttcattcacaggggaccacaccctgataacagacagaacccacgccctattatccatcagggttgatacaggaaaagggcaga

SEQ ID NO: 335919 - DNA, 1000 bp, Homo Sapiens
cacgctggctctttccaggatttttatttctttaaaataattcatacaaatggttacagtcacaaacatgattttaaccaaaatattgctagcctaccacatcagcaggacggcactggtgcaggcggggacgctgccaccctccacgtccccaggacagacgtcgatgggcagcgggcacgctgggcaccgcccaagcttttccttttggagctgcttcgtgatgccgtcttcatttggaacaagggggggttcatgccaaaattaggaaaaacagcctttgttttgtttttctaaattattctaaaaataagacaagcaggtagaaaaaacaatgcactgtgtggcataaaaagaaaaacgggaaggattcattgtcctgagaagtttgccaactgcctcattctggggcacgttccaacatacaaaaaaaaaaaaaacaaaaaaaaaaacctcaaattgacttccaaatgctccttcaggttttctttttgttgacagctaagcaaacagatcctttgtaatgttctaaaaactgtacacagacaagaacgttcatgggagaataactactgacttcttctgcttaacgaggaacgcgaaggacacagggcagagcgcccacaggacggacgacgacaagcgacacgaggcccagcgctgccccctcccgcctcctgacagcccggaccagtctctgcagtgccagggccaccacacagatgcctcctccacacactctggtccgagggtttccgggccctctgcccaggcgccgaggctggagagctcctcccgggctacaactggtcactggcgtggtctctatccgcctcgggcttgacggtttggccaggagaaggggcgtggggcgggtgggccacagggggcaggccgtgggacagggacatggcgctggggacgataccttccacagcagctgggatgccagtgggggccacgcccaccacgcccggagggtacctataggcagccccat

SEQ ID NO: 335920 - DNA, 1000 bp, Homo Sapiens
ttttttttttttttttttttttttttaaaataagatgaattattttatttctgaattctgaaggtctgctgggcttggccaggtgattctcattcttgtggtctcttatgaggtcagtggtggctagggctgaaaccatctcaaagccttcctcactcacatctcatgggtgatcccagctgttgctggaacctcatctgggactatcggccaaaacactcagaacttctccatgtgtctgggcttcctagaagacactgttattggtttttaagtagatcatagccaaagctagagtagcacctggacaagtcacatccacatttatggtatctccttctttgatttgataacttggtgatttatgtttctccctatgcattcctgtttgaaagcgcctatgtcctccaaccatgtactgatagagctgctcaggcacattgagatcagacatacctatcaaattgctgccatgccccaagcagaccatgcccagggccaagccagcagctaaggagtatgactttctgtcagtgcagtattccatttcaggaccaggaggccgtcctatctcagccaacaggacttctgcagtatgtctgtgagctgtcccttgatatacaaggccaatgccaaccactgcagccacttggacattgtgaggaacatccagctctgtggacgttgggggtaagagagcaggaatgcgaatgctaagaagccgagtaatagacatatccatggtgcctagttttgcagcagaaacaccaagtagcagtccaatgcttgtcatttcatggcccttggtcaagtagtcatggatattgagagtcgccagcttggtaaggtgcccattcaaacccagagccatgagaaagccagcatactcattggccaactcagcatgcttgggcttattgtaaacaatccaagctgagtcgatctgggaggcaggagctatcttcaggccagcagccacaccattatgaaagctggccca

SEQ ID NO: 335921 - DNA, 1000 bp, Homo Sapiens; identical to SEQ ID NO: 157543

SEQ ID NO: 335922 - DNA, 1000 bp, Homo Sapiens; identical to SEQ ID NO: 246404

SEQ ID NO: 335923 - DNA, 1000 bp, Homo Sapiens; identical to SEQ ID NO: 157544

SEQ ID NO: 335924 - DNA, 1000 bp, Homo Sapiens
agagatggagtctcactctatcacccaggctggagggcagtggtccaatctcagctcactgcaacctccacctcccgggttcaagcgattcttttgcctcagcctccagagtagctgggattacaggtgtgcaccaccactccctgctaatttttgtatttttagtagggacaaggtttcaccatgttggccaagctggtctcaaacccctgtcctcaagtgatccgtggcctcccaaagattccaggcatgagccaccgtgcccggcccaatctcgtttctcttttccatgtgcttgcgcagtgcttcagggctgcctcagtctagcacagaaaatactctactgcctccccactagtcacagccttgacggtctcaatcagaattatctggcaaagtggagaaagtgcagacctactgaatcagattctcgggttcagattttcttgtagcacactcacgtgggagagaaacttcgctggcacacgtctcctcagagcagggacctggtctcattgctcttcatgtttcccacagctcttagcaccgtgacaaccagcagccagtgtctggtgagtgtacagaggtatttcctcattcattaattcctcggtagacatttcttgggtgctggttatgtgtcatacactctgcaggtcttgcaggaagaatcttccccagtccagcttgtctgctgctctcctgacgctggaacagcttctcaggagttttccatttttcatggcacaattctttctccttggaggcacagagggatgggccccgctactgagtggcaagaagacgaaatgtctgtgtcgtagaactgtgtgtgatcttgaaagacctctcggttcgtgaatggcatcttgggttctgtcaggctccacacaggttctactgctcctcttcctccaacaggctgagctgtgtgacttttccagggttgccatccgacctgtcatttggtctgtggcccttagtttcttatccacatgtg

SEQ ID NO: 335925 - DNA, 1000 bp, Homo Sapiens
ggttttgaaggtggttccttttgtaggtgatttctagtatcggtccactatggtctgagagagtgattattttaaatttattgagactcattttatggcctattatatggtctatcttggagaaagttccatgtgctgttgaataaaatgtatattctgtggttgttgggtagaatgttctgtataaatctgtcaaatccatttgttccagggtatagtttacactgattgtttctttgttgaatttctgtcttgatgacctgtctagtgctgtcagtggagtactgaagtccccaactattattgtgttgctatctcatttcttaagtctattagtaattgttttataaattagggacttccagtgttaggtgcatatatatttaggattgtaatattttcctgttgaacaagacattttatcatttatataatgtccctctttgtcttttttaactgctgttgctttaaagtttgttctgtctgatataggaatagctactcttgctcacttttggtgtccatttgcatggaatgtctttttccatccctttaagtttatgtgagtccttatgtgttaggtgagtctcttgaaggcagcagatggttggtgagttcttatccattctgcaattctgtatcttttaaggggagcatttaggccatttacattcaacattagtattgagatgggagttaccatttcattcatcatactatttgttccctgtataccttcacggttttgtttggatccggttttttttttatattcgatccttgttttataggtcctaagagatttatgctctaaaggggttatcttttcatgtgtcatccggatttgtttcaagatccagagctccttttaagatcaggggtagtgcttacctggtagtggcgagacctttcagcatttgtttgtctaaaaaataccatttttccttcatttatgaagattagtttcactggatacaaattcttggctgataattgtttt

SEQ ID NO: 335926 - DNA, 899 bp, Homo Sapiens
aggaggacagattcagagacgtgcttcaggaattcaggacacagctgcagtcattcctggagagcccggatctgtaggacccactgaggtttgtgggcagagcctcagatcttgcactggcagcaaattgggacacagcagctggactgggaggagcagggcttgcagcagctggactggcagcaggatgacccacagcctgaggagcagcagcagggcttacagcagctggactgggaacagcagggtttgcagcagctggactggcagcaggatgacccacagcctgaggagcagcagcagggcttacagcagctggactgggaacagcagggcttacagcagctggactgggagcagctgggcttgcagcagctggactggcagcaggatgacccacagcctgaggagcagcagcagggcttatagcagctgcactgggagcagccacaagaaccgcagccccccttggagcccccacgaaatccacagacccccttggaacccccacaggagccacagctggaggagcagcagacgggcacacagcagctggagccacagccccccttggagcctccacaggagccacagccccccttgcagcccccacaagagccacagacccccttggagcccccacaggagccacagctggagcaggaacaggctggcacacagcagcacacgggcttgcagcagcagacaggtacacagcagccggagccacagcccccatagccggagccacagcccccacagctggagccacagcccccacagctggagccacagcctccagagcagccagagcagcccatggttctggtgggttgagggtggagcaggtagaggagcaggtgagagggaggtgtgcaggtttggagttctctgagccc

SEQ ID NO: 335927 - DNA, 930 bp, Homo Sapiens
tttaggtttttataatcatttgtattataaatttgtttatcaaatttttcctaatttgaagtaacatctcattataagtgattctcaataatccttctattccatgttgtccaaagtggcaatacttctggtcccagcagtaatctgtgtcataatcattgtccagaaggaaaacacctagttgttcattctctttatcatagatggagctggaagaacacaacgaaccttggagtaattcaatttttttcccactcttttacagcaaatgccattttaccgctttcttctcccctcatgtccttggatattccaatcattccttccagaaaaacacatactcttgctactcgcagtgagcaatcagcttgcatagcccatccccagggccttcaggtcagcctccggaccacctctggtggggtcctagtgctcctctgtggtctgaagcctgtgaaatctgactgccagtttcaggctggggatcacagggccctgacccctgctgtggctcccagatcagccaggagctcaagaccagtctggccaacatggtgaaaccctgtctccactaaaaatataaaaattagccaggcatggtggtgcgtgcctgtagtccaagctacttgggaggctgaggcaggagaatctcttgaaccccggaggcagaggttgcagtgagccgagattgcaccagtgcactccagtctgggcaacaaagccagacgctgtctcaaaaacaaaaataaacaaataaacaaacaaacaaaaaacagtggattcagtttcagtggggaacatgcccttccagtgatgagaaaagttgttgtccatcatccatccctccaacctggagtaataattagaaagtagcagagtgaacatggaaccaggagagagagttggctggtactgaaggatctttcaacc

SEQ ID NO: 335928 - DNA, 1000 bp, Homo Sapiens
catggatgaaactggaggtcattattttaagtgaaataactcaaaaacagaaagtcaaataccacatgttctcacttgtaagtgggagctaaataatgtgtacacgtggacatggagtgtggaataatagacattggagactcagaagggtgacaaggtgggagggggtgagggatgagaaataacttaatgggtacaacgtatattattagggtgatggttacactaaaagcccagacttcaccactaggcaatctatccatgtaacaaaactgcactgtacccccttacatttattattatttttaaaaaggaatgactttcctgaggcctctcagccttgagtgtagggggctgtgaccgacactcaggtccatctggctctttctgtgcagcctggtgtctttctgaatcctgtgtccagcctaggaccaggatccacggggccactggggaaggtgggtgagtgtctgggcttggccactgaggctgctgggcaggactcctggaacagcctcctggcctggggctcactccagggtggcaggctcacttggttcggtccttctccctcttctgcggtgagaggcactgccagattcccctgcagaccatctcattgcccagggcatagttgatggcattgatcgtgggcaccattttggcaatgagggcgggcaccatctgcagtttgggggagatggaagtcacgtctgcgatgactgcgtatagatacaggatggcataggggccccagccgagcagcagcgtccttgctggcagagtggtgtttacctggagatggccactcttccccagtttctgctccatgagactgtaggaagtgatcgtgatgaagaggggcatggcgaagttgaagaaggacatggtgaagaggaagctggtgaagtttctgtcccccttggagtagtccagggtgcagcatgtccccagtggctcatagtcgtagtgaccccaacccagaaggggcagagctgcc

SEQ ID NO: 335929 - DNA, 1000 bp, Homo Sapiens; identical to SEQ ID NO: 157545

SEQ ID NO: 335930 - DNA, 648 bp, Homo Sapiens
acatgtgactttttgtatttatcatctctctcgactttggttagatgaacaggcaggagagccagaatggaagcttggagcgcaaacttgggattccaaaatggggtagaggcagtatatattaggatctcggcagcagccaaaatggactattctgtggccaatgaagtcatttgcagggaccttgaggttggggtacaggatgagctggaatgaggggactcgatgacccgtgtacaccaggccgatcgggtgagcagcgttgggcaatctgggtagtgtgtctgcatttctcaggccgacactggtggagaccccaccctctggtattggcggttgtggagtttcttgtttttgatgaatatgcttgcatttcgctttcttgagttttgctctgtgattcttgaaccagacctgcagtactgttgggtgtatgtctattttcgaggccatttctttctgaaggctggggtttgggtatgggttctcattgaacaagatgttcagatcttccagttgcttcttagtgaacatggttcgtttcctgtgtgaatgcatctggtccttgcctttacgaagatcctctgagcctggcatcttctaatccagatgtgcgcctgggttcaggtccagggataagaactagca

SEQ ID NO: 335931 - DNA, 1000 bp, Homo Sapiens
aagttactaaggttctttagtaacatctcacagtagagggtatgagaggcccctgaattgtcttaggaattttcttcagtgagcatttgcgaagactcggatgaaggttaggttaaacttttgtcatgggtccattggcaggctagtcacaagtgcctcctggatctttgggtcctggcggaaaacgatgccagactctcaaattgccacaaggtagcctggaaagaacgccacagtccagaaggagcctcgaaagtggtttcatgaggtggaatttactcctggtgaagatgctgtgaacgctgtttaaactacaacagaggatttacaatattgacgcacgtagttaagaaagcagtggcagggtttgagaggattggctccaattttgaaagaagttctattatgggtaaaatgctatcaaacaacatctcatgttccagagaaatctttcgtggaaggaagcgtcagttaatgtggtaaatttcattgttgttttaacaaattgttacaaccacttcaatatttagcaaccaccacccttatcagccagcagccaatgacattgaggcaagactcctcaccagcaaaaaagattacgactccctgaaggctaagatcattattagtatttttagcaataaagtatttttatataatttctttttaaaaaataatggagcttcaaataagggcatcaggtattttttcttttaatagatggggttttgccatgttgtccaggctgagctcaagcaatccacctgcctcggcctcccaaagtgctgggattacaggcgtgagtcaccccacccagccagcatcaagtgttttaaaattaaagtatgtgccttgtttcctagacataacaccattttacactttattagactacagtgtagtgtagtgtaaatgtaacttttttttttgagagggagtctcgctcggccacccaggctggagtgcagtggcgcgatcttggctcactgcaagctccgcc

SEQ ID NO: 335932 - DNA, 1000 bp, Homo Sapiens
ttttttttttttttttcatgattaatgatattcgtatataatcatatctaagatctatatctggtataactattcttgttttatattttattatactggaacagctcgtgtcctctgtctcttgcctcggtgcctgggtggcttgccgcccacatctcccccctttttattaactagaatcgccatcgccatcattgcttgttgttgacttcggacttggtttcggactccttagaggcatctgcagactaaaaggagacaacataagcataccaatattaataatgccagtaacaacaatgatcctctgacgggtttgagccatttgaagggattaaaatcaggtaattgtttagttatgccttcaaaaatgtgtgagccaggaactgtggataaatgggcttgtgaagcctcaaagatttgctctttaagttgtgaaatatccaaggttaagttatcatcccaggcttttaaatgtcttgagacattttcccagctatgttgatcttgattataagcataaggcgttatgcaataatcagaagtattccaatcacactgtaattgcatacggtgttgcaagttcataactctatctcccagccaggttacactttggcggagatcattaatctgattagctaatttttgatcaatttgcgcctgagaattccaaagtctggaggaatttttctggcatgcttcaacatagtgagcagtttgaacagaactgcggatggcaactccagcagttgctgctgttgcagtaaccgcaagtagtcctgcaaggactgcaataagagtaaaaataaatctctttgttcttttgaggatgtctttaagaacttcattgactatgtgaatagagggggaagactcccatggacgatgtagagaaactggtatccataccccctccctagcccttaccaagagaatacttgtagtgggattaaaagttgcatcaatgcaagtgaacagcttacagttatgacattct

SEQ ID NO: 335933 - DNA, 1000 bp, Homo Sapiens
tgctttggtagggtagattttaataagattttaataatattggtaaggagccaaattacagaataccctagaatgtggaatacaaaatctcagagacaaaataaaaactcatgaaaatataagagcactttaaaaaggtaataatctttaggataaagaaagccttttctcaacacaggtactgagcatgtttaataaaaattaaatgagattaaagagaaggggcacagccacacgctccccgccccgcggtgattaggaaggtgatgcttgtgtaggtgaaagcatggagccagggcacagaagagctccgaacaccaacagtgctgcagtaagctgtctccacgtgggtggaatttctcacaatccactcacgggataggaattaattttctctccagttgcagaggggccttgtacatgaactgcgttggcatgcggaggaggggcaacacatccatgttggggacccctcccatccacagccccagctgccaccacggcagggcatgggctttgggggcaacaaggagagacaggctgtctcctctaggaacaactcattattcagctaaacgaaatggaagagctccatgtgaccaacaaacccaaattgagccaaaacaacaggcgtccccaccccccagagggataatgtgccaccaccctgtgtgcagtgggagagcaggaatggaggaaatattcctggttcagttacactcctcgtctgtcaggacagatgtgccaccctatctcggattccgggagggtggctgggggtttccctcaactctgcagcaaacacttcaatgctactgtcatttgaggcctaattttcttccaagggcactatatgccatgcttcacttgggccagatgttcagatcagtgtgtctgctcgtccccattaagaacacaaccacaattatttatttgtccttccagcacatgtagcagtgaagagaggctgccggatcgcagcagatgacagacagctgat

SEQ ID NO: 335934 - DNA, 1000 bp, Homo Sapiens
ttgatgggcaatttatttttttttattgcaaaagttttttcagaaaactttttaaatgtaattaataaaccacctgaatctgtcattctagtcctataaattataatcaaggtatcttgatggttatatgtggtattgtttacactgttaatatccacatgtaaggccattacacaaataaataaccaatgttaaaattcaaatggtttgtcttgatttaccgtaggagtaaaggtcagaaaaatgtgaagtctgcattgaagtccacatgagttatattttaacagtatccaaaatttcatataggagaatggtttattataaaagactgtacataaaatttagacaacaggttatatacaaattaagagaacaatccacttgaaaaatggaaagtagaaggtagctagctgatcactaatgatactttgtttgtttaaaattaacaaaggcaaaatgcatatgaaatagtcacattgatttggtagcaataatggtctttaattttcagaaataactgttttgcactagtcttaccattcactatgctgttataagtctgtagcatccagtacataactgtaatttgaattccaaacaaatcctcaataacacagaaacccacacttgagtgctctactttaatatcctaagcaatagagaattatacacaagacaagaagagaaaacatccctcagccctcccttcaattaagaggagacacacaaagtgcatgtgttgcattttgattatgtcaaaagacaatccaagtctgttggttaggtaaatctctgttcactgattaatacatgacccaccttctttcccaattattttattttaaaattctaatgttgctagtgccaggtaatggattaaagagtgcctactcacaaatcaactgtatccacttttacaatatgtaaaaggtacttttaacttcctttcattgaaccagtgtacaacagttcactgtacaactgaaggactgacatggca

SEQ ID NO: 335935 - DNA, 1000 bp, Homo Sapiens
ttttttttttttttttttgagacggagttttgctcctgttgcccaggctagagtgcaatggcacaatcttggctcactgcaacctctgccccccagattcaagcgattctcctgtgccagcctcccaactagctaggattacagaagcaggccaccacgcctggccaatttttgtagttttagtagagacaggggtttcatcatattgatcaggccagtcttgaactcctgacctcaggtgattcacctgctttggtttctatccagtgtgagtcctaccatgttttcgaaggtgtgaggtagatctgaaggtttttccacattgcttacactcatagggtttctctccagtgtgagtcctttcatgttatcgaaaagaagtgaaagaaataaaggctttcccacattgcttacactcatagggtttctctccagtgtaagatttttcaggtatttgaaatgacttggcagaataaaagcctttcccacatatcttacatttataaggtctttctacagagtgcattcttacgtgtgtttgtgtcctttcatgaattcgaaggttcttggcagatctgaaggctttcccacattccttacactcatagggtttctctccagtgtgagttctaccatggattcgaaggtgtggggcagatctgaaggctttcccacattgcttacactcgtagggcttctcttcagggtgagtcccagcatgcatttgaaggattgaggcagatctgaaggctttcccacattgcttacactcatagggtttctctccagtgtgagtcctttcatggtaccaaaaggaactggaactactgaaggctttaccacattgcttgcattcatagggtttctctgcagtgtgagttttttcatgtctttgaaatgacgtgggagaataaaagcctttcccacatgtcttacatttataaggtctttctccagagtgtattcttatgtgtgtttgtgtcctttcatgaatttgaag

SEQ ID NO: 335936 - DNA, 1000 bp, Homo Sapiens
tttttttttttttttttctttttttttgtgacaataaaatcaaactttaattggggagccagataatattgccttttctttccaaaattttaatttatactttttagtaaaaaacataacacatttctcattcatttaaccaattaatccaaaggaaaaaagtgaagtactataatcacaggtacactaacaaacacttttacaaagacattcagaaatatttgcagcaggttttataagactctgatataaaacaaagtaaaataaaacgttttgaaatggcaaaatcggtttacctagcctgaattgcttcaaagaggcatttgcacttcttgtcctggcttaataaaacaaagtaaaataaaacattttgaaatttcaaaatcagtttagcctaaattgcttcaaagaggcatttgcacttcttgtcctggcttaaaaacaaaccctgaaattactttcttttatccaaatcaattgaccatattaatctgcataaagtctatgaggatacgttttgataaatgctataaacacaaaattaaggcaaatctgatagttattgtcaaataaatagcacatttagaagggcctttgttaataaaatgcctctaatgtatccagaggtatagatttcaaagggcaagtctgtacctgttgcacatctgattctcacagcattcatgaaagaggagacaatgatattcccatttcactgaaaactaaggtgacttgtttaaggtcatacagtccgatcagtggcaccaacacatttaccaatggccttggaatacagagtacagggcttcctgttggtagatttaccttcctaacctcacggagatgtgatccaagtatcaaaacaagtgtgagtcccttcaggtctggaaaatactccagccataacaggtgaagaggaaagtcagctcaagatttgtcatatgctacacaatttacagtaaaacactgggaaaagcaggaagctgatgtgaggaagggt

SEQ ID NO: 335937 - DNA, 1000 bp, Homo Sapiens
ttttttttttttttttgaccacagtattcaatttattgtgtatttcaaaatagctagaagagaagatttggaatgttcccaatgcaaagaaatgataaatgtttgagctgatggatatcccaattaccttgatttaatcattacacattgtacacatgtatcaaaatatcacatataccccataaacatatacaattattatacatcaataaaactaatgaactgtaaaaataaaacctgcaaacaaccagaatgttcctcaaagttatcatgaataaatcatggtatatttatacaatggtaaactgtacaacaataaaaatggatcaactacagctatctgcaatatcaatgagtctcacaagcaatgtggagtgaaacaagatagtcacaattccaagtctaaaaagcatttaatgtttgaacatctgtaaaacaaaactgttgtttagagatgcttataaggaagaaaacttataaacaaaagcaaagaaattattattacaaaagtcagcatgggggctacacctaagatggagggagcggtgtcatcagtggtggggggagaagagtaggttattaaagggctctatttcttgctctggctggttattacatgggtgatggctttgtaaatgttctttaaactggcagttctcttctgaatgtatctgttttcttaatgaaatagaaagtagggtcactagttggaaatgatgagggagggagtattaaaagatttgaggaaaggaagatgatatgaaagaaccagagacactggagagtgaacagactagagaaatacaatatttttatcttttctgaaagctttttatattgtttctgatttattatgctttttctctcatatgcaacgtcattttattaactttaatatactacactatatatagttatcccagtaaaattataatgctatttagtgtttaaaaataaattgtaaatgcaaaattaagtcagaatataccatataatgatt

SEQ ID NO: 335938 - DNA, 1000 bp, Homo Sapiens
ttttttttttttttttggtgattacatgaatttttattgtaccatttcttatggtggcaaataagcaaactgtgagtaaacgagggcagctgaataaatttacagtatacaatattagagaatattatgttgcaattgctcatcttactctgaccatcataatcattctttttgctgggtccaggaccatggctaactcatggcacaaaaagctagtcctggtttggtctgaatttgagtcctagttattctggtgacttcaaggctacccaagcacatgggcaaaacacttaaaaaatatgaaagattatttaagtaaagcaaaatgaggaacagaagaagacagtttagattcatgtacacatacatatattttatttgggtatattacctcagaaaatcaacaactgtcattttcaatcttatctcaagaccaaccttcagaaatgctagtaagtgctacagtaatattaacattatattgagtttaaaagaaattaatatatttaaaatcagtctaaggttttaatgctgtatacccattttcataatcattcaaaaacatcaggccgggcacggtggctcacgcctgtaatcccagcacttcgggaggccaaggtgggcggatcacctgaggtcgggagttcaagaccagcctttggagaaaccccatctctactaaaaatacaaaattagccaggcgtggtggctcacacctgtaatcctagcactttgggaggccgaagcaggtggatcacctgaggtcaggaattcaagaccagcctggccaacatggtgcaactccgtctctactaaaaatacaaaattagccgggcatggtggcgcatgcctgtaatcccagctactcaagaggctgaggcaggagaaccacttgaacctgtgaggcagaggttgcagtgagccaagattgtgccattgcactgcagcctgggcaacaagaacaaaactccgtctcaaaaaaaaaaaaaaatcattagta

SEQ ID NO: 335939 - DNA, 1000 bp, Homo Sapiens
tttttttttttttttttttaattaaaaaatgttttatttatacaaatggacaatcagaggccagtcccccgtccttgccttccggctccagtgtggtgtaccaggtggccactgcctgctgtcccggcaagcacgtcctcacgctcagctctggcccgcctcgtcgtcactgtcctcaatcagacagtcccggatctcctgcaagccccaggccctctgtgtgcggagctgggcctcagccaggatgtacggcggcagggggtccagtgagggcaagtccttcatgttcacgcggcagctgtagcacagctgctcctcaatgcaggcttgggggtcctccctcctgcaggccccctggccacagcgctgggcccagcccacccctggagaacagcagggccccgggggtgtccgggtctcagtcagggggatgggtgactgcatctgggagagacgcgaggaggtctgagccccaaaagccgtggcactgtcagcggcgtcgacgtccagggcacacatgcagaggaggcagcgggggccggagtcgccagcagcagggccatcccgggggcccttcaccagcttctcacttgtcctgtacacagtgctgacagtggaggggaactgggtctgcagcctgaggatgaaggcctccatcagccggtggatgctggccttttcaggggccttggtgtcgacggctggtgtgaagacagaaggaacggagaacaggcggttgtagaaagcgacctccttcagggtgtggtcccgcatgggccgcaccaccaccacgtccccgtgccgctcatccgagaagcccgtatcccaggccaggaaggcccctcgacccagcgccaggttggtcatgagcttgatagccaagcgtgtgcagctgtccccagtcatgaccttggagtagccgtgggctcgggccatgtggaggatcaggtgggtccgcagggtctgcagaagctcctccttggcagtcagtgtcctcact

SEQ ID NO: 335940 - DNA, 1000 bp, Homo Sapiens
ttttttttcttttaaaatttcttttattcatatgagcacaatgtatagtaattagagaagcccaaggcattggttcaatgtaggaaagtggaccacaggtaaaatagatggagttctagaagtattttaactgcctaaaaacattatctcttcatgactaccacctaagttctaagacaaagtcactctcaggaaatttcagactaatttatgctatgttccctggtagataatgtttgtggtaccttccccagagtatttttttagctactatatttctatatttctgttgaataggcttaaattgaactaatgtaggctttgtttaatttattgtcattagttaatgtcactcctgtactaaactgaattgctaaaagaaattccatttttaactagttttataggctaagtaaaggaagagaaaccaagatagaatctccaatatctgatatattagattgactctgtggaacatttccttttttacaaggagtcctcaccttttattataataggacataaaataaatgattgtaatatcaaatatgaaatattgtctgttgagtggaatatctttaatttcaaagccatatttatcttttgtgccataaattttagtttatatattacattataatgtatagattatacattataatttatgaaccataatattcatatagaataattatttgtgttatgttttttattacatattgaaccttaagagagtttgttggtttgaaaacaataagcatattgaagcaatcttgtttcaatatttacatttttatgtttgcatataaatagatgaatagattatgttatatttttattgtaatagatttctttatatatatacaaagtcaactaggacttcttaacctttttttgtgctatgagctgctgtggcagtctggtccatccctctcaggactgtgtttttaaatgcataaaataatacaaataggactaaaataaaaaatacattgaaata

SEQ ID NO: 335941 - DNA, 1000 bp, Homo Sapiens
ttttttttttttctaaagcatgactttattataaatgtttcgtgtgatgtaactgtacaattaatcatcctgtaacagaaagatgagatgaataaacctgatacatttttctatcatccatacttcaaaggacaaaaaatcatcaagatgcaccatgccttggatatcagcttttattttgtataacaaaaagtaaccttaatgaagcaataaattacatgacaaaattcaaagattagataaggtgaggatattaaaagtaaaagtattgaattacatatacaagaaggcattgaccagtaaatgcatggttgcttttctccacaacacagaattcataatattggaacacttctgaaaaacaccaattggatgaggatcttcaagaaagtcagcccagtgtcaggctgtgagtggttttcctgggatgactggggaatggttagatcaggatgatggtggggtgaataggtttgttgatgcctgtctgagcctagacttcacagtgaggctcccctggcagtgtgggaagcctcgtttgccccaggctcagtttctttgactccctaaccaagatttccacagtggccatgagttcttagccaggtgaacaagtaagttccatggctcaaaatctcaaaaggacattaaaggaactttaggaagagcactagttaagagcatgctgcctgtctctgactgttaggttcactattacttcacattttaccagctctgtgccttagaaaaagggaattagtcctcttaaggctcagttgcatcatctacaaacaccttccttataaggttgatatggggattataggatatgactgtaaagggcttagcatggcaagggcttagcatggtaccaaccgttacatgtttctggggtggggaaaccagccttactgcagggaaagacaagtttccaatagtatatactaatttggagaaggatcaattcagttttgaaatttcagaaagttggccgggtgcg

SEQ ID NO: 335942 - DNA, 1000 bp, Homo Sapiens
aaaggatgaagaccaacattcacttttaatgaactagaatagaacaaatacaatatcagagtgggctgcatttttgttctatgtatatacagggtcatggtgagtttccttcctggagtcaccatcacaaactgtgaaagccactgacctagggaattaattgtccagacatcggcactgggcacaataaacttgccaacaaatgctcctggttgtttgggtaagaagatgtagcccaccccacaaccaacaaaaaagagggaggaagaagggagggagagaatgaaacatcggttcttgcctttcctcaccccaacagtcccagtggctgcagaagtctgtctgccagggaagggaaggagagatgaatggaagactgaatttgagaataacactaacagtggctgacagtgtcataatccaattgatgagacaaaaatcaccagagcagactgttataagacagaataggaccaatattttaaaatgtttgctctggacaggccatcagagaagtctgatataacagacatgctatatgaaatttaacctttgatgtaaccacaggactgcacagaaagaataacgttcacttaaaccagaccagaaataagttctgcacaaagagtaaggtcgtagccagtgcacctgatctcacagcaataattctggaagcaagggaagaagatcatcgccgttccacagacctgagtttacaggtcttcctgcaggagcttcctgcccagatgttctgcctgcagttatggttgacccttgaacaacacgggttttaacatgtgagtctactcataggcagacttttttttcaataaatacagtctgtatcaggggttccagatccttaatccaacatgaatcaaaaatacagcattcgccaagtgtaaaacctgcagatatggagggccgacttttcatatccactgaaaacaagacttgagtacacgtggatttctgtatccacaggcgtcctggaattaat

SEQ ID NO: 335943 - DNA, 1000 bp, Homo Sapiens
gggacagagtcttactctgttgctgaggtaggagtgcagtggcgccatcaccacttgccttctgagtagctgggaccacaggcatatgccaccacgcccagctaatttttaaattcttttgtagaaacaaggtctcccctggttgctcaggctggtcttgaactcctgggctcaagtgatcctcccgcctcagcctcccaaagtgttgggattacaggagtgagtgactgtaatatttcatattacagccttaactttcatatttcttgatggatggggatttctatgaaacagagtagcgataactcccagttttctgacttggatcactagattgagggtgatatttttcaccatgaatgaagaaaaatcaagggttagtgggaagaaaatgcattcatttggggggcacaaaaagtgagtatctagagctccagagaaagaaccggaccggagttccaatctaggagtcatcagcatatccatccttctagttcttctgtttccccaacgctaacacactgcagatgctagacccatagctgtctgcctgcttgcctttctccttctctcctccccttcctcccttcaacagggacctgctgagcccctaaggtgagctggggacttagcagtgagcaaaatacagttttggcccccatgaaattcacagattggttggggagattcctactattgtgtggatgtcctcagaacaagtctctacgttcacggttagcaccaggggactccctatccctgactcagctcatcactcaacaccaaagcaggggagatggggagagcctgggagggagactgctgcctgtgccaaattggtgaggaaggctgcatgggagtccgtgagccggcgacaaagcactactgcttctcaggtgcttagatactaccttgcacagtcattcccctggactggaaggtccttgtttatagggacttggtctgtgtacccccttatccatcattcaagtataatcct

SEQ ID NO: 335944 - DNA, 691 bp, Homo Sapiens
ttttttttttttttttggccagaatagcttttatttcacatgaagctaaggaaggaagtcgagaggacagggctggttctgtgggcgctgcctggcaggtgcaccacctccaactgctgggctccagctccagggctcagaagccatctccgagaaggtcgggagcggggctgaagggtcccgggggcaggttccaggccagctcctccagcaggcccagcaggcctttcacctctgtccccaggtgatccacggtcttctctaccatctcctccatgacatctagacggcgttgcacagccatgtgtctgtcacacgctgtgctctgagctgagtctcctcgcggagggctgaagggttcggcagcggccaaagagcccgcggcgcggagcagggccagtccggtcagcgcgcagagcaggggccgcatggtgccggcctggccgagcgcagcgccgcgtctgcccgcagccgcccttcccggatcgcacccggccggcccgagaggaaatgcactcagttcgagccaaaattcctgggcggctccggactttctggctcgagagaacccgccccctccagaggcccctcggcaccccgtgggcagcgcggagcccagagaccccgggagctgaggcaccgacgtgccacctgggcgcctcccgaggaaggggccgccccccgagtcccc

SEQ ID NO: 335945 - DNA, 1000 bp, Homo Sapiens
atttatttatttatttatttattttttattattatactttaagttttagggtacatgtgcacgttatgcaggttagttacatatgtatacatgtgccgtgctggtgcgctgcacccactaactcgtcatctagcattaggtgtatctcccaatgctatccctccttcctccccctaccccacaacagtccccagagtgtgatattccccttcctgtgtccatgtgatctcattgttcaattcccacctatgagtgagaacatgcagagtttggttttttgttcttgcgatagtttactgagaatgatgatttccaatttcatctatgtccctacaaaggacatgaactcatcattttttatggctgcatagtattccatggtgaatatgtgccacattttcttaatccagtctatcatggttggacatttgggttggttccaagtctttgctattgtgaataatgctgcaacaaacatacgtgtgcatgtgtctttatagcagcatgatttatagtcctttgggtatatacccagtaatgggatggctgggtcaagtggtatttctagttctagatccctgaggaattgccacactgacttccacaatggttgaactagtttacaatcccaccaacagtgtaaaagtgttcctatttctccacatcctctccagcacctgttgtttcctgactttttaatgattgccattctaactggtgtgagatggtatctccttgtggttttgatttgcatttctctgatggccagtgatgatgagcattttttcatgtgttttttggctgcataaatgtcttcttttgagaagtgtttattcatgtcctttgaccactttttgatggggttgtttgttttattcttgtaaatttgtttgagttcattgtagattctggatattagccctttgtcagatgagtaggttgcgaaaattttctcccattttgtaggttgcctgttcactctggtggtagtttcttttgc

SEQ ID NO: 335946 - DNA, 857 bp, Homo Sapiens
tgcttttaaattgctttattaactttacagtatgcaataaacatctttccatgaaagttgatgaaagtcctcttctgacagaaaaacttacagactaggtcaaaatgcaatctccaatcagaaaattgcagaagaatgccaaaaggttcacattaaaggtacaccaggaaaaatgcgaatttagaaagcagggattttatgattattaacctcaagattcaaggcataaggcaaaactcatcatgatgatcatggtgaggagggtcccctataagaatgcgcagactgtacctcaactgaagttccctaattttcctccttagctctctcatctcctccatgaaccgttccatatcatctccatctccatctatcatatcaatgttatcgacaagcctattgggcacatcctctccaaaacccggggcaggtggagcccaaacccctttaacatttcctccaggctcctggtattcaccacctcctaaagcgggggcttcattctgcactggggccttctccacaactttgttttccttggggacattttccatgttgagtttttttcctgttttttttttttttttcttccttcagggatcagaggcagtctttctctcttagccttgaaatcggctgcacaaacgcacttaaagacctgccagggctcaggggtcagcttctaccactttccacctttcctgggcagctggctcgcctgccttcagggcaacagcgagccgtcacacggccagcgacaactaccagactgcaactaggaggagggactaatccacgcattggctctgggtctcctaagggtcacgtcactgtgagctcagatttccaattaccat

SEQ ID NO: 335947 - DNA, 1000 bp, Homo Sapiens
ttttttttttttttttttatggcagaaaccagtgggagccatttattttagacatttattccacaaacaagttttcaagaagacatctaagtgaacactgatacaaaacaatgaatggacatccatttgcaccaggtcttggaatgcattcagaggcagaggcttccagtttcacaagttactcagacattcctttagccagggctgccccagctccctcacagctgtcttgtctgtcactgggcgccagacctcctgacagaggcttccttcacttcagcctacctgccactggttatcgaggtgcttggggggtgcctgctgtggaccacgagggacttgccctttctccttccccaacaagctcctgggctgagtttgctgtcacagcatcccctccctttcctgaagcatgcgatggatttggtatggccagatgtggcaggcacaggacagctgggccggcagcctggtcttctaacctcttccgcatctatatcacgctccacagcctcatgaaacattagagccagagcaacttagcagttaagttcaacttctcttcagatgaggagccgaggcccagagaggctatgatgtgtcaaacaacactcatttagtgacaagattaaaacttgcttctttcagcttccagtctcatgctcattccaccaaggccaggctgccctgagccatttacgtgtgaggtttccctttttaaaaaactgtttctttccagatgaatgaattaggttgaatgcataataacatcactggtaagaactggaggtatttgtggcagtaacaaagcaagcctaggtgggacatacgaccccggtttccaaaatgccttcgataagatgatagtgaaaagttgtcagtctatgctgcttttcaaaaacaggatttgacacaatttacaaggaaataagatgaaattaaataaatataggttggggtagttggttgaggtgggctgtaagttttgttgaactttcca

SEQ ID NO: 335948 - DNA, 1000 bp, Homo Sapiens; identical to SEQ ID NO: 157548

SEQ ID NO: 335949 - DNA, 1000 bp, Homo Sapiens
gaaaaagaaaaatatttattttcagcaagaccaaagtcccaagtgggggcaggtgccaaatttgcccccgccaccagagggcctaggcccacaggaagcctgaagccaaattcaggcgtggaaggaggggagccaccagtggggcgggacagtcacttgtactgaggagagagcggggggacaagtggagcagtgcagacactcagcatcttgtcgatgtccacctgggttgacttatccacctcggccttgtggtcactcacccccaagctgggcaagcccccaggctcctctccagcctcctctccgaggggagccagggcatgggtgggggtcactagtggactgggacagggcaaagcgaggcctgggcccagctcacctgccaagggcagcaaggcctgcagttgctccacacctccctcctcgggaaccggggccagctctgcctctgcctccacctcagcctccccgtcccccttccctgcctggttcagctcagggttgcaatagttgacgtactggtacagcggccgcaggcgctgggcctttcctgcaaagacccagggcagggcagaggctagagcgccaggttgtgccatgtcgggccccacaggcagggggagaaggaacagtccagggactgccactcacgctccagcctcaatgtctctaagggtgcagacaccatgctggccacagcgtggagcacgggagcccccaggctcttgcgcttcttggcttttttgtgctgtttggcagatggtgagggctcactctggctgtcctctggctcctcctcctgcagcggcagcttgggtggcagctcagcttcagccttaagatgggcacgaaggcccgggaggctgagagacctgagccagggacaagagacttgagccaggctccagccctggctcccattccctggcccagggaatagcccagcctgcccacagccccagggctcgacgcctgtcccgttcctggtcaatgagac

SEQ ID NO: 335950 - DNA, 641 bp, Homo Sapiens
tgtgtttataacaggttttactttttttcttaaaatagagatttcttactaaataccattttatttcatttcttcacagatcttctggttcttgatcatcttaattatcaagtgtcgtatatagggaacaagtattgatgttcactatgattcaaactattactgttccatagtcagtggagctttttcaatgtccagaaagaatactttcaatctttatgaacagcctaggattttgcagttgtttctgaaggctcaaattgtcctgcttcaaatttttctttgaattttaagtagtctcttcttttatcaaaatattttatccactgttggggacaacttgattcgaaagagcttcttaacttcttgcattgagaagcatcctctaagttctcatctaaacacttccagtactcatcccgggccccccagcagacctgtctttccttcatagatggggctgccattcctactgcgatgaagctaagcgctgtagaaacaggtgtgtgggggccacaatcaccaagcaggcgattggagtgccaccccgttttgcacaagaggaacccgcggctcggggacagtaagggacctcccgggcccatagtccacgcgcgccccacccggacccatcagcaagc

SEQ ID NO: 335951 - DNA, 1000 bp, Homo Sapiens
gaagggacagggtctcgctgtgttgccagagttggtcttgaacttcctgggctcaactgatcctcctgcctcagccttccaaaatgctggtattacaggtgtgtggcactgcacctggccagctttattttaaggcactaataataaagggtatgaaaaaagctaggaataagtcagatctttccagaaataaaagacaattttaaaaaacatcagttaacctgtctggcctatttcaacatctaaagaggatagagaatgtaaaagttttcatgcctacctgattcagctcttttccattctcccaaacacttatttccatgtctcagatttacatttcctcaaaaggcagtagagatttggaaacaacaacaacaacaacaacaacaacaacaaaaccaccccaaaacaagcaagcctagtttgtagcctagtctcatgattaatgaattccctaatgctggcatttagcccacatactgagaggccggaactgtaacaaggtgctcttttctagtgttgtaaggggaaaatgtataaggaaaattaatttttcataatcaggtaaatataatttgttaatagcaaaacaagaaattccggagagaaaaaagatttactctgaaacaccagttccagcaggatttccctacaccttccaacgtattctactttgccatgagaaaaaaactaaataaataaaatggggttcaagtcagttaggcgagcaaacaccaaaaaacgagtgatttcattgtggaggtaggcatgatggggcaggatttccctcaagtggaaatgcttcctgtgcacacacacgtatacatgcacacacaaacctgtacactcacactaatttcaaaagcatggatgtggggaaagccctgccagcatgactagacatgaggagttagcccatctgcctgtatctctacacaggctctgacgtacattccacacccatagacagtcatgcacgagagccagcctggcttgcaca

SEQ ID NO: 335952 - DNA, 1000 bp, Homo Sapiens
gagacaggatctgtaacccaggctggagtgcagtggtgcgatcccggctcactgcagcctctacctcctgggttcaagcgatcctcccacctcagcctcccgagtagctgagaccacaggcatgtatcaccacacctggctaattttttccctttttctagaggcaaggtcttgctattttgcccaggctggtcttgaactcctgagttcaagcaatcttcccacctcagcctgggagtaatcccaaagtgctgggattacaggtgcgagtcactctacccagcctcaactgtttttcatgactccactttttctcccctcttggaaatgagtagtctttgagggaatgtcttttttgtctcaatctctggtttctttgctcagtgcacctgtgtttggggctttgttgatctccaggcctttttcagcagcgttgtccctggagagcaggatgggagctgatggcttctcagcatcttttaactcagtttaaagatgactgtcaacaacatctagtcagcatctgttgctctcggcagctgggacttcatttcttttctctttctccacctctttaacctctttaagactctgtctttgtcatgggtacagcatcccctgtgtggcccttaggctctcttacttacatgtgatctgcgtattatgtctttacttcagggcttctcaaccgggggtgattttgccccccagagaacatgtggccatgtctggagacaattttggtggttgcggctggaggaggtggtgctactggcagctaatgggtagaggccagcgatgctgctaagcatcctacaatgccccggacaactcccactaagacagaataatgatccagccccaaatgtcaatagtgctgaaagtgagagaccctgattccatcttagagatcatccaagcacacttggccaaattggttttgctactgtcccacgaagaaaaggcagactcatgactgatggcaacatcgatgggaatt

SEQ ID NO: 335953 - DNA, 1000 bp, Homo Sapiens
ttaatcttccagcttgactgacttggaagcgttcctgtcaatgtaaaagatcttgttgggggcggtggagaagccgaggccggctccccggctgtacttccagctcatggcccggtcgtagtcccgctgcagattctgctgcaggctgtcagccgccttcttgccgagggccatgttgggccttgcaatcgtgctggcggggcggctgaacgaaggggacaggtttttgaagccacccataagtctgagaaatttcagtttttggtcctcgttctcaaaaccagcagtatcccactggccaaactgggttcccgtccacttcctggtttcagaagcttccgttttgcctgactcgcgatcgatctcttcttgcaaggcctttcgcctcacctggtctatgtgcgcctcatccatgttgccttttttttccaacaccacctctaagtccgtgtctgtttcctccttccaagggtctcctgctaccccactctctttcctcttcttctttttcttccttttcagagctggctcctcgatgactggctgctctaccttctttttggacttcatctttttctttgcggaggccttagggtcatcacttatggggatgtattccggagcctcaactttgactggcttctttttacttcctttcctagggctgctctccatggacctggagggcttggagtggcctgggagggcatctccctcctggtggattttttttttcttcttcaccttcccattgtgttctctggggctcttccgcttccgtttctgccccaaggctgcctgttcctcatccttcttccccactgagcaagtgtccccaacatccctggcctccctggcctcacagaaccaagggtcctggaccgagaaggctgtggggtcctgggccccctttttttccttcttgtgttttttgagcttcttgccaactctggtttcctcctcaccctgtctagggtctggggaggttttcaccccagag

SEQ ID NO: 335954 - DNA, 1000 bp, Homo Sapiens
tttttttgagaaaatttccttttttattagaatatttaaaaaacaactgaattgtattaattattcacaaaaggaatgacaatccccaaatttgagtggatttctgggtggttcaaggaagcttctacatgtttttcacaggtaatgacactactagttaacagctctggatgtagatgggcaagactggacggccatgcagagaaaagaaaggtgggagtgaaactttacagagaaagcacctgagatgagggaaaggcaccttaggtgtgtttaaatagcattacaaaagctaaacattaaccaggaaatacaagcttttttccctatcacccaagtgacacctgcttcgctttgtcttaggtttaaaaatatatttgatcccaggaaggatctgagtgatctaagttggactaaacaggaggcagtctatagggaatgtgtatttttcaagtaggagcatttctttgcctcttttgttcaggatctcatcattatatatcgtcaatgattggcagtttttaataagaacttaatttgcagagagagagagagagaaaagataggcaggaaggcaggaaagaaggcaagaaggaagagaggaaagaaagaaggaaagaagggaggaagggagggagggagggagagacagaaggaaggaaggaaggaaggaaggaaggaaggaaggagataactctgtgatgatgctggaatgtacatgtctcagtgagcagtgacagatgattagccctttctaaagaccccttaaagacacaaaatggtaggtagcattgatctcaccttcataccctgggtgaccatactttgggaagcccaaattgaaatgatgtgatcactgccaatgagtgttgtgacttctaagtgagatggccccccagacatagccaccagaaaaagcatctgaattctcagagcttgtcttctccagaatatatgagaaatcatcagaagacattgaaaacaagaatgccacgcccat

SEQ ID NO: 335955 - DNA, 1000 bp, Homo Sapiens
tttttttttttttttgggtggtgaaggagtggatttattggagcacaaggcagtgaagcagcaaaagtgaaagtacattccacagggtgggagtgggctagagcaagtggctcaagagccctggtagcaaaatcttctggggcttaagtaccctgtagaggtttcttgatggttacaccctatgtaaatgaaagactgactcacagccaattagagactgaggtgaattggctcacagccaatccaagactggtgtggtttgactccttatgcaaatgaatgtcctggaatgaaccaatcattggccagagtgcaggtctggcccatggccaatcagaggctgatgtggtttgataccttatgcaaatgaaggtcctggaatggaccaatcacaggccagtgttcagactcttcagtgccagggagtgtgtccaagtcatccttagatccctatctctgtaccctattctcctgcctcagtcttgtgtgagattttgcaccctttgaccatcatcatcatctccccattcccccaatctctccctcaactacttctaaccactattcattaatctcttgtattatttaggtgtaaggaagaacagaaggatccaagtgtgagaaagcccaccctgagtctctcagaggtgattatgactgtgtgagcatgggtgagacaaatcctctgttgttgttgatggctacttgaagtgcttcctccattctttccattgtagaatacttagggagggagagaatattatgacaagttattgatgttgggtgatctctttcactgaaagtttcaggacagcgaaatactatttccattttctgtatgcctcttgcatgcagcctatcacgtcctgtaaggaaaaagaggaattttttcttttcatccaaggttagtttgtggaaagccttccaaaacaactgtatagtaggatgtgatttttggtatccttgctcatactttgaattctgttcaaactgtttccag

SEQ ID NO: 335956 - DNA, 1000 bp, Homo Sapiens
tttttttttttaacagtatttccatgcagaatatttattgtaaatgtttccattatagacacgtgtttaacaacatatccagtgtacattttaacaggtggcaacatcaccacaggtagctttgattatgtaatcaacacttttaactttccctacacatgtacatcaaatgtgaatggtggaatatacaagttaaccgtcctccttcaaactagctgaaaaactactctctcttatttcattttgcattttctaggcagtatttttccatgctctttaaaaacagacgcaggagctttggaagagcagaaatgcaattacttacatacaatatgatgagaagtgtttcatgatatacaaattgacataggacaagttattaacatagtacaagtttttactgtgtagaaaaaataaacttacagtgaataaataaacagctttctatatcaagttatgtatggagtataaaaagtagttactatatatatatacatatacatatatatataaatgtgcatgttctagagtataaatatactatatacttaaatatttcacgtgacagaacattatttcatctggtttcagttttgtacattaaaatatatctggcagttggggtctcccctgatctctggagacccagggatcctcttcccattccaagggtagacgcaccagcagagtcccgcctctccatccatggatgtctcacactgtctgctgtgataaaatccattcttgttgcagtttggcaggtaaaatttggaaatttcttctcctgatgtctcctgtgccttgttgatgttggtgacatggagagccttcgagccatcataggtactgatggcgtcccaaaggatggaatgatcctcttcagaaggggccatcagatggaaattatccaggagctcctcctcagttatctccgtgctctctgggctttcagggctccctgcctctgcagcatggggagcggaggcgtcagactcctgca

SEQ ID NO: 335957 - DNA, 1000 bp, Homo Sapiens
taatttttaaatcaaagtaatttaataaacagacattgtatagttaattgaaatgcaggtagaattcaggtagtacatacattctgccttgttagtaaaaaacagccaaaaacctcaagcctgtggtgtttactctttcttatgcaattagcctttatgaaatcctatacatgcaacacttctatatttagaatgaacaccaagggtttaggattaaaaaaaaaaatacctgaggcaaagactttagagacattatctgtttaataaatatgattgtaaaagcaataaacaagagcaattatacattacactacatagtatttaacaaaaaatacatcaaaaaagtcattttaaaattagaagtagttccaatactataagaaaactttttttttttttaattggcttcctataaaaataagtcggcaaatgagagatttcaatgctcagttggattcctggaaaacacagaacagctgccaagcaccccactgctctcaaagttgctgtttggaacttctgaaaaaaaagcaaagcaaacctctgcattttggacagtgaatccaattaaaaataaggcaaggtagaaagtgttgcttgggtggttcagggtagaacatgcacagtttgccttctgggattttggaaaacgttgcagtatcggatttttagcttgccctgaatcttaccttccacatacatccctccctacacactcctctgaccttaagcccaccaaactccttgtgtgtttgcacctgcgattagcgagtaggtaggcacttaggtccctcccatttgtaggctctcattactgccttctgtttgagattcagctggaatggcctagtacaatggttctcaaactttagtatgtatcacaatcactgggagggcttgttaaaataggtggctgggcccactgtcacttagcaacagagaacaccactattcatcccctagagtttctaattcagtaggtatggggtatggatccaga

SEQ ID NO: 335958 - DNA, 1000 bp, Homo Sapiens; identical to SEQ ID NO: 157941

SEQ ID NO: 335959 - DNA, 1000 bp, Homo Sapiens
ttttttttattttcccctttcaggattttattataataaaataattattatataataaaataaaataattagtgatacaaagcccagagatggtcaataacaaagggaaagatatttttttaatggtaaaaactttatttactatttataaatacattgcaagacaaacttctcaaaaatacttttccccccaaaaagttaaaaaaataaagaaaagctaataggtaggcagaatgtcttgagacccctctgttttcaaggagagctctatgcagcgtgtgtccacaccgaggtctgcagcagggcagagtctccctgagcctgactttgccagaccttcttgggtttggcctccgggagagcagcccagtctctgggcgtgagctcctttcctcagtcatggccacagttgtatcatatagcatctctaacatttcatctaggattatctagtatagatcttactatatttggggctatgttgtatacaatgttaacaagaacatatcttctctgcatatatgtgtgaattataaagaaaagcatgagaatgactctaagttcaacaaacatgggtgaatctctatgtgctcccagtgtcctggatgggctccccagcaagccattcctccttcctgttctgatattactattcttttttacattgtgctaaggaggacaaaagatgagagatgaaaataaagctttgcctttaaagagcttatcctcagaaataagcttcgtcttgagttgttgaactacaaaacactattttctgcagtcatccgaagaattgtgccattacttgtgatgcctctgaatgtggaggctgactctccctgtctctctgtccctcctaccccacggggccgcagcaaaagccatcctgggccttcgactgggccatgtcttcaggaagattcctgaagaggagggcccgaaatacctgcctttataggttcccagagtgccctagaacattcttagatacatatttttt

SEQ ID NO: 335960 - DNA, 1000 bp, Homo Sapiens
tttttttttttttttacagctggagaagttacttttattcttgcagttttatactaggaagtcaacatttaataagccatcatccacaattgattaaaaatgtttaatccttaaattgtgcatcaatatcctatgactccaaattttatttatcactctccttcaagtctgaagaaaatgattaatttgctaagttccacagacagtacagtcccactgacataacatttagtatgatgtcctactctcatattagaattaaggacagccagtatcaaactggcctgaaacctgattgtgttcctggttcagaatacctgtagtaaatctgtaaatccacaccaagacacaacattaaactagggtgtgtatatcttataaaaaccttttcacagtaaaaatcaacattaaaattttaccaaattccaacattatggtttttgaatccaattaagctttcaaaatgcctgattagctgtgaattaattataaataacttcatgtagtttgcccagcatttcaaaatggttatggactatcatgtttaaaatgtcaaagtatgctatacatattgcacttttctgctaggctgggctagtatcttccatggcaagatcctcaaactactgaataaaatacacttttaaatcaatataggtacttgattaatttccctgaaattatcaacatcattaccaaaatcttccaggattttgtaagatttgattccttaaatacagttttaaagttaaacttatggagggaaaaaaaccctcatagattgactgtaaattttacgtccttttttggtccctcaatgaccaaagagaattttaaacaaattatgcttcatgtttcctggcttaataaaaagctacaatttttattatccaaattaagaaatattatactaatcaaaagctattaattttgaaatgtctatgtatgtctgtctgtaggtccccttagaacctttccaaacatttataatcaagagatt

SEQ ID NO: 335961 - DNA, 1000 bp, Homo Sapiens
taacatgaaaaaacacattttattgcacttaagttataagaaaataaaatttctaagtgaatcaaaccatagacacaatccctttaaaggttgttttcctccatcatgtcaggttgttacataactaaaattaaccaacttgaatctgattgttttaaatcagactataaataaaacaaacaaaaaaataaacagaaggaggaaaaaagatcgcctaggatacagtgttaaaccactttcacagttcagcttgagttgtggctcttggagaatgaggcaaaccatttgactgtttcattcattttgtttgtttgcatgtgacgcctttactacaaaaactgaatagtttctgctttgtcagttactcagagcaataaaactgtaacagttgttttcccaaatactgtaaaacactaagactgaccagcaactttattttaattttgtgttttatatatttttaaaatattttgtcagttttacgatgtacgttcatccattcaccacagccctcaaaaagaaaagtttctccacagaacaggcaagtaatagctctgttccaaggaatgtgttttaatttttgcccagataaaagaaaataagctttgcacacactctcaattctttacttgcaggcaaacttcactctttattatctgaaactcttccattctcagcctcttagaggcacagatggctcaagtttcagtggcaaaaagtcttttttccataaccaaactagagcaaatttggaattcagtctgggactaaaacgtcacagcagaaaaaaaataaaaaaaaataatttgcttttttctttctttcatttagcagcataaataagtttggccactgggagtacagtacagggttgggacaacaatcccatatttgaagacctacttctagcaccagcatcaagaattaaatccatctcaggactcacagaacccaggacaacttgccacctttgagcaacatatgcattgaagaatgtata

SEQ ID NO: 335962 - DNA, 847 bp, Homo Sapiens
tcagtttttacttgtttcttgattttatttcactcaacaaatatttactcagtgtgtgttgtgtgctaggcatagtgtaagtcactgaatatacaattttgaacaagacatacttagtccctactttcttggggcctgctgtcctcctcatttataattttgatatgggcagacagagataggttgaagggagactgtacgtttgaactctcctattacaactgaaggcaaatttttaccactcgtctgggtttatgagaaaaggcatgaaaaatattacatagaaactttttgccagattacagctcttttttaattaaaaaaattttacatgtcagtgcctgacacattatagggcctgaataactatttgtcaaacgattgcatatgaagtgacttcatattttgtctttttcatacctctttcttatatagcagtaaaaaataacaagaaaaccacttaatagtaatccaacaccaatcccaattgcaatgtatttttcataagaatccacagcatatgaagttaaagtcaagtgctcacacctttctccagtataaccagtaaaacacctgcagatggctttctctagctcatggtggaatgcacaagcaccgttgatgcagtaactgttatgatcttccaggcaaaggtgtgagaacttcaaggctatgggtccttctatgttgtcagcttgctgggctgtgattggaggtgttacagtcacggctgcctcttcggtcagtgctgtcattgcgttgaataaaagatagactgatattggaactcccaaagccatttcctgtagttgcttaactttctttctcttatccttctagactgacg

SEQ ID NO: 335963 - DNA, 1000 bp, Homo Sapiens
ttttttttttttttttcattttaataagcagtttaatagaatttaaatatatgacatccaattaccgacagaatacaaagcatcataaagtatgatttgcagacatattttataaattggaacaccttaaggattcatggcatttgtgtaaaatgtgtggtcgttaacacattttaatacattgattctattgtggaaggtcgtgtgacatggaatgttaaacaattaaaatggtcaaatgtacttccatgtttatgtgatttgcattcacaggaagaaaatgggtaatgccgaaggaacattggcctagagaagcttactgaagcaagggaatttggagtgagactttctcccgctgcggctttctgcccccacaccgcggcttttgcagctttttgcctccgccgccgcggcgttttggtccccgccgccgcggctttttgtggtttttttgccccagctcccactgctttttgtcccccccgccgcggctttttgcccccgccccggcggctttcttccgccgcggctttttgccccgccgccgcgcatttttgccgccgcggctttttgcccccgccgcctaagctttttgcctgcgccgccgcggctttttgcccccgccgcctaagctttttgcctgcgccgccgcggctttttgcccccgtcgccgcggctttttgccgccgcggctttctgctcccgccgccgcggctctgagggcgggagcggcagactccgctgccagctctactggcgtcctggcaagggcagcgccgaggggcgctcccggtccagctctcccggctcgggggttccttgcctaggcgcccgagccccgggctccctgcctcggccgctgtggcctgcatagggcggcactgcgcgcggaggcgatgggagagaagaaggagggcggtggcgggggtgatgcagcggccgctgagggtggcgcaggggccccggccagcccggggctgcagcagtgcggacagctcca

SEQ ID NO: 335964 - DNA, 1000 bp, Homo Sapiens
aaacggagtcttgctctgtcaccctatctcaaaaaaaacaacaaaacaaaacaaaaaaatggaatacaggaataggggcaacacagggacagggtaagacaggggaccatggcagggtgagccaaacagacttgagagaaataaatggaggcccctgaaagcttctctccctaaaagcagtcaggagtgctggcccagacagggatgcagggatggagccacagaggaagtgagatcccctaggataaaatgagaacactctatttaaaaagtaagacctgaaaagaagcacaaacatctgacaatgagaaactttcctgccaggaggagtgacatgttactgttcacaagaagtaatggtatggacgataaataatgtgatctcacttagcagcaggggctcagatgcccctatatgacctactaccatccaaggacccgtacaaagggctacccatcctggcaggaaatgacatcactcagcaggtaggaaggggtgggtctaccagcccaaacgcttctgggagggccaatccatagagggttagtcctgaaggtccatgtccctcctcaatcctccatcttggccaagagagaggccaaggcttctagactttgggtgaagtaattatgcccccatctcttcatctgttaactccagggagtcctaaattccttaaatccttacttagctggggggagtagtgagagatactaaataccaaaagccataggtcaatcctttagagtcaatatctctatagaagtatctctaggggctgggcataatcccagcactttgggaggctgaggcgggaggatcccttgagcccaggagtttgagaccagcctgggcaacacagggaaaccctatctctacaaaaaaaaaataaataaataaacaattagctgggcatggtggtgcatgcctgtggtcccaactatgggggaggctgaaataggaggatcgcttgagcccaggaggtcaaggctgcagtga

SEQ ID NO: 335965 - DNA, 1000 bp, Homo Sapiens
ggagacggatttcgctctgttgcccaggctggagtgcagtggcacaacccaggcccactgcaacctccacctccagggcccaagcaattcctccgcctcagcctctgagtagctgagattacaggcatgcgtcaccatgcccagccagtctctgcatttctactagaaacagggctccaccacgttggccaggccagtctcaaactcctgaccccaagcgatccacccacctcggcctcccaaagtgctgggatcacaggcgggagccaccacacccagccagttccttgcctttgaccagtacttaatgctggatgaaaaggctggttatatctagaaatatagcctagagaaacacctgtctgtgtacacagggagatagatatatactagagcagtagttcccaacctttttggcatcagggactggtttcatggaagacaatttttccatggacaggagacagcggaaggatggttttgggataaaactgtttcatctcagatcatcaggcattagattctcacttagatcccttgcatgcgcagttcacagtagggtttgtgctcctatgagaatcaaatgctgctgctgattcgacaggaggcagagctcaggcagcaatgcttgctttccctctgctcacctcctgctgtgtggcccagttcctggggtttggggactcctgtactagagggttcattgcagcataatttatgtagcaaagaaatgggaagcaacctaaaattccattaacaagagaatggaccaaaaaattatagtacatgcaaataaattatggtatattcatactatggaatactatttagcagttaaaactaataaactaaattaaaactacaaatattcatatggatcaatctgcaaaacatgctgaatagaaaaggcaggttgcagaataataatacacagtgtgataccattgatataaagtttgaaaaacacaaaccctactataaataatttataaatcataca

SEQ ID NO: 335966 - DNA, 1000 bp, Homo Sapiens
taatgctcaaccttttattgcacaacaacttctgaggctgggtgaggtgatatctgaaaaatgttatcaccagctgcagcaggagcagaaggtatcaaagacaccaccaggctggcagtgctgagtgaaagtctttccattcacacaactgtaggaggcattcttgtcagtggggtcagggtacaggccactggccctgtcagcacagaatccactacctctggggctgcccccagagctcctgccagagcggcccccagagctacgactgtggctgacaccgcatgtgatgtttgcctcggcaatgggagcaatgggttgggctggagctttgcaacctgagaagaaaaaagaaaacaaatcctgaacctccttgcttttagccagtgatacctgatgtgtgagagctagtacctggattttgttcttggctcctccttctatgtctccacatatttcagtcttctgatctgatatatccttcctgctccactcacccctttgcttaccaactccttcctcatccttcaagtcacagtgcattttttcctccttacatcttactgattgaaatttttcattatcatgaactcacaagaaggttacttattcttttagggggcacagtatcacataatatcttctgtattgttgtctagctttgcagtttttgtaaatccaatttctctcactagattgtaaatttccatagagtagatatggatatttatgcatttagatcacctgtggtacctacagagcactgtatatgtaatagatgttcaataaatttcttgtgaaatgaatgaaggaaggaagaaatggtgaagagccctgtttgttcttcccaccattaatcaattgttaccagataggaatggacaatgtcagacaattacttgtgcaacagctccatgacttccaaggaacctttggaatttctcttaagtctgaggcttagtgtcccttctcactccctaactcacttgtactctgcagg

SEQ ID NO: 335967 - DNA, 1000 bp, Homo Sapiens
ttttttttttttttttttttttttttttttttttttgggcttcaagttcatttattgatgcattggttggacacaataaaaccacaattgttatcaaaaagtttccctcccctccccctttttctggttctcccattggaaatgtctttaaaaaacaaaaaaaagatacagggggatactggcagggtcccatattgtggggtggggagggggcagtgctgcagtggaaaggagtttgtgacattgacattgacagcatgaaaatgggtcttgccagtgcatgtgagactgcctcccaacactcagcttcacagtggcaggggctggttgggagaagggaaagctgaatttagtgctaggaccagtttggagtgggaagctgtaggggaaagctcttcctttgggagctctgcggggggttcggtgttagctgagtccatagtctgagggagacccacacccgccctccaagagttggggttcaggaagtcagagaaaggctaagaagaagagcttctgagggatgagttactccctcaatattaagactgggcttatcagcaagtatcacttgaaccagggaggcagaggctgcatgcagtgagccaagattgcaccactgcactctaacctgggcaacagaatgatactctcaaacagaaaaaaagactgggcccatgaatgcccagaagacttaagattaaaacaaaaccctgggcccaaccagaacatcacctcctctcttagtcccaccccttcagagcagatgaagcccccaaaagctttcagaaccagccccactacctccttggctctgccccaccttagcactgctgatcgaaggacttttgggtccccctttctcctccatggtcctctgtcacactcccatggtcaccttgtcctgacagccttgagcctgctgcagctagagaccccatccctatctccagtgaagccccaaagcctaggaatagaggtcagagagtcgtcccctggc

SEQ ID NO: 335968 - DNA, 774 bp, Homo Sapiens; identical to SEQ ID NO: 157551

SEQ ID NO: 335969 - DNA, 1000 bp, Homo Sapiens
tgacggtatgaccagttgttggcatttattctgcacagatcttatatgttggggctttgagaaatttttaaaggcatttttttctccttttgatatttatttcacctaaatgggaatgttagagaatgtcgctagatccagcaatggacattgttagtgctggaaggaaacagacacagtttggattttcttgaatactaagcaagactgttagcttacttctcacccttcccagctgccccaagcattgatgtagcacctctttagtcaataaaatagaactcactaaagcacccggtttctggtagagtccatacttgccccttcctcctcggggccccagggttactatcatatgccctttatataactgactacagcattcacaatcttcagggaacatgggaaagagagagccttcttatcaaaaaagataatggatccgtgaaaaccatcatacaggtggtaccatgtcacgcggaccccctggtcctccaagcgcttcttatagagcaagctgtcatcacggagtatgtcattctcacagctcaccaggaaggcctcaggaagctgagcgatgacctcatcatctgctatcaggggtgaattttctacatccagcatatgtttggcttctagataggcagcttcattaaaagggccgggagaccagggttggtagcctctgttcttaaatttcttggggatgttgtcagggctgagccacttctcgtacttcctccagacgtctgggggtacacaagtgccgttcaagatggcgtcacgccaggagaggtcaatggccagatagttacacagagaagtcaccatgaacttccgggaaagtaatgggacattttggttctgctgaaaggatggcaactgcaaacagaatgcctggacaactggataaatcagaacctgagcccggatccggggaagatctgatctgcccaccaaggcctgggtgatggcggccaccgctgcacctccgacgctt

SEQ ID NO: 335970 - DNA, 1000 bp, Homo Sapiens
gggggggacagagtctagctctgtcgccaggctggagtacagtggcgcaatctccacccaccgcaacctccgccttccgggttcaacagactctcctgcctcagcctcccgagtagccgggaccacaggtgtgcaccaccacgcccagccaattcttgtattttcagtagagacggggtttcaccacgccggccaggatggtctcgatctcctgaccctgtgatccacccacctcagcctcccaaagtgctgggattacaggcgtgattcaccacacctggccagtgtcattttctactgatgcaggttggaagcctcatgctgttccacctgccccggaagctttccctaatttcacagccctgtctcacccatcctcatggatccagttcaagaaccatctcatccatgaagcccatcagcccttggagatcttgttcataacctccacattgtcaatgcccagcagtgtcctaaaaacagcaagttctcaaaactataggcattagttactaaaaacaggctgctgtgtgggaatccgcacacaggcagcaggctcccttaattcagggactagagagccacctggtcttcctccccacacaacacagccttgcctgggtccccgggcttatattttctagcaccagatcctcctcttccaacaggggtgatacccaaatgagtggaggtccaaagcataggactagaatgaaacaaacccagctcttctgtgaggtgtaggcctgtgagaagatcagtattggtggccaacccctgattcctaagggtgcctactgagtcatctgggccagatcagcccctaggcccagcactgttcagtaataccagcatgctactaccttctgtaccatacctcaggccctgactgcaaagcaggctgaaactgtaagccttcttttggggtcctcccagaaaagcatgcttccctgggcacagagatacagattccaggagatcctgttcctctcttctcact

SEQ ID NO: 335971 - DNA, 1000 bp, Homo Sapiens
gaggggagatgacgcctttttattaaggttaacaccaaggaaagcattgagaaggaatacacaaaggagggggagggcacacaaagtcaccacttgaggaggtggaagggcggcacatcagtaaaagaacctcaggacagccacatgctccatgccctggttgggggaagagggagagaaaagcgccattgatagcttggagctcgtagaagggtctgaagcccctgaacctaacaccagagccacaagccctgcccctgagggctcacacactactacacaagtagacacacataacacacacaagacattatgaaggcaacaccgagaggcagtgggcaaggacatattgacagaaaaaggaactgaagttaagcaggtgtagccaggagagacagtttttggctgcggccccaagagtccctcaaatgtcccctaaatctgggctgctgctgagcacccccgagtctctgcctgtgaaccgggctctttgttctctaagccccagggagtggaaaagcaatcccagatgaagtcagtgacaaggcaggatccgctctgcatgcaaaatcctagaggttgagctattatgtcttcatgcacattcatagccagctcctcccagcccaggggcccttggaaccccattcacccagattcctagggctgcagttccctcctcaagcttcctttaccaatcagcagccgcagagatctgtgagggggagaggcttctgcagagcactgaatatcttggatttcagcagaagggtaaatttcctgttgccagaacaaaatacccccaattccttaatttccaggtaaattgttagagattatttgccatggtcctaggtaagtcctttttcagaatagaaaaagcagaattttatttacacaattcacgggttctcctgttgtctgggaagggggaaaggacaggatagggatggatgggagtccagagatgggcgcttcctctcccggagcctcacctttc

SEQ ID NO: 335972 - DNA, 913 bp, Homo Sapiens
ggcatttcttctttattgtaccgaattaacacagaagaaaaaaaaatgtttccctcccagttcctcagtcagtgctgccaaatataggcacacagctctttccttgggacatcatcagattttcctcttgggatcctcaaggtctttaatatttctagtctttcttttccaagttgggaaacactagtcattcactcaacaaatattccttgactggcaaatatgtttggggggctggagatataaagacaaagtgcctgccctcaggaagccaacagtctagggagagacaatggcacataaagagttatatgaccacatggccgggtgcggtggctcacgcctgtaatcccagcactttgggaggcagaggtgggtggatcacttgaggtcaggagttcaagacgagcctggccaacatggcaaaaccctgtctttactaaaaatacaaacaaaattagctgggcgtggtggcacacacctgtagtcccagctacttgggaggctgaggcaggagaatcacttgaacctgggaggcaaaggttgcagtgagccgagatcgcaccattgcactccagcctggagacagagtgagactctgtctcaaaaaaaaaaaaaaaagagttatgtgacatcaggtggagagcaggataaagcacaggaagggacctggagtggcagaggggccaatctagagaggggcccaggagaggtccctgtgaggaggtgaagtctgaacaaagacctgagtggaacaaaaacatcaaggcaagaactatgaggaaaatataatagggtacttagcagacatgggttcctttacagctgggctgcaatcttccttttgggtcaagagaaacttctaaaatccctcattttgttgtccaggtgctcacttcagcagagtagcatt

SEQ ID NO: 335973 - DNA, 1000 bp, Homo Sapiens
gggtgtcatatcctgtgctctttatttggggttaaacccagtggcccagagctgcctgatgacacctccctgaaagcagaagaggctcaggactggcagccgtgggtgcgcatatattccaaaaattcctccagttggtcccgcaattctttcttgctggcatctccatctgctggccaaaggatgaggaacgtctccttgcccagaacatagctgtaatcagatttgattctccacaggtctgacgtctggcccatgatgaggtacgattcctgttcttgcaaccccagggagtcatggcaagtggcatgggagacgaatttcttcatggccaggggtgtggcagggtccgtaccactcttaatgatgtcttcgagctgcgtgttgtaatagacgtaagggttggaggcagagacctccacagattccagctttgtcttgtacacaaaatccacgcctgcctcacatgctgttgtctggagctcctcctgcctcaattggccactgggcttctgcagggatgggcactgtcaaggctcgtagtagtcgtagatggtgaccagggcggcctgcaggaactccgcctgcagcatcctgtgaacccgaaagcccagcaccgtgttcttctcatgggagagcttttccaggtagaggacaacagtgctgtcgctggtacttgtcttggttttgtactgaaaggcgtacctctccacatcattcgtgagctgtttgaggtcatcctggttggggtagaagcccgtgagcagggagacctccatgatagtcattgtggcctctcaattgttctggaaccttgtttccatccggagccgaaaagtctcacctccctttttattttcttctagggcactgtggagagtcgcattcaggtggtacaggttgcagttgtcctcccgggactctggggacttgtgatacattgtcaggatcgagatggtgcctctcccgttgccactggctttgatctctaggtcgtcct

SEQ ID NO: 335974 - DNA, 1000 bp, Homo Sapiens
aaatttagaaaggagattttatttttttataaagggttacagcctgcaagtggccattctgacagactgggaggcatagcttcctgctgaaacccgaaaagtaggtttccagggaggggagggcgaatagtgatttacgttgatctggctggccacatatacatattcaacagggaatagggggagctctgaatatttgtgaagggatcctgctgcatgcatgctgagtaaacatgcctgttacatgcaacccatgttcactttggggtggagacaacatttaaatacattataattaggccctatgcttcaaaaggtgaagcagggacacaaaggcaatcaagtgcatagcttctgtaaactgtccagaacccgcccacggccagtggtctcttatcaagagaaaactactgaaatcagtctcttgtccaatcaaagcagtagttacggcttgtgtagggagggctcagtcagtttatggtaataggtgagctgcaagtgcttcagcattgcttatctcaaggccagtgcttgtttagctagagaaaaaaaggaagaagaaaaaaaaactggcaattagaacatagtgcctactgccacacacataccaccaaatcctgcactccaagcttctccttctgcaccctggactcccaacctccagttagacaatccacatcttcccacacctgcctcaggctccatcaggccactgtgcctcccatagcaaccaggccaggggggatcttgattcctattacgtttctgaagaaggtggtcagggggtgtggaggatgtaggtgggagggggtgaggttgagggcagaagtacactgtggtcttctgtcttctacctcattggcccaggtgctgctctccctccggttgtctgctttcagcccttcgtgggaaatcaggtctgcaccctgatcttcctgactctcattttgtgaggaacctgaacggatgagacgtcgctcttgtcccacaggttctgtcc

SEQ ID NO: 335975 - DNA, 1000 bp, Homo Sapiens; identical to SEQ ID NO: 157553

SEQ ID NO: 335976 - DNA, 1000 bp, Homo Sapiens
aacagtctaagacaggtttattttggagaataaacctgagaggggcttctgcccgatttcggtcaggagccttttctcttggagactaagggtatttaagagttccgggaaggggagcttattgcaggctaggaatgtttctgtgtggaggagagtcttattgcaggactggagtgtctctggtcggaggggaggttatctcggggttggcatgtctctggtcagaggtttcatttgtgatttaaggtcacactgacattagccattaggctgatgttttggggctggatttaggcagttttgaatcaagtagaactcacaggggcgatgcttgtctaagatgatgatgctcctgctccgccagtccagactggtgccattgtctccctgatggtaaatctagtatgggtctctgtggggaaatgcatcattggccactggattttgtacaggggcttgattatggagttcatctgcgtgggtttcagctgaacgccaggggcgcccttttcatcaggagtgagggtggagattagaatgatataaatgtcatgccatgttaaattaaaggactgagtaatgtgcaggaattccttgcgataatgagagggattttcagaggaagatcccagatgctgttggatctgcgacaaatcagacgtagtgaaagggccatgaacacgagcactgccttcaaccccagccactcccagaagaggaagaatggcagaggtggtttgactggctggcgtttcctttgcctttaatgtccaaatacaaggctgggcccaccagcccccaaggggcatccaggaggggccccacctgatccccacggaccacgtttgagagagaggctggcacggcccctttctagaggccattcttagctccggctgctgctgcccttcttcgtgcccaagtggcctctggctgggccccagtctttggcttccagggcttcggctgcagctggactgtggttcctggacttcctcac

SEQ ID NO: 335977 - DNA, 1000 bp, Homo Sapiens
cttttattatttatttattcatttatttatgatatatcatagttgtacatactttgggggtacatgtgatactttgatacctgtatgaaacatgtaatgatcaaatcaaggaaattaagatcttcatcacctcaaacatttatcttttttgtgtgtgtgggcggcaagccacccaggcaccgaggcaagagacagaggacacgagctcttccagtataataaaatataaaacaagaatagttataccagatatagatcttagatatgattatatatgactatcattaatcattagtttgtagcaattactttttattccaatattatgataatcctcgctctataatcatagcctaggaaaaaccaggccatacagagataggagctgaggggacatagtgaggtgtgaccagaagacaagagtgcgagccttctgttatgcccacacagggccaccagagggctccttggtctagcggtgacgccagcatctgggaagacgcccgttaccaggcggatcatggtccagcggtagcaaaaggtgtcaaggaacaacacctgctacatagcagaccgggaaagggagggtgggggtctctctttccccgggggagtttagagaaggctctgctcctccacctcttgtggagggcctgacatcagtcaggctcgcccgcagttatctggaggcctgtctccctgtgatgctgtgcttcagtggtcacgctcctagtccgccttcatgttccatcctgtacacctggctctgccttccagatagcagtagtcaattagtgaaaatactaatagtccctgatatgcagaaataatggcgtaagctgtctttctctttgtctcctctccctctctgcctccgctgccaggcagggaagggccccctgtccagtggacacgtgacccacgtgaccttacctatcattggaggtgactgacattctttaccctgccccttctgccttgtatccaataaataacagtg

SEQ ID NO: 335978 - DNA, 1000 bp, Homo Sapiens
gagaatcattaagttggtttaattatatcacagaagtatgggctcactaatatttataccaatttatgctaattaaaccagaaagtttctgtaggtaattcagctctgcgcaccatttaatagggttatgccaaacagaaccaatggttatataatacccagaatataaacctcagcaaattcatacttttggaatggcaacacaagtgagaatgagaggcaatatttcatttcaaagtaccataggctgctaagagtgttcttttcttttaaaaatttgtgtggttgttagtaatgtaccttaacactggtcctccttgacagcggtgttagagatggttaggtagaacctatattacggaagtcagccttgcccatttctttagttcagtgattaaaattgaaattactttttcaaaacaattgaactgctgcttacaatataaatagaataccaacaggattcctgttgtattcacattattctctaattagtatttttacatttccactctgacctgaccttcagtagttcctttatttttattttcaagcatttttgtgagtatataataagcatatatatttatggggtgcatgagatgttttgatacaggcatgcagcatgaactaatcacatcatggagagtgggtatccatccctttaagcatgtttcctttgtgttacaatccaattagattcttttagttatttttaaatgtacaattattgactagagtccccctgttgtgctatcaaatagtatgtcttattcattccttctgcctatttttgtacccattacccgtgccctgtctccccccccagccccctagtacttactatgtccatgagttcaattgttttgatttttagatcccacaaataagtgagaacatgcaatgtctgcctttccgtgcttggcttatttcccttaacataatgatatccagttccttccatgttgttgcaaatgactgaatctcattcttttttagg

SEQ ID NO: 335979 - DNA, 1000 bp, Homo Sapiens
aaatacatccagaagtattattgctcttcctgggacatcagggccaccagtgctgcctgtacgtcttctgcctgggatgggggcagccgacagtcctgaatgagggccacagcagctgcctctgtcaggctgctgaagtcctgggatgttttgacagggaggtgcccagccagctcacagagggcaacattgaaagcttcaccgtcctttatcccaaagctggacttccgggcccacagaattactcggacccctatgagggctgaggaaggtgatgtctttcccggcggagctccccgggtgacaaacaagttatgagcaatctcatggtcagtcagataatcagtggcccgacataccctgcttatcaaggactccaagtcagtccctggcccacgagtgtaaaagaggaagccaggagctgggaggtcctggagcagatgcaaatggcctccagggtccaggggctcgcttggcgcctgctccacgggcagtctgtgggccaggtaatagccatgcaggtggaggtggttcaccgaggccaagcctcccaggctgttgaagccgacacggaagcccgggtgtaagctcagcagcacagcctcaatccctgccctcagtgcacccggcagcaggcgctgggggagctggcgggcaggctcaggcaccagcagcacgtggccccactccagggggctgacgttgatcaccaccaggatgtcttcttgcagcagagtcccagggagatcaggctcccggtgcaaacggaagaggacttctccgggccggatcttgttgaagttgaactgtacagggtcaaatgcctgcctcacactcttgatggtctgcgggggcctcctctgcacaccacgctccacattcagctgagccacgaaacccacagcaccagggaggatttgggtctgtagctcccgtagacggtagcgaaacagccccagctccacccgctgcttccaggcagagcagagtgcagcatcaa

SEQ ID NO: 335980 - DNA, 1000 bp, Homo Sapiens
cagtttgaaatgttttccccctttattttgtttttcaaattacaaaagcaatatatgtgaacaagacaatgcaaaggtattcagaaaacttattacccttctccaccaaggtaaccaatgaatgttaacaccttcgtgtgtattcttctacacttttctatgttcatataaacatccacatgcatatatacacacacacaggagtttttactttttttaaaaatagaatcgtatacattattatgaaattttccctttttacaatatataccatgaacatccccacaaattagcaaaattctagctccctcatccccagccaaatttactaactcacacatttgtggtatcacccgtgattcagtcatttatgtatttttctttttttggttttccttttccctacacccctgactcccccataacctacctgcattacccacctccctccaagtcaatgcatactcttctatacttttcttcatgcacataaaatcaaataaacatatatagataccgtttattgctgacaaacacctagagacattttgttaatgatttacaaaaatggagtcatatttaacatacttaatatctaccttgcatttttcactcaagagaacattgtggaattccactcaagtccactagcatagttttaatttgtccaccttaatggctatattaacattctatggaatggatacactatagttttttcctttctacaatttcccagttgatgggtatttactttgattctagtgtttgctttggttttgggggtttttttgccattaagaacaatttttacaataaatgtccatgttcacatgttcatctgtcttttatgtattggagcttttacttctaagggaagattctccaaagtgagttctccaatgtttattgaggcatgacttctggctgaaggattttccacattctctgcaacgatacggtctttctcctgtgtgcatttttcgatgtacattgaggt

SEQ ID NO: 335981 - DNA, 1000 bp, Homo Sapiens
gattttccaaatcactatttattttcttaaataccaacattcttaaaatcttggcatgaaatatttgagagttacttctcctgaagtacaatctttcctttaagacccagaattacatatagggcatgacattaatttatagtctatatgaccctcttgaatgttgttctctaaaggctggacttcagaattcctctacagacatgaccccagtcttccaagtgagaattcacaaatatgctccaggcagtcaggacaggcttcaagtttctttggtttgatgataattatcacttggcctgcaaaagccaaggtctttgcttgctcatagatggttgattgcagataaaaatatgatgagaaaagtaacattcccacagacataaattgccaacactgcctttttaaaagcatgaccctctgtttccactgcagtaaatgactgaaggatctgaattctgtcatcatccaatatttcaactccagaacaacctcagtcccaacatgccaggctacgaatccggtcattgcataggttttccatgaatcaggaagattcagtcctggtaaatccattcccaggaacatcgctgccactgctattattctagcagctgttcccatactccaatgagtccagttaaacatttgccttcttgggtcatgtaaaggtggcctgaagactgccagaagaggctgaagaactgccaaagtcatcactatacagccgaggtatgggtggtaacctgcatgcctactccagcctcccctgtatataaacggcataacaaaagcaatgcaggtgaggacagttgtggtgaacatgagcatccgatgcacctgaaaccaagctgcttcaccaagcaagaaagcttttgaccaaactggcttgaagaaccgggcaaccagtacacctatgctaacagtagtcatccatgccacaaacattaaggcaccatgaaccttcagaaggagtacagaatgggatcctcctatgttc

SEQ ID NO: 335982 - DNA, 602 bp, Homo Sapiens
ttttttttttttttttttttttttttttttttattaatgacaactttaatatgaacatgtgcttaaccctcaagaaattgtcacaactgaaagacgggagcaagctgacactgcaaggaacacatgatgctttggaatgggtggcctgcgtattcaaacacatcaaagcagcagttacttgaacaatcggaacttcttcaaatactggcccacttcttccttggggtagggccggagagcaatacaagtggcgatattctctggttgctcaagccacagcatgtggtcaatgttcttctgttgcagggtctcggccagctcctttagggtggtctcatctggggcctcgaggaccactttgcgcatgcgccccagctcttggaggtaagcggctgtgtgcgggtggtcgcggtgagtgtgcaaggccgcggtggccgcgtgacaagcctgcgctaccagtgcgcccgccggccaggagaacggagcttgtgatagatcctttcgtaacaccaagtattgtaccaggacctgcggctccgccccagaggccgccatcttcctgaccacccgaaaggccggacctactccccggtgcatcttgg

SEQ ID NO: 335983 - DNA, 1000 bp, Homo Sapiens
gtagagatggggtcttgctatgctgcccaggctggtctcgaacttctggacccaagccatcctcccacctaggcctcccaaagtactggtattacaggcatgagccactacgtctggccaacactgaaatttgaatttcagataaatttgaaatatcacaaaatattatttagttggttttttgtgcttgtccaattattttaaaaagtggaagccattcttcactggctcatgatctctgaaaacaggagggcagattgggcccttgggccatagttgggcctgtcttggatgcctctcagggttctttcggatgacgagcgccctcccttttcagtgtatgactcccactggctggctccctttgaatgagccccaggggaacacccactcctgggaccccccaccaggctgggaatcagaggcacagtggggtacgtaggggccttggactagaggaagggatacatggagagagagcggcacccactgttataggtgcacaaagtgccttgttgatggcagtggtgggagcaggggctcagaagggcctcttgggggcattaagatgctcccagcaggaggggctctgtggcacctcacaggcctcttcccatcgccacaccctgggctcccagctgggcctcgcgtaccaggcagagaccctctcagacccaccttcatgggttcccctctgacccctgtcctcccaaacccaagtccccactgtgctctgccctgtgttgttgggggcctctgaacagcgtctccaggacccctcaaggggtatggggagaggtggagagaaagggtggaggaggagagacaggcctgagagagacaggaagtgggggtggcaaaaggaggtggcagaggcgcacggagggagaggtgacagagcctgacagacctgggcgtgggctgcaggaggggcactgagagacctgagagacaggcagggtgatgggggacagggagggactggggctgccagctggtc

SEQ ID NO: 335984 - DNA, 1000 bp, Homo Sapiens
aaattagcagactttaatatggcaagataatatctgggcaggtacatgctcaaaacctatgaaatttttgtggcatgttgagtgaatatgtatgctttcttcaaattctggaaaaccataataagggagttatttttaaagtaacagaggaaagtaacaaaagaaaattaaatgtcttccattgttcctttatccaagccaaggtatcagagcctccttttttgcatataaaatataaatatagtctcagttttccagggcagtaagaatttgggacttgggctgaaccttgctatgacagacataatgggaataaacttgaaacaggaggctcagaggacggtgtttagggaactttgtatttgttggaaaattattttgagcaccaagaatattcctaaagggtaatactggtctttattttgacatgtatactccaatattccattgactggagatgctgcactgttttaaacaaccaggtctcatgggaactcactcactttcacaagaacagcaccaaggggatgttgctaaacgttcatgaaaaatccaccctccatcatcaaaccacctcccaccaggccccatttccaacactgggaattagaagttgacatgagtttcgatgagacacagatccaaaccgtatcactgactacagtaaaattctcaaagttaatcattatgacacagattgcaaagacctccatcataatatagatagcagaatagcctttaaatgtcttttgttgtagccttctataaactgtgtccttgaagaataatttttttttcacagtgcagcccaactgttggatgcaaagttgttttccttaaaggcccctaaacaagtaatttgactaagaaataatctttttctccttttttatttgtataaatacaacaggtagaagtgcagttttcttacatgggtaggttgtgcagtggtaaagtctgagcagtcagtgtaaccatcatccaaataatattttatcca

SEQ ID NO: 335985 - DNA, 1000 bp, Homo Sapiens
ggctaaagaaactgcaaaaaaagatttaggacctcattctattaggttagtatttatctagtaaacttcagcataagctaaataaaatacatgttgttgctctggactgaaacccctcaaaaccatattgtaaaaattacaaaaaaaattaactgaaatcatgttttttaaaaatcttgtagatgacaagatatgatatatagtaggtttaagtacctatttcaacggttcccaaagtggggccctcagacgcccaggtccaaactattttaacgtgaatactaacatggtgacatttgctgtaacggtgcaaatacaatagtgggtaaaaatgctggtacttcagcacaaacaaaggcagtaacaccaaactagtcatggtattcttcactatgcacaggaaaggtttaaaaaggaagggcaggctgggcatggtgtctcacgcctgtgaccccagcactttgggaagccgaggcaggtggatcacttgaggtcaggagtttgagaccagtctggccaacatggtgaaactccatctctacaaaaagtacaaaatttagctggacatggtggttgcatacctgtagtcccagctacttggaaggctgaggtaggaggattgagcccagaaggtggaggctaccgtgagctgtgatcatgctactgcactccagcatgggtgacagaagaaggccctgccgccttgactgtacaatgagcccttccagaacacagcagcgcgcggccaggccccggggagagggatcgctcaaacagcaccagaggctgcattccaacttttcctccgtcaacgaggccgttttcattgttagtttctccttaaacacaaacttaaaaacaactggcttaaatctactatcgcatcttgcgtgatcatgtttgtgccttacagtgacaggctgcaaacgatagaaattcaacccaaactgtcacaagaaaagaaggaaaggcttgtaactacttaaacatattgctaatt

SEQ ID NO: 335986 - DNA, 1000 bp, Homo Sapiens
atgtcattaaacagcttattttattctattttatattttattttattttagagacagcctcgctctgtcgcccgggccggagtgcagtggcgtgacctcggcccaccgcaacctccacctcccaggctcaagcgactctcctgcctcagcctcccgagcaactgggatcacaggagcccgccaccatgcccggttaattttttttgtatttagtagagatgggggtttcaccatgccggtcaggcccgtcccgaactcccgacctcaaatgatccgcccgcctcagcctcccaaagtgctagtattacaggcgtgagccatctcgcccagcctgggacgtggaggctgcggcgagccgagatcaagtcactgcactccagactccagcccagacaacagagcgagactcgtgtgctgattccaagtaaccaggcacccctctgtgttcctggggatgactttgccatcgtatggatgcatcagacctgcacagacgtaggggtgtccggcctggcagcccaggaccatggtctgcagggtttcctctcggccattcaggacaaccctagtctccagggaatagcgctggtgtcgcctatcagccgtgaaggtctcctgcaggaggaggctctgcgggatgggcaggtgcaacgggtgcctaaggagcaaggccccccgtttccggtacaatgtcctgtcttgcctcagctcctccagctctccttccaactgcaggccccgaggctggccctgggcaccaatccacacagccgtgagcgacacctgggtcttccggggccactccaggtgcctgtaggccgctgttaggttcagctcctgctgggggcctttcaaccagcagttcaggatcttacggtcccggctgttctcagcatggatctcgccctgcactgctgtgttccaggctgactcgagttcgctccagctgtggaagaggctctgtgccaagactgtcactgtggaaacccggaggtaggtg

SEQ ID NO: 335987 - DNA, 1000 bp, Homo Sapiens
caattttagaacacttttatcaccccccaaagaaatccacatcctttagccgtcaacctccaatacttccatttctctgcacctaggcaatgtataatctactttctgtctgtatagatttgcgtactccggatgtttcacataaatgcggtcatgcgacacgtgatcttgtggctggcttctttcacttagcgccatgttttctagtttcacccgttttcagcatgtgtccgtccttttccttcttttcgaaacagttttattgagatgccgttcacataccatacggttcattcatgtaaagcatctgtaattcaattgcctttagaatatgcacagttacgtagccatcaccacaatacattttagaacattggtatcacctcaaattcctttttattgccaaataatattccactgtatggatataccacattgcatttatccactggtgggcattttcactcttagaatattataaataatgttgctatggatattcgtgcacgagttcttgtggggacatatgtcttcatttctttcaagtatataccctggaggtcaaagcagctgattggagatgaggaagccacactccaaggtcacttagggacagacgctggcagggctgatctgaagactggcagcaactcctttttatactccactctgcaagcgccagtctttatgcagagttctggaagaattcccctcactgagctagcaaggccatcaaactctgcgttcacctggatatctgagaaatccagcagttccagggcagaggctggattgtcctggacagacttgaggagaccaaagcagccttcacttcgcatgggattcctggacacctgagaaacacgcacacaaagctgcgagaagccaggtccgggaaggccagagagcaatgtgaaagggaaggaggggctcctcatctctgaggacacagccactatggccacactgtttcggctcagaaggtgtctccatcagatag

SEQ ID NO: 335988 - DNA, 1000 bp, Homo Sapiens
gtgggtgaaaatgacagatttattcaacttaaatggtcaccgaggctacagcagaaccaatgctgttacaataggcaagcactactgtcagcagcaacataccatttatttcttcaacagcatctgagcctcatgggttatgttttcattaaaaaaaaatataagccagttgggaagctgttaaaggccaattttaaatggcaatgtaaaacaaatttcactgaaaatacaattcaaatacaactgctatgagcactgtaagaaaaactgactagttactcagatataatagaaaagaccttaaatggtaaataaaacaatagcagcatttaaaaacctggtaactcccatttcagaagacgcccttcccctgcccagaccttcatgcctctgaacacctgcctagcctaggagaggcctattcaagcagggaggctactggtatctgcacacaacatgcagatgagctctacaccagccgagaggaacaaggcttcagtgcagttgtgtgctggggacagcaggactcgtgtttaagtgtcagaggcttagaggggtcagctctgaactagaagtctctcacatatctggtcctgcccttgagaaatcttgtcagtaatctcaacttagaacaactttctggaaaatgtgactagaaattaaacagctgggactcctgccacattatccaaaagtccaaatggatagtcactttgctccacagcccagggtccactttaaattctgctgttagccctcacctactgcaatcaggtggatacagctgcagccctggggacaggtcacttgaactggcagcagctaaatgaaatcctgcaacagcaccttcaaatcagccctcattcccaaaagatcaatagaggccagggctagagttaacttcaacaggcatgggatctcccagcctcatgtgcaagcaggcaagtatatcaggatatgcctttaattctcatcttgatgttttttaatagccagagat

SEQ ID NO: 335989 - DNA, 1000 bp, Homo Sapiens
gaatcttgtctctttacttagcctggttaaaagtttgtcaattttgtttagctttccagaaaaccaacttttcgtttaatcttgtgaggtttttatttcaattttgtttctgctacgatcttatttattttcttattttcggtttagtttgttctttactagttctttaagatgtattgtttacttgaagtttttcttttgtttggatggtaggcacttatagctgtaaatctctgcctttgtactgctttctgcataacaagttttggtatactgtgtgttcattaccctttgtttcatgaaatttttgaatttctgtcttagtatcttcattgacccgctagtcatttattcaggagggtagtgtttaacttccatgtgattgtattatttccaaaattacttttcttattgatacctatttttattcctttgtagtgaaagaagatggccacagagacagacagcagcgtggtcagagtggtaggagccggccatcagcgagagctgctccatgcctggctgctgggtgctagagtctgcggcccactggcttgcctcactgtggttggtggtggcggtgacagagactgcagcatgaccagagtggtaggacaggggctatccagggctgcacctttcgcagtgtggggtgggttgggggcgctatccagggtgtcattgcctgcattaggggtactagttggtagcactgtacagggctgcactgcccacggcagggaaggtgggttatgggtgctttctggggctgcaatgcccatggaggagaacaggttagggcactatcgggtatacgctactggcggcattgggggacagaggtggggggtgctattgagggcaggactagccgtggagtgggggacgagttcggtgctatcaggctgcactgctggtggcggtcaacagagttggcatccaaggaaggagtggttctcctctccctgactccacactccagagggcgacccactcttgg

SEQ ID NO: 335990 - DNA, 1000 bp, Homo Sapiens
atttaaagccactaattttatttaaagaagaaatacaattttaaacaaaatcccccagcgaataacctttctcctattttaccctttttcttaaaagatagtttttctttgttcacaacttcagtttaacagtcattttctctgagaaccagatgttagttaccttcttgcttccattgttgctgctgaacgtctgctttccattcaatttgagattaatctggcttttctcttcaagtccttttaagacttttcttttgactttggtattctgcgggttcactagagttgtctaaattttttaacctctgaattttatatactttgcttttcatatttgtgaactcgtgtttttcataagttgtagaaaagtctaagacattttcttgtctacaccattatttctagtgtgttttcctgcgacttcgactgggagtataccagcctttcttattctattctgcatacgtattaacttttcacacgcatccttgtctccctataccatatgtgggtactatgttagtccattttgcgttgctataaaataatacctgcagctgggtaattcataaagaaaagaggtttaattgactcacagttctgtagactatacaggaagcatggcaccagcatctgtttctggtaagggctcatgaagctcacaatcatgaccgaaggtgaagtgggagcagacctctcacatgacgagagagggagccagagagaggaaggaggtgctaggctcttttaaacaaccagatctcacgtgaactcagggtgaaaactcattcattattgggaagatggtactaagccactgatgagggatctacccccatgacgccaacaccttccactagccacaattccaacattgggaaacacatttcaacgtgagattttcaggggactaacatccaagccattattccctccctggcccctcagatctcacatccttctcacattacaaaatacaatcattccttcccaatgg

SEQ ID NO: 335991 - DNA, 1000 bp, Homo Sapiens
attttctcacatacataatttttattataggtttattacatttactgctcttttacatgaatggtatatcataaatacagcttaaaatttgtttgttattttcatttaacagatatcttgaacaaacttccatggtatatattatagctagaataacctcattctggaataatctatagtgtgaatgtaccataatttgcccaatcaagcagaactataatgtttggcatctgaatcagttgcaaagattgtaggttaattgcagttataaaaatagagcttggaaattgcaactgccccaagttcttcacggctcttatgcaaggctgtgtcctaaagccatagggaagtttagctttcagttgcctgtaacattaaggttgtttcatgattttttgaaggtttgtttcacaccattttcccccttaaatcatttaaccgaatggtatgtaacaggtgtagtttctaatgagttcttttcttcccctgtggctttagcatggcacattacacttctgtggatttaaagtccttgcccctcagatcagctttgctcctgaaattgcatccgaagaagaaagaaaggggatggtggctgcgtggtcccagaggctgcagaccatctggaaggaagagcccatcccctgcacagcccactggcacttcgggcaataactctgtggcacgtgggcatcacgtaagcagcacactaggaggcccaggcgcaggcaaagagaagatggtgctgtcatgaaataaaattacaacatagctacctggggatacttttttctttctgttttttgtttgtttttaattttagctttaaggagcacatggccagtactgtttcaggggaatattgtgtggcgctggggtttgggcttctattgatcccgtcacccaaacagtgaccatagttcccaatagatagtttttcaacacttcctttcctcccttccttcccgcttttggattcccagcatctattgatcccgtc

SEQ ID NO: 335992 - DNA, 1000 bp, Homo Sapiens; identical to SEQ ID NO: 157554

SEQ ID NO: 335993 - DNA, 1000 bp, Homo Sapiens
gagacagagtcttgctttgttacccaggctggagtgcagtgatatgaccacagctcactgcagcctagacttcctgggctcaaaggattctactacctcagcctcccgaatagctgggactaaagtcaggcaccatcatgcatatataaatacataatcgagatgagattttgccactttgcccagactggtctcaaactcctgggctctagcgatctgaccacctccacctcccaaaagtgctaggattacagacatgagccaccgcacctggccacattgatcttactttgagttctgattcccttcctcaatcttcctgcttccatttaattttttcaataaacgttttatttgtcagctttttatatttacagaaaagttgtgaagagagtcaatagagttcctatatatttcacacgttttccttattattaatattttatattgtgatgatacatttatcacaaatagcaaaccgattttatcttagtttttacctaattttttttttctgtttcaagatcccatacaggacatcacattacatttagttgtcacgtctctgtagtatcctcctttggttgcgacagtttctgcaaattttcctctttttaaaaattaccttacagttttgaggagtactagtcagatattttttatactgtccctcaattaggatttgtctgatgtttttaccatgattggactagagttatgagttttgggtagaatgactggagaggcgaaatgcccttctcatcacattatttcaaggctacatggtatcagtatggcttatcactggtgaagttaacactgatcccctggtaaatggagtataataaacaatggaaatacgtatcacaagaaaaagaagagcaccagatataaaattctaaattgatattctccccttctttaacaattgaagtatatgacttttgtcttaggcataatttttaaaaaatttttgtgggtatatattcatgaagtacat

SEQ ID NO: 335994 - DNA, 1000 bp, Homo Sapiens
ctcgttctgtgaagactgtcaatggtagtttaatgggaatagcattgaatctataaattgctttgggcagtatgcccattttaatactgattcttcctatccatgagcttggaatgtttttccatttttttgtgtgtcatctccgatttctttgagcggtggtttgtagttctccttgtagagatctttcacctccctagttagctgtattcctaggtattttattctttttgtagcaattgtgaatgggagttcattgctgatttggctgtcggctttactgttgctggtgtataggaatgctagtgatttttgcacattgattctgtaccctgagactttgctgaagttgtttatcagcttaagaggcctttgggctgagacaacggggttttctagatataggatcatgtcatctgcaagcagggataggttgacttcctcccttccaatttggatgccctttatttctttcacttgcctgattgccctggccagaacttccaatactatgttgaataggagtggtgagagagggcatccttgtcttgtgccggttttcaaggggaatgcttccagctgttgtccattcagtatgatgttggctgtgcgtttgtcacagatggctcttattattttgaggcatggtccttcaatacctagtttattgagagtttttaacatgaagcgatgttgaattttattaaaagccttttctgcatctattgagataatcatgtggtttttgtctttagttctgtttatgtgatgagtcacatttattgatctgcatatgttgaaccaaccttgcatcccagggaggaagccaacttgatcgtggtggataagctttttgatgtgctgctggattcagtttgccagcattttgttgaggatttttgcattgatgttcatgaaggatactggcctgaagttttcttttgttgttgtatctctgccaggttttggtttcaggatgatgctggcctcatagaatgag

SEQ ID NO: 335995 - DNA, 1000 bp, Homo Sapiens
aacacacgcttgcaggtcatttaatgaaaccaatccataactgttttttaaaaagaaaatgttatattgtagatgatgtgtactaggtaggtagccgtatggtggttgtgtctgtactgaatatgtacagatgttttttcttgtcatacttccctaaatacaataaaacagttgtcttcatagcatttacaatgcattaggtattataagtaatctagagatgatttaaagtatacaggattgcctagttataggcaaatacacttttctgtaaagcacttgagcaaaattatatattctcaaggggtgctggaaccaatcccctgagaataccaggaaatgactttattcaagagaaactgaaactacacaggttttaccacattctttacattcatagagtttccttttgagtaaattctttcatgtatctaaaacacacaaggactaataaatacttatccacactccttacagttataaggtcaccagtgtgtcataccctgtgccttccaaagactggaagagaaaggaaaggttccccatattcctaacatcactgtgtttttcttaaatgtgacttctttcatggtttctaacagtactggacgaatggaaggctttatcacattttttacattcatacaacttttctctgatgtgagtcctttcatgtctttgaaggggactgagacaataaaatactttccctcattctttactgcataggacttctctccagtgtgagttcttccatgtatttttaagtacttagaactactgaaggcttttccacgttctgcattcatagggtttctctccagtgtgaaccccttcatgactatgaaaggaactaaaacaatcaaatgctttcccacattccttacattcataaagtttctgtgaagtgtgggtacttttatgtttatgaaaggcactgggataagtgaatgttttcccacattccttacatttatacacctgctctccagtgtgaatt

SEQ ID NO: 335996 - DNA, 1000 bp, Homo Sapiens
actttaaaattgctatgattgtattgtacgttatttaatgtctgattgaaacacaaatttacatgcatgtttgttacaaaaaaaatgaaaaaaaaagtcacaatttgtcagctctgatttcaaattgcaattatttttaaggtgtataccatcgaagagaatgggtatttttttgtatgtattctggaagaaaacaacaaaaaaaaaaagaaaaagaaaaaattctattccaaaacctcatttgccttattttgttctttaaaaggaacacttaactatttttaatttttaagtccacccgctgagaaggggacaaggtttacgtcatgtactaaaataatagacaatgtatcgctttaaagattaaaattccgtatatttgatgtattaaagggttttacttcttcttcttatcttttttattttggttaaagagagcatggcagtttcggccgcagtgggttccggggcctcactgctactccttcttcccgggaccgtggccgaatttccgatcgctttgttgtgattttctgggaggcaaaggcgtcggaaggggctaccagccgcgaagttggccttggggaacatgtttttagaggatatttcaccatttggaaaatagtgtcctccgctatctatcatttcgtttttatttcaattttctcttggcagctggcttgttaaaagtgaaagggggtgtggggcgggggacagggtttttgttaaatttccctcctgagctttttgggcatttgggtttcgttttgtgcagagtggagcaggccgggactcgccggctgggcctgggccggggcctcggggacgtggggcagcgcgctggggcaagccgaatagactgggaggcggaggggcgctgggggaacctgtgtcccgggcctggggggagtacgcagggaccctctggtccctaggggagagtgcgtcctcttttcttcttctggctgcccagggccttctaaacgctccccgcaaccct

SEQ ID NO: 335997 - DNA, 1000 bp, Homo Sapiens
atttttcaaaaaaaggtttaattggctcatggttccgcaggctgtacaggaagcatagaagcatatgcttctggggaaaccttaaggagcttttacttgtggcaaaaggcaaagctggagcaggagtcttacatggcaggatcaggaccaagtgggggcgagatgcaacacacttttaaacaacaagatctcatgagaacttactcaccatcatgagaacagcagtgagagaatagtactaaaccagttatgaagaatcttccctcatgatccagtcacctcccaacatgccagtcttccccaacactggggattacaattcaacatgagatttgggtggggacacagatccaaaccatgtcattcagcccatcactactcccaaatctcatgtccttctcacatttcaaaatacaatcatgccttcccaagagtcccccaaagtcttaaatcatttcagcattagctcaaaagtcgaaagtccaaaggctgatctcagacaaggctagtctctttcacctatgagcctgtaaattcaaaaaacagttacttccaagatacaaggggagtacaagcattgggtaaacactcctgttccaaaaaagagaaagctgtaaaaagaaaggggctacagaccccatgcaaatctgaaaccagcagggaagtcattaaatcttaaagctgcaaaataacctcatttgactttctatgtttcacaaccaggcatactgatggaaggggtgggttcccaaggccttttcagttccacccctgtagctttgcagggttcatttcccacagcttctctcaagggctgacattgagtgcctgcagcttttccaggtgcatggtgcaagctgccagaggatctgtcattctggggtctgcatgatgacagctctcttctcacagctccactaggcagtgccccagtggggactctgtgtaggggttccaactccacattttccctttgcactgccctagtagaggttctctg

SEQ ID NO: 335998 - DNA, 1000 bp, Homo Sapiens
tttttttttttttttttttgcttggtagatcttcctccatccttttattttgagcctatgtgtgtctctgcacgtgagatgggtttcctgaatacagcacactgatgggtcttgactctttatccaatttgccagtctgtgtcttttaattgcagaatttagtccacttacatttaaagttaatattgttatgtgtgaatttgatcctgtcattatgatgttagctggtgattttgctcgttagttgatgcagtttcttcctagtctcgatggtctttacattttggcatgattttgcagcagctggtaccggttgttcctttccatgtttagcgcttccttcaggagctcttttagggcaggcctggtggtgacaaaatcggtcagcatttgcttgtctgtaaagtattttatttctccttcacttatgaagcttagtttggctggatatgaaattctgggttgaaaattcttttctttaagaatgttgaatattggcccccactctcttctggcttgtagggtttctgccaagagatccgctgttagtctgatgggcttccctttgagggtaacccgacctttctctctggctgcccttaacattttttccttcatttcaactttggtgaatctgacaattatgtgtcttggagttgctcttctcgaggagtatctttgtggcgttctctgtatttcctgaatctgaacgttggcctgccttgctagattggggaagttctcctggataatatcctgcagagtgttttccaacttggttccattctccgcatcactttcaggtacaccaatcagacgtagatttggtcttttcacatagtcccatatttcttggaggctttgctcatttctttttattcttttttctctaaacttcccttcttgcttcatttcattcatttcatcttccattgctgataccctttcttccagttgatcgcatcggctcctgaggcttctgcattcttcacgtagttct

SEQ ID NO: 335999 - DNA, 1000 bp, Homo Sapiens
ttttttttttttttttttttgcaggtatatgaaagcatttattatatcccaaaagataaatttataatatattacacatgaaaaactaacaaagctcaactttgtaggacagcttcttagaaaaaaattttttttttctttttttttttaagacagggtcttgctctgttgtcccagactggagtgcagtggcgcagtcacagctcactgcagcctcaacctcctgaggctcagatgatccatctcagcctctggagtagctgggactacaggcatgtgccaccatgcccaactaatttttttagtttttatagagatggggtcttgctttgttgctcaggctggtctcaaactcctggtttcaagcagtcttcctgccttggcttcccaaagtgctgggattaaaggtgtgagccactgcacccagcctcttcttagaatttaattttaaattatgatgaatgtacaacattccattattccagtataagcctctgtctgtttgaatgaggttaacgacagttctttagggttaaaataagattctgtagtagtcatctctatagctgtacagaaatagcacagacacctttttttctactttgatgttataaatttcatcacagactaatttgaggtatctttgctttggcaggcgtgacagcagctgcttcacagttgtgttaaatgcctgttcatcagcatcccactctaatgataaaaactgtaatattgtttctttgggtagatccacagccagaatttcaatttcactgcttttctgatgtaagttggcaagggaggtctgaagtcgagtttgtacctgagtttcatagcgcctcctagtgctggctgacagcttctccggggctagcacactcacaatgggaaccactgttgctccatggatttcaaacaaacctgaagcattagaaaatgaccccttcagattttgcactgcaagattatcggaagcttctctgccattcctttcatcagt

SEQ ID NO: 336000 - DNA, 1000 bp, Homo Sapiens
aacaagagaaaagaacagatttaattatatacatatgcgtgggcattcacaaagaaatgtgactctctgaggtggttagcatttggagcctgtgtaacatcttaacaaagagccataaattgtggagatgtggccagcatggtggctcatgtctgtaatcccagcactttgggaggccaaggcgggaggatcacgaggtcaggagattgagagaagcctgaccaacatggtgaaaccccatctctactaaaaatacaaaaattatctgggcatggtggcacatgcctgtaatcccagctactcaggaggctgaggctggagaatcacttgaacccgggaggcggaggttgcagtgagtcgagatcgtgtcactgcactccagcctgggtgacagagcaagactctgtttcaaaaaaaataaaaaaattgtggagacatgacaagacaaaggaaaaatgttttgagcttctagggatggcaaatgtggaaagggatacatacgggggaaataatggaagataagggttgttaaaggttatgactattcaggttggtgccatctccggtgatgagttgtggcttctttctggtacaggagaggggaggaggaatccttcacaaaaatgaatttctgggccaggcaccgtggctcatgcctgtaatcccagcactttgggaggccgaggcaggtgttgaaggaggaagtcaggagttcaagaccagcctggccaacacggcgaaaccccgtctctactaaaaatacaaaaattagccgagtgcggtggtgcatgcctgtcatcccagctacttggggatctgaggcatgaggatctcttgaaccgaggaggctgaaattgcagtgagccaagatcgctccactgcactccagcctgggtgacagagtgagactctgtctcaaaaaaaaaaaaagataaatttctgccctcccttgaggcagatgggagcatggggagtagagagctttttctgcatctggctg

SEQ ID NO: 336001 - DNA, 1000 bp, Homo Sapiens
gaaacggagtctcgcactgtggcctgggctggagtgcaatagcgcgatctcagctcattgcaacctccacctcccaggttcaagcgattctcctgcctcagcctcccgagcatctgggaatacaggcacacgccaccacgcctggccaattttctgtatttttagtagagacgggatttcactatgttggccaggctgggctcgaactcctgacctcatgatctgcccaccttggcctcccaaagtgctgagattacaggcgtgagccactgtgcctggcagtgtgtctggtttttcaaaacaagccaagaatcgggacatgtaatgcaaaatctggttgttaaatgcatgcaaagaatgaaaatatttaaaacacgctgcacaggcatttgggggccaccagtttgggacctcaagtctaaaagccctatatgcccttagggtctgggtgttctgactcctggcgggatgcaggttgaggggccgtggaagtgaccgggagggaggacaggcctggttttgagttgtatgtttcctgctgatctgctgtgtgaccttgggtgagtctcagacctctctgatctgtaccacaggggatggggacggggcaggactcaggggttagggttgagggtgtcgtcctcaccgagctcttcctccgtcatgggcaggaagtgatccaccagctcctctgatttttccagtacaacatccacagcatggctcacggagcgcttcagctccacgctccagcgccggcccctccgggccaggtccaccacacccgtgacactgctggccaccacgtccttggctgaggtcaccacctggaaggaagggcccccccactccaggcaccgtgggactccagctccatttctgccaccctagttccctggggctgggactcaaagatccctggacttctacctggctccgtgcctcagtttcccctataaaatgggtgataaaacccttccctcacagagggtgttgaggg

SEQ ID NO: 336002 - DNA, 1000 bp, Homo Sapiens
acataatgacttttattgtgtctcttccttctgtgtttctctttcctaactgaactttgttctttatccatgccttcttccaatcctgacatattttaaaacctttagcatttctgcctataatatttgggttttcttcttttcctatctttatttgataagtcccatcaaatattttccccataatcacaatgttttcttttcactttgctcaagaactgagttatgagctccaaatttggacaaactctacattggctaagttttagtcatttgcactgctaagaaagatgacaattcagcatgctgaagatgatatcctcccttataaaggggctaacacagagggcaatactgttcgtgcttctgagtcttgatcacaagaattgctttaggcaattacaatcatgtctcctctgacatatcatattagtcaagtgagacagagaaagaatatgtcctatgtcacacagctgggtggtgacagctgctttagcatcagcacactgcgttccctctgatttcttcattcatctcaaagtagcagtaaagccggtcctgaatactgactttgacactcagctttctccacatccttcctgtcactgcctttgagactacttcagattcttcccttaacttctatttctccatttgtaaaattgggttgatgagggtatcttccttcggtagctgggtttccttccagtgagccacagatagaagtcatagatgatggcaggggcctgctggctgatggcattccagtactgggttctgaagttgctggtggtgaaatcagcatatggcctcgtcaaagctctctcaaatggaattggaatttcaaaggttgccaagacctggaaacccattttgccccggttgcagggattgaggttaccagatgtacagtggtagactaacactgacttaggttgtttttttttcctttgtaccaggaaacttccccacacatagtgattgaacacttttggcatta

SEQ ID NO: 336003 - DNA, 1000 bp, Homo Sapiens
cccagcattgcatttttaatggacgctctcaacattacttcattaagaactttttccaggagctccgagggccaagggggttgggggagactaaacagctattcagcaaagcctctctccaaacttcagctggggcctgggaggaccggaatctggacgggttttcacaaacggagatgaggccgagagcagccaactgcgaccactcaagagagggccttctgtacgctcagcaccgtcctaaagaccttgcgtatattaactcttaaacctatagccactctacaaggggtgcactattgtaactcccattttacaaaccgcaaaactgaggtacacagcggctgagtaccttgcttgccaaggtcaccaactagaaagtggcaaggcgggaaaaatgtcttcagagagttcggactccgagctttcaaccaccaagccactaactttgaccctgttggcccgctgatggtttaactggctaatgggggcatcttggagaaaaagctaattcccataactatggggatgtgaaacggcttttctggcctttttgggaaagtagctatcagattcaataaaaagggctgccttccatcctgcttagcccggccctgcccgcctccctgggaaaggggacttcgaagatctcaaagaagctggaaaggaaaccagcgctaaggaaccagatcgcttcgagggtgcaagcatgtgcaggcgcgagtgtgtgccaaggggctccctggcctccgacttgcatccagggaagagctccctcgagtctcacgcttctccaagactcaaatcctggacgggagcgtgggaaggagcaggttggccaggcctcggatgaaaccactaagctctctccccttctccgctcccagagcagccgacctcatcttcagaagccagatcgggtcggccaagttgtgtggtcgccgctcgcgttttagaggggacaactcgttgggggagaagggggcgtgcgagtgcagga

SEQ ID NO: 336004 - DNA, 1000 bp, Homo Sapiens
aaaatgttggtattataattcctcaggataaaacttactttgtgattgttttctataactcaagatatgatgcttagagctcctccaatcaagtgtttccaggaagtgaaaacttgtaggacagaaatttaggctgggttcatttgtatcacacagacctattcttcattcaagttctgatatatttaactatgtagctcctgtaacagtttaatggaatctcacctccctaaaattcattatgcattttttttgaaatccaaactcattaacgcttgctttcactgttgtccaaggcaggcacatctttaaaaatggtttgttggacttagctttcagctaaatatataataaataaaacaaaacaagcagttaaatgaaatgtaatgggccagagagcttcagcttttatttccttactgctcagtaaaaagagaaaaccatcaatgtccacgtattctgtaatccacagaacaagtccggggctacagctacactgtccacagttgcaattcaaattagataaaaaataaaaattcagttctttagtcataccagccacttttccaatgctcaagattcataaaatgtcaaaccataaagacatttacatgtcgctcactccatttacttaaggtcggctagacatcagagtatactaggagctcaggagtacaagacactattccttcaaaaagctcagaatagttaaggtaatttaaatcagcaatgacaacaaccccagaattactatgacccacgcagtacaaactgctcaggagtcagaagaaaactgcttttttaaaagggcagtttgggtcatagaacaacagaccatggaaggcatgaccaaaggggagatgacatttgaatctgcaggattaaaagcagcaagggtagcattccaaaaagaaccaccccacaaagatatatgacgtctctatgatttggataactgcaattcattccatgtgacttcaggagagaggtcatatttgtg

SEQ ID NO: 336005 - DNA, 1000 bp, Homo Sapiens
atgtttcacaatttgtatggctgattctacgcacatttaaatgtgtttatgacaattgtagatttcggttttcctctggttaaaccaatgtggaagtacacaggatgggagctgagagacaagcatcctgggcccagccatgctggcctcagtgggccaagctggggacagatgacctctgctccgtggatcctgctggctcagggtggggaaggggcctcaggagaggagtcaggctctcttctttattctcctcacagccatggtgaatggcattcctgggaggctggtttggagaactcgctgaaccatgctctgcatccagtctaggtggctcctagcggggcttggtgggttctccatcctcagcaccatctgcagcaccatcttggtcatctgagaagctgagagaaacacaaggtaaatgttcctgtcctcatttctgcctcccaaccccactgctgctgctcaatgtccccagtatctctctgcagactcctgtgtgccctcaaaagtctacacggtaccagtcaagagacatccatactgcaagatgatagaaaggtaagtggaacccaaccacctcattctctaccctcatgtctaccacggacagctgaacctctccctgtggaacctggaaaagtagctcagagaggagtagcaggtggcaaggaacatcagggaaacaaagctagagggagcatgtaggcacctttgacctgaaatagacaagatgcaagatctcaggattgtcagggaccttaggaaccatctaggccacatcccggctttggcctgcagtgcaggcaaagggtttgcctctgccagccatcgcatccagctttgctgtaggtggaatcgggcctgtatgtgagttaccggggttgcagaggacactgtggtctgggtggcagtctggtgccacatggcagaattcatcacagtagcaacttcccctcttgcagcggtgatccgtcccaagacagcaaaggttctg

SEQ ID NO: 336006 - DNA, 1000 bp, Homo Sapiens
gagacagattcttactctgtcgcccaggctgaagcgcagcggcacgatctcagctcactgcaacctctgcctcctgggttcaagcaattctcctgcctcagtgagccaagatcgagccaccgcgctccagcctgggcgacagagggagactcacgcctgtaatcccagcaccccgggaggccaaggcgggcagatcacctgaggtcagcagtttgcaaccagcctggccaacacggacaaatccatctctactaaaaatacaaaaatcagccaggcgtggtgatgggcgcctgcaatcccagccacctgggaggccgaggcagaactgcctgaacccgggaggcggaggttgcagcgagccgagatcccgccactgcactccagcctcccgggcccacgccattctcctgcctcagcctccctagcagctgtgactacaggcacacgcagccacgcccggccaatttttgcattctcagcagagacggggtttcaccgtgttagccaggatggtctcaatctcccgaccctgtgatccgcccgcctcggcctcccaaagcgctgggaccacaggcgtgagccaccacacccggcctctccaagtattttcaaaccaaatttttattattagtataaccttctggtcctatggtttaactatgcagaactttgtatcaactattatagtagcaaaatatatgtgaaatgggctagcacattgcttgatggatagcaaccacccaagtactttttggactgagtacccaaaaaaatgtaagaaagtcctctgccctttctctggaaattacatctgtttttcctatagcattttattattttctaggaagaaactcaaacttaaattgctcactcaagattcacatgtggcatgactggcgggtctgtgaggtacatcatcaacagtaacagagttaaaacttgtgaagcaggctgggtgtggtggctcacacccataatcccagcgccctgggattacagg

SEQ ID NO: 336007 - DNA, 1000 bp, Homo Sapiens
gtctctacctggtgattgcgaatgattttaatttttttcctcttgtgcttacagtattttctaaaatctctaaaatacacccaaattactttcttgttatggcaaaatagacataaaatgtctacatccattttaaccatttttaagtgcagagttccatagtatgaagtacattctcactgttgtgcagccatcaccaccatccatctccagaactttttcatcaccctcaacataaactctgcatccactaagcagtatctccctgttcttcctccttccagcccctggcaaccatccttctactttctgtctctatgaatttcactattctaggtacctcatataagtgggatcatctggtatttttccttctgtgtctggcttatttcacttagcataatgtttttaaggttcatctatgttataacatgtaccagaatttcattcctttttaaagctgaattatgttccattgtacatattcaccatattttgtttatccactcctcttgtcatggacatctgggttgtttccaccttttggctattgtgaataatactgctacaaacactggtgtacaaatatcactttgagtccctgctttcaattcttttgggtatattcctagaagtggaactgcgggatcatatgataactaagtttttgaggaaccaccacattgttttcaacaaaggctgcatgattttacgttcccaatagcaatgcacaagggtatctatttcttcacatccttgccaacacttattttcaggttgtttttgttgttttaaaatagccatcctaacagatgtgaagtggtatcttacttattatggttttcatttgcatttccctaatctaaattacgttttaaaatccaatcctctctgaattgaaccctttgttctttatttctcaataaaatggaccttgccccctttttttccttctttgtacctatgctctgcattttaaaaaattgtggcaaaatacata

SEQ ID NO: 336008 - DNA, 1000 bp, Homo Sapiens
acaaatccacatttatttattgatttttcgttagtttaaatccttgaggggtacagcatcactcggattctgtgtccaatggccttagcaggaagattgcttcggaatttggcacgaaccatgccactgtttccatgggcccgagttacttttctgaaaaatctcgtcccacattataaaacaccattactagcatgtgcttgtcttttcttacaaaactttcatcaatactgcaagttaaactatggcaaaacatttacaataaagaatatcatatatagtataagggagatgatgctattgctgtgctcatctcacatcaatgaatttgaaaactgtgatggtgtatgtttaaggaaagatgctgtcagaggatttatgaggctcccttcagcagctgctgctctagagcatggagagatgcattctttttcctggctttggaggatgtatataagatgggaaaagaaagtctagcggatgtgacaaaagtttcagggatagcccccaaaacatatttcagagatgctaggaggttagggctatacctttatccagagtccatccaagggattcctccaccataatgtggaaagttgcctctccttttctcctttcttcctcatactttcattatttgagtcaccttactgctctctggatactgtatccctacaaaatcattattctcttaagtggtcacaacatgctgcagccctagccaacctggtggtttgctattcctttatgtgactcaaactttttagcactaacagcgctggccaccacagttaccctaattatctaaaattcttttgacattgcttgtctctcctataatcaattcctgatccagggataattctcctttattttctacccccttcagaaggaagaaggttttgaagggtcaggaatagggcttctctgggtgctttgttttgtggcactaggttgattgcttcctggagcctttgccaatccacaaagcaatcagcag

SEQ ID NO: 336009 - DNA, 1000 bp, Homo Sapiens; identical to SEQ ID NO: 157555

SEQ ID NO: 336010 - DNA, 1000 bp, Homo Sapiens
tttttttttttttttttttttttttttttttttttttttttttttttttttaaatgatatggacttctttatgcatacttatgaagtacgtgcacctttagaagtaagacacacagtccagacacgggaaaatataagattgattaaaatgtataaaaaccaaatatcagaacgaaaatataaatatggcattaaaatagaaacaatacatactccgctatgacaaacagtgaaaaagctcaagtgaactgccaaaaatattgttacctatagtgtcagggagaaaagaggaacgagaaatctacaatggaagctaaaatcttcaaatgcatcatcttttataattttggcttcagtttcatgtaaatgttttatatatacaaaacagatatgaagcaaaacaaagtaatacaacaaaattccaaaatgtgaaaaagagaactgaacaattaaactagctgtatgaatgttggcatgaacatatagagaaaaattatatcaaatgattttgtggaaaaagtattctgattatgtacccaaaaaggaaagaaagagagagaaaagcaaggaaggaaggaaggaaaacaaggaaggagaatggatggaaggaaacaagggaggaagggaggaaaggatggatggagggagggagttagggagggagagaaaaataaaaacaagcaaagaagtaagaaaagagagagagaataaaagggagggcagagggagaccatgttcaactgcatacctgggcctagtgttttagtggtcattatagtattgcttatgttgttatagacataaggaataagcaccactctcagctgtgatctctggaccatgagtggatacatgattcagtataaatacccttcccatttgctgtccaaaatatctcgcttcacagctggaccctagttgtacctgtgtgtcataggaagcagagtgagtgggcctcccccatgtcctaggagagctgagagaaccttgctctcagcca

SEQ ID NO: 336011 - DNA, 1000 bp, Homo Sapiens
ttttttttttttttttggtagagacagggtctcactatgttgcccaagctggtctcaaactcctgggctcaaaggatcctcccacctcagcctcccaaagtgttgggcttacaggcgtgaaccaccaaccccagcccacttgtaggtcctatgcacaacagccagagttatctctgtgtatgtcaccttgctctccacaaagaaggacagcagaagctggaagaaagtcctctgggcacctgggctctggcgttgctctcttccacccatcgttcttatctcgcactcagggtagaaaagtttccagtacagaaattcacccacagcagaggccaggcctcaattagaggcctacacaatggggtagacgctctcacagtccacgtccatcagcaccccttccatgttcttaaggataagtatcagtaatctgacggcctccactgccacactgtactctctgtccatgatcatggaaaccatccagtccttgaagcggccagtgaagagctccaggcgtgcggtcaggtcccggttaccgtacagccctttcagagccttcacgcacttcacgcggacttctcggtgcttatcatgcagagtccaaccaatatattttaaatagctgtcggtgaggaaagacgtgctgtagctttgcatccaacacccaatttcctcaatgcagatagcacggatctcaggaaggacatccctgcatgtcacttttggcagctttcgcagcattgaaaagatcattggctggtggctctgactgtttccggctatgacgatgtaccgcttgggaccctttctttggatattttgccaccggcgttgttttcagtggtcgttttgctgctttcttcttcacaccgcgattgaagctgtcctcaaatcattttcttgtcttcttgtctgcaagtggccagtgccaagtgctgggccgccgctcctgccgtgcatgttggggagccagtacatgcaggtgggctccacacgg

SEQ ID NO: 336012 - DNA, 1000 bp, Homo Sapiens
agtagaattctcaatgttgtgagttcttccagctttcaagggctacagttgagatctcgatggtgttagaggatcatcaccctctgcttcatcttcacgatgtctgcggtgccataaattgccaataaaactctggacactctggcctgatttaggcttgcgttcctcttctacctttttctttcccaatttggggaacttaattttcagcctgaggcttctactgtcagtgtccgaagatttttcctctggaacaaagattggattcatccagtcaatctcagatagctttttgaactccttattcatggcatccagggcgctttgtagtgcagtctcatcctcagcacttctcagcagcttttcatccaggaaagctgtggtgtcatcgtagagacctttaagactaaatgtaacatctacggcatcatttctgcttagagtttcaatgggaatacaggaagctgcacccatctcattgccactgtcttggccgtaaaatatatcattcaggatgttagcgctggcattcacagaacccatgaggacagacacatgctggtggatcttgctcaggtcattaagtttgctgatgaggttttctgcaagccgagctaagtgctgcatctgggcatactcctcgtcagagaggctctcttgagagtcctggaagtccagctggggttgaggggcagcttgaatttcagtatgcttgtattcccacattttcattgagttctcaaagtcccgatctcttgtcagcatctgggcagcgttcttgtatctaattttgataaggcctggtctctgaatccaggcctccccatccacctgcactgggataccttcttcaccatcaatggttatcatcacctcatggcactgggcaatgcgatgatgatgcaggttgatgatacgggacattgccatctgcacagaaccaaagattgccaccacctccagtttcccatcatcgattgcaggagcctcatattccgtg

SEQ ID NO: 336013 - DNA, 1000 bp, Homo Sapiens
tttttaaacacattgcattttattacataaaagtacaaatagtaaaatgatatactactaattcactttaattttaactaagattaaaaatggttttctcttactataatgcagaagaatattgctctgaaaacctacttcatggatcactcaatattataagttaaacacaaacagcctcttcactcaggttttcatcatgcatcttacattttaatgtccttattctttcatagaaagtgtcataaataataccgacctaacagaaatgatttctcatatctttgatgcatgaaaaattaatcacatgctttcacatgtgaatacaataggaatgaagagcatgaatttgagttgaattacatcatttgcttttcaaaaactaatttttcaagaaaaaatataatttgaatgtaattatacatctacaaaaaaattctacttcttttaaagttatatacacattatttacctaccaactttagttttaaattattttctatactcagcattctgattctatactcagcaatgtctgaagtgtcagtaccttagatatttctactgtgaattctctgatatttatatagacttaattttggattaaattatttttatatttacttcacttgcaaaaatatattttagtatgaggcctctggtattttctaagctgtagttttttaaaaaatgttttcacaaatgcattacatttacagtgcttttctccaatataaattttctggtgttgaacaacatttgagcaactgcttcatggttttcctctagtgcaaaatgggtacaaaagtatctgtgatacaagtaaaggtactacaaccctcttcgtatttgtattgtttgtcctcacaatgaatactctttttttgttttgtttttgagacgaagtttttgctcttgttgctttggctggagtgtagtggtgtgatttcagctcactgcaatcttcgcctcccaggtttgagcaattctcctgcttcag

SEQ ID NO: 336014 - DNA, 1000 bp, Homo Sapiens
tttttttttttttttttttttttttttttttttttcctttgagttttttaataaaataatctcatgcggcaggagaggagaggatcagggattggggccgccgcctctttggtctgtggctggggagggtgggctccgctcagggctggagggctctgtgggctgtgggggcagaggctcggttccaaggccagatcctaggcttggggatggaggtgcctcgagttttggcctgcgtttgaggacgggggagcgctgcagcctcaggggccgttcagcaggggcctggagctggtcctcatgcacagacactgctcgccgccctgccgagagaggcctcggcctcagctggccatcttcatttctggggcccaagcaagggtcctctgggaggcccaggctgtctggggaggggctggttctgcagggacttgggctttgaccaggggagggagggcctggaccatcctgttggccccaaccacggctcctgagctccgcattcaactgctgccccagtgtcttccaggtggcagactcaggcccctggctccctgggccaggtctgcaggaagggtcagcagacacagagtgggtgcgggacttgatcgagatgggaggggcctccgtggaactgtccataatgtcaccatctgagccagctttcttgatctcgccatctttgctttgcttcctcttgccttcggcacccccgctgcctcggctgacgcctatcctctgcagcattacttgtacccgctgttcaaaggatggagccagttctgtttctccccgctccaggggccgccgcttgtcgggtctggcacccagcgttgcctcctcctcggcaggcagcagtatcatcgagtaggccttgctatctcttgtgtagcgaggtcggctcctgccggcagggtcagggctgctggtgtccccctcagccccaccaagctcctcaccacggctgggacgggttggcggccgcagtaggtcgccaaat

SEQ ID NO: 336015 - DNA, 1000 bp, Homo Sapiens
ttttttttttttttttttttttttacaaagcactttgaggcagtttaatctcactttatcctcataacaagtctgtgaggtagatagggcaggcatcattattcccagcgggaagctgtggctcagaaaggttgacttggggtctaaaaactagtacaggcatctggtttgaattaagacctgtaaacgctagtacggagcagagaagctgagcactggctttgaaagttattcagttcccaggttgtccctgatcttcctcattccttgtgcagtcttcaggagtccggggcaagattccatgcagaggcagccaaagccacaccgttctctgtcccagggctgccagcatggctctgaggaggaaagctcagtaactgcccactggggaataaaggtcagttccatccttctgcagtgacctcccccagaatatcaaccctttggatgcattatttcagaagagatggttggatccagccagcttgcaacactgacagtcacacagagatatgcataccattgcgcataaatacacatctgcaacatgctgggcccagacaggtcaccatgccaaaaacactccacggacacctgacaatgagtgagttcacattgtggaagcccagggatttctggtgaggaggaagagccctggagctgcggcatcttgggggcctctcaagaaaccaaggttcctgaccagactgcttagaggagaaagattcagccctcgactcaagagaggagggcaggcgtcagcagcttttcctggcaatgtggagaagcagcaagagggcagagggcgaggaagacttcacagcaagtcccctccacccagggtcaccaggtgcaccgagaggtctcagcctacagaaaggttttttgctcgttgcttcttaaccactaatgatggcataaaggtcttccggtgggggcggcactgaggcctttcagggaggtccctggactcgatcctggggtcagagccatcaggagg

SEQ ID NO: 336016 - DNA, 1000 bp, Homo Sapiens; identical to SEQ ID NO: 157557

SEQ ID NO: 336017 - DNA, 1000 bp, Homo Sapiens
ttttgcattttcaacaacttgctcaatatttttaatatttcatcacaaaatccagagatgtacatataattctttacacttattttacagaatcaggcatagtttcttacaggcctaaatcctgaaaaggcaaagggaagattcagcataaatacaacaaagggagaataaagactggatttatattgccatttggaccacggaaacatacacaaaggaaaatgtacatttgttttaggttttccagagttcatttggtttggcttgtttccacaatgaggataaagtactgaaatctgctatttgaagaaagtaacctgacccctgtggtaacttctgtgtgcaggaaccatctaccctcgcacaagctgcacctgaagtggttagccccatttagttcctgtcctctcttttaactggaaccaaaccaaaccaaacaaatccagaatggggtcacctacaagcaatatagttagaaatattaaccctgatgaacagaaacaacactgcatctttagaaaatccaaaaccttttgttcatattcagaacgattaaattaaaccacccaagtagaacaaataattcacattcttactgagttaaatcaagtttgatttcaggcagcttttaagatttgtctatttccccttcagaattagcagaattagaaattttggtctgcttaaatcacattgaggtgaaaataaaagctaaaagtcagaaaatggtagtgaaatactaccatatcagacatgattgaattccaaagccatatactgatcaaaaaacagattatcattcaagtctaaatagaaaaaaatacttatgagtagaggcatatgtttttcaaatgtatttgtaatcaatttcaggtataatttgtgacaatttatgtattacacttttgcattttcccctaaaagtgaaaaaatggtcatttttttccatatataaaatagtattcgattatttaaaaatccatacaaatgatatttatta

SEQ ID NO: 336018 - DNA, 636 bp, Homo Sapiens
ttttttttttttttttttttaaggttttttggctgtaagtttattcaatgcaaaagaatcctctccaattttactgaggtggctgaccacgtccacgaccaaatccgcctctaaactggaattcggttgctgacccagccccagcctcggctttcttgtcggcaccaggtggcacagcactccgtctgtaggtatctctgtcagcttcccctcttgtgagtctcgcaggtcgctcaccctccagacctttaggccgaggcctgccagtctctggacggctacggcgtagggtggcaggcacaatctccgggggcagatgaaggtaatcacggagatactggataccctcattggtaaggtaccagtagaaatgtctccaggcaaactgttccttcacgtagcctcgggacttgagagactgcatggccttcatgacatgaaggttgggcacattcttgtctgccagctccgggtgcttaggcatgtggacatccttcttggccaccatgactccctccttaaaaaggagttcataaatggcaatccggttcttcttaggcatcaacatctctgcggctgcagggtccggtaccggggctggaaaggaaggagcatgcgcggtgctgcgtctcttcc

SEQ ID NO: 336019 - DNA, 1000 bp, Homo Sapiens
tttttttttttttttttcccgagaaaaaccaatttaatgcttctgttctcagcatttcacagcatgcaggactcaaatggatacaacagaagaaaaaaacccacaatttttggaaaagcctttgtccaatgattaatattttgatatctattgacaatcccttagaactttaaatctcaaaaacaaaaaagtactgtggatctccatagtttatacagaattatgtgaattctataaacttttctgaacaaaacaattacatgtcaagaatccatgaagcctggaagatacgctcacgtttttgaggtttgtattaatgccagtttttattgtattagacaaatgctctctgagaatcgaagacttctaaaggtagacaggcccagtttcccattagagttctggaagcagagcctggggaaggtctgtcacttgcccatcactggaccagccagaagccagcgggggccaggcggggtctgcaggctgcaggtcccttccagtcctgtccctgctgccctctgtgaccatctctgctaagaaacatcgacagttcgtcctgcagcctccaagcacactaacctcagccatcagatgttcctgaagcccagggtaagtcctgttctcagaagccaacccagctgcttgtctgggccatgctctctcacaccgcagctaggtcatctgcggcgactctcctctgtgctgggcagcagctccagctggtccacgtcctgcacagtgctgcaggggggcagcaaggcacgcctgtgacatgagagtctcggcacgtgaggtagggtcaacagtgatgtccacaactcaataccagccctccacacctcggcagcactcgtgggtcctcctcaaccaggcggacacgagaaacagatgataacatggtgcaaggacagacttcagctcaccaatcagatgaaggttttggggttgggttttttcagacaacgatgtacattttagcttccaaatgtgcacaggg

SEQ ID NO: 336020 - DNA, 1000 bp, Homo Sapiens; identical to SEQ ID NO: 157559

SEQ ID NO: 336021 - DNA, 1000 bp, Homo Sapiens
atctctcgccatttgattcaggttctaattcctactcgtttattgtaaaaatcctggagaaagctcattgatgtaacaataaaatatgaatttttccctttaatgcagccctgtaaaacacattctcaaacctcatgtcatccaatataccttttgtattttttcttataattcatgtgtatgaatgcatagagctgccatttttaaatgaaaaaatacagaatttcacggtctttttttattatggtaataacaagttctagtttataataatatatagtacttttttgggactaggagcaatgatatactgctttttagtaactggtaaatagtatgtttttgtctatttgaactagaaatgagaaggagaaaaaagaaactatttttaatatatataaaacatactctatttaataaagtatatgcataaaatgatacattaggtaagaagcaaaattataaagaaaacagcttataatattcctgattaattagagtttctaaatataaaaacaaatgaaagtgacttgccatttacaaaattagcacatcatacaacttttacatacttcggaggaaataaagatcttgcgacactgttctgaggaatcgttgcatttataaaaatcgaaggcttaattttgcaaatacaactttcaagccgtatgagcaaattcaacttacatgaaaggcacaagataacatcatgttgaagaactttatccgtaaatttcataaagtctagtcacaagttattggaaacttcgtaaggaatctcagaactgtttttaacatgatgttccgatttaaactgagaactgcatagtctttatatcacaaatgtaaattgaagtaagagtgaagatttagagagagaatagtttcttattttggatgctacctgctttaggcagtgttggttactaaatactcagagcagaaaattaaaattgaatcgtttttcattttctacagcttatctgctgtgttttcagtt

SEQ ID NO: 336022 - DNA, 1000 bp, Homo Sapiens
tttttttttttttttttttttttgacaaccaacactctataaatttattaccaaatataacctatgcacaaacacagctaagctaatgagattagcaaagtagcagcacaaaaggtaaggaaaaacacatttaataaatacaacttggaaacgtctttttctttaaattaggttcaaatactgggagacaaacactgaaacaaaagtcttaacaacgcacttacaagccatcataacatgcagtgatcctgcgagacactgtgtccactcacagccatgttaactgggggccactccctgctgccgtaccatcatatgaatatacatttgtcagtaaaaatgtgacaaaaatgtgatgtttttccaggtttgtgtgttttcataaagttactcaggtttttagagaatgaacataggaacatgtaggatccacaatttttaatgtcatcaggttagtttgtatttacaaaactctaagaaaatagatgtgtgttatgtttggaactgctgctttgaatgcaatacatccaaataatgaagctgaccataacaaagacgggaaaagtaattcagacatttcacagaggccttatttggaatacaaacactttgctagagaaagaaagatggaatattttaaacaatttcaagattaaaaagaaaagttaatgggaggagggcaacagcaggagggaaggatgtgcttaaaagaaacaaatctgcatagatgatgaactgaatttaattcaattcattcctgcctaaaactaagcctggttaactgaggtagactctgggaattacacgtgcaaagagtcaggttttccaaagggcgatattttgtcatttcagatatggtaaagtaaaagtgcattttatagtttcgaacaatcaaatgggagtccttttataagagggaaacttctctatacaaattccctatttttttgtgtcaaatttccatatgtacaaaaacctacacactgttggtaataaagca

SEQ ID NO: 336023 - DNA, 1000 bp, Homo Sapiens; identical to SEQ ID NO: 157560

SEQ ID NO: 336024 - DNA, 1000 bp, Homo Sapiens
tttttttttttttttttttttcgtggtccaaaagcatatttgttcttcagagacacggatgagctgggacagaaaataggggaagacaacaggccaaggccactctgtgttacttttcctgaagtcagaatcagttgaggcacacactggggcctgcaggcatcgagtgagccgcgtggaggaacatgttgtgtctgccgtttttgaatacccagggtgggagcttggccatctgcatccccacttcccatagcccaggcagagggacagagaaatggagtggggagcacagagcaggctccaacaagacaaattccctgctgccaaaccaccatgatccactctgactttggtcacaaactctgctaaaaacaattctctacgttcactgttcccaagggtcattctaaacagtggtggccaccaccccttagaagcaagagaaaaagaaaaaaggcaaataaatgcagaaggcagccagagcctcccagatgcccctgctcaggacccttccccgcagcttggcagtggccactcagggcttggccacaggcagggcttggctcagtatcctgtcaggggcaagagccaagctgtctgggagggtcgggggatgcaggaaggatgtgtgggaatcaccaggccattgctgcatttggggtgacaggctgagtctgccaagccggagggagccctgaggcctcatcctcactgggggtcctattcctggaagagtgctgaatgtcaactcccaggcctcctcttccagcaataaggaagccatgtctgagaggggaagggcaagatgtgccctcagcctcactcaatgagctccacgtagttggcagggaacatgccaaaatggccatccggcccatagccacgccaccagccttcgtcgatcacctcgatgcccgtgatgaggttctcggggtcaaaggagatctctgtgtcgtcggctgcctggtagtcgtacagggcacgggcacagagcccttgc

SEQ ID NO: 336025 - DNA, 1000 bp, Homo Sapiens; identical to SEQ ID NO: 157561

SEQ ID NO: 336026 - DNA, 1000 bp, Homo Sapiens
aagttctaaaagcgaatgtgtcattagtctggtttttgattatagagattcaaacttacaaaacgctccttcatattacttctcagctttgcaacgcagggccatgtcacttaaggaaaacaccttatatctcacaagaggccttctagaattgtagtcacctgccgaatttccaagatccacagactaatcctcacagggtcaacaaaacaatctattaatgaacagagccatctctggagtcagtttcaaagaactgaaccattggactaaaaccaaaatgccaactcgacaatgttaagtgaaaattataacctcagagaccaggagatgttagaatcctggggccgatgtatgtgcccctcccacaagccccacaaacaagtcatgttggaaactgatataaaccaaagggacccagatgatgaaatcattggctcagtgtgttccctccatgtaggcatgccacacagcaaaccagctgtaatccaatgtttattgagcaaagaaatcaaagcaactggtcatctaacatatatttaacaacatcagggtaagtttgtcttgtgtatcattctttacaacagggttatactctaggatgatacacaagatgaaattaccctgatgttgttaaatggctgttcattaaacacctattccatcccattaaaaatcttcacatcatcctttccaactttctttccctcacatccattatgcccatcagctgaccaaattagctcaaccttcaaaatatatccagaatctgatcaccttaccacctccactgtcaccatcttcagccaagccaccatcatctcttgccttggtcactgctaactgatttccttttaaccttgttcccctggcttctttaataaagcagccagaaagtctttttttcaaaagaattaagatttttggtttgttctgttctctcttgttaactgaggtgaaacttacacacagtgaaattaagcacatcttaggcttcaat

SEQ ID NO: 336027 - DNA, 1000 bp, Homo Sapiens
cgctccgggcctgcggggatgcctgacacgtccggggtctgcggcctcccggcgtcggtgtctgagccacgtgctcctgtcccgacccctttcccgtgtctctccggtgtccgcccctcggtcccgtgtctgtgtcgccctcgtccgtgtctgcctcccgcttccccgcctcgcgacttgagccccgcccgtacctgcttagggcgctgccctcgcccgcttgctccggatcccagcccaggtacccggcctcgcccgcgggtcgggaccgtagggttcagggttcgcgcacagcggtccactgccggcggcggggcggcggcgccccaggacggcaggcgggtggggccgcctggagggcggagctcggcagtcgccgcccccgggaagccttgcacgccgcgccccggccaatcccccggtgcccccggacacgcggaacttccgggccgtcggggcccggggccgtcggcgggggtgatccctggccggtcccgcccggcgtgggtctcgggcgtctgtggctcccgagagtccccctcccgccctcggtggggtctcgacgttcggacgcggcgcagcgctggggtcccggcctcgcccgacgctcgggccccgccccgctgggttcggagttgggacacggccccagccgtggctccaccccaggccttgcgccaggacgcgcagagagagagagagagaggcggacacgatgcggactcgcagactttaagcaaacacgtgtggggccgctcccgcctggcgggtcagttgtccgcgtcggtcaccagcggggccaggtagtccgagtgccggatcccgaaactccagccgcggggcttccggtgctgatccacgttgtaggccgcgggccctggcttccgagtgttgtcttgggggagcgaagtccgcgccagaatcgtgaactggggggcccgggacttgtagacccctggactcacgaccttgctgaggtcctcgaagaaactgccagccg

SEQ ID NO: 336028 - DNA, 1000 bp, Homo Sapiens; identical to SEQ ID NO: 157562

SEQ ID NO: 336029 - DNA, 1000 bp, Homo Sapiens; identical to SEQ ID NO: 160526

SEQ ID NO: 336030 - DNA, 1000 bp, Homo Sapiens
ttttttttttttttttttttttcataataaactttattgtgacaggcggggctgatccctcccatgttgggagacaccatgtggcaagtgacaaagctctgagcccgcccctcttggggccacagtggtagggatgggggaaggggatggaccccatggctggggtagtaccatgactggaggcgggggaggcaaccagaggcctgctgctttggggaggtgcattcccccaaccatgtcccgacacctctggagttcaggcaaggaccttccagtcctacttgtcctgcatcttctcaaggataggcacaatcatgtcaaatttgggtcgctttgcagggtcttcattcatgcagatcttcatgagcttacacacatgaggggaaatacctggtgggatggtaggccgaaggccttccaatgccaccttcattccaatctccatattggagaggtcagcaaagggtacctcccgtgtcaccagttcccacagaagcactgcaaaactccacatgtctgctgagcgtctgtttgtgtcttcaggcttcttctgcagagcttcgggggctacccaggcaggtgcatacatgcgaccaggacattggaaagagaacttgacatcagccatgctaattcgggcagtcatgtcctcatcaatcattacactacggctattgagtgcatgtcgtgggatgaggggctctagtgtgtgtaggaaggccatgccccttgccatgtccaaagcaaacttcacagcctggctctggtccacgacgaaattggtgccttcatgtagtacattgtagagggatccatacggcatccagtgtgtgatgagagtaggatgaggagcaggtggagactggcaggcacctagcactgggagcacatttggatgcgagaaaatcctgagccggggacactcttcattgaagtccctgctcttccttgtactccagtctcgaaccttcagcaccttcacgacaatgtcattgccctg

SEQ ID NO: 336031 - DNA, 1000 bp, Homo Sapiens
ttttagaacacaaatacataaatttttaatctgcgaaaaatacaaaatgaaaccatgtacaagttatgtacaaaccctttttacaagacaagagagttatcactggttgttacagatgacagagttgggtagatcatttcagagcaccagcatatagtctcttcttcaattcctgtcaggtcagagtaattaatcataatcataatcataatgccaacaatcaaaagattgaaagatgaataagccacgctctttttcctcaatgaacatgtaggctgaactctgcatgtgtgtactttttttttctttgtcccctaaagaaaccttgaagtgcaggttttggtgttaagcagagaaaggtttcttttcaacatctgggtggtgggatgtgggccagaagttttaggcaggatgtgattgtgccacctgggaatgcaacgtttttaattaggatttcccaacagatctgggtttgtgtttgaaatgttgcagttctggtcaaaggcgtgtcaggctgcattgagcggaaggaaggggaggagagcgagcgctctggggcagatgggactctggttttgtgtggaagtgaggctcagtccaccttgcgggcggggctcctgtccctgccagctgccttcccacgctgaccctgagtcccatgggagggaagcactgggtcactcccgcaggcgtgtgtcaatgccttgtgtacatttccatctaagattctaaacagtggggcccggtagtgcttcccaaggcaggcatggccgagagcattggtgtcacttctgcccctgttctgttaactagcaagatggaggagaagcagcagcacagaagtcctcaagggataagcaaaggaaacctttctaaactgaaaaacctacctaaaaataaagtccactttcacctggccagaacatctcttctcacaatgcctgttcagaaaagccaccaaagcaaggtggtcgtagcatttgttttcagacccctgaaa

SEQ ID NO: 336032 - DNA, 1000 bp, Homo Sapiens; identical to SEQ ID NO: 157564

SEQ ID NO: 336033 - DNA, 1000 bp, Homo Sapiens
tttcacaaaacaagacaatgttttaattgtaaaactaactcgaggcaggggtgggcgggctggggctgcgctgaccgggcaggaacctggttcttcaggcagtggttctgccagggccaccccgcaggacagggaccatctgtcccccaataagggcaggggctagagtgttataaaatgacaatataaatagacttctagaaaagaggaggctgtccaggtgcagtagtcatttgctgcaggggctggagagggtggggggccctgacctgtctccccatccagccacagaaagggggcgcagggctacgggaaaaggccactcttcggacattcatgatcgacccccacaatggctcagggggagagggggctgggtgtcaggcaaggcgccagacaccccttgcaggctggaggacggggtggctggacctttgcacacacacacatgcacactcacacgcgtgcacacactcatacatgttcacctcttagtgttctctccacccccagcgacccccactgcagacttccagtgatgggagggccgctgcccttcctggagacagaagaacatgggggagggcctgtcccagagggtgggggtcctgggagcctcgcttgctcccacgagtccctgtgtttttctaaaagtcacgagatcaaaactggagttcagtagtagggtctcatctacccccagcaaggagggtggtgccacgcggagcatctcccgggctgggaggagtgggaggcctggccccctactggcctcagtggggcgggggtgacccggggggctctttggttgaggggaagggcgctgggcctcatctggtgcggttctggcgcatgaggggcacgatgctggcaggcggccctgccttggccaggaatgggtgcttcagcagctcggctgccgtggcccgctgggcagggtctcgcaccagcaggcggtccaggaagcccttcagggatggcgacaccttgtgcaggttct

SEQ ID NO: 336034 - DNA, 1000 bp, Homo Sapiens
ttttttttccattttattccactttattctttgcctggcacaaagaggtattcaacaaagtaaatgggtcatcaaatgggctttaaaccccacatgatgtccataggcattaaagtcagaaaccaggaaggtgaagggggaaatgtctccggagagctttataagtgagacactctcatatcattcaagctcagtcctgcttggggataggaggaaccatttaatgatctctgaatggtaccactgaaccagggatcaacgggttgggttagggtactggatgagtagggacaggaaaaattgaggtcaggaacctgacagtaatagccatggaataaagggaggatacctgaaaggcaggaagcctccaacagtcatgtggatgacagtagacttgtaccagggctggggtggaatctcccgggcgatgttcttggtgcgacagggtgcatcaaaggggctggcgttgttcttcccaaagatgcctccaatgacagtgaggggaaagcccaccagcagccaaaccgtcagaagcagcaggatggttgtggctggcagagcctgtgtcgaaccattggcccaatgcactgagttcaccacactccacgtcaggaagaaaggcacagagaagagactggtggtgagaatgatgttccacacccaacgctcgcctccaatctgccggtagaagtggctggacacgtagccagagatgcagcaggtcagggcatacaacaagatggctgctgagttaatggccccatgacggtgcacattgaacatgcccagcagtgccatgacaataatgccagtgccaagggccaggaactgggcacccacgccaagcacagcacagagcagaccacggtatggggggaagcggaagacatctgtatggataattttccagccattgtcaccctggtcaaagtcatcaccagaacctgcagaggtggtctcctcatctaagttgtaccgagccaggtcattccgaagcaca

SEQ ID NO: 336035 - DNA, 1000 bp, Homo Sapiens; identical to SEQ ID NO: 157565

SEQ ID NO: 336036 - DNA, 1000 bp, Homo Sapiens
gcggccgcggcgcgggctgcaggactgaccccgggctgcgcggccccaccccgggcggtccgctccgttcccgccggtccccgcagccgccgtcttaggccagctggagcaggccgcgctcggccagcaggctctgggtgcggttgtagacatcctccaaggtgccggcggcccggagcagcgcggcccgcgcctccgcctcggtggctccgggacacgccagctccagcaggcggcggcgacccgggaaggcgaggaaggcgaggcgggcggtctgtcggaccagccaggggtgatgcggacccagggccgcacggtaggcgtcgctgcactgcacgcccgcttccgggcctcccagcgcgccggtcgccacccggtggaggcagagctgggaccagcgcagcgcgcggtgcagcaggagcagcgtgcgagagcccgagctccgggtcgggtcccggggggccgcccccggctgctccagcagtcccgccctccgctcccacgccgccatggccgccagcgaccagtagtgctccgcgtccgggccgtgcacccgagcctccaggtctgtcaccttggtgaaggcctccctagtggcgaaggcgaagacggagccgaggggagtcaggaattcgacgagtgccctccatcccgccaggtacggcgacagccccacatccccttcgggtttcagactggcgtggaaccgcctcatcatgcggcccagcatcccccgagggcccagacacggaggctgtttcctctccggggcctccagggttcccgactcctgccggacctggaagggcgccgtttcccctggaacgcagggctgcgccctgggtccgcagcccgagcgggcgcctaggctccgaacactgagataaagcagcagcagcgcgaagatagcgagaggaattgagtggctgaaccagtgccgcagggctgggggccgcgccgccactcccatgcctgctgctgggaccgccgccccctcacc

SEQ ID NO: 336037 - DNA, 1000 bp, Homo Sapiens
ttttttttttttttttttttttttaattttttaagttctgttttattgagaaccacaaaaggtaagaactaagagagtcctcccaggtcatcaggtcccatcccttggtctaaggatggtgaaaccattgtcacagccagcagctgccgtgttctgggactgtctcatggggcaatgtgtcctcacccccagcagtgccagcccaggtcagaaggcttcattcagaaggggggtgtcacagcacctggctgagcccccatggaggatggagacccacagatacacacaaacacacagagacatctccaaatctctgactcagactcgcacacaggcacacacagacgcacgctcaacacagacacacgcaggcctttattctattacacagagtagggctggggccagggcaggtcattctcaggctgcgtcagaaggtgcagagcgttcgggggacacaggccgaaccccaaagtgataataagttacggggggatttctcaggctgttgtcaggctggagcaagggcaggacgccatgtgaggaccccagagccacttccagctgcccagctcagccgtcccaggcaagcctggttccaggacagactcggcctccacaggccctcagttcagctcctgcagattctcgtaatctggagccccctcttcctccacttcctctgcctcctgggaactcagggcggcaggctcagtcttagccgctccaggatgcagttcctgggacacattcacatactcccggctgccatccagagacgcttctgcgctctccccgctctccggaacgttcacgtaatcatcaatggactccatggagaaggcactgtctcggatgccaggggtgctgagtgcaggagctgatggggcagcagtgctagtggccggggtgctgtcaggaagcaccaccaggtagcctgggttgtgatagtcgtcctcatcctcatccgcatcctcacaggctggttcctcgttctcgt

SEQ ID NO: 336038 - DNA, 1000 bp, Homo Sapiens
ttttttttttttttttttttttttttttttttttcctggctaatttttttattttttgtagagacaagggtctccctacgttgtccaggctggacttgaactcctgggttcaagcgatcctaccaccttggcctcccacagcactggggttacaggcaggagccactgcacctggccctgtctttactgatggtcctgccccatgcctcccacacctaaccctgggcacccactcccgaagctctcctactggctgcagggtctgcctctgtgaggacagtgaagccgatgacacgggaggtgaagtcgaaggccgtctgctggccatcgtggatcactgagatgcagtggcggtccccgtagctggcccgtggcatgccaccctggaagatggtgaagggcaacccctgcctagtggtcagccagaggattctggtaatcgctttgcaaggaaagggaccgtaaggcacgaggctgcggaggggctctggttgctgggcttcgctggacacgggccactggcagtagctgccgtcagagtgacagctgacgagcaggcggccgtcccgctgccaccagatgttctccagttgctggctgctgaggaagtggtagagcacgcggctgccctgtaggtcccagatgacaacgaggcctcggctgtagccgatcaggatctggttggggtctcgagggtgctcctgcagtgcctccaccatctcgaacacacgccggtggcgggcctcctctggcaaccgctgcagcaccgcgtccgagctgatggtccggtcctccagcgcacgaaaagctggcagctgcaccacaaacacgttgccactctcggtgcccaggtagagcagctcgcaggaggaatgtggcaggaccacggtgatctgtgtggcactgggggcagcccctgggggtccacgcagtgtgaagctctcatcctcctgcagctccgatgccccgcccttgaccttcaggctccaaaggtgcaggc

SEQ ID NO: 336039 - DNA, 1000 bp, Homo Sapiens; identical to SEQ ID NO: 246406

SEQ ID NO: 336040 - DNA, 1000 bp, Homo Sapiens
ccactgcaagcgtaagagactggttttatttcaagaataactaagggtatattaacacatgtatctcaaagtaacattgaattattgaagacatactgttccaatactcaaacagttcacagagaggggacaggaaccaatgtactggaaaaacacacttgtattatatgtaaaaatcgatggccaatatttctcttattaagagaaaaatacccaacaaattaaaaggtgaaaagctgtgctcaaaaaaaaaataaaaaaacccaaaaccttgcatgcacaagctaagctcagacccttaaaaaccagatagaaattgacaaagtcaaacaaaggagaaaaactagctgaacttctcaaactaaattatatcaaatatatgtgcattttagcaaaataaaccactaaactatactttgtagacatattcattacatttattttaataactacttcattataggctgactggctttcctgtgtggataaagtgtgatctgaaagcaacgctgactgaatgtaaataaagcaaacgttcccagccatttttggcatgaacatggactacagcgtttaatgcagacccaaagccacacatttttggggagtaggttttacttgcagtacagattcttttcattacagatcacaaaaatacaatacaatgtgacaagcccagtttaagaattacatgcagtagctcatattaacacaaacagctccccacgaaggccgacaagagctaaatccggtgtcaacagggttcattgcaggagtagaataatccggtacaaggaacgagaacagattgaaaccagaaacaaagccatgcctgacagtcaatcaaggtcaatctgatcatttccatgaccaattacccatgtgaacaattcaaaatgacggtggaagagctgagcaccctgtactcacacacgatgcccacagcttggcaaaaggtacacaaacacttgtttgaaaagaatgactgaaacgtctactt

SEQ ID NO: 336041 - DNA, 1000 bp, Homo Sapiens
ggcactgccagaaacaagtttatttacacaaggacacacagtgtaacgggttacaaaatacttaactgaaatccatatccagggagacaaagcaaggagtgggtttacatgagaaccagaccagccacagggagagagtgggtaaggggccgggagcctggggctcagcacagagaggcctagtacactgagcctggccccatccccatcccccaggaggatctaaaacaaacacacaagcacactatgaaccgatggtgctgggactcctgcccctcccctggctccctcaatcctgctcaggcccccataggataataaatatgtaaacagattggtggggccctggagatagaaggagagaaagtatatgtggtactggggaggaggaggaaggaagagtcagccccctaggagccacttcccatctttggtttcctacaggctggatggcatcccctggaagccttgtaggcccacagcccctggcagggctcctgggaaagagaagggacagcgcccagccccctcctggtcttagctcccttgggctggtggtcagcaaagggagcccagaaggtatggaagctccagctgagagccgactcctggatccctgggttctggccttaccccttctagaacctccattctcaccatccccaggatccaaaacaaaaggccccaggagggaggtgagcctctgccccttctccccgcagcatgctggatggctgggaaaatctggtcctgacagcaggggggctctcaccagcctggagcccctctgcagggaccaccttctccccttgcccaggctgtgccagcagaggggcagggaggccatccgagtaaggtggggagcagacctggttctgttactcctcctggcccctgagaacccaggaaaccagtcctctccttccccacacactttcaccctctcagccccggggaaggggaagtaggctgtgaggagtgtgaggcaagacagccctcc

SEQ ID NO: 336042 - DNA, 1000 bp, Homo Sapiens
ttttttttttttttttttcctcaggagccaggtgaaggctgctgttaaataactttaatggttgatgtgggagtcacaagggaggtatgtttgctccaagggttcttcagtgccatcctcaaagctggttagtgcagggaggtagggcagagttggttccagttttcttccaggaagggtttagggaggtcccagcgagccccaggaatgagtccctcggtaccatggcaaccacaatttaagaggggcttctgcccacccctgcagcctaccccaggtccagcagaggaacaggaggccagactggccaacttgctatagacagcgccgtatccagagcccaactgcgcatgggtcattttctcttctgggcagatcctatgccagcacctttctctctcacactggtgactggagccaagtgcgaggttggcctttgctgcagaggcctctggtccgtggggatcgctgaggtgggaggggggcaaccgagcgagccctaggggagtggtctggggggacagcatccagggaaaaggttcggggtctcccccagggcagggggtgggtccagtctggggctggggccactgaggcaggcgagcaggggttaggcagggcaggctggtctgtaaacattgccagccagggtgggggtgtctccagccttgcgccctcccgctgggtcaggatgtctgtcaccgctgcgatgtcatccagcggctcaatagccatctcatggtacaaggacccctgctttgccagtgcttggggtggtttccggggagcaggagtttcaattttcatgatttcatcacagcactgcttccattggctcatgtcaaagaaaagctgccacagagcctccatccagctctgcagtgcttcccgactttctgtctgaagggtgtgtgtcacctcatcatccccatactggttactgatgcttagggtgaagggccgtcctagagcctggtccagctcccctgcccggactcga

SEQ ID NO: 336043 - DNA, 1000 bp, Homo Sapiens
tttttttttttatgaaagtcataagtcatttattgaatgaatagtatatgcaagaataccaataaaaggaaactaatactacaaactacaattttgaaaataaagccaatataacaggaacaaaatatacataacatgagaggaatgtttgatttttgacccataatgcattccttatctttacaattaacctaaatgtctgttagaacaaaactgtataccttggtctaacttcagcgctttttttaaaaaagcaacaacactctagaacactttttcttttgctttgagatatttgagattcacacatttgttcaagtacacagattctgattcaatagcagatctacagatcttgttatctcttaatatcttgagtagcatgtacttctgagcaagtactatctgaaattctaaaactgctgattcttgaaataaaatttacttcagttgtgggtttttaataacttgagatgaaagtaaaattcaccccctgcccccctcccccaggaacaaagagctcttcttaaaagtatagaaactcaagtctatctttctactctaaagaacatttcctactaacatttctggtaaggcaataaatgctccagaataatcttcaatatacgcttgcaaagattacactgtttaatatcaataacaaaaaacaaaacaaaaaaagaaaaaagaaagaaaaaagacgcttcaaaatttcaggctaaaatatgcataaaagacagtaacggcagtattttttgaaatgatgtaaatgttatatacttatcaaataatgtcatgcttattaaaactacagttaaggacttaagagatgtacagtaaatacactgctgaggtccatttttctaaatattaataccacaatgtaattactacccagaagatgatgatgctacttgggaacataagtactgtacaatttttacattgtaaggcacttttactcagcatgtgacgaaaacatgattagagaatcaaaaca

SEQ ID NO: 336044 - DNA, 1000 bp, Homo Sapiens; identical to SEQ ID NO: 157569

SEQ ID NO: 336045 - DNA, 1000 bp, Homo Sapiens
tttttttttttgatatattgtaaccattttattaatatgaagcaatgggataaatcctttaacaggggtactgatttactaccgtgaatatgtaccaacactttggtgcagtatcatgcctgattcagtcaaataatgtgttatttacttgcactgccacacatgtgaaaacacatttcattggttgacagaagagcacacagccatgtacctcgtttctggcttaaatgcatagaaatgttctcatgtacaacggatttttcaccactcaaggacttcataatagatgaacaacttttcaatacactatttctgccttgctatttttttttttaagtgaagagagaggggaaaaaaccaatactgtggtacaaaagacctttttacaaggtcctttctggagaaatgttgagaatacagttatagtcctataataagactataatcaagatcatcctacaaggacgtgagggtagactcactctcctggagagtttctgatcttattaagactattatatttgactggctttaaaaacaaagaatattataatgaatagaggggagaaattctagcagaagactttcctagagaggttattttgaacgtatttcaatcctataatgactgcaatgaaaacgacatgttaggtcattctactgcagaagtttgtgtccagaaacacactcatgataatataattaaatgctgtttttggtgttttgtgaaaatacagaggccatgaaagcagaaaaatgtagcactattacaaacagtaaggtaacattctcaaagaataaacacataacacataaaatttttaaatggtatctaataaattttcatgtcaaatcttttaactaaacatataaaaattttaaatggcaactaataaatcttcatgtgaaatcttttaacaaaatccacaaatagattataaaaattgaacaatcataaatgtcttatgtataaagttttaagggaaggtttaaattttga

SEQ ID NO: 336046 - DNA, 1000 bp, Homo Sapiens; identical to SEQ ID NO: 157570

SEQ ID NO: 336047 - DNA, 1000 bp, Homo Sapiens
tttttttttttttttttttttcgaatgaatgacaactttatttttcttacacttttaaggctgatgaaaaaccttcatttcaattgaaaagtatggtaactgtgtttactcattattattagttttctaaaacacaacttgaaaacatccagcatgcatgtttaatatcagtacaatgaattcaagaccaagtatacatgttacattcagcaaggctagattacagattatcatagtcatcatcatcatcatcgtcatcatcatcatcttcacgttttcttttcaatgcatttgatgattcattggcagtattttgtgatgacatcatattagtggtaataagaatgtttttggacccgattaatgatggattaatcagaacattctgaactgctgaggttgcaggaattgaagcttttacagctggagactgagaagtaggcatctgtactgtaaacctttgacctgtgagggacatgggagtccctactttagttgaaacagacatggtctgtggggttggtgtgcctagtgtgggagtacttggtctgctagtaactgaaccaacacttaaccgcgggactgttattcttcccgcagaagttgatgcctttttctgtaaagatttcagcctatagtttggagctgttaagcagtatctatcaggtggcaacctaggacctgaatatggcttgatcaatggcaaaggggtttgatttctttgccttgcaatatctaataaaaaatctcttgggggaggagaggtaaaagactgatcagcgcggcactggattgccaatcgcacatcatctgcatcaacagtagctttcttagcatggcttgaataaatttttgcatcatctagaattgtggtcacatatcggaaggcaaactccaacatctgatttataactcttggctcatattctgtaatccccatatccttcaggatttgtgccatcatctgtgcatctttcggcatgctcttgggagaagccgt

SEQ ID NO: 336048 - DNA, 532 bp, Homo Sapiens
ttttttttttttttttttttttttttttttgtgagccaaagatttatttcttcatttcttgcatttgaaatactcttcaatgacatccttggcctgagactccttgccatagtccttaactactacacaactgcaaccaaccactttacggggtttcccctctctgtcaattttacaaaggcctacccattctcctagtttcttgttgtcatcaaccttaattaggttgatttggtgttcagcacaaagggcctccaccaacttgacatacataggctcatcacagttggatgcaagcacacaaagatgggcttggcgcttgtctaaggctttggcagcttcgcgaattccacgtgctaggccatcgtggatgagggcagtcttcagaacctcttgtaaagcagtattaacgtccattacacctccagcagcaatgccttcctcggccatggcggtgggttacgggtgaagttgaatcttgaacgcacccaagcctccgcctccgcgcgactcggcggcggcagggaaagag

SEQ ID NO: 336049 - DNA, 1000 bp, Homo Sapiens
ttttttttttttttttggtgtctgtattgaaactttattacaaaattataaagcagagctctgtaacaaaataatacacatttgggtttgctttaacctccaagtaagtctgagaaaatcttaataaaagccacttgaagtaacaattcacatccaagagatttccacaaatttatacaatgtatattgagcactagttcctgtacagcttattcttattagtttggatccaactattccaatgtattatgaaccagtcagctatctgtcttttgaaacaagtcttaactgaaatctcagagtaatcagcaaaagctacggaataattctaagaattagatgtttccatatcattaaaaccaaggatccatgaggggcagaagggaggattcaaagatttaaaaaaaatcaaattttagaccttggttaaatattaactggaatgggatcttggaactcccaactttaatttggtgtaataaaaatgatgcaaaaaaaaaaaaaatcagggttgtttgacaccttttttcctaaagggaaaccttcaccaaaaggggataaaagatttaaaggcaaaatgagtaaacaacctcagttttaattcttactgaggttactaaccagctatcagtatattattttcgatttgtgtctaggagggaaactgaagaggaggtaaggcttcagcagagaaagcaggttgtaagtagagagccagcttctgcccttaagttactgctagatcttagctgaattgcacatacatagacctgttttacagaggaactgagtagctgaatgaatgatcctttgctaattggtaggcattgtaaactatagtatttactgcccatgacaaaagtggaaagggatgtcttcatgagcaaatctgattcccccaactcctgcaaaggctgtggttcagaatcaaatcatccaggactttgtataacattgaggtaagtggcccagtgttcagttgactagtttatgcagttat

SEQ ID NO: 336050 - DNA, 1000 bp, Homo Sapiens
tttttttttttttttttttttttttttttttttttttttttttttttttttttttttttttttttttttttgttttaatcacacaaaaatcacatttatttcaagagctcaaagtgcaaatacagcaagtcagttcacaaagtttcaagatacagtttttaatgacaatggaaatttgatatacaaaaatggaagggtaaatagaaataaagctcctcaatttttaaaaaaattcaagtaatttgaaaagcctttagactaaaatactccacttacatccattcagaaatgccagtactgcactgcaatcaagaaggactcttcaaagagagaatcagctcaaactggtcagctctagattagaatggaagttcttggtgccggcttttcttgatttggaagcttcagtcactcactgctatcaattgatgaggttcaatccatgatattttgatctttaggtgaattctaaaacatgtttaaagttaaaaaggccgggcgcagtggcttacacctgtaatcccagcactttgggaggccaaggtgggcagatcacttgaggtcagaagtttgagaccagcctggccaacatcgtgaaaccccatctctacaaaaatacaaaaattagctgggcgtggtggcgggtgcctgtaatcccagctacttgggaggctgaggcagaagaattgcttgaactgggaggcagaggttgcagtgagctgagactgtgccaccacactccagccaaggagacagagtgtggctttgtctcaaaaaaaaaataaaaaaaaagttaaatataaggccaataccactatgaagaattttctgaaatgaccagtatatatctaaaagatttaaagacccaatgtgaacttcaggcctatggttttactgggagaaaagccatagattaatacttctagtatccaaaaccttcttggaagcttaggaacatggtcttttaaaacttcctcatgaaaactgtacttaaatatat

SEQ ID NO: 336051 - DNA, 1000 bp, Homo Sapiens; identical to SEQ ID NO: 157571

SEQ ID NO: 336052 - DNA, 1000 bp, Homo Sapiens
ttaaaatatttcagtaaaatttaatcttttattcaaaattagaaattttacttattagaaagtacatttttagtgattgtccaaaccgctagccactatttattatttaaaatctttagtattaaggaaaatacttagttatgcactgaatctccaaatagataaaaagaataatcaactactgtttatatcaattaaaagaaattaaaattcttatgcaattaaaaaattatctctcatattaaggaaatatagtacatgcataattaatgttagctccctttccccatttcataaagaatcatatacccccctctcactcttcctaagaaagcatatgaaagttctagatataaaaatcttaaagttttatttcccctaacattatttgatcataaagttccctggtcagtagaacataagactttttcaagttatccatgaagtaaagtggttcagaaattttcagtggattaaatccatcttccaccaactgatgcttcaatagtttgaatgttcctgttgcttccattttttcctgaattcttaaaaatcgtggacaagcataagctggtagaaatgttacaacttgttcataaactttttccaaatctaaagatgtatttggttttaaaataatagaagccattcctgctcttccttcataacctgatatagccacaccatagacgtttgcttcctgtatgaaatccaacattccaataacatcagcaacctcagtggttgcgacattttctcctttccatctgaaagtgtctccagtacggtcccaaaaataaaggaaattgtcctgatcctggactattaagtctccagtattaaggtaaacatctcccttcttaaaaacatcacaaagcaatttgtcttttgtgtgcttataaggcccagcatagccaaagaagggattttttgcattcactcgagaaatgagaagtccaggttctccttttttcacatgaatacaccaaccctgctcatt

SEQ ID NO: 336053 - DNA, 1000 bp, Homo Sapiens
ttttttttacatgaacacaaatcatattttattttaattgagctttattttctttggagggagggtcttgcttgtcatccaggctgtagtgaatgggcatgtcataactcactgtatccacaacctcctgggctgaaatgatcctccagcctctgcttcccaagtagctgggactacaggtaagtgccagcacatgtggctaatttttttacatctttgtagagatgaggtctcactattttaccaggctggtctcaaattcgtggcctattgtgatcctaccagctcaacctcccaaatcgctgggattgcagacatgagccactgtgcctgactcaaaaatcatactttattcttgagcccattggtcagggtagattcgcacactccctctgcagtgactccaggagcccctctcacagctcagagcggaagctgaggctgcagcctgccatcttctccgcatagtccgcatcgaagcgctcattctgcgccacggtgaaggtggtcttccagtccccagccatgcctttcctcatgaagggggagatgctgtggtccatgagctcctgggggacggtggtgtagttggtcatagggttcttcttcatctccttgaacgacgtgtgctgaaccatgaagtccatggtctcctctggcagggagcgccccacaaactccaggatcttttgaatctcccttttggggttctccttcatgtcttcatagaagaggtagagaacagggtgggtgcggctcagctcccaccactcctgcacgtgctggtaccaggacccgtaggacacttctccagccatgaacttttccaggaagctgtcccaggtcccaggctcagggtgcgccttttccatacggtggaaatggtagtaggagaccgccacgtcctttgggtttcgggcaacatagaccaccttgaccttctgatccaacagagtctgagggagcagagccaggggcaggtgtgacttgatgagccgtg

SEQ ID NO: 336054 - DNA, 1000 bp, Homo Sapiens
tttttttcttttttttttttcttttttttgagatggagtctcgctctgtcaccaggctggagtgcagtggctcgatctcagctcactgcaactgccacctcccgggttcaagcgattctcctgcctcagcctcccaagtagctgggactacaggcgtgcaccatcacgcccagctaatttttgtatttttagtagagacagggtttcaccatgttggccaggatggtctccatctcttgacctcgtgggtcacccaccttggcctcccatagtgctgggattacaagagtgagccactgcacctggccacatttttcatgattataaacaatcctgggatgaacacctttttccataagcccttataaacttgtgaaggtgtttctataggatacattcttagaaatccttctagaaactgatatgaagggaataaccattttttattttaataaatattgtcaaattgccatcataaaggttgtatcaatgtacatcccaacagtgtatgtggtccccaacttcccaaggactgtgggattttatagacaatctgttctcatcagagagattgtagaacctcgagactcttcatttaactctgtgaatgtctgcagttcatacatttctctggtggctaatacattaacattaatagcagctcgaaggtttgcccagaaaagcccacatttacgcctatccttgggccattccaagtatgcttttttttccaggagagctttcagtttatgatacctggtgggaatgcaatagaatggaatgggttccagtaagataagaattatatgatcagaattttcatggaagagattgtggtgggcaaagtagaattcataatggcaccactcattctggacaaagttgggagacaaaacaaagatggacttatagcttttctcaatgaagcttacaatattttcactaatgcttttgccagggtcaaagtagctttcataaaggcaaatcaagatagaaccat

SEQ ID NO: 336055 - DNA, 1000 bp, Homo Sapiens; identical to SEQ ID NO: 157572

SEQ ID NO: 336056 - DNA, 1000 bp, Homo Sapiens; identical to SEQ ID NO: 157573

SEQ ID NO: 336057 - DNA, 1000 bp, Homo Sapiens; identical to SEQ ID NO: 157574

SEQ ID NO: 336058 - DNA, 1000 bp, Homo Sapiens; identical to SEQ ID NO: 157576

SEQ ID NO: 336059 - DNA, 1000 bp, Homo Sapiens; identical to SEQ ID NO: 157577

SEQ ID NO: 336060 - DNA, 1000 bp, Homo Sapiens
ttttttttttttttttttttagttgtataaaataaagaattttaattgattcataacaaaagcattaagcaaacaaaatgttaattaaaaattttaaataaaatatttaaaagaaataagtgcagaaaatagcattaaaatgtttgcataattacatacattttaatacttccacattcttttggggacccaggcttttaaattttggaaacatgttaacttacaggcaaataaaatgaatgcagatgaatagtttctacatataattacaatctggaaaacgacttgcctagagtcttattgccagttagcagttgaatgatttttcagaatcaaaacaatttgaacaatgttttgctttttaaagtatccaagaattacactagaaaaatgtgtgaacatttaagtgtatttacacagttccatggtctctcatccaccagcctatgtatatttactaaccttggttctattaccatacattttgtaaagacttttgccaggtatctcagaacaagtaaggtgcattttaaacaagcaaaaaattagaaaatgaaaacatctaatccaactaggcattttgttaatgacatcaattgtcagtaacaggttcccaaagtagtactaccaatatttccatacaacaaaaattaactaagtaatagtgcaattactaagtataattttaattaaatctgatgacaggtaaacatttattttcaaaaagattgaacactaagctatcaaattctgctctacagaaatgcatatgggataatcttattccttaccatcttgttacaaataaattctaaacattttctaaagatattcaaactgagttactacagacgagtgcctatcaagtgaagactctgtatagagaagtcaggaattaggctgggcacggtggctcatgactgtaatcccagcgttttgggaggatcgcttgagcccaaaagtttcagaccagcctgggcaacacagtgagacccatgcc

SEQ ID NO: 336061 - DNA, 1000 bp, Homo Sapiens
tttttttttttttttttttttttttttttttttttttttttttttttttttttttttttttttttttttttttttttttttttttttttttttttttttttttttttttttttttttttttttttgctgtgggccaatggctggggctttattacagtgggtgggctgccagccacctcccatccagcctcagccctgggccacaggctacatgggccgctcctggggctggtgtgcagagctggcctgtccccggccaggtgacagtctctttctcagcctgaccaagaccttgatggggttctgggtgcaggtgtccaagtgggtcacaccctccagcaaggacttgctgggctggctgcagggctgccgagatggggatgtgcagggctgccgaggtggggatgtgcagggctgccgaggtggggatgtgcagggctgccgaggtggggatgtgcagggctggcccagcagggtcctacccgtcctgctgctaggaaggtgctgtctgcccagaggccctggggatgtgctcttggcctggactggtggtgttgctccctgggttcccttgctggaaggggaccagagccggtcctgcgggatcagcttgaggccaccctgctgggccacttcccggattttggacagcattgattggagccgcccgttctcctcctgtaggacccggatgcggatgtcgttggcctgcacttgcctctccatgtgatctgtgacgttgccagagtctgtgggacatgttatctgggattccacgctgctggatctgcctccatggatctgggtctcggtgggcctgtgcaggtctgggaaggccaccagcagccgctcccgctccttcagctcctccagctcccgttctagctccaggatggttagccgcaggtccgtagtcgcctgctccaggccttgcttctccctctgcaggctctgcagcagctcctgctgggccctgagctggcattgcccctgctcccgc

SEQ ID NO: 336062 - DNA, 1000 bp, Homo Sapiens; identical to SEQ ID NO: 157580

SEQ ID NO: 336063 - DNA, 1000 bp, Homo Sapiens; identical to SEQ ID NO: 157581

SEQ ID NO: 336064 - DNA, 882 bp, Homo Sapiens; identical to SEQ ID NO: 157583

SEQ ID NO: 336065 - DNA, 1000 bp, Homo Sapiens
ttttttttttttttttttttttttttttttaaaacacaaataccaaacttttattttaaaactgtacaaaagcaaacaaaaaattccactgagtcactgtgatagttaatcttatgtatccacttaactgggtcacaagatgcccagctatttggtcaaacattattctgagtgttcctgtgagggtgtttctcaatgacattaacattcaaatcagtagactgagtaatgcagactgtcctcccaaatgtgggcgggccttgctgaatcagttgaaggcctgaatagaacaaaagagctaactctgccctaagagaattcttcctgcctaatagcctttggacaggaccatcagctttttccttgccttcggacttgaattaaacatcatctcttccttggcgtcaagcctgctgccatcagactggaactaaaccatcagctctcatgggactccatcttgctgacttatcctgcagatcttgggatttaaccgcctccataatcacgtgagccaattccttataataaccaccgcccccctgccccaatatatattgattctgtttctctggaaaaccttgactaatacaggaactaacggagaacttctgacaaacagaaagatacagtttctgttggatagaactgtgtattcatctgcaaactgataaccaatatctccatggttaggccagatcgcatatatgatgtgacttgaaagcgacgaggcttctgcaatacacacccaaaaatcaaggtcattatttcatcctcacacctagtctaccaacttcctatttgaaatcaatactctccaacctaagaggctgtttgctacacaaatactcaagtattgcagtacaatggtcttgtggggaaaaaaaagcttctacgttggtggttaaaactgccactttttctagctggacctctctgaatctcagaaagggttggcacaacagattgattcataagacagtcacaacagactcaacag

SEQ ID NO: 336066 - DNA, 1000 bp, Homo Sapiens
tgcaaataaaagaggtagaaaaatgtttttttattagcatgttcaaggtagtcaagattttaacaaacatcttaatcctcacaacaaccctgtgaggtaggtaagtcattgtttcatgataaactagtattccaaataaagtgcatttcctgaaagaataaatctgcattaggaataattttgttaatgacaccatttatgtttactgtaatatttgtgttattgtatacttcagttcatgcaatcaggtgtccccagaaaagtttactctaaattaaatcctaatcagatacacttgggaaactaaataaatcttggggtgaattttttttttttgtaaaataaatcagtttgatatataaacaagaattttcatagtatttgctaacgtgaggcattctcagtaatgtttcacccatatttatccattcttgggtaagttttctcaacatggcaccaagcactttagcagttcagcagatggcagtgatctgtgctgtcatgtaggagcttctaaatatattgcaactaatctcaatcccaaacctgaagtgaactatttattgaaatgtaaacactaaaatggtgataaatttcaaaaagtattttcccttgagaatattttttcccttaagttgcaaaaagaagagtgaccttagggtctttataaagaaacgtaatgttctgataactataaaatcgtaatgatttgtattgcaagtcaaagccgcatgctatcaatcactacttacaaggaagccagtagacatcactcaaaattttaagtattcttttctctgtgtcaatataaaacttcactaggaaaagaagtatttccaggcacgcatttccccttaaatatatatttaaagtgcatttctattgctagtccgacactagtaaacatccagttgcctaatattgtttatagttgttttatctgcaaaatacattagagcatttcaaattacatttaattataagataaacatttaagata

SEQ ID NO: 336067 - DNA, 1000 bp, Homo Sapiens; identical to SEQ ID NO: 157584

SEQ ID NO: 336068 - DNA, 1000 bp, Homo Sapiens
ttttttttttttttttttaaactactaatcactacttttattttgtattcaaggtcacaatcaaccagaagagggttcttttgctctgtcaaataaatatatttaaaagctagcaaacgtcagagaagagttttatcaggcctataaaagagatgagggaaattaatagttatatacagctacacagagttaacatattgcaagggaaacaactatattcaaaggcttcatttctaatacttgacatttcaaattttgagaacattaaaattattgtcaaacaaaactcagaccacattagcaatgtttataaaagggagcaatttaatcattatattacagagtgctttaagaagtttttaaacgtgtaaaagaaaaaaaaaaagcttagtgcattacggtctttacattgcttcttttttaaaaaagttaacagtagtatgaaaaaagccacccacaaagccagctgtctgagtgaggaaatcagctacattgcagcattttggaattactaataaagctatagttaaaaaataaaaagtttataaaaatgaaagcagcatgcatattcaaggctttttcataacattttcaatggctgaaaaacatttaaccaagagcttaatatttattatccattaaattagagaaaataaactggctaagcctacatctggtcattcagaaaaacatgttaaaatccaaagctaattaaactgaacatttcttctacgaagaaagcgcattttgaaaaatggtcctatggtcacaaaagaaagggttcttcccaatatgaatgaacagcaccagtctttacaaagtttgtaaattagtatgaactttcagtctcctgatacggcaagagttaacagttaacactcccatgattcataagtgaaaagctaacttttaactcattatgatcagttcagaattttttctctattcactgaaactgttataaaatttcactgaaagataactcttaaaaattctgatc

SEQ ID NO: 336069 - DNA, 1000 bp, Homo Sapiens; identical to SEQ ID NO: 157585

SEQ ID NO: 336070 - DNA, 718 bp, Homo Sapiens
tgtacactgagtcagaaaattattttaatagttacaaaaattttttttttttttttttacagaatcagtataaaatagcagttgatttctccataattatcagaattatttatacttgaggtcttggctaagtggggctgaaatcaacaaaaggtcttggactgttggctcagaaatcatcctagaaagcccgccctgttgatatctgtcatgcttagctcttatgagatgacccagtccttaaaaaaaaaaaaaaaaaaaaaaaaaaaagaatctctctttattcattctttggaggcttgaagtgaattcggcagcgttcattaaacaccttccagctcctgtcatttaccacttcttcaacattcagttctgactgcatccatttcaactttgtctgctcttttctaagttgttttaataacgttaaatcgtccaaattcttttctctctcttctcggaggttttttactactgctgaagtctgggctatacagttttttatgactctgtctctactggcatgagctgccatcaaagactcataaagttgtttacaggtttggctggcatcaattttccctgcaaaggaagctgttggaaccgtagtgtttaattcatgtactattctgtcatcaattgtcctcatcaccttgagtaattcctggaactcggcgaactcctcacagttcacaccgccactgggcgccgccatatt

SEQ ID NO: 336071 - DNA, 1000 bp, Homo Sapiens
ttttttttttttgatggtccagttgtttatttagaaacctgattgttcaagaacatggtgggtgcttcacacctttttcactgggattgtgctggaggtgataggcagcattctaccatttcctcagcaacagaggtgaaggctcctcaactcagaagcacaaattgtaggggacagggtgggcagggaaagggagaaggaaatcccaaggcaattcaatagaagagggtaaaacgactccaaacatcactaagggcaggtgggggcctgcttgctcagtgcctgctaagtgtcctgccctccttgctctctctacccacctccactcaaaagatcctactgaatctccaggtaggcagcagggaatatcctatcattaggggacaataacaggaaaagccacagaggagaggaagaggattgagtgagagttcaggagagcaaatatcacaggcccggtgaggtctcaaggtggctgccagcaggggcagcagcattcacccagggcccccacacccacagagttgcccgagaggtccacagctcagctccactctgctgtttggccctcaggggttccagggtggggaggtggggaggaggcaagccagtccaggaagagtctggattccgtgaagggtcaagtgtagtgttggtctcagaagtcaaattcgtccaggtcccctgtgccctccccacctggagagccccacacccggcggtaattgctctccagctctttctgccgctggcgttccttctgggcctcttcagctcccggcaccaagatattgaagaagatctccttgaggtttctcgtgtcctcatcagtcagccaacgtgcaccctcttcagtcccttcagcccatgggcggacaattttgatctcaattttccctgtaggttggggtgatgggggaggctttttggggacaaccctctttttcttgtgcttcttcaccagctctggactctgtttttcctccagtcttttgatgag

SEQ ID NO: 336072 - DNA, 1000 bp, Homo Sapiens
ttttttttttttgatggtccagttgtttatttagaaacctgattgttcaagaacatggtgggtgcttcacacctttttcactgggattgtgctggaggtgataggcagcattctaccatttcctcagcaacagaggtgaaggctcctcaactcagaagcacaaattgtaggggacagggtgggcagggaaagggagaaggaaatcccaaggcaattcaatagaagagggtaaaacgactccaaacatcactaagggcaggtgggggcctgcttgctcagtgcctgctaagtgtcctgccctccttgctctctctacccacctccactcaaaagatcctactgaatctccaggtaggcagcagggaatatcctatcattaggggacaataacaggaaaagccacagaggagaggaagaggattgagtgagagttcaggagagcaaatatcacaggcccggtgaggtctcaaggtggctgccagcaggggcagcagcattcacccagggcccccacacccacagagttgcccgagaggtccacagctcagctccactctgctgtttggccctcaggggttccagggtggggaggtggggaggaggcaagccagtccaggaagagtctggattccgtgaagggtcaagtgtagtgttggtctcagaagtcaaattcgtccaggtcccctgtgccctccccacctggagagccccacacccggcggtaattgctctccagctctttctgccgctggcgttccttctgggcctcttcagctcccggcaccaagatattgaagaagatctccttgaggtttctcgtgtcctcatcagtcagccaacgtgcaccctcttcagtcccttcagcccatgggcggacaattttgatctcaattttccctgcagctgtgagtccctccctctccagcagctccttcaccagcccctcgatttgtttcagctgtgggttttcccgtttcatctcgaggacagtcagatcctg

SEQ ID NO: 336073 - DNA, 1000 bp, Homo Sapiens; identical to SEQ ID NO: 335391

SEQ ID NO: 336074 - DNA, 1000 bp, Homo Sapiens
tgtttttttttttttttttttacagcaactcagtttattacatgcagattcttctgcattgttgctaacagttcactggtccaaaattactaaaatacttaaaaaactatacattatgtaaacaaaacataaataagacagcatagttctttgtacatatatttagtacaggttgttagggattctggaatatgtacaattttacatcatggactgcatttttcacaatgcataaatatatatatgtatttttttttttacagaaacaaaaataagatttcactaatgacactgaataccatatcatagatatgctgcaacagtccaaattcaagaagaaacatgtcaatgtaaatgtgcaaaaggctagcttactctaaactattcaaactttgttcactttatgttctacagacaggtaaatcctgactttaaacacagaaccttgaaaccctcctcagaacagtaagtgaaatggaacagatctttccctccccaagaaaacaaagccttgttgcaagctaatgaaaagatacattaaaacacacacacacacacacacacacacacacacacacacacacacacacacacaatgtatagtatgctttcaacagtataataaacattgaaaatttttatgggagtcaaaacaatgccccattatttaaaaactggctcttttagtctaaattcaagatgcagctctgtcaggcttctctaagcccgacgactgaaaagcagggaagacagacgcaggacttcgactggcagatacaacaatctgagagagagatggagagagtgaagaaaccttagatgctggagtatttatggtattcaaaatggctccttctgggctaaccaacaattttttgacaggtgggtccaaatgaaacactgaagtgctacttggcagtggaggattactggggcaaatggcagaaaccaaagatgtcttagccaaaagagtagctggagacttaattactgaagtcag

SEQ ID NO: 336075 - DNA, 1000 bp, Homo Sapiens; identical to SEQ ID NO: 157586

SEQ ID NO: 336076 - DNA, 1000 bp, Homo Sapiens
tctgaacatcaggtacagtctgatccacaatgtcataactcattctcgggagtactcttatgcagtttgcaagagaaattccacgtggagcatcagctgaacatttatcagaattcagaaagccttcaaacctgagtattacacaatacataacgacaacgatacagtaataaaaatacaatatcaaatattactttgtgagttacaaactacaatataaacaatttaggcccttttttaaaaaatgaaaaaatatttctattacaggcttatttcaagcattttcagttagaaacagctttatatacttttactcacgatagcgaaagaatgtcttcataagtatctgtaggtaaaatatattacttgcttaatgtttgcactctgaagtatactttgacacatacaagttccgataagagaatgaaattgctgtggcaaaatcctggctgatgatcaagacttggagagttttcatattaagttaaaaaaatttacatcaatgaaaaaagaagcaaggacatacaaagaaacaacatcattcttttgcaatgaagcagtctaattccagggaatgggttttccattttgaattcaaagtgtgtggtcccaaagttgaattctttcaaatccaaggagctgcctgccactgtgaggcaatagcaatgatgaagcaagttgggagtaaagtgttaactgaactacagagatggtcactgataaaacaagttcctagaagtcctcgggcccacccagaggtgaagggcagccagaactatcaacacaaaagaaaaatgcgctcactgaactgcacacatagagcttctaggagggttaacagtccttgacataggttcctggttgtagtttacaatatctgccttcaccaccctctgtgactgttctatttctgctttgtttaatttgatcccaaggatttcagcagcaactttctgaaagcacaggaagacagagtctcctgtcttggctgagacaaagt

SEQ ID NO: 336077 - DNA, 1000 bp, Homo Sapiens
ttttttttttttttttttttttttttttttagcactacaaacactttttttaatgacatcagatggtacatttatacaaattacaagctacaatatagtgaatacaaaatccatccagaaaacggttagaaaagcatcacttaacagaagtaaatcggattcaagtagctaaggaactcaagccccccattttgatgattatacacggcttgaaatgcagcacatccaaatcctccccctagtcagggcactattcaatactacagcatattcaatgactctagtgatgtaaagattctaacacttttagcatcgacgtcaagagacatctcgtaacaggttcactatgcaaaactcaaatgagaatgtgtgaacgttctttgcaaactgtaaggtgctgtgcagatgttgttagctattgctattattactgttcagtgagattacactgaacgtggggaaaaggaagactactctgtataactgacaaatatgacttacagaacatcttaaaaggaatgcagatattactttcaaatacacatagcaacaacacaggcaaggaaagtgtggccaggagtgatgtcgaggaattcctattttaaggaatatataaaggattaagctattcatagattatgtgtaatatttatcattagattcccaaagtccctgaaaataatttatttttaaggtgaccctttccccctgaaaagggaaaaagaaatcttgtcaggttactaatgtgctgcttcagccagctcttgtaaaaattatcttaaacataggagtacagtctgaattaatagttatactaatctggtgggtgacacagagtgcttgacagcagagaaacctgccactgacctcagacaagtgacaaattctgtgtcagagttgaaccataagtttacaacttcacttgggcataaattaaacaataaacatgaacttgtctagagataagaaatacacactaggtacatctaaaatcggattt

SEQ ID NO: 336078 - DNA, 1000 bp, Homo Sapiens; identical to SEQ ID NO: 157587

SEQ ID NO: 336079 - DNA, 1000 bp, Homo Sapiens
gagttggagtcttgctctttcacccagtctggagtgtagtggcaggatcacagctcactgcagccttgaactcctgggctcaagggatcctcctgcctcagcctcccaagtagctggaactacaggcgtttggtatgacgcctagctaatattttcatttttcgtagagatgcggtcttgctgtgttgcctaggctggtctctaactcctggcctccagcagtcctcctgctttggcctcttaaagtgctggaattacaggcgtgagccactgtgtccggccttctttcctaatttcaatgacattttgcagacgcacattatggttctcagacacgttcttaagatctttaccccagagctcctttaattagaaaacgctgacagtcgatttataaagtagcattcagagtcacagagctcatccacgcccccttcagttgtcgggtgggtaggtcatatggcctggtggaataccccgcttggacagggggacctctgggctgagggacaggtagtccccctggaggaggcctttgcgtgaaggagggcggaggaggacctggaccagtccaaaggcaggaaggaagggcgatccctgcgtaccgtgaggggcagatttggagggaagttgggcgaactgacgatgacttaggtagtaaagggacaggccggtccctagcaaaggcaactgaagaggacagcgagggaggaccggataaaaggacagtagcagtaggtccaggactggggactggtgaccaagtgactgagcctgaaagccagaatggactagccctggtcaagaccggtttttcctcccaaaaggccacgtcctgctggaacagaccacagaatgccgggctgggaggcgtttccctggaagacccagcatagccatgccagtggggtgcgccataggcggaagaagaggggggttatgttggatcgatccactcagggaggggaggatgtcaatgacaggtactaagatggattaa

SEQ ID NO: 336080 - DNA, 1000 bp, Homo Sapiens
tgtttttttttttttttttttatacaagtatgaagcaattttaatgtactgaaagcaagttatataaaataaagtgtttttggagattaattttggttacatgcattttaaagattatgttgtcagataaagccaataaggaataatcaaattatttgaaaagtattaccttaaacaaaaaattcttactgattccattttaaagatttataacataagtacaagtttcccaactaagaaaaaaagagaagtgattccttcctccagagtaccttataatgcctgaataagcaatccaaataaatattttaaattttcagaaattaccctgaaaaatacaaataatgctgatatccaaatattcagaaatcactgcatagattggaataaacatactggtacttaaaattggttaataaatcatcactggagtaactaaaatattttagacattataggaacatacattgatattttcaaagatgttagtatctcagagacactttgcataaataagtattgctagttactggacataataaagtagaattattctaaaagctttccaaggataaaactgtgttagtatactggtagtaaaatgtataattaataaagatgctgcagctatattttcccacagtgaaatccttgcacaagagaagtatctgtaatcctggtctacagaaattatttaagatgtgctattacactaagaaatagaaataaaattacctctgtcaaattgtaccataatgacattaatttgatattataatatctatctctcttaagaattagacattgtctgtagttttggtatgagaaggttcagtaagaaagatattaaaatataatttgaccagcagaactccactatgagctgaaaatttagatgatttataaacattaatggaatggtggctgtctcattatgcttatttagtaagggaaacaattaaaatatgtacctagtacaacgatgacttttgggagtaaa

SEQ ID NO: 336081 - DNA, 1000 bp, Homo Sapiens; identical to SEQ ID NO: 157588

SEQ ID NO: 336082 - DNA, 1000 bp, Homo Sapiens; identical to SEQ ID NO: 157589

SEQ ID NO: 336083 - DNA, 1000 bp, Homo Sapiens
ttttttttttttttttttttttttcccttgtgtccaggtttattttacattctcttccagaggggatgtggggctgggggagagccagcaggcaggcgggcagcacacagcagtctccctggggaatatttgagccaggctagtggtgcctggccccacagtgcggggtgatatgccagggccagggccaggacttggcagcccctgggaagaggaggccttggggccagagctcttgccaggcctagatcgctaagaaggtgctgcgtctgtcccccgccttgctccgcccccccacacccagctggaggccagaaggcaaagagggcagccagcaagctggggtgctgggaggaaccccagcaggcgggggcggcctttggtctctacgaggctaggaagctggttctggttagaggaaccccgtgggggcaaagcggagagctggtccctgttagaggaaacgctggagcaggatgggggtgggggacttggggtctggtctcaataaggcctggaaatggtctccgcttcaaagcagacctctgtatttggggagtggggtggggaggaaatgaaagggctgtgggaggaatgcctgtgagtcgtgggtgggaatcagtccagggggcttcgaggggggtccgagggaaatgctgcgggggtcgtctgcagatgctgggagctcaggtcctggggaaggaggatgtgggcgggggtcctctccctcccacgagtgccaccgctccccaccccatcctggctggctccaagttgccatggagaccactcacaccggggcaacgtaatttccagggaacgttccgaatttctgggtcctccgggagacacccacaaaccagccatcgtcacactgctgcatgacatccaccctgtccccctcgcgcagctccagctcgtcttcgttctggggcctgtactggtacatcgcccggtacggggtccagtgtatctgagaggtgttaggagaggaggtccc

SEQ ID NO: 336084 - DNA, 1000 bp, Homo Sapiens; identical to SEQ ID NO: 157590

SEQ ID NO: 336085 - DNA, 1000 bp, Homo Sapiens
ttgaaaatgattactggtgaccacagcactccatgctcttccttatggaaaaagggttgcctagaagatttaggcaatactgggagttcttatttgaagtcacagaaaggagaaacttttctcaagccgtttttattacacttagtgtattaagacaagtacaaaataaccttgtaattaagatactgtatcagtcaaaaaagaagtcactattgtatgaagagatttacaaatgactaaaatatacaggctgtgacagaattaacagtttgaaagagggttgcttttttcttttagaaatgctaaattttcttaacaagacaaaaatacagtgctctaaatatgcattaccatgaaaacgttaaagaaaagcagtcttaacacttaactactattaacagcctttgccaacacatgcctgcctactccctttcctaactttaaagaactgtttcctctaaggaatactagtgcagcataacccttaaataatttcatttatttttaaagttacaacctacagagaaattaacatcttgtcaatctaataacagtggcaaccattcttcacatgcacttctcttagaataaatccccttggctggcaggataaggcttatgctgtagaaccttctcccccacagccacaaatccccttctataagtccctcctaccctcatccccccgcatccccactggcattcacctttcccaccccaaaaagtgcagctcatggtagccttctagaaaatggttttaatgggtatcccagcatacacgcttttttaaaagccccctctgaacaccagaggtggtgaaaatgaattgtgttcttggatttttttttttttaagcctccactgggtcaaaaatatgtgctcttaatacttgagtttttgctttgtgtgtgggttttctttctttttcatttagatatcgtgggataaagtggagaggacatctccattttcccatacaaactgagggtgagaagagaaa

SEQ ID NO: 336086 - DNA, 1000 bp, Homo Sapiens; identical to SEQ ID NO: 157593

SEQ ID NO: 336087 - DNA, 1000 bp, Homo Sapiens
aaccacagaaacaacatgacactggtatagcctatatatgattactagttacctacagcataatccaggttttaaaaagtcgaatttaccaagtaagaaagttgtctaagcagattctaacttcaaactgtctattgttccagatgctactttgtattattaaaagatactggtttgcatgtgaactgcttatcaaatcccacaagttttataaagactacactagaataaagcaggaagagggtcatggccatttaagcattttcaaaggcaaagcacaagaatccaagagtaattcacaatagcagtgttcctgagttttgcttttccttcttcatgtgtaattggatataaggattatatatctggtataaaagctaccagtggtttaataaccccacaacagaaatggtttaattggttaagtaagtaccaccaatgacgaggatacataaggtacaaaggcttccaacaaatctagcaaatccagtgcagaactaagaacaccctataaaaaaaccagattcattaaaattcctattaaaagttaccaatacaaaaggttttctttgtattcaaaatactgaaacagctgtacgtagtttgtaaattttaagactaaaatctactgttggctttcacttgcaaagtcatgcattaacttttcatatcaaactttttgatgcctgtaacatttgatttccagtcccatccctcaacctgtacggtctgataactccatcttcattgaagaaccgaggaggtcgcagactctccacttcagaagtctctgtagctctttttattccctgaaatgtactgctagccatgtctatgatgcctccagttggccttgctaccgctcctactaaacctttcccaacacctttaaagaaaccagctgctcctcctttttgagctcctttgattggttttgtaacaattcctgttatgccactaacaaatccagaaactaagccttttcctccacgagtgatgc

SEQ ID NO: 336088 - DNA, 1000 bp, Homo Sapiens
ttttttttttttttttctggtttgaaaaggttctcaagatcacttttaaatgggtgtgatgtgtattttttttaagtagcaggttcattttaaaacaaaaaaggttagtgaagactctgtctttcaaaacataaaaatctgcgataaaaccaattattccatacagtgactacggtcagttctgagaaatgacacccaggttggcgatgtgtctcatggttggccttccatggggacagttccaggggtggtccatctcccccatgtgggtgatcagtttcttcatctcgcttgtgttaagagcagtcccaatcatcaccgacttccggcaggctctggaggcaaacatctgcttgactcgggaaggccggcacatgaccccagggctgtcgctcagcatgaagatcagttcatcgacgtcctggggtccgaaggtccagtttttactagttggcaaggaaatcagtttagccctttcagtgactggagcattttcatcgataacaaaatcaaagccattctttctaaatatttccagattttctatcagaacagcttcattaacagcagttaagttgagagtctgaggtgctatgagcctctgcccctggagcacggtgtgctgctgcagcatctcgaagttatacttctcgtccgtggcatgctggtccactatgaagatatcctcattcagtttggttattataaatcccaggttaaactgaccaatgatttccatttctgcaaacatcgttttacttatctcttttcttagttcatcttcggctgcttgattttctccaggacaaatctttgccctaaacttcctgtaattctgttccccttcactttgctgtgcttcatgatgtaactgctttattcgtttagctaaagaactcatagaaaagtccaggggcacaactttcttattaattttcacagctacatcaacctgagaggctgacatgtcctgagtatttactaacttttgacaaatgtc

SEQ ID NO: 336089 - DNA, 1000 bp, Homo Sapiens; identical to SEQ ID NO: 246407

SEQ ID NO: 336090 - DNA, 1000 bp, Homo Sapiens; identical to SEQ ID NO: 157594

SEQ ID NO: 336091 - DNA, 1000 bp, Homo Sapiens
aacatttcataattatagtctttcatttaatatatgcaaagaaaatattggtacattttaaggtatttttacaaagatttttgtatgtattaaagtacaccaaagttctccattttcttagaaaataagacacattactttgttattaaaaatgaaaaatagcaataattacaaattctacagtcttattaacaatgttttcttgatctaaccaatgtcagattaaaattataggaatgttacttcagctatttgtatatgtaaaacactattaaagtcaaagatttttaactacataataattattaagattaaatagctgaattaattttagccttgtatgccataagcaactgctatgctgttagataagattcttgaatttcgtttgcttttaaaattcagtatcatatttaaagaacaatatgtaacttcttgattatatataattctttcagcaaaatcagtctcttcttttatttgtatattttgtctgctacataaactaccagctttagcacaagaacaaaatttatattctatggaaaaaatacagtgacaatatagaatttttgcaataaaacagtagtgcagggataaaagaggtagtattacaaacacaaaagtctttactgttattctttatgcctgttggataatgtaagaaaaagacattttacagagaatttcatcagtagaaaacacaatagaagtcatctgattatgcagaaatacacataaaaatccctttacaagcagataaaaagttcccttttatgtataaagcagtagacaatagtacttcatcattaagttggttgaatcctgggagatatattttttaatcaaaatagctgttttcggataatctcctatacattcaaatctctatggacctcagagggaaaatgtagcactgaaaattttaagaaaagctattttttctgcttttggattgtttccttgttttcaaattaaaattcatacaaacaataaaaca

SEQ ID NO: 336092 - DNA, 1000 bp, Homo Sapiens
ctacggatttattcttattgcccaggcttgagtgcaatggcgtgttctcagcttactcaacctccgcctcttgggtttgggtaattgttgtgcctcggcctccctctgcctcttgggcttgggcgattgttccacctcatccaccctccgcctcttgggtttcggtgattgttccacctcatccaccctccacctcttgggtttgggtggtttttccacctcggcctcctgagtagctaagggaggagtcttgagattatcatccactgagggtggaagaggagagggtggaagcgggacaaagagacattccttcagattatcatccactgagggtggaagaggagagggtggaagcgggacaaagagacattccttcagattatcatccactgagggtggaagaggagagggtggaagaggagcaagaggacactccttgatattatcatccactgagggtggaaggggagtgagcagacactcaggaggtgtcttgaggctcagggagttatcagttatagaatgttgttgagttggaggaggtggctggcggcccatcctgttttttaaagtttcagctgtgaggtagagccagtagggcaatcctgaagaatgacgatgctccgctgccgccattctgacccagttgcaaagaggctttcttgcagaaggggggattttgcatttgtggtagtcctctgcccgccgccgcaactcttgcgcacgttgaaacattttctgttttctggcggtcttcctctttccattgattttgtcatgacggttgattttcgttgtcaccttcctcttacggattttagytctaacttttgtttccacatgcctccgtagagtaatgacgtctttcaggccaattttatttcctcgaaaggaagaaactcttttctttgtgtgcatacaaatggacctcagccctttctgtctactgyggttggacctccaggctctctgctgtacatccatggatccatcatgt

SEQ ID NO: 336093 - DNA, 1000 bp, Homo Sapiens
ttttttttttttttttttttttttttttttttttttttttttttttttttttctgcaaatttgtgcgttttaattttacggtaatgtctaacatgttgcagggttcttcaggggaccagtcccaatagagggagaagaggcagggcttgtcctgcctccagtgccagctgtcagtggcagcagaggccttgagggttgagcatcttctggatccagcagaggcctcccaggaggggagccaggtggctgaaggcaagcactgggagggctcaggttctgccctgggggatcctgggactggagattggcacctgcccccaaggcttggcctgtgcccttggtgccccctttgcctgcccaagtctactgcatgtgagctcaggatcctttccccgtaagccaggacatgtcgccagtctccacctcccgcttccggatggcacggcctgaggccagcacctcagcgaccttggacacaatgggatcgtagttcatgctggccacggcgatcacctcgtcgcctttagtgtaaaaagccacaaacttcagctcctccagatccccctggatgatgacgtcgtcgaagccttctccgtagcccgcgtagcgcaggctcttgccaaacatggcggtccagaggtagggcacagtgctcatctccgcctcctgcgccaacatgttctgggctgccacgcgcccctgagcatgagccatctgccaatgtggaatgttcactttgcggttgttcctccaggcaagggggaaggtgacagcatcgccagctgcaaacacgcctgggacattggtctgcatcatcttgttgacagggatgaagcctcgggaatccaaaccgatgccgctttgcctcaggaagcctgtggcgggcactgcaccaatgcccaccacgcagacgtcagcccgcacgaccttgctgctcttcagcacaacctccttcagctttccctcctggccccgcagctcagacacctccgtctgcatg

SEQ ID NO: 336094 - DNA, 1000 bp, Homo Sapiens
tttttttttttttttttttttttttttttagagagaaatgattgacagtaagtttattgttaatggttcttacagagtatctttaaaagtgccttaggggaaccctgtccctcctaacaagtgtatctcgattaataacctgccagtcccagatcacacatcatcatcgaagtcttccccagttataaagaggtcacatagtcgtgtgggtcgaggattctgtgcctccaggaccaggggcccaccctctgcccagggagtccttgcgtcccatgaggtcttcccgcaaggcctctcagacccagatgtgacggggtgtgtggcccgaggaagctggacagcggcagtgggcctgctgaggccttctcttgaggcctgtgctctgggggtcccttgcttagcctgtgctggaccagctggcctggggtccctctgaagagaccttggctgctcactgtccacatgtgaactttttctaggtggcaggacaaattgcgcccatttagaggatgtggctgtaacctgctggatgggactccatagctccttcccaggacccctcagctccccggcactgcagtctgcagagttctcctggaggcaggggctgctgccttgtttcaccttccatgtcaggccagcctgtcccttctggggtccccaggcgacctcagagccacccgagtcctgcacgccacggctgcacggaggctggacggtgctcctgctccacttcctttttctaggcaggtcttgactgaagcgggggcctggctcctccattttggatgaaggctgtttgctgaaacacactcctgttccttccagctccagttcttgggagtccttttctagatacttcagccagcgactctctgagggctgcgatttttcctgctgcttcacattcccagcctgctggtgtcccacgttttcttcttcactggcactgacagtttcttctagagacctgcaaaaaggactgcttctctccacaagc

SEQ ID NO: 336095 - DNA, 1000 bp, Homo Sapiens
aaatcatcaacaaagagaacaaacgacccaactctcatctctcataggccagcatataacttgaatggacgtaaggtttatcttgtcaactccctcgcttgactgcagttgctactggatttccttttgttctgttaatttgcacttttgaatttttgagaattggctttcaaagcctttaatgaaaaataaggtgttccagtaattaacaggcgcaagcaaaacctaaaacagagctatcgcaccttcagaaacaaatatgaaataacatgacctaagatgaatgaaaatcactccctttcaatctggctcatgttataaagatgtcaagtttagcaaaattcccctcacagagggtagcaagttttcttgaggaacagaaatatttttctttcttggtatatctgaccattcaaatagctgtaaatttctatttaaatttgagccctctttttgcaaaaccaatgactatgcctagaagcacacttccagtgcttggtctgggcacagcctcccgttggcatgctgtgccaaattttgtattttgactttttgaatggagtgaaggaaacaaaaacagcatactgacaatggagtacacttggaatgaaaccactctcccaactagagcccagagcaagggacttgacctgtgtacactgaacatgagtgcatgtgatgccctcagggtgaggtttcctttcccttagggattgattctgcccttcccacagtcctgtgggttcgacgtggatgaggatttccaggcttcagggtccatattcattaaaacccatcaccaccgtacaacgcagagacattgatactcagctaataaactccattagcttcccctaattgtataagtcatacctttttatggatctgctctacctatcagggaaacgacgtctggagcagtagtgtctgcacacaaggtattaatcgacgaagaccatgcacaattttgcttgcacagttaaaaggacgggtgggcatg

SEQ ID NO: 336096 - DNA, 1000 bp, Homo Sapiens
tttttttttttttttttatatgacagtcttgtctttattggtatatgcgtttggctctgaatgatcaactacatcacaaattccagtacaaaagatctcattttcggacagatcatatagataaagaattccaagctccattggtcactcatacatacacgtgggcaagccctggagtttctgaacataggaagagaatgcaagtcatgtgttaggtccgctcccttgcatgaaatgtgggagagggaaataaagttaggcaacatttagcaatcaacagaaccccttccctatcctaccgcagcccaacatggtgcagcagcagcaggctgaatggttgagaccagtgcaatgaggtggcaggaagtgccctggtaggaggggggtccttggccacatggggagcttacagagagaatcacagtaatacacagatgtagtgcccattagccagcagggtttccttgaggaacatctatccatacccacccactcaaagtcccctctctccaaaagtaaatagatggcatggggaccatatgaactaatcccccaacccagcaacccttcacatagctccgccctcacaccaaagttcttcctcatactgagacaagtggaggcacaaaggccctcaatgacatgaatcctcaaagagaactaaagaggacactgagatgttaacgccaagaactatgccgatgaatcagccattagactcaaatctggctaagatccactttacttaaaaactcaggatgtaatatgtaggaagtggcagagcatatacacaatccgagaaggaaagtgtgattgattcaggacatgagtgatgatcttattctgcctgctacttggccactgtctccctccccaaagctcaggagtatggaaatcaatggcatagctatgtatcaccaatatcttactaagaaaatgagtgttttcctctttaaaatccaatgtccataaaaatctaggtagaattcagtgaaatcaa

SEQ ID NO: 336097 - DNA, 1000 bp, Homo Sapiens
gactttggacaagtttattgacttctttggaacctcagttttctcatttgacaaaactagatggtcaagaagcgtctaggattattgggacacgtaaattacataattctgacacagcccccccaactctgggttcctggtatggggtaagtttttagtaaatgtgagatgctgtgattagtactgtgaatatgatggctatttcaacagaagaattataaagaaagggcttcaggaagggattgggagtgactcaagcaggcaaccatcaaagcactttgtgcaaagatcaggtccttttctgagcactgaaaatttgcctatttagagatgcggcaagctgaagtgacatttactccccgcggaaggacacaggaggcagacgagtggtgaagctcattatctggtgatgcagccgcagacgtaatggtcaaagaacaagacttccaggggctgccccaagttcgccacacacgcctcttgattagaaagaatagtccatgcaaaggtagggcattttacacagcactgcagacatgcagagaaggtgctcagaaaatatctgtcgaaagtctggttagaggagatgagaaggaatatcttccaagtctcatgatatcacaaactgaatagcagttttgcctcacatccttttccaaagaggtcgccaatgttgattcatccctttcttggtgaagtttgcataaatgagggtgggactcaggagaatgtgtcaaggaactggcccaaggtctctctctgttttggccccattgtgcctctctgatggccttttgggaagactctggcctgagacccaggccttcccctgcatctggggaggcactgtccctccagctgtcctcttgatccaggatggggctggtacatgagtcagtacatgttgccctggtgaattctttgtcagctgagagttcaggtgtctgccattcctgctccagctcaggcagcgcacctggagggggtcggcaaaggagga

SEQ ID NO: 336098 - DNA, 1000 bp, Homo Sapiens; identical to SEQ ID NO: 157579

SEQ ID NO: 336099 - DNA, 1000 bp, Homo Sapiens
ttttttttttttttttttattattgagaatttactgtgtatttgtcagtgtgataaaccctttttatgcactatttaatcctccaacaatctcatgagataggtactatcacaactaccctcattcaactgatgtggaaactaaagcttagggaagttgagcaacttagccagatcacaaaaccagtgactggtggagttgggacatgaactgagattttgcctgggactggaaactgcaaacgttcatgacttctgtgcctcctggcagtcctagaagatggttggaggttgtggagaaagcttttccaccattaaggtgctgaggcctggaggctgtgccacaccttccccaccgcacataccaggtttccagggtttgcccagccaggaggtcacagtaacaccaggtggaagaggctggtcaatgccctcccagtacacgccaccatcactggtctcagccacattggtaaaaatagtgttactctggattgtagccatggcgttgggattggtggtggcagaggtaccaggggcaaccccaaagaagccgttctcagggttgatggcccggagtcgaccttcactgtcaaacctcatccaagcaatatcatcccccacacactccactttccagcctggcagtgcaggccgcatcatagccaggttggtcttgccacaggcactagggaaggcggctgccacatagcgcttcttccctgcagggctggtgatgcccaggatcagcatgtgctctgccagccagccctcatcccgggccagccgagaggcgatgcgtagggcaaagcacttcttgcccagcagggagttgccaccatagccgctgccgaaggagatgatctcccgctggtcgggcacgtggccaatcagggttttctctgggttgcacggccactggctcactggctccccttgtcctgtcaggggctggcccacggagtgcagacacttgacaaagtcaccatctcccagggcct

SEQ ID NO: 336100 - DNA, 1000 bp, Homo Sapiens
ggattccaaagctctcagcttcattttattagttacgttaggtaagggggttcaagggtcatggtcctcatcacacacatgtcatcagggccctctgcactccacatgatgaggtcagacccacacggtgcaaatctttgggtcagtgagctcccctgcctcacttgccgcagcccagtgcctcctggctcccgctcctggtgctactgccccttaacaggctccccagggcataagcagctgcatcctgcacactcacaaacagctgatctggagtcaccctgtccaggagtcctacccgggtcagtgtcccctgcaccaaggcattacactgagccaggaggaggcggatcctagcatctcgacatcggctggccagctgcaccacttctctggccccagcagcatctgcaaaggtgacaccactgaagtctaggaccaccaccctgacaggctcagcaactgcaaccattgggccatctggctttgaagtctccttttctccttctccgagccccaggtgccactccaggttgcagcgaaactgcccacgggtcccaaagtacagtggtgttggatagctcaggatgcagagccccgggacctggaggagctccgggtgcggcagaccacagtcatcatggagaagaccacacccacagccaggcccaaatccacactcagggtcactactgccacccaggtgaccatccacacagcaaagtccactcggctgatgtgccatagttgtggaagttcctgcatctggcagaacacctggcgcatgctggagatgttgatgcaagccaggacagccttgggcagatagtaaaagaagggccccagccacagcagcaccgacaggaccactgtgcaggagaagaggcctgccagctgtgttttcccaccagcatccaccagtagattggtggtggccagcgtagccgagttgggaaagcaagagaagagggaggagatgaggttggaggcaccatgtgcc

SEQ ID NO: 336101 - DNA, 1000 bp, Homo Sapiens
tttttttttttttttttgaaatcacacagtgctttattcactgtttcagtaaaagtaccgaacggtacaacacatttaattgagcagttaaacagttactgtgagggatgggaaatgaggagcaaaataaagaatgaaaaggttgacaaggcctggaaacagtggcaaattctactggtttctcaagacttcacttcaaggtcccctgcccacactagagggaagcaaaccccagagccccatttccaccaaaccccgatgtccaccttccacccagcccccactcctcagcttccgcctcccgacctgtaagggtctccgcacatctccacagagccatggagagaaaaagctaatagggccaagctttgcctactggtgaatctgagcaggatctgtggaggccaggcagcgggagtctgtagaggcacagctacagtgtgttctagaaatgtggggggctgagaggcagggccagctctagagcctgaatcacacccagggaaggaggagcaaggggagactccacacaggaggaggtcacagtgagtgggacaaacattggtgcaggacttccagaggcggaacaggatactgcagtgggcgcaccttccgacctcatcctcacaggaaaaggctgaccagagcgttccccgggctttcccatggtcgcctcctcctcacgcacgttatcgtaactggcagaggaagtgtgctcaggagcgggctgctgaagctcagcacctcacgatcttgtgagtggaggactcctcctgtactccagcagccaaagcgtcaagtgcaaaaatcagcattctctgcagtacatcaaccgtgacctgcggcattttttcaggctccacagttcttctcagatctgagtttttctgaaatcccctcaaaacaaacatttgaacaaaatcagaaagcatggccctggcgacgtcagcatgctggcaggatgcttccatctgttcacaaaggcagcacagattcctga

SEQ ID NO: 336102 - DNA, 1000 bp, Homo Sapiens
ttttttttttttttttttttttttttttttttgaacttagaacagaatttatttgtaaaattggtacaagcctaagttctacaataaatcagagtttcaaaactagctcccaaagtccagaatcatgactcagagattttactctgcagtgtagcacagctgggtttatccaaaccaataaataatgctacattagaatcctgagccagggactgtgatggtgttagacaatccatgatgtccacaagttaataaagaccccactttaagaacaaaatatggctgggagcggtggctcatgcctgtaatcccagcactttgggaggctgaggcaggtggatcatgagttcaggagattgagaccatctggccgacatggtaaaaccccgtatctactaaaaatacaaaaattagctgggcatggtggcatgtgcctgtcgtcccagctactcaggaggctgaggcaggagaatcgcttgaacctaggagatggaggttgcagtgagccaagattgcagcactgcactccagcctgggaaacacagcgagtccccgtctttaaaaaaaaaaaaaaaaaaaaaaaaagaggaacaaaaaaggatcctaccagtaagaaaggcaaacagcggatttcaaactctaacacaaaatgatcacaggctggcagagacacagaagcaggcaacaatttatctggggtctaatcagagtcatcataactctcatcactatcttgctccttttctccagcacttacttcgtcttcttcaccatcctcagtggctttgctcttggaggcctgggatgacatgtcatcctcactctcatctgctgtgctctcctgggaattttgggacttaatctcttcaccctgcaagtcccggttttttagattgcccagccagaaagcctctctacaattgttgagagtgagcatagctttgactctgcaaactaaaagttccagggtctttttgagcagaggcacatgttgggtgag

SEQ ID NO: 336103 - DNA, 1000 bp, Homo Sapiens
ttttttttttttttttttttttttttttttttttttttttttttttttttttttttccggcttccaaaagctttattggcaaatatgctctataaaagaatgatcaatcctgttgcctctaagtcaatggaatgaagagctgtgtccagggacacaccacgccgtgctgaaggagactgctgttgtgtccacctcttattcatagacccagtcatgagcacaagacttgtagtcaaccagttcttcaggcttaaaccataggctgatttctttttcagcactttttactgaatcactgccatgaatgatgttcctgccaacctgaatgcagaagtccccacgaatggtgcctggctttgaatctgctggattggtctccccaagcatcactcggcctgtcttcaccacgttcagcccctcccagaccatggccacaaccggccctgagttcatgtacttcaccagcccagggaagaatggtcggtctttcaggtcaatgtagtgctgcttcaggtgttcttcagaggcccggaggaacttcatggccacgaggcggaatcccttctgctcgaagcgcttgatgatctcgcccaccaggccgcgctgcacgccgtccggcttgatggcgatgaaggtgcgctccaggttggccatggtcctgccaacttgtatgcagaagtctccacggatggtcccaggcttggagtctgcagggttggtctccccgagcatgactcggcccgtcttcaccacattcagcccctcccagaccatggcaactaccggccctgagtgcatgtatttcaccaggccggcaaagaatggacggtccttcaggtcaacgtagtgttccttgagaagatcttcggaagcttgcatgaatttcagaccaacaaggcggaatcctttctgctcaaaacgcttgataatctctcccacaagaccccgctggaccccatctggtttgatcgcaatgaaggtacgctcacagttggccatg

SEQ ID NO: 336104 - DNA, 1000 bp, Homo Sapiens
tttttttttacaaatgagaaaaatgtttattaagaaaacaatttagcagctctcctttagaattttacagactaaagcacaacccgaaggcaattacagtttcaatcattaacacactacttaaggtgcttgcttactctacaactggaaagttgctgaagtttgtgacatgccactgtaaatgtaagtattattaaaaattacaaattgtttggtgattattttgatgacctcttgagcagcagctccccccaagaatgcagcaatggtatgtggctcagcagctccatatcggcaaaattcgtggacataatcatctttcaccattacagataaaccatattcctgaaggaagccagtgagacaagacttcaactttcctatatcttcttcaacttgatagttagatactcctggatatctaccctgttgtttatgaaatctatcaacagcccgtaacattaagtacaacactatttcattatctggattgtccatgctagaaataatttcatccttgttaattgtatccaaaccatattcttcagctaaggatcgacatcttaccactcgaagaaatgcagaattgctgcagagtaattttaattctttctctgaaatggactctggtgcctggccaatggactgcagcaatttggcaacatgattacccacagcggcagcatctttctttgctttttcacggtaaacgttttgcagttttatatatttgcctgaatctgcaatcatatcaggaattgtgcctcgaacaggtaaatttccttgaccctctttggccacaaattcctttaaggcacgagctaaaatccaaaatgatggagtctgtttggtgatatttatgcagcgatcatcattaaatatatcttcaatactgcttgggatctgagttgtatttagtgctgtgttcacatttttaatagcttcttcaaaattctcttcatcttctggagccccattttcattttttagaattccttgt

SEQ ID NO: 336105 - DNA, 1000 bp, Homo Sapiens
tttttttttttttttttttttttagcataaataaaggttttattggtcagtttgggtgagtgacaaactgacatggccccagttcactattccacatatccaagcccctgaggtggcaagagaagctaagcttattaatggtgggcaatgggtgagaggtggaaaggacttgaaggcctctgagggttaacaaggctaccgggaccggaaccaacgtcccaggaataagtccaggatggaaaaggcatcatccagggctggaggtcttggtgattctggatcacccctaggactgctatctgcttcgtgtcgggttactgtagtctctgtccggccctcactgtccaccacagtccggcgctcctccactatcccatctggtttagtgatcttggtcacagagatgctcttgaaataggatttgggctggggctgtagaaccgggccaagaccctcctgggaaacctgggaatcaagatcattgtcctctctggttctaggatgggggtccataggccatacatcatcaaacctatgaaatggcctctgggagccccagtctggtgctggttggggggattcacttcttgcatcactctccaagacccccccaaagatcctgggctggtgactatctggatacttaagcattgagtcccgaagtgtctgtccctcccgtagtctctcaccaggtgtctctgactcaggacctggaagttcaggaggatgggaaggcaaggtccaggcccccatatcgctgaagatgctattgaaatctcgtactaggtcatcaaagccgaagttatcgtggaaacgtatccctcctcctgggctgaagctccgaggtccaggaaagccgaaaaagccccggaagagatcaaagaggctcattcccgtactgggacgcgaacctttgaacccctccagtggtccattcgcagacgggggaaacctgcgcagccctgtgagaaattgagcgaggcgtcagcccacgctaccg

SEQ ID NO: 336106 - DNA, 603 bp, Homo Sapiens; identical to SEQ ID NO: 157601

SEQ ID NO: 336107 - DNA, 1000 bp, Homo Sapiens; identical to SEQ ID NO: 157602

SEQ ID NO: 336108 - DNA, 1000 bp, Homo Sapiens
taatgaaaaagcagatttttttattatgatgtttctccatatttggcattgctgtaaatggctaacatttactgccaattcggtacaaatgtgtggtttggtaataccagaacagcaaatttaaatgaaaaaataaaagttaaacatttccacacaaggttttacagtctgacatttcactgcgtaggtaaaaagacactttttttttaactacagattattattcagcatgaataaaaaactacaacttttatttttaaacaggagtcactggttttaatttttacacattttaaaattactgtgataaaaaataatgaaaaagcttcttaataatgccatacacagtataatatagatttgtccccattatatagcatttaatatacaaaatagaatattgacacacttgaatctatatgtagttaagcaagttatttgaggagggtattttcatacagcctttcatcagaaaataaaatcctttcagacattttctagagagaagcaaatcctttcctgaaaacctggtcactaatcctgggtggaccaggttgcttgaaaatagtctgggaaattacgaaactccacccaaagggtttaaagtgtcctccttacacttttatttcccttctgacactaaaaccagacacacacacacaaaaacacattcacctacagctacagtcagggagtgaccagccaagatggaaatctcactgaaggctaccatggttctggaagtttgacagatcaatgtattgtataacaatatttttcattccatggtgatgtagttttcagggtttttaaaagggaactaaaattatgagacttaggtgaaactggaattgctccctgcctctgaattctgaagggagcgtggctttccttcatggcatgcccagagctcatcccatgctaattatccagcacttcatagacacaaatcatgttagttttccttttggggtggccaaggtttcctcccatagtttta

SEQ ID NO: 336109 - DNA, 872 bp, Homo Sapiens
tttttttttttttttttttttttttacgaatgaggcaatttattaacccagcatggtttgttctaatgcttcttgttggcagctgccacctgtccggcgattctgtccagatctctttgtccctgaggtgtcagtttgcggccgccatcttggtccttttccaccattttcagcccctccagggcttggaggacccggcgggccacactcttggagcctcggctgaagtggctgggcatgacgccgtttctctgacgtcccccatagatcttggtcatggagccaaccccagcgccaccccggaggtacaggtgccgcgctgtggaagcagctcgcgtgtagaaccagttctcatcgtagggagcaagctctttgtgcttggccagcttgacggtatccacccattcggggactttcagcttcccggactttttgaggaaggctgccagagctctgacgaactcctgctggttcacgtcttttacagtaactccaggcatcgtgcggcctccgcgctgccagccaggggaaagggaacgacggggtttcccgggcgcacaagtcgggcgtagggtctcgcgagagttccgaaagctcgcgagagcgagggtagacgctgaggctccgcctctctcagggcgaaagttcgtccccgcctagaggggagggtgtctagtgaggggtggagaggtaaaggggagggccaaggggtcgcgcgtggaggcctgggtttcctcccgcgtttccttctcccggagtgtaatagagagaggatagagagctcctgttcggagctgggggaacttggcttcgtttgcgtcgttcgtggctggaaggaacagtggtggagaatactatgatggcgaaagtac

SEQ ID NO: 336110 - DNA, 539 bp, Homo Sapiens
ttttttttttttttttttaacaactggtcatcaatttattaaaatagttgacttaagcatctgcaatggtgacttccacctcaactcctggctcaatactgatggaagtaatctgcttaacaatctcagaaggactgtgcaagtcaatgagtcgcttgtgaattctcatctggaaacgatcccacgtcttagaaccttcaccacaaggagtttttcttgtagtgattctcaaagtcttggtaggcattcgaactggtcctttcactttgagattcttttcttttgcgcctcttatcaagtcagcacacaccttttccaaggattttacgttgcggcttgttagggtgattcgaattcggtgaattgccacctccggctccacgggtgtttttccggtatccttaaaagccatggctgttgcgcgcgggcttcctgaccgacttgttcctcggcgagagcgaacagcggtgagtcaggagcaggagcgtgcggaccaaaaatcctcagcccttacgaccgcgtcttcctcaaaaagaaag

SEQ ID NO: 336111 - DNA, 1000 bp, Homo Sapiens
ttttttttttttttttttattatttctgttatagaaaattttatttgcttaatgtttgttacagaaacttaagctaactcagcatttttccatttaagttactgtgaaaaagagaacagagcaggccagagactgctattctttgatcttgcaaggttcatccttggctggagtccgtactttaggttttgggaagtttcccattgttcccagtaatgagaagtagctccgtgtgcctagattgtcttacgctgaacacctcctgttcttctggaggtctacaattgtggtatgtgctagaaagcaagtccaatataaactctgagcaatgggtgctcaagacgacttcctggaacacatctcacgtgtgttgttttaagtcccagatggagcttcaatgaagcacatcctgtgtgatttcattaagattctcaaagattgtgcctggtttcctctggacttgggtttgagccttttgctgagtttgctctggattctttcggtgtggtaaatcatagccattgagtatgacaaaatgctgagtcctgtgagtcttcctagcaaatcaaatctggaaggggtcttgaggactccagcattcatttattatgatttctaaaattgtgtacgtaggtccataaaagtccatgtagattctcttcgaggtcaaggtacgccatatatggtgccacctatatgcacagctttgtggtaaacgcgctgagggaactgaaaataataataaaaaataccctgctgtgtatggccatttaccaacacacacatatatattgagggtctactacggaacaaaaaggaatggggcagtggccggacgtgggaatgataaaggaaaaagaaatggccacaatgtgtctggtttgagtaacatgacagaaattagggggatacactgatgttcttcaggcatctcaaacacacctaaaacaacatgcatgccttagcccttctctactccttctccccacccctcccacat

SEQ ID NO: 336112 - DNA, 1000 bp, Homo Sapiens
gaacttcatgaagttttaactgttgattctttcccaagcatcatcaagttatgatttaggcaatgtatgattgaaatgcattcactcatcacgcataggcacaatcacagaaatattgcacaaaatatgtccctgactgaaactgagaggtacaaaaacatatttcactcttcgtaaagaagtttgtgaggaaatacaactctgcgatcgtatagccatgtttcctgataatacattgacattcacaaacagtagattgcagcacagtgtgtaaacattttcagttgcataaacttctccttgattttcaaagataatataatactgtctactaaaattcctttttgtttcaactaagtactctcacatatattagtttataataatgtttgttattattttctaaagtgttttccactcaaggaaaagaagtaaattcctatgtcagagtaaccgaggtggttggagaataggtattagccagagaggtctagatagtaaaatcaaacttcaagcctcaaagaagctccatgaacagagaggaatgccaggtgtcacacagctttccttcactctaattcattcttgactagagcctgtatgcctgtttcagagacatttaaactcttaaaggatgtcttatgatctttactaaatacattaagaagaatgccaaccagcgccctttcgtgtactggcacaggtagtcatgtgattaaaacagggaacacgaactctgactttaaaatgtattgtagatacaaatgctctaagctaggaaaggttttccacatccacagccaacgatggcagcctttcattcctcggaaataagccatttttaggtcactgaaaaagagtgcaactgctgcagctcacgatgcaatatcttcatgagcccagagcacatacaaatccaaagggaactgccacagtacagtgctcattcttggcaccggaacagatgaaacacactgtatcctgcacatacctgccagag

SEQ ID NO: 336113 - DNA, 1000 bp, Homo Sapiens
ttttttttttttttttttttcaattgttgaaaatatttatttagaaaaaaatatttagttggaaaacagaagaaaccaaagaaaaacacacttcatgtaaacaacagaacactatgctaagtttagttctacaataaaagccacacaaatctgtgtgtggctaaggatgaggatacagagaaaagaaaaagaaaattgagagagaggtagaatataactctttgcttactgcaggtcttgtctggaggagaacctctggaaaataataagttaggatggccctagtctaccagcatgccagaggcagaaccaatataatctcctaaaatatgagatttgtgtcaattcttagggttactcactaaggtggtttggttccaccaatgaataaattttctaattctatactaagctcatcctttggaacatcaatctcatctccagattcttctccaagcttcttccaccagggtgcttgtatgtgcttcagggttgtgagatgggcctgcttggccttggctgccacaggcctggatctacttaggaagagctcaggttctttcccttctgcctccttcagacttggtgccttcattagctgttcaacgttggtgctgatctgtgctatcagagcttctctgtgctgctgggctcgctcttctagggccctgcccataaagtagtgttgcagtcgttcttgagcttgggcatggagctccctactgaccacatctgacattggagagcccaaatgtcttctgacatagtcatccactcgtttcttcagttcaactcggcgtgcatcagtgagttcttggagtcctcgccaaggagcaaatagtttctttttcttacggtacttcgctaggaatttaagcgctgctctttgaagtgtgacagctgctttatactctatgagagactgcctctgttggtgaaaatttttcctttccctgtaccctctccaatgtttctggataatcagtgctgatttctcttc

SEQ ID NO: 336114 - DNA, 1000 bp, Homo Sapiens
tttttttttttggaactgaccagatatagtttattaaaatatgttcattataaacaattttacctcagttttgtaaaaattgtaaatacatcaaaaactgttacagtgtcgtaagattgcaaatattgccttataaaattataaagaagtaaaattgtttagtaaaaactaggaaatatcttatttcaattttccacatataaaaatatattttttattgcaatactgaacagttaaggccacaacactttagggagaatttgagatacacatattttgaaatgacttgttaaaaatattagcataaataaatatcaaaactggtcacacttatagaagctgaataaaacatattaagtcttatatcttttaaagactactatcagaaactttacttcataagttataacatttttcaagtatacattacaatacacttggtgactgtgaaaacataaatatatatttatagtattgtacaggattttgatcttctctctgtatttgttggtgggatattctgatgattctgactcatgtggttctggtcggcatctttattatcactttttaaaatgatctggtctcctatggattttatctctgggagcggctcattgttattcttgacaatcttttgatttattgaggggactcttttgaacagaaaaatcttctttgtttttttcatgtctttgcttggtgttgtttcactgttttctaggatttctaatgaactgctatctgcatcatcaagcatgtatccttttgggttttcattgtactcacaaatggcccgttcctctaggttggctttttctttcttttcaatagtttcagctgagctatcatcattggttctttctgctccttctgttttactgtgataacctgtaggaacactttcatcatctcccacagttttcttcttgctttccacattttcagcattaatttcctcatccacatcttctagttttagttcctcagttttagaaaa

SEQ ID NO: 336115 - DNA, 1000 bp, Homo Sapiens; identical to SEQ ID NO: 157606

SEQ ID NO: 336116 - DNA, 418 bp, Homo Sapiens
tttttttttttttttttttttttaggttttcattatttatttatgacaaatattccacatctgtgattctctccagtcaaaagttctttgagacgatgccatcggccttggccaatcggagaatggaatcatctgactcacccatcctacgaatggccccgcagatagcataagttttaaactggccattaaacctgcctgtgaccttgtcaacctcggccacgttcatctggatggatgcgtggtccttggcaccgatgatgcgattgctagcggagcatttccgcggcacgtacaggtccacgaactcgccggcgtcgttctgcatttcgaggctgggctgcgcctgctgccaccacaccgcgcgcgagagagaaaggaagcagctagtcacccggcagagatatcggcgggcaag

SEQ ID NO: 336117 - DNA, 1000 bp, Homo Sapiens; identical to SEQ ID NO: 336108

SEQ ID NO: 336118 - DNA, 1000 bp, Homo Sapiens
ttttttttttttttttttacatttttaaataatgatcaaggaatttttttattcattaagtttcagtatcattacagaaaatgttatggtacagaattgtttaacattattttgtctttgctcttgatttccacatgaatgctggtaacactaatatctgtacaagatcagtctttgattttatttttttgttctgtacaattttaaatgtattggttaaaaaggctgtcagcacttaaggaagcattttttcttcagtttgtttcttcaaataaaaggtgtccagttactgcccaagagtactgtgccgtgaggctattggggcgagaaacctccctggatgctctgcaggggatggttcttgaggcaaggcagagcctccacccagtcagtcttcttttggcactgtgcacataaacacgagatacatgagaaagaacaagcaaaagctctctgtaaagcagttatgaagcatactaagaagggaaatccaagtgttgcctacgctagtataaataagcagacagccttgatttaagagcataagtagttgtattttaaagatgagaaaaacacaagttctgcaggcacctaccgctgtctactaaaagctatcgctatcagacctagcattgaacacacaaagcaatttgcaagaaaggaaaaatttgccttgatataatcagaacagaattttctgttaagatttatttttaggtgtttttttctttaaaagatatttaaattcatttgaaatatagttcaagatgttgactatacagatcaacttttatccaaatcgggaaaactagctgtgccgttgcatattacaggatacagtcaatgatatgtggacatgcatcaaagctttctcctgctggtgaccatcatagccgtccaatgaccatgacatccaccacctcgcctttgtggagctccacgtactgttctgtctttggaggtagcatcaacaatccattggcactgcgcatgctcatca

SEQ ID NO: 336119 - DNA, 1000 bp, Homo Sapiens
ttttttttttttttgaaatagttaagagattttattctaatagctataattacagtgcttgtttgtcgaaatgaaaactgaaaacaagtatacaaaacagttgattactaatcgtgtattgaaagcagtaagaggttccacgacaccaaatagaccagttctgaggtttccccaagataaatttaacagctccagcttcagtgtttatcaaaatacaaaagaaaaaagtagaggttgtctttttcgatggcaaatcggacccttgcaggctgagggagagaaagctacatcacacacagaggtggggtgctcccgaggggctgtgggtctaggtggaccgcctgcccggcttgcacgcgctcctgctggtgaggccccagacatcctgccaaagtgtctgagcgagcacgagtgttggggacgacggacccactctggccacacggcgaccgagggacagatggggccctgcgtcccataggctgcctgaaggtgggtagggcggcctgcggcatagtggggtggctgtgggctcccagcctggcccctgggaaccgtgggagcacagggacaagcacatggctatggaatgcagggtgacccaaggacaagcgagttgcggggatctctactgtgaccatgcagaattgatcgcagtctgctgcgccaccaccacctcatgttcccgaggggaacagctgggctggcgactggcatccaggccgtaactgcaaatctatgctaggcggggtctcccttctgtgtgttcaagtgttctcgacttggattcttaactattttaaaaaatgcactgagtttgggttaaaaaccaaccaccaaaatggatttcaacacagctctaaagccaagggcgtggccggctctcccaacacagcgactcctggaggccaggtgcccatgggcctacatcccctctcagcactgaacagtgagttgatttttctttttacaataaaaaaagctgagtaatattgcatag

SEQ ID NO: 336120 - DNA, 1000 bp, Homo Sapiens; identical to SEQ ID NO: 246409

SEQ ID NO: 336121 - DNA, 1000 bp, Homo Sapiens
tttttttttttttttttacaccttcagaactggtttattagtaggattggttacattcaaaggctgttgcttggacttctctaaagagatgaagcccccacatactgaggaggcaaggcagtcatcaaggccccaaggtgaggcaaatccctggaaggcttgaaccctgcagttcagtctcccggggtaatcactccccagatagcagtgagaatggggcactgaggcccgggatgtaggcactggacagcagcaacccaggcatctgtgccccacaaaccagttaatgggcatcgttaagctgccgtgcaacatccaggatgtttttggctcctttgctcagcaacaagttggccaggctgatgcccaagttctgggcagccaactggggccctcgtggaatgttacgagcagtgatgcctaccaactgtgggtcatcctcagggccatcttcatgctgggcagggacatggatggtagcctgcatggtctcttgtatgctatctgagccgtctagactccagactcctccagtcaggtacagttgcccatccttcatagctgtatgcacggctactggcacactgcagcctccttccaggtgcctcaggaaggccctttcagcgatgcagcgaagcagagtctcgggatcgtgcagcacacccaccagatccaagatgtcctggtccttggctcgcacttccacgcccaaggccccctggcccacagcatacatgcattcctcagggtgcaggatctgccccacccggttgtgccagcccatgcgctgcaggccagctgttgccaggatgatggcactgaactcctgctgctcgtccagcttccgaagccgggtgttgaggtttccccgaatactcctgaactccagatgcgggaactttctctgcagctgggctgctcttcgcagggagctggttcccaccacactcttctctggcagggtttctagggtcttcccaacaaattttgggtgaaagac

SEQ ID NO: 336122 - DNA, 1000 bp, Homo Sapiens; identical to SEQ ID NO: 157608

SEQ ID NO: 336123 - DNA, 1000 bp, Homo Sapiens
tccatcaccaccattctcattagtttatatttattgagcactcataatgttccagcccccgactccaatgaccgcattacccctcctacccactcccattcccatccctggatctttggaaaaagcttcataatcatatctggccctcagacacaatgatataaggacaaatttcttggggaccctgcagtgtttggtctttggccagtctgtccctggcacaactacagaaataaatatatatatatatatttattaaacctttgcttgtatctgtacaatattgatctctgctgattgcttaaaatagaacctgattatctctactactacagcatctcctaagccaaacagccccaccacagaggaggcccactttcacagactggctaagaatcctctagagcattttaagtagttgctctgaattttgcacagcagtctaatacctacttttccctagagctattgcccagaggaacaggactgaggcagaaggggcacttggggatgatatggaaggatctataaggcaagtctaaagatttagtggccatgtcagatgtttggggaagggactctattttccagacatttcagatagccatcccgggctcacctgaggagtgctggcaaagacaagagtcccctgaatgcacatatggtctaagcgtaccttgagaagtcgtgaacatttccccagaaaagtgaagaccctagagtcccctcttttgcatttgctgtcgccagatggtgtcttcagcagtgaagcggcatttcctttaacaatctgtgatttcctaggatgctcagagaaggctgggtaatgacagaccaacccaccccaaggaaatcctattcaagtctaatggctaagtgaggagccaatggcttcttcgaacctaaaactggctcctcctcaaccacagctctggcacaggtatgcttcatacaaagagaactacttccccagacaccgctggtgagagctggccagtga

SEQ ID NO: 336124 - DNA, 1000 bp, Homo Sapiens
ttttttttttttttttttagacaaaccacaactgtttattggtgaaagactcagcttcctcatgtgctcgctgcaaaataaataaaataccagatgctagtatcgtacactatttacaacctgcagctgaccaagcaggtcctgaagccttctctgtggaccagtactgcactcttctgaggctacgggagaggtccagcagccgggccagggactaaaaggaaacgaaggatctgttttatttcgagctcgggggcaggctgcacttctcgcagatctgaacgggcagcatgtgagtcaaggaagtactgtttatggccaccagcagctgcaacttgcccatacagtcctccagcgccgcctccgggtggtctcccagtcgcaagtccacgggccgcgagacccgcagcatgcggtccgccagcgccaggcagcagatcgccaggagggaaggggagtagctggtgaaggcatagtcggccagactcagctctgccaccccccgcgccagggcttgcgcttccagagcttcggaggcctcagcctgccccgcctccacgcgagcgtgcgtgaaatgctccaggaagaagctaatggtgggcgcacccagggtgaagtgcagcttgtgcagcacgatgcactcgaggttgcagagctgctgccgggagaaggcgccgcagcagagggccagaagctgcttcacgcgcggcgggtgcacctccacctgtttgcaagcgatgagcaaggaggtgaccccaagcagctggaagcagtctgcagccaccggcgtggtggtgaggaagcggtccagagtgttcaccgtcaggcacagcgactcgaaggagaggccgaattggcggtgcaccgggatcagccagctgagcagcttacagcgggattccgccgtcacctcgcgtaatgggctcagcaattcaaaggaaggggaggggttccattttgcagatgaagaaagaagctcaggggtgttaaataacttgcc

SEQ ID NO: 336125 - DNA, 1000 bp, Homo Sapiens
ttttttttttttaagaagccccaaactgagtttattggggtatagaatgggggataataagtaactccagtatattcaggtaaagtctgatatagcttgggatatctaaaatataacaccagggctactctagggtcaaaagtccccaagagaaaacaggaaaagtagacatttctctcaaaaaagtcaggaaacaggacactgtaccaatgcttacaacctcatccatgttcccaatgacttccctgacttgtccattcttgcatcacttcaagtcatcaacatctttccattttttagcccaaattactggatgagaagaaagtctttttcagaagaataaggtggttctcattctttttctcagtgccatctggttccagtcaaaaggtaaacttctttacaaagaaaagtgttagcaactataagctctggaaagaccagcatcagggcctcttcccacccactaaatctaatttcctatctctagaagctactgtggctaaactcttagaaaccagttacattggctgggcatggtggctcatgcctgtaatcccagaactttgggaggctgaggcaggcagatcacctggggtcaagggtttgatacgagcctggccaacatggtgaaaccctgtctgctaaaaatacaaaaattagccaggtgtggtggtgtgcacctgtaatcccagctactagggaggctgaggcaggagaaccacttgaacccaggaggcggaggctgcagtgagtcgagatcatgccgctgcactccagcctgggcaacagagcaagactccatctcaaaaaaagaaagaaaccagttatgttatacagaaactctcattcagcttagaatttttacccaaacagtaaatgaggtttagaatataatgtttttcaaagtttgcaagaacctggcattagcagggtaatttcatcacaaactccccgttttccagatgtccagttatgatctatttaaatcccgccgtcc

SEQ ID NO: 336126 - DNA, 588 bp, Homo Sapiens
ttagctttttcattttattgatgttcttttaatatatgtatttaggattaaactagtgttcaagtactaataatccagcaattctgaattggggctttattttttaaaaaatacaagcacagttagggaacagagatgaaattcttgtcaaacataaaaatatgaattgaattgcttctttttagatggatctttaacattgacttgaccatatggacaatgtctgcacgcagagccacaacattcacctctttgcaagtgggcaatctgtgtgagcaccacatagccagtagctggatccacatagtttagctggccagccgcgcaggcggcagcgtgcagctccgcgatctgtcgctccgccgcggttaactcttcgctcaccgaaggcctcgccgctctctccggcctaccgggcgtgctgggcgcggagccgccgcagtttccctcgttagcagggcagagggttaagctgagctgctgtcggaacccagctcttacccagagaggtgctggcggcggggcggcggaaggttgcctgcagagcgcggcacccgtccgtgcccagatctgcctggccgccatgcc

SEQ ID NO: 336127 - DNA, 1000 bp, Homo Sapiens
ttttttttggacataaaataggaaatatttattattcacctaataaaaacatactaaaatatgtgaagcaaaatctgacagaactgcagagaagtaaatccaatttaatattcagagatgtcaacaatcctcttaaaataattgctggaaccaaaaccacagaatgtcaataaagatagaaaaaacttaaataacatcaaccatttttacctaatcaacacttgtagaaccccttcatcaaacgagagtacagtatacatttcaagtgaacatgtaactcataccaagatagcccatattctgggccacaaagcaaatctcaataaatgtaaataattcaagtcttaatgtactctgaccacaatggaattattgcagaaactaccagaaagataagcaaaatccccaaatatttaggaattaaataacatacatttaaaaagagccatgtgtcaagaagaatttttttaactggaaaacatcctaaactcaactaaaatgaaaccacatcggctgggctcacgcctgtaatcccagcactttgggaggctgaggcaggcggatcacaagatcaggagatcgagaccatcctggctaacacggtgaaacctcgtctctactaaaaatacaaaaaattagccaggcatggtggcaggcgcctgtagtccaagctactcgggaggctgaggcaggagaatggtgtgaacccaggaggcagagcttgcagtgagccgagaccgcgccactgcactccaacctggatgacagagcaagacactgtctcaaaaaaaaaaatgaaaccacatcaagcttgatgggaggtaattaaagcagttctcagatagatttttaacattaacatctcttccccatattaggggaaaaaaacccaaaggtttgaaatgaaggacctcagcttccatgttaaaaagtagcaaaagaaatgaatccaataaaagcggaaggcattagtaaaactcaaaatggaaaagaaaaatcc

SEQ ID NO: 336128 - DNA, 1000 bp, Homo Sapiens
ttttttttttaactagaatgaccccaaatatctttatttacttggcattgtacttcccaaagaagaatattgcagccactgggcctcccttcagagtgcagagaggcagctccaggagctgagcctgctgggatgcaactcctcctcctagcaccatggactccttcatctttcagtcaaggctgccagtggctaccacgtggccctcccattcctggagctctcagctgcatccgccacctgctctctcgacggacttttttttttttgagatggagtctcactctgtcgcccaggctggagtgcagaggcacgatcttggctcactacaacctccgcctcccaggttcaagcaattctcctgcctcagactcctgagaagctgggattacaggcggcagctaccatgccctgctaatcttggtggactttacactggacacatgtgtgctgagcgctaacacaaaggccaggcaagtgtccccaccattctctccccaggccttttctgtggacctgaccttcttcagcgacccaggaggcaggaagggaagcctgagtgttagaaggaaagacagctaagagcagcagcctgaccgcagctgagcacggtcgtgctcctccctggggaagtgccaagggagggaccccctgctctacccggagccctggagccctgctaagcagggtggaaagcctgcagcccggggggtaccgcgactgtggcccaaccatccagtgtgtgagccctggatgatgaggccaccaagagcaaggcagcccgcttggacaactgaccatcatctgacgaggcagcgcatcacccacgtctctgctgttcacatttaatcctgcacaagagcgtcacaaagtgacagcattgtgagggactaacgaccaggcacaggtgaccctggacgcggccagtggcttcctgcagggcgctcaaaacccaagtccttatgatccgccgcatctactgccgagacaccagctgctc

SEQ ID NO: 336129 - DNA, 1000 bp, Homo Sapiens
tcactggtggccctggtggagcccgggctgcaggggccccggggttggcagcggcggctgcagaggaggcagcgtcatcggcggctgctgcggtagcgggggcggcggttcagtgcctggttcgccagctggcgtgcgggccagccccaggctgctgtcgtgcagcttgcggacatgcttcttgaggtcaaagttcctgcagaaacccttgccgcacgtggggcaggtgaaaggcttcttgtcgttgtgggtgtgcatgtggaaggtgaggttgtaaacctggtggaaagccttgttgcagatattgcacttgaactgcttctccccgctgtgggtcaacttgtggtttttgtaattccctttttgatgaaaccctttgccacagaattcacacacaaacggtttgtagcccgcgtgtattcgggtatgagtgtttaaagtggaacttctattaaatgctttgccacactggttacatttgtgaggtttttcctgcgtgtgaatgatcttgtgcctgcacagggtgcttgcttgcctgaaaccttttccgcacactttgcaaacgaagggtctggctcctgtgtgcactggcatgtgacgggttaagttatagtgcgcattaaagacttcgcaagtgaaaactttgggcttggcattaggagagcctcggctgaaatccgaggttttgaacgcgattttttccgacagaagctgggcgctttctttcatgtaatgctgcagctgagcctgggacaggtctttgaaagctactccagaagggtatttctccaccgccgggaccaccagtttattcctttcggctaaatacgtttttggctgcgggtgcaaaggggaactgaggaagtaggaggccaccgggtggatgttcacgccggctgccgggtggcatgggccgtcacctcggttcaggtagcacaaggcgcccatggcgtggaatgaagagtggttgaccacacgcggccttaccagcttgtactgc

SEQ ID NO: 336130 - DNA, 1000 bp, Homo Sapiens
ttttttttttttaacaaaaccaaaaaagccattttattgaaaattaaattcaaacttcaaattaatattacaatcatgagaaaaatgccaaataattcaatttacagttgcaacatacaatacaaatagtccctttgaagttaagagtaaactcatccacaatcatgacctgtggcacaaagcggaatttttacaatatgtgcatggaaagcaattcttgggcaatagcaattggaaaaaataaaaatgaaagcttgtatttacacaaaatgctacaaatatttttgttccacagaaacctaagaatggtaaagcatatccaaaagaaatggaattttattcagaatacctaagaaattattgtaagttatggttttggctgatatatttcaaagtactgcattaaaaagcaaacagttatttgtaaacatgaagtaaacacacatctaaaaaattctcacatagaaaatatttttaaatgcattcgttttctaaaaacaacaaattcaaggtttggaagaagtgtcttttattattgttctttcaaataccataggtataattattacttttgctaatgcttcgtgtttccatgtattaacctggattctgggccagtccctttcctcggaattgagggaatccttaaagctgtacacacatctcctcccttctgaatttatcacagatggtccctaatggtgtggacttctctgctcattttgaaagggctctggcaagtgagaggcagtgagaccgtctaaagagcaaacgatagttaatctgttgagtttctcagttctgggctgaatgttattccactaatctaaaaccaaagctgtggtacctgttctggaactctgatatgggttaaaatttgtgagacaactgaaatggataaaaatgtggctgcattgaaaagactgcaaattccagcaatgtttgtgctacaaagagaaccacgctattttaattcccaggaactagtacatggttccac

SEQ ID NO: 336131 - DNA, 1000 bp, Homo Sapiens
ttttttttttttttttttttttttcagttagttagcaataaatcctagatcaaaaaactttccctgataaaatgtgtgcagccacacaccaggagggcaatataccatattataattttcgaagttgtcagctgaaatttcttggattttagcttatgaacaattcaacattcaaaagagcttcaaaaggagatggagaatgagggatagggaacactgaaactaaaacatcaatttcagagacatggttttcaccaaaatgatactatcctattgacccagcaagaaactctctgtacatctcaattaaagagaatatttatcaaaactatggactttcttatttatagatccactaagtactgtgacttccattgttcttaagctatctaaacatgatgcaagtgtcaaatcacagtataaatttaaacatattttcattagtaaattattttcatgttccagatcaccatctttgacaagctatacctactaaaagatgtgaagcagacacctacattccatgactcaactgtaaagagaacacaaagctccagtcataggagaaaaaataaaataaaactgctattaaaattgaaggccaaatttcatgtatcatacattcatggtgggtacgtatgtttagtcttctaacagaaggagacttgcctgcatactatgcttctcctagttttctcaattggagaagaaaggaaaaaataaggcgcaggaagaaggggttgcaacaaagctgtaaggttttgatataagtgaaaagacattcataaagcatctgggaaagcacatgctcacacattttaaaaaatgctcatttattctcaagtacttgtgcaaggctgatttcagagtttaggaacgcaccagtcatgaaataatgatcccatcgtagggcttaaaacgctaaacctcagaaaagattaccatctttcaaaagaattgtgggaaaataatgaaaaccaggtagcagaaaagttgtgat

SEQ ID NO: 336132 - DNA, 1000 bp, Homo Sapiens
ctatgtccattctttaatagaagtaggaagaaaaatggtacttagaacaaactgttcagatacatatcaacttcataagcacaaaaaatttattctgaataaatcactttacaattactgaaaaagatgttcattaccttagctatgtacttaatgaaccaaattacccaaacaaaataaacatggcaatataaaaatgttaagaatttacaaagctgtacaaaataacttaaaatttaaaaattagactgatacagtctgtaagatctcttcgagagagctgtccaattacagatctatatacttttcttcagaaggtcaaagaaaggatgctttaaggcttctctgagagtaattcttttggctggatcatactccaacattttctgaatgaggtcaaagagacgctcatgttcaacatcttgagaaagcataaattccttcagaggtttacagcgtcttgaaacatatctgccggcagaactgtgttcatcccagtctaatcgatcgtggtgaaaatatttacgtttcctggttttctgtatcatatgttttggtagaggtccaagaatcctttccatcattgctaaatgctccttactatcgtgtgttggaaatacggtaaacccaagatagtattcaataagaatgcatcctatgctccagacatcacatggttgggaccaccctagggctaaaataacttcaggtgctctataatgtcttgtagataccaatgtactgtgatgttcgtcatcatatgttgcactaccaaagtctacaactttaatatctggatttattaaggtgcgttcatcacgttttattttgggattatacgcctctgtgtagtcagactgcacaaataagatgttttcaggctttaagtctgtgtgagtcaacttattactgtgcaaaaaattcacagacttgcatatctgatatgccatctttctgatatgatccagtcgaaatggtagaaaaccattttctttaatga

SEQ ID NO: 336133 - DNA, 859 bp, Homo Sapiens
tttttttttttttttggtggaggcagcggtgatctttactgagtcagaagggagaccctggggaagtggggcagggcaggggtgggatggtggtggtgagaggccaggcagatgatcttgtctcgggagggaggaggcttctcagcagagatggatccccggcctggaggggagctggcagcaggccaggaggctccgccagaaggccgtgacggtggcggagccggtgaccgcgcctggctcggcagggttctctctgcgggtgtgcacagcaaagcttcggcccgtggggccccggggtccgctcagctctacatccaccacgtgcatgtccgtgaggctggtatcagccacgagcaccccaatcaccccatcgaagcccaggctgggggcagccagggcagccgccgccatggtgttggaatttcgcggggcaaaggggcagagcccacggacagggccttcgtagagcacagtgcaaggcccagggctgtgggctgcagccaggggtccctcaagccggaagccatcggggtgtgtggccatggtgacacgaaggctcaggagattggcatggcgcaggatttgtgccccagattcatggattattttgggatgggccacttccacaaccagatcagggcgccttgacttgctacctttcactctgtcccccatcgtgccaccagctgcctccagtgtgacgttctcgctcccacgtccgtccctcccgttccccagctcgcatcagcccaggagaagccttcgaggcctggagaggccaagtgcccccaacatgagccccagcctctgtgccttgagggtgcctggcatcggaaatggcgcaggctgcggcagc

SEQ ID NO: 336134 - DNA, 1000 bp, Homo Sapiens
ttttttttttttaatttttaatttttttgaatcatggtagctgcatcacaaaagctccaatcaagagggtggtaaaaagaaggcacagatcattgcaaataccagattttctctttctcttttggtaaatataccgtcatatataagctaaaatttctcttagggtggtggggtttgctggcagggaaagggacaggttgaacctacaattgcatatgtaatagaatcctaatggggggacaaagagcgaggcagctcttagcctgaagcaaaagaaaaggacactcgcttctgactacgtgtagtacaaacactagggaagtctgtgacaaaacacgattaaaaaatcataaaattataaagcttgtaaacgaataatctgaaattacattttattaatggaaaatatcatcaaaatagtaccactatggactaaactgcctgagttttcatttcgcattgagatctcagagtagaaaagcctttagcacaattttgctctgtgtaagtcacaacgagtgccagccccaggactaaaccctggggaagattctcctcttggatggaatttgtgttgtgctatcaagacttttgtgctaatctttcaaacagggacattttgaggcaaacctttaatcttttggcacaagattattttggctggggcagaaaatttgagtctcggactcaggatgaataatgtgacatttcattgatcaagtattcattttgattgtagagctttctttatgtcgttcacttccatctgcaaccgaagccggattttcttctcttcatccaactcagacaataactgtttaatctctcgtttctgctggtccttcatggtctcgatgatgctcctcagctcgcggacctgtgtccttagctcctccacggccgcctggctgctggccgcaggctccatctttggttttccttccgtgccgaacagagacggggagttggctctgtgtccagctgttcccaaagaggatga

SEQ ID NO: 336135 - DNA, 1000 bp, Homo Sapiens
tttttttttttttttttttttttactttttccaatggtcttttattttcaaaggctccactaaaattactttttttagatttctgggctatgggtttttagttgtgaattcaaagataaaagtcaagtagagcactgcatgagaataattcattttacagggcaatcaatcagaatttgcacatttgttatatccgagatgtacagttaggactcaccccttcttccactcacatactctgatttgcacagggctaagtgttacaaagacatggaaaatcttgaactttgttctttcttgggttcagaatcctgcagcccagcctcgtaggaggcagagtctggagagatggatgatgtgtggttggagagaacagaaaaaaaaatggtgcaggctgtttcctgtgggccactctgggtaaggggctagtggtctgaggccagtaatacacgtggtacattctcatagttttcttcatcatcttcttcatgggccctgcctctgctgctagcctcccctgcagagtcgtctgggtgtgtcttcttcagttctgaatagaggactgtaagttcctcatgctcttgatgcatcattggacaattagctgagttttcttttgtatgctggatgctccagatctgggaataaatcgggttgctatctccaggatttacattgctgtacattggctccagctccattggggctagtggtttagagtgagtgggctcttgagggtctatcctggaaggcctggacgaggaaggctcctgacactcactaggactgtgactagatgttccagtggcagaaagtcctcctggtttccttcgggccctggcgtaatgcagcagagcagcagcagcagcaaggacgaggatgctgagcaccagccccgtgattcccgcagcggtaaggcctgttctgttcctggaagttcctgtaacattgagtgtcaccactttactgtgctgggcccccaggccattgtcagcctcac

SEQ ID NO: 336136 - DNA, 1000 bp, Homo Sapiens; identical to SEQ ID NO: 157610

SEQ ID NO: 336137 - DNA, 1000 bp, Homo Sapiens
ttttttttttttttttctgcaagaatattttaaaataaataaaaataaaactgaagacatgaaatgtcaaaataggctggctttgatcacaaagtagccaaaagggcggcatgccagagcaacgcctgctgtccacccctgcacaccctatgggaatatgggcggtcctcgggtggaaggagtgggcctctccagggcctggctcccagctttgaggtgccaaagtgcacctcgtccgatcagctgggctcctgattcagggggccatcgcagccttcagggcaccaggaggaaaggggcgtctgctgggtattgaggtgagtggctaaggagagtttcacgacggcctctccccatgctgtgggcagggtgaagggagcccagtggctggagaggcatcccaggacagcagcagtgggagtgccacccccgccaccccgtcttgggagaagggaaagggcagacgcagactccagggagctgctgagagagggccttggcgggggaacgcagccaccacccctgttgtccagctgggaggaggtggcagagtccatctgccctctctctctggcctgccccctgtctcccactagcgcctcctacaggccaagcccaaccagaacccagagggaagagaggccattgacaggctgtagtggccacctggggacacagaacaggtggagaaggtggccagggcaccaggacggcggccagaaggtccggcacacgtcacccacttgagagctttgcacgaagggacattaatgcactcactcaccaagcgacagccatagggcagccaaggtatccccttccatcatcaaaatccaggacagcaaggactcattagaaggcttgaggctaatatgggcttctagaaaggggagcgcgtagccttggaacatgtgcaaatgcccacaggggtgtgcgggcgaaacccacctccaggccccatgtgctcatgtcctccaggtaggtgcgtgttgtctttccc

SEQ ID NO: 336138 - DNA, 1000 bp, Homo Sapiens
ttttttttttttttttttttttgagacgaagtttcactcttgttgcccaggctggagcgcagtggcgtgatctctgctcactgcaacctctgcctgccaggtttaagcgattctcctgcctcagcctcccaagtagctgggattacaggcacctgccaccacgcccggctaatttttgtatatttagtagagacagggtttcaccatgttgaccaggctggtcttgaacttctgacctgaggtgatccacccaccttggtctcccaaagtgctgggattacaggcgtgagccatggcgcacagcccctttcttttgttaagagtaaatgggcagaagagaatgttgttgggtctagaaattatactctatgatcatcagtggaattggagagaagacataggaagagacaggctatcagtcttcaaatatctggcaatcatagacaggaaggactgaatcagcctggttctagagggtggaagtggggctagaaggcaaacgttacagagaggtggtcttcagtgcaagcctagactacaactggactgttctgtgacataacagagatgctattagtagaagtacaggatttcagcttgggctggctgactgacagtgttcctattgagaaaattactgaatagtcctggacacttgactgcctgattttcaaggactcttccaactctaagaagatagtaggagacaattaattatctactgcttgattcaacatacagaatttgcatatagtggggcatctttctaatatttgcctatttgttaaatattggtttcctggattcttatatttaatgctatagagaacagtttttaagaagaaaaccccacactaactaaagcagtttgtagacacttttttactatggtggtaaccacagattcagaataaacaatttgttatagtgagtagcatataatctgtttttatgaaaaaagagaaacaaaagtttttaaaagttaaaataaaggttccta

SEQ ID NO: 336139 - DNA, 1000 bp, Homo Sapiens
aatgggtgtaattattgaaaattggagataaaatttttattacttgtaaacaaaattctgtcaaaaacctgacaaattaaacaatacaattaatatgtttaatagaactaattacatatgagaggcatccaaaatccattttttctatacaaacatggtttgatatacagtcattttatctgtgtattaattggtttatgaaataacaaatagaaaaatcaagtatgcattatcaagttaaagaagcaggagagatggagctataaaaacaaagagagaagaatgttgtaaggagggcttaacaaccaggataaatgttgtagaaagatcaattaaagtgatggcctagagatcacgggcttcctttggcagagccatgttggtgaagtgaaggaagtggaagccagaccacaatggttgaagaatgaatgtaatgtaagagccaagacatttatttgagtctgatagtaatgaaaaaggacaagaattttcttcttgctgttgtttttgtcatttcatgttcaaaaccctttatctcccatgtggtactgaaaactccaagatgggatctctgtttctgtgaggcctgtagtgcttagtacatccttgaatgtgtgaggctctcattggtataagtttaattcctgactgtggatgaaagctttaaaactttgcgggcaaaatacagaatgaatttcagtgagttcccatgtattaaacaaggtggcgctggctggagacatgctgtccctgtgcccacaggagtagcagtgctgtgctcatcttcctgacccgctcttcacagtcttcaccgcctttcttcaggagtctcccctttggcttttccacagctatgaaacccacgtagtcggacaccctaatgcttctcctttcctgtttgggcgagatttataggaagtgtttcttctgctgaagcctggttcatttattctgccaaatgtatgcctggtattgtgttttttggtcttgaaacacgttt

SEQ ID NO: 336140 - DNA, 1000 bp, Homo Sapiens
ccgtggaaagcggttgcagaagcccagtaggcatccactgctaatttgaggctgttgcatttgtattctccttctcacacactgagttcattcttcttataaataagagtatttgctctaactttgtagttcttcttctccaaaaacaacatctggacattctttcctcaagttcctgtttatcaaatatggccttcacaggagacggctgggtggccgaggccagcagctgctgcaagaggatcatggggggctgcggcccttcaggagacatgtccccaaggtcaggtgataccactgctccatcatctgtgtgaacagttccagtctcctgaacagctggctgagacaggatctgccgcagtttatcctggtgggagaacagcgcccgacctgctttcaggatgtatagcttcaactgctggcaccgcagcaggtccaggtccacttgtcctgcaaaggcctgtttagtcgatttctttattttgtgcttttctaacttgcttccagcgaggttcaccaactgagcccagacagacagcatgggctctgtgaagggcaggttgttcacattaaaggccacggcagggagtggtttcagctgattcaatgggcaaacgtgacacgtccgcatgtcagagaactgcacggtgattttgcccttcagggtgatgcgagtcatggtgacttctccaaagtcatcgtgcacaacttggccgcccaggcacaggcgaccatcgatgcctccaaccacagccaggaccgccatgaggccccccacttcagggttctcggaatcagggaagtagtcctctaactgggcccctttggaaggccttcccgcaaagctgtgggtgatggagcggagctgggagttgatgtacttgttgatgagcccattccactgagtcagggagtgcagcgtgtgcagcagtgccaccacctcctccgccagtgtgctgctgtgggtggcagtcagcgaggcctgcgggcacaccct

SEQ ID NO: 336141 - DNA, 1000 bp, Homo Sapiens; identical to SEQ ID NO: 157611

SEQ ID NO: 336142 - DNA, 1000 bp, Homo Sapiens; identical to SEQ ID NO: 157612

SEQ ID NO: 336143 - DNA, 1000 bp, Homo Sapiens; identical to SEQ ID NO: 157613

SEQ ID NO: 336144 - DNA, 1000 bp, Homo Sapiens; identical to SEQ ID NO: 157614

SEQ ID NO: 336145 - DNA, 1000 bp, Homo Sapiens; identical to SEQ ID NO: 157615

SEQ ID NO: 336146 - DNA, 1000 bp, Homo Sapiens
agaataaatagaactttattctttatccagtagatctcagtggaaagcccaacagtaacaggtgcacccacgggctccaggggaaggggccccaacccctggtgaaggaggtcggggcagagccagctcccccagctgggggtgcaggggtgaggggagacccccctgtaggcccgtcctgcggggtaaggagggggcacgggggtgggacaggttgggggtggggggcaggccagggaaatggaggaactcgggccaagtgtgtgtcggcccatctactgtccagtgtgtgtgtgtttgtgtgtgtgcgcacgcgcatgtgtgtggtgtctgggggccctatgggggtgctggtggctgaggccgggggtgggggcagctcgggcccctggccagccccttcacagtgggggctggggagcctagatgatgtgggccctgacgggaggcagctctgccgaggagccaggtctgggaaaactctgtcccggggcccttgctctgccctgctccatgcctcatggtgggtgcaggcaagtgccaaggccaggagcctgtcctttcagggctgccccacaccgtccacacccagtggtcaggcagagggagaaaggggctggcggcttctccagtgggagggaggggaaggcaggccttggaaagttagtacttcacagttttaaagagaaaactgaggaggaaaaggctgaggaggagaactggggggcacagggacatgaaaggagagtgggggccccttccgagccactccctcccccggacccaccccctccagctctggatccagctccccccaatacacagcacaaattccttcagtataaatgtgcttaaaatgaaaattcttattaaaaaaatcaaaacaaaaaaattaaaataaaaacaaaaccagcgagaattaatacctggggttggtatggcagggtatgtacagggggaaccccccgcccctgtcccaccccctctgtcaccaaccgag

SEQ ID NO: 336147 - DNA, 1000 bp, Homo Sapiens; identical to SEQ ID NO: 159300

SEQ ID NO: 336148 - DNA, 1000 bp, Homo Sapiens; identical to SEQ ID NO: 157616

SEQ ID NO: 336149 - DNA, 1000 bp, Homo Sapiens; identical to SEQ ID NO: 246410

SEQ ID NO: 336150 - DNA, 1000 bp, Homo Sapiens
tttttttttttttagctactaggaatgggaacaggaggcaggatgctcacctgagtattttgctttattcaatctaataaacattttatttatgtaaaagacaaacaatgcatagaataaaaataagtgcttgagacttttgatataaaaagagtatatagcattcacattcctattttaatacatgagtacagctgaagtgttccataaaagaataaaactttccctttatgtatagtagtgaaaaaagtcagtatttttaggaactacagaatgttattccttggtcttttttcttgaataagaaaaaaaaacataaacaaaacaagccacagtatcctctgacactacattccagtttatgctgataacccagaagtgagaatactcttgaatcttgaatatctcatgaatggaccagtattctagaaactcaccactagaggtcaatgggcaacagctattgggatggtatcagcatgccctacggtgcaagtggaatttctaggcgcctctatgctactgcagccacactgtctttaactctcagcccacccacactgaggagggtgcctagaggttctatttccaaacctttgcatgtatcttaaaaatctcaataaaatgagaccttccaccatccaaacagagctgatattctcactaccagtccctctctaatattcctatttggctgaaaataagtagcttcaaaaagttttaaaaaagagattacttgcagcattaacacttctttgttgattaacaagtttcctatggagttttaaagctcatactttgttcttgtccttgtggacacaaattttctaactgcaaatgggacctttgtgtcccacattcaaatcctctctagtaatttctgcaaaggttgagaaggctggcatgatggagagaacggtaaccatgaggaaagcttcttggagtaaagcactcctctctccaatgcagagggtaaaactattaacatataagcaaaaga

SEQ ID NO: 336151 - DNA, 1000 bp, Homo Sapiens
taatttcccctcaaatgttttattttgaaaatatcagagtacagaagagttgaaagtatggcacattgaatacccgtattttccatgtggactcaacaatgaacattttgctatgtttgcctgatctctcaatacatatttaaaatcatttttttgaaagttgtaaacatcagaacacttcattccaaatacttcaacatgcatcccttaagattaagaatattcttcaaactaccaccaccgtcacaggtaagaaaatcaacaaaaattccctaataccatctaataaccagtcatattcaaatttcccaactgtcctaaaacatgtattttataactttttttcaaatcagtttcacacactttagttggttacagctctttagttttgggttttcgttgccattgttggtttttactttttattttgaaatgatagaatcacaggaagttgcaaagatagcacccttcacccactttcccctcatggttacatcttacataaaatgaaaaaggaaatcaacattggtacagtatgtgtgtataggtatagcacctatagatttgtgtaaccaccactgcaatcaagatacacaagtgttccatcaccacaaagacctttctggtgctaccttttaatagttccatccaaccctctccccatttttcctcccaccatccctaacctttggcaaccattaatccatttttcatctctatagttttatcattttgagaatgttatatgaatattttcatacagaatatggccttttgtgattattttcactcagcattaattcccttgaaatttatttgagttgttatggatatcaataagtcaattttattgcagagtaacaagtattccatggtaatacataaaccacaatttgttttaaccacctaaggaaggatatatgggttgcctacaggtttcgaccattacaaataaagctgctatgaacattcgtatacaggtttttgtgtgaacgcaagt

SEQ ID NO: 336152 - DNA, 1000 bp, Homo Sapiens
tggagcattattgatttattagaaaaactagtaaatgggtttcctctggttggtggaagcacggttgagcaggtggaggacaggacccagctggccccagggccagccccagattgcatggtctgtgcccaacagggttgcattcctctgcagccgccgcctcctcatttcctccctgagcttgtttgtccaagccaccaagccatgtggtcccgctggcttcatcctcctctggattcctgcccccctcccatgaagggaggaagaggattcagggtcagcctaggggaccctggctccctccgataggcaggaaggaggagggatgcggaggagaggctgagccttccacgggcctcctgttaggggtgttggtggaggccaggttggggagggaagcctaaggaccctccacacctcccacagccagagtcagttgaggctgggacaaaggggaaggagagagggaaggaggaccgcctgaccttgcccagaaggagcttcctctaaactgccctgggaaggaagcctggtatgctggtgtggactggagctgtgtcaacctcgtttgggaatactgtcaaaagactgtagagtagaataaggagagaaaaaaaaaaaaagaccttgctagggcactgggagagcttagccctggtgtggcacacacagggtctcccaaagctggatgcctgcattttcagtctagttggtcgaatgtcttggagcctgggtgacaggagggatgtgtggggagctggcaacagaatggtcacatgcagctggctgccctggaccaggccaggggacctggggtggtgagatgctagctcttccactagagcccttcctttctcgggtctgtggagttgcttgctggaaatgcctcacttcaggtgctgatttggcacacgtggaagggggagggtgggcccttgtccctaggctccctaaagactggcccagggaaacagttgagggagatgtttgccaccatctg

SEQ ID NO: 336153 - DNA, 1000 bp, Homo Sapiens
tcgatgtctgatatattatttttattataaaaacatagaataattttcatacataattcagacatgatcttagccaggaaaaattaaataacacagcacagcatggatgagggaaagtatgcacagtccgtgtcagggttagaaaaccctgaaagaggtacctgagtatagagaactccaagctaatcctcctggagaaagcctcttaggcctaacatgagatcaggtaagcaatatagaataaaacctttctcttagccccaaagagattccatctgtgtagaagactgggtgagaagtacatttgcctgtcttcctcctgtccttcctttttattataagatacatttatagaccccatagaagaaaagataaatttcagaggctgttaaaagaggctaggcctaagttataatcctcctcctcacagccccatttccccaaggggcattagcaccagtgcagctttctagctgtaaacaatgccaccagcatgagtgatagtgtccctgtagggtgctcccacttctcaaggaccaaatacaccttagcagaggccaaggtttcctgacaaagtgaatgggggcaaacagaaaatgcacaggtgcaaacatggaatagaatggtagttgatgattggtctgaggtgcctagaaactgagttaaatctagctctagccatgaatgaagaaaaccttttcttattttctatttggagcctctgacaaaaaaaatcttgagaggctcctgaccaagggacctgagggatttcggtggtttctttcacctaaggcaatcggattggctgacatagctaagctaagtaaaaataacccttttcacataaataagcagttacaaaaattaaaatggtggaatgtctcagagaaaaggagaaaaatcccaataccccaaattgtgtattctttaacaataatttaaataatcgctgaagggcagctctctgattcctttcccaagttcctagcagattgtgttt

SEQ ID NO: 336154 - DNA, 842 bp, Homo Sapiens
ttttttaagaagaaggtccaaatcaataggtcttttattgcatcatttaaatatcacaagtaggtcttaagtgtcatctggcatcttctttctgtagccaggtaactcttagatcttattcatcagcctgctgaacagttcctttttcagagacatagataccatccaaaaatttcctgatatccttgtttttaactgttgtggcttgctgaatcaaagccgctgaatttgaaacaagctcaatgtcatttccttcaaggattaattcatctttctgggcttgagatactgaacaagcaacacctggtctcatccgaaccctgcggatatatttttcacccaagaaatttcggatttcaacaagagacccattctcctggataacaacgttgatggggaagtgagcatacacagacctcatcttgtaacggaagcccagtgtaacacccttgatcatgttctgtacatgactacaaatagtccgaacggtagccagttcctttctgttaccccaccatttgtcaacccggagcctcttttttttctttccaagaaggctgagttctacattgatgtgattgaagtccctccgcagggttcctctggggcccttcacgataactgtgcgtcccttcagagtaatgtcgacattttctggaatgtcgacagtctgattgctgagaatagtcttcattctgaaacacaaacactgggggtgaggccgacgcaaggcccgtttttccaccaaactacgccgcacagagctccactcctactggagactgccaggcggaagttccagacaagatgtcggaggacgggagaccgacagcgggccccag

SEQ ID NO: 336155 - DNA, 1000 bp, Homo Sapiens
ttttttttttaacttttaaaatgaaccatttattaaatcagactgttattcttaacagttatgtaagttacatgtatgtttaagtcagagtatttcacatggaaaagtttttaactcctataggcaagcaaaatcatatcacacaatatataagtgggaaggggatactgctaaacattcaaataaggcaagtatataaaaacaataaaacaataatgaaaaaattcaagcattcctttaagagaattcaacactacaagctaaatgtactttctgagtgtattcgtataatcaaggcagtgtttcttcttttaaaacatcaggaaatggaataaggctcattagtagacacagctgccctcaagatttcaatttcagttgctttctttaaattaaaattcacaaagtacacaattaagatatatcaaaaaactgaatctgctactctaacaacagctgtccatgcttaatacttagtggtttatttgaccaaattagtcttttcagggggaaaaaaaagataagccactgtaaaacatttagtttgaaatgtatgctaatattttccttagaaatcaaaagttatggaggaaaagggtcatttattataaggaaaagaaagcaaaacactagaatgaccaaacattttcaaggaacaagcaccacaaaggacatttgcattcagttttgtaatatttatcaatgcatttttcttactccaaccaatctacttcatcaaattctgaatcatcttccgaatcactatattcaacagcaatacggcgagacaggatggtggcaacatcgttttcaatgcgttcatgcttagcttcctgttcacgctgctcttctactttgcgtagctgaataccttttcgtattgcttccagtagcacactcctggcatcactgattacaggtagggttgatggatggcgctttggctcagaagcaggtataacttgtgatggaggagatggaggcattaatggaacatggg

SEQ ID NO: 336156 - DNA, 1000 bp, Homo Sapiens; identical to SEQ ID NO: 157617

SEQ ID NO: 336157 - DNA, 1000 bp, Homo Sapiens
aggaagcagaggacaggacagtagctggctttggctctggccacccctttgggactagagttctgttgactggataacctccaggctcctccacgtggggccctgggcccgcctggggaagttgagtctgtgtaattccttggagatctcttggaaggtcttgcctttggtctcaggaaggaacaggccagtgtagatggccccacagacacagacaccaaggaaagggacatagaggaagtgggacaaggcctccatgataaagggaaatcccaggccgaccaggatgagcatgatccacatgagcgccccgcagaccatgcaggcagcaggcctggccatctggtcaaacagctctgtggccaggatccccgtcactccggcagggccaatgccaaagctgaggatgaaggcaaagatgcaggccatggccaggtagagtgtccaggggaaggagctctgcaggcacagggccacagtgaagatgctcccccagcaggtcatcaggctgtacccaccgatgagcagcacgcgccgacccaccctctcgattaccacacaactaacaaccgccgtgagcagctcgcagctcccagtcccgatgatcgcgtactggatcttcgcttccggcactcctgccttccggaacacggaggaggcgtaggcgtacaccgagtcattcccgcagagctccatggcactgcccagaaccacgaggcttgtcacctgtctcctcagggcccgatgctggaacagctcccatgggcgccgggcacggcagccctggcaggcagcgcgctcctcctccagctcctccagctcccctgccaagtccccggagccccggagccgccgtagtgctgccaggcaggcctcggtgtctccacagtcaatgaggaggtagcgcgggctttcagggagcagaggcagggaggcgagctggagcgccccgggcaccaggcagctggccagcagcaggggccaggcctgagggccacct

SEQ ID NO: 336158 - DNA, 1000 bp, Homo Sapiens
ttttttttttttttttttttttttttttttaacaggccatgaaaagattgttttattccatgtaaatattctcaacagagaacactatctttaaatgaaggatttaccattaagaaatcaacatgtgcacaaaaagagtaaaaattaccaaaaaattaaagattttttgggacaattcacatgttcaaaatttaagaatgatttaaactgtgcaagtacaaatgtctttcctattataataacccatatacaggttgcactattccacatcaaggaacttgcctcctacggaagcaaatcctgcttttagaaaaacaaacagtagcttgaaaagaacagttagtccttacaagaaagtcttaaactttgccctctgtggctgttagccaaaaaaccataagcacttcaggctttgtacagaagacaaacacagccagatcacatttcctcctcattgctaacctttaaaataaaaatagcactagattttaaaactacttcatgtagtctgtcagtactgaataatgtcacattatataaataaccctgtaacgagattcaatatctaaactttatagtttactagctgcaaaggtaatacactatatgtcagctgtgtaacagtggtgacttgatcttatgaaggcagtaactttcacacaattgtcattcagctttagtataacgggtagtatgattcaaataacactgggaaaaagttattaaagcagtcacacagcttctaaaatattgcttaaaattcaataatacacaaaccatttcacgttctttctcccctcaaaacagtaaagaaccaaattaatgaagattcagtggtacaaataaccccccacctgccccatctccctattacaacaccactaagaaattagttaagatacatgtcattaacagaatcacaaatgcgaggcaggacaccatgagcaacaggagcactaacaacaatcatatttacaagtataaacatacagaaattcca

SEQ ID NO: 336159 - DNA, 1000 bp, Homo Sapiens
ttttttttgctgctataatactcaactgatacagtttaattatgatcaacttttattgattttacataaatagcttatagaatgcctttacaaactatgtttttgcaatatatttgttacaacacacatttccttatgaatgtatttgttaaatctttttgcagaggaagtagggaaaagtgaggggagaagaggaggaataagattttagaactaatcgtcagcaatgggcctaggtatttggcaattatttcctttacaaaaaaattacaggtttgtaacttcaaacatcaaaagtgtagtgcatcaatttaactaaaaaatcagtagtgcctaatatattatctgggcatcaaatttctttttttaaatatatccagattcacatatttttactcttattaaataatggttttaaataataatcatcacaatgtttagctacataatcccagatctggattaaatcatggtgatatcgatatttttaaattccaatttatttgttaatcagtaaaatgtaataggtgatagtgtgtccagagaatgagcctcctatgtgtaggaagacgatagtcttattacacctgctatcaattaggtcatttacatagctgctaatgtatcagaatttttttccacactgatgtagtactttattcaagtcaaaacaagttatcattatcataccaacgttgaagaattaaccattcctgaaacaagaaacaatctttacattagtatttcttggttatggtgcttagtcttggtattattaagcacaatgattcttaataaacatgggtggatgaaggcaaatgcatatagcctagtcccctcaataatttattctccatcttatttaaaattgttgttgaggctatacaaactacagatctgctgctagaaagatacaagttgtcccccgaacaacatctggcattttaagcataagattaaagtcctggtgttcacagcatcttcttctgacctaccacta

SEQ ID NO: 336160 - DNA, 758 bp, Homo Sapiens
ttttttttttttttttttccagagtcccaggaaaggttttaattccagtccttggaatctgagaagcagacaccaagaactgccctgagaacacctggggggcctggcatcttgcctccagatccagccagggtggacagacccccagataatcacgtctgactcagagttcccgcacagtgctgtttggctccctgcagctcacattcgtacttattcctgatcacatccagacagaagcccttgtagatccctgccacctgaatgcgaatcttgaggctccgctgcagccccccaaggggctccgtgtattcaggggctctctcagcccccacttcctccagccgcaaccgcagctgactcagtcgttccctgaacaacttctcctttagctccgagaactgcttctctaggtccagcatctcactgacacactcgctgcggcgtcgctcatagtcctcatcatccatctcggagctctcctcttctgactctgtctggctgccgctccgctcctcctcactctcttcctcctccccattcatctcagcagcagaatcaccctctgcttccatctcttctgtgtctttgcttggaggctggacaggcatctggactcgcggggactggagcctctggcctcacgacggagattccctgagagctgcccgtggttgccggtaccggctgctgccgccggactcccgtaggcgctgcgcggctcccttttcttcgggaggcagagcctatcggtgctt

SEQ ID NO: 336161 - DNA, 1000 bp, Homo Sapiens
tttttttttttttgtagaaggaagggctttattcagctgggagcatcggcaagctacagccttaaaatctgagctcctcaagtgcacaatttctgtcccttttaagggctcacaacactaaagatttcacatgaaagggtcgtgattgattgagcaatctaggggatatgtgacaggggtttcatgcactggtacagaacacaacagggagtttcacaatttttttatacaatgcttggaatctacggataacatcaggttctaagtcgtaagttgatttttaactactaggtttaggccaggcaggcccagggctggtttcaggcctggtgccgggctgcctgtctttgatttcacttccttgtttttttcttaaaacaggtactgagtataaaacaatataaaacaatatgagaaggtctctctcttccctcaagagtgtatgactttgctgcccaggatgatcttgaactcctggcctcaagctattaatttcttcccaactcagcctcccaaagtgctgggattacaggcatgaaccacagcgcccagcttaacaggatttttcagagagaaaaagttttttaattttaatgaaatccaccaatttatctattttttcttttacggcatgtgcttttggtgtaatgtctaaaaactatacctacgcctaggttgtaaagatagtctgttttcagttttatagctttccattttacatttagatatatgatccattttgagttaagtttgtattacatgtaaggttggggttcctttgttttggtctttgacaaatggaagtccacaacatttattgaaactcttcttcctccattggttttaagataaatccgttggccatacttctgaatgtctatttatggattccctatcttattttattgatgtgtatttttgtctctcctccatggatacatgaaggaaagggccttggacacaaggcagtggggaaaggggctggggggccacacagaga

SEQ ID NO: 336162 - DNA, 1000 bp, Homo Sapiens
ttggtaaaaaacaatctgttattttttaatatttttattgatatgctcaataataaaatacaagtgttaataaatacattggtacaggataagtttatatccaacaacagtaaaagagtgattcaagttgcagtaatacactgacaggtaaatagtataacattagaaaagcaaaattcttttaacttaaggacagactgaaccatcaggtatgggtctgagatcaagtaatacaggtagcaagagtttttcccacactggaaaatgaaggcagttttccaaatactgtgaatttacaaacattggggaagcgatacaatccatatactgtatacatctgccagtgttctctgggattcagtccgcacattttgtaagtgccggtggtacctaatgaaggcattgcatataaactcaaaagtctgtttctttattctctaaaaaggtagcacggccacttgcttatatgtgtgtctggatgttttctatcaaccccctgctcccaccactcctcagccaatccaaagagaggcttgcaggctctcattctctcctacaaagctagtcttggtttctgagcttggaaccagcaggaacaaagcaccatttacaccttatttctctgcaccaattgtatggatacactagacttaggtccagagtgggcactgtgatacagttgatcccttaaaaaatttcctcctggtaccttgtcaaatgggacaaaaagcagattaagtctataaaggctgtccttctctgcctggcattaggagtgggggacaactggggcattacttctcccagggtctgtcattctgcagagttaacatatattgtgtgcagtacattacaagccatcaatcaacatttaataatataagccgtgatattcacattattctcccttttcaatctccattaaaaagagaagcacaaataaaatgctgaaggaaagccacacatttctcagagcccaagtaaaataaagcatgtgtac

SEQ ID NO: 336163 - DNA, 1000 bp, Homo Sapiens; identical to SEQ ID NO: 157620

SEQ ID NO: 336164 - DNA, 1000 bp, Homo Sapiens; identical to SEQ ID NO: 158806

SEQ ID NO: 336165 - DNA, 1000 bp, Homo Sapiens
ttttttttttttttttttttttaccattaaaagtttattgttttatttcaatattcaggaacagtgtacactttccgttcagccatcgtcacagcacgtgctgtgtgggtgcggccacgtatggatcgcagagccgacctcagctcagcgacgcagagtgcttctgctgaaaaatttggaggtttgtgtctggagttttgttctttgtaactctctcatcatcgaggctatatattaatagacatggtattaagcccacacgaaacattcagaattagaattggattaagaagacgcgttttggcatcacgctgactactcctcatctccgtcctcggggagggtgatgccagcgtgggactctttggaaggcctatcaatcacaggtgcgctaaaatcaaaaggtgggtcagtaggttagggagggaggcgcgaaaggagatgccagcgggtgttaagaaggatatggtcagaagagctctttgtctccatccacggggccgtctgctcagcccgtgtgtctcggtgagtaattcgggagcaggtgcacgcctgtgcctactcgctaccacgcgtcttctgggaggaagtgaatgagccggttatcttctcagggagggttagtgctggccactgtgcactgccgctgccagcacgcccggtcacagccagtgtctatgggcgactggcgcggctgcgaggctgtctagaggactcctacccttctgctctgagtgcgcaagtcttcctggactctccggctgtgggctgtggtttggaaacgaggttgttcatagaggctgctctggggccaccatgcagggcaacggtgacgtccagaggccacctgcttgacatctccatcaccaaatctccaggaagaccctgtttcctatgtgaggccattgcccagcccacgtttgcctccttttcctccctctgccacacgcgaattcagctaattggggtgtgtgggcagccacggcctggggaggtggcc

SEQ ID NO: 336166 - DNA, 1000 bp, Homo Sapiens
ttttttttttttccaagatagaaggtatgaatcactttgctttttccttgcgtgaagggttgggggaaaggaatcctatgatccttaaacagcaaacactgtcagcaagactgcaaacaagatccatttagtggggaagaggggactattaaaagctgctagaaaactgaataaagcaaatcaagactgagaacagttccaactcccatcaatctccaaacagtgacaggtcggcagcaactcctttcctttatttcttccccttgtaaagggaaattcaagttcagcagcattcctttcctgccccaagtcctcaaccagacaagaggctgcaggcaccaaatcttgggctggataatggcaaaggcctcagaagctcacctccagctctgagcttcaacagctgtttgtaccagtgagtcagcattaaatccaccagaaaagaacagcaccacccaaagactggggggcagctgggcctgaagctgtagggtaaatcagaggcaggcttctgagtgatgagagtcctgagacaataggccacataaacttggctggatggaacctcacaataaggtggtcacctcttgtttgtttagggggatgccaaggataaggccagctcagttatatgaagagaagcagaacaaacaagtctttcagagaaatggatgcaatcagagtgggatcccggtcacatcaaggtcacactccaccttcatgtgcctgaatggttgccaggtcagctgcaggccagaggcagtcttcagaggaggggagaccacagaggacttctaggccacacaaatatgtctctcgggagacttctgggaaggaaagctcactctcggggccggctgaccatgacttcacccagggcctccaacacctcccgcttgtagtcttcaaagtcaccatcgatttggctaacactctgctcctccaccacccacagctggcaattggtttctgtgatgagtcgggcatcatggctgacaac

SEQ ID NO: 336167 - DNA, 1000 bp, Homo Sapiens; identical to SEQ ID NO: 157621

SEQ ID NO: 336168 - DNA, 1000 bp, Homo Sapiens
ttttttttttttttttttacaacataaatcatttaatgtaacatttgcaaccttagaaaggcagacatgtttaatccaagtccgtttataaattccaatttcacatggattaaaaactgcagataaattaagtcacaataatatcctgtacatgcattaaggctggtgactgctaaagtctcttgggaatctacaaataggaaatcacacgcagattactgggtctgaagagtgtctacattgttaaaaaaatcttgcttttttttttttttggtgatgcagatttcaacagtaactctggaaaactgtgaaaaatgttatttaaaaatatatatgtatatgctactgcacagtttcaaagatgtgattcataaataatgttggctgcactgattaattttataacaattactgcacttccaagttgatgcgaacacgcagtgactcatactcaatattaggcactagtaatatccttcaggcgtactacagttttatgttagctgtattgtacatatatatttttaaatgtatgcatttatacaaactgtgtatattatgtatggggtgtcagaaatgtacacatcactgttatataatacacacatcattgttgtacatatgaggataagttttagtgcagaaagtctcattgcattgcattccatgtgttcaatctagtacacaatttgtcaactcttcagattatttttccagtacattcctcattagattgtgggtttcaagtttccatttgcaatttgaatgtttccagaaatctctgtcttaaccaaacctctctctccaggcacgattctgcacatgagtctgatctgtgtagagtagtatcatcaaaaatgccaaattttgatcaggaatatacctggactactctctttcaaaggcaattgaacatcgtgataaaggatagcatctattcaggtcatggaaggatatggtcagttgaacttgtgttgaactttggaggcaaatgtacgtc

SEQ ID NO: 336169 - DNA, 1000 bp, Homo Sapiens
ttttttgtgtttcagtatcactttaattgcagtatttaaacacatcactttgtattcagaaaaaatatctacccaatactctcttctctggaaatttctatttccaaccgtcattgaaaccaggatccctgctcaacccctctggaaagaaatcaacagcaaacaaggacctgggtcacccacagaagaggcagctggtgataagggttaggagctgatctgggctatgaccatatgggggtgcagagcaaggaaggggctcagggtgagggaggcagagacagaaaagcatctgttgggggactgaggcaacagctcaacccaggagtcggcaggagggaggaggaagccatggagatcagaggataaggctaggatccagcctcagaggaagaggatttttcggaagagtacaggtgagaggctcagctccaagacctggtcccatggtcctgcctactttgatccagagggagaaaaaggagcccaaaaagagtttctgtgtggccccagagagactagaactgagctgtttgtcctaaaacttgggaggcctgttctaggctccagccagaaaactgtgcaggactctgcaaatggtagagggggcacatggagctcagtggaacttagagaacaagggaggagctggtgaccaagtccacagtgtcttggaggagagatgagggaagtggttcaaggcaacacgtttttctggctatatcattacaagagagcaggtgcaaaaggttactttggtttcctcaaagtagagaaagaaaatacagggaagaaacggtaaaaatcaaagcttcctgggagaaaattgtagcctagaaaagctcatctttcccctgggggttcctgtattgcggcagagaggagggggtaggggaagggggtcctgtgtgagtgctgcaaggccatcgattgttcctgggagcttctccagaccttggctttcccccgtcacacgtttacccaaagaagaccagagtct

SEQ ID NO: 336170 - DNA, 1000 bp, Homo Sapiens; identical to SEQ ID NO: 157624

SEQ ID NO: 336171 - DNA, 1000 bp, Homo Sapiens; identical to SEQ ID NO: 157625

SEQ ID NO: 336172 - DNA, 1000 bp, Homo Sapiens
ttttttttttttttttttactggagcaaaatgaattttttttattgtacttcagggcaacaagtcaacagctgcaggaaaacaaaaccaggtccaatctatgatctaagaggaagtcaggaaaggcttggaagagagatccaaaggccagcctggcaaggggaatcccacatgagaattcctgggagagagcaggccccaggcagcaaggtcatcttgcctgcttctctgtaagttaatccttcacagggagccaaggcttctcttgactgcttggacaagagggtaagggccctggttgcaggatttgccagtgaagtcatccatgtcaatagaccagatcatggctcctcccaggtttaaattctttaagaactgaaccttggtctccatactcttcacatcatcatagcccacccactggttccccttgactgcgtagggaacctgctgatcctggagccgcgtgatcttggctcctttcaggaactggcagatctcataataggccaggaagcctgaagactctgtgatgggtccagcagctccagggccagaggcaggggcccccacggtggtttctgcagaggccagtgtgaaggagtgcccatatgtggggatgcccatgaccaccttctctgatggcattcccttatgtatccagtaccccacagcatattccacattgtagtaggagcttggccctctgtcctgccaccccttgctcagagggctgttgtggccagtgataaggggcttttcccaagacccatggaagtcaaaggacaggaggttgatgaaatccagatcttttgccagtttctcaacttgatagctgttatcaatcatttgcctccctgcagatacgcccgcagtcaagagaagcctttccttggtggattttgtgaagtccttctgaaaggcttctgctaactcatgaatcagcacagtgaaatgagtgttttctttctgatctgggtagatccagcttacatccagtc

SEQ ID NO: 336173 - DNA, 960 bp, Homo Sapiens
tttttttttttttttttttttttttttttttttttttttttttttttttttttttttttttttttttttttttttttttttttttttttttttttttttttttctaaacagatgcatttaatgggaaatcttaaggcaggggtggcaggagctgcgggctcagttggcggccaggatcttctgcacccagggtatgagcttggtgacacgggcgtacacagcgggcgtggtggtagagcaggtgcggctgccccaggacacaatgcccaccagggtccaggctccgtccttctggcagaccagggggcctccagagtcacccatgcaggaggagacgccactggccccggcacagatcatcacgtcggtgatcctcctgccccaggacttcttgcattcggcattggacaggaggggcagggctgcctgctgcagcttgtcaggggtcttgttggcgttgtacttggtcttgccccagcctgtggtggcacacagtgtccccgcggggaagtcgtcgtcggcgctgggcaggcacacggcggacactgtctgggagaagcgggcaggtgtggccagcttcagcagggtgatgtcattgttcacggtcagaatgctgaacttggggttcttgaagaccttggcgatcttcaggacctggatgttctcctcgtcagagccctggtcaaactccccagccacgaccacgtcggaggtcctgaccccgcagtgggcagcggtgaccacccagtcctcgctgatgagggagcccccgcagaagtggaagccggttttgtcctgcagggacacctgccagggccaggagccggggacggcgtcctccccattcacgatcctggacaggccgctgagcacagggtggatggcggggaccccgcagccaaaggcggcccccacaagggagaagcaggagaggagccagagggaagccatgccgctgcc

SEQ ID NO: 336174 - DNA, 1000 bp, Homo Sapiens; identical to SEQ ID NO: 157626

SEQ ID NO: 336175 - DNA, 1000 bp, Homo Sapiens
tgctgtgaattcagttttatttggcataattaacagagaaaattttaagcttacatagaagattttggttactgttatcctgtttttttttttaaactgagatataattacatactatataattctttcaaagtgtacaattcaatgatttttagtacattcacagagttgtgcaatgatcaccactatctaatacagaacattttcattacctcacaaagaaatgccacacccattagcggtcactctcattctccttgcccagcccctggcaaccactcctctcctctctgtctctatggacttgcctatctggatatttcctatgaaaggaataacagtaggtgaccttttatgactggcttctttcacgtagcataaagctttcaagttcatccatgttgcagcctgcatcagtgcttcatttctttttatgggcaaataatattccactgcatgcacacactacattttatttattcattcatcttgatggccatttggactgtttccactttttggctattgtgaataatgcttccataaatattcatgtacaagtgcctgtgtgcacatgttttccattctcttggatatatgtctagaagtggaattgctgggtgtgaacaccgtttcaaatactgtagaaatactgtattcactgatttatgtaatagttattgcttcaaaaagatgaaagcagagagtgcaagctggctttttaatctgacttacatagtgattttgtactttctatcatctcattaatccatgtggcttcaccacttgcttttacctgtttggtttctctaggtatgtgagtttgtggctcctgtattaagagtctctattttattttttttaatattcaatatttcatttcaaaataatagtctgttttaattatgcattctataagggaaaaagaaaagtccaaattttcactggagaaacattaaacaccaactatcgtaactaatttatgcctggctttctcccc

SEQ ID NO: 336176 - DNA, 1000 bp, Homo Sapiens
tttttttttagttgccaaatagcatttatttgagtacaaaatcctggcaggcaaaagcacttgcagacccgactctctgagaacttacaaacaaaaagtgaaaagctcttagttcattttgagtcagaacaataaggaaattatgaaatctaagatgtgcaggtttacttaaaagtgataatggtttatattaactgtggcccacacagggtctctctaatctaatgaaaacaggacagtcactgaaaataaggactaatcaatggccaaatgtttcttcactatgggcaaaaatgtgatttcttcatctgggctttaagagctataaataaaacacatggccgggtgcatgcctatagtcctagctatttgggaagctaaggcagtaggattccttgaccccaggagttggaggtcagccaactctaaacaaacacaaacatcattctgacaaatgaccttaatgtaggatctctttggacacatcttcagcaagcagtcatttaataaatgccttctgataggcagaatgtagctgctcatggctctttaagtatcatatccagaatatgaagggtttggagagaagttgcataatggacttgcccctttcctcaatgggcaggtaatgtatacaaaagaacccatacccaaattatagcatttttattttccaatactatacaaaaaatagactgtgcatatcttaacagatccagatccaaattaaatactttttttctatttcaaactattctaagttgctaaggtgataatccagttttgagctctactctcttccactgactacttggctctcataagcataagaattcttgccctatttcccacaaactccataaattgacatttctttttgtaagaaggggatattttcttctacacttgagtccttacatctgtgagatttcataagtatctgagatttcacactcttgctattttcttagtgtcaaacacaagaggaaccaggaactgt

SEQ ID NO: 336177 - DNA, 566 bp, Homo Sapiens
ttacttcttttgcttggtggttttattgagttggcgacctttattcttcctgaagtctggtctgttcctaaaggtcggagacttgcgagtggacttctttttgtctgatcgtcctgattgcttggacgggacactcgcagggggttcaattataacgaccttcttggcttctttcattttaagcatctgaattcgtctcctctccagggcatcacattgtatgcgcagtgcaacaagcagccaaggctccggattcttgaggagaggcacaaaagctctgtaagcattctccagcctggttcctggtggcccacgttccaccttacaaacgtagtaggtgcttcgagctgtaaggtatttgctggcatactctgcatgattgggcttcatcaggaaaagcatcttcattttccccgtttgttcacacaaatcgatggtgtttgttttaggcaactttactttactgcggatgtaatacagcaacacgacgacagcacagttggtattgaccagaaactgctgattatctccatgtttgatgaagatgaacatgccctcaagatcgc

SEQ ID NO: 336178 - DNA, 1000 bp, Homo Sapiens
ttctggtataaaagaaaaaaaaaatcacgtttattttacaaggcagttattttcctaaagtgttacatatcaaggaaagttgagctgtctgtaggaaaacaatataattttaggaaattacagaagagtcaacattgtgcttaaaactttaaaatagtttttaaaaatagcagagtaagtgaatattgccaggtatgaacagccttaaaaagtgaggtggacacaacgatatagaagctcaatattaaagccgctagtgataagtcgctttgagaagtgttcaggctactaagagaacactgcttcaaccttaatcgaaaaaagaagtcatagcactaactgaaacatggccttttcctagaacagctaactctcagttatctacagtaatgaaaaagagcagtgacaatttttaaatggtgaataattccaaaattaatgttgagaagtgccctatttctgtgttgatgtgagagacactgatatccgggaacttacagcactgaccacgtgtgtggaactcccactggcttcccccttcttccctcctcctcagtgggagaggacaaaatcgtactactgaaaagcctaaaatataactggcctcctcagttctggttcacacctcctctggagaaggggacagaagagaaaactgttaaaactttgttttcctcatgtaaaaaagccagaacgtgaccataaaattttgcaaacaagatgtgggaatattaagagctgactgtagaaatattttaacttgtgctttttctcctgcccagtagtatctgtaccactaaacttagatctatggacagctttataaattatccaggtgcacctattacccaagtcaagaattaaattagcataaaaggggtttgttatcggtcccaaaatacttgtgatggttcaaatagaccaagaagtggaggattagaagtaaagccggccgggcgtggtggttcacgcctgcaatcccagcactttgggaagccga

SEQ ID NO: 336179 - DNA, 1000 bp, Homo Sapiens
ttttttttttttttttatgttcttacttggcaaaataaagaactggcaatcctatgctggccaccagcattctgaaggaaactttactacccagaaaaatcagaattctggtccagattgcctttctttgacttctcctgtattcaaatatacctattttggtatgtaaaaggcttaagacacttgaatttgaatgatggaatatatagattaaaaagcagttcttgtagcattattttaattcaaaaggcaagtgacaagtaatgacaggggcacacttaaagaaaatcagtttcactaataccataggataattatgtcactatcttcacagggctgtaacaaggaccaaattctaaaacgaggaaagggctccatcatgtctgacctttatgtgtgtgagccattagtattttcaacaaagcaaagtcaatctaaacctgaaagtaagctaaggaacagacagaaagatagttaaaaagaattcacttgcagcccttggccctgaccacttgctgagcagctgtgccacagcaggtaaatttctacctctctgagacttctcgtcctcatctgtaaaacggggataactttcagggctgtgatgaggccttctgctggtgtagtaagtgctcaccatatagcagtgaccactactactactactactactactactactactactactacttctatttataggcacagacaactacattacttatccaaagtcacaaactagttagtggcagagcctggagcaagaacccacatttcttattcttactctagtgttttttccagcatgcaatgctgttggagcaagggcgggggtaggtttttaaaaggtaaaaccatttcaacctaaacaaaattaacagctagcttccaacagtaacatagaaataaaacaaagattgacagatatgtaattttatggagttgttttttgaaatatacttttaaaaaagcacatttacctgtttatgctaaaact

SEQ ID NO: 336180 - DNA, 1000 bp, Homo Sapiens
ttttttttttttttttgtttgtaaaaatgaatttattaaaatgctcataattataaaagaatattaaaatgcacagaaattaacattaataattataaaagaatattaaaatgcacagaaattaacattaattacaaactttacatcttatgccacaatgtgtgaaaagcatcatgaatagttctacttcagttaagctgctcatacatttttaccctctcaaacataatatgaacataaaatggtacaagaagtgtttcaacaagagtacattctgacccccattgtgaattaatgttttatgaaattcaaggcacacatgcaataaaaaagggaagactttggtgacagtttataagatggccttgtttagttttaaaataaaaatgatagctttccctttctaatgatatatagctaaattatctgagggatgtttaatgaaaaatcccctgagtatttgctctaatgtttcaatatgctaaaattcacaggcattaaaaaaggatataaagctcagtttctctagtggttaacactggacaggctgaaggctagattctccctcttcacaggtccactgccacacccatcaatttccccagggctgctgcctctgaagccacttacagatgcagccaccattgtctgcagacacagctccatgcttttctttatcactgcaagtcagccgtggactcactaacaaacactgtggatggcatggggaaatgaccctgcatctccactacaactttgctcttttgggcatcttaacagtgtcagatattacatttggtgcctttcaatatgtagagggtttttttttccctcctgtccacagcagcacatttaatctatgaagaggattttctctgctggggctatgaaaacaaatgcacatttcttttaagttctatcatacatacaggagataaggtaaaaacatttccttttctatgctgacatacatggcgagtaactgccaaatttaaacact

SEQ ID NO: 336181 - DNA, 1000 bp, Homo Sapiens
ttttttttttttttctttttttttttttttttttttttttttttttttaacttttttttaataaactttatttttagagcagttttaagttcatagcaaaattgattagaaggtacagagatgtcccatacacctcctactcccacacatgcacagccttccccattatcaatagcccccaacagagggatacatttgttaacaactgacgaacctacatatcattatcacccaaagtccacagtttatattattccttctggagaattttcaaatacagaaattcctctaccaggaataaactagcaatttcctctcggctttctataaatttaattattatttcagaaattagcctatctttacaggagaaaatgttataaaccatgaaaagactatcaaatacacaaggaagtgaatgttatataaaaaatgtaccatctcctaaacaactacctgcattcccttcttgttggtaagttataattgtgatagttctgatcatctgtttaattaatttgctaatgaagcctctcacattctttacaactagaaaaattcagttttcaaaaattaaggctctggtatattacatatatcagcttcactcaactcttttatttagtccaaaagaaaaagaagaaaatgtcatttaaaaaataacatactcagctgcttgtttgtagtgcttcaaatctttctttaaatttttgttctcattttccaaaagcataatctgggtgtagacatctggaacattcccaacagttctaagttcagtcactcctttctgtattaactcataccattcagactgaaagcaatcaagagttctggtcattcccattttgatcaagaaattgcagagaaagtcttctattacttcaggtactgcatgctttgaaggaagaactgttttccgttccaaaatttcagtatctgtagcctgttcttgggccatctgaattgcttttgccagatcttcttcaccttctgggat

SEQ ID NO: 336182 - DNA, 541 bp, Homo Sapiens
cgagcttcccatcccaggtggagcttctccagctccttcccagttggtgcaggaaggactttaagcccaagctgacttgggaagaactggcagaactctttggaggcccacagcaggcagactctctgtgaactcaaagaatcctgtggttactgacccattcttggctccttcccctccctcactgaggcccggaaggagagccccagctggtaccatctccagggtgggccagctttgagctgcaggaaggaagacgggagtgcaggattctagaggcgttctctgcagcaggcggcccagcagacccctagtgaatctccttcttatcgcttcccgattgctctccctacatactggtgtcgcctcattccagacactggttttcttcaagctggtaatgcctttcatggtgcttccatgcagaacattatagatgatcttgtcccactgaggcatggcaggtatagtgtcctccatctttcataagagggaactgagaaacagaggggaaatgagacggtcgaaagtcacacagcca

SEQ ID NO: 336183 - DNA, 362 bp, Homo Sapiens
ggagctgggtgggctgctttagctctcaagcctcagtttccccatctgtaaagtagggggtacaccacgtccatcctgccggggtgccctgaggattcagtcaggcagcacttccaggagtggctgtagcaaagccacggaaagccatccggttccgcagctgtacaggaagcacagggcatcaacttcttgggaggcctcagggagcttttactcatggcaaaaggtgaagtggagcaggtgtcctgctctgggtcatggccgggctgcctcccctccacctggttccagggccggctcttttgggtttcctgctcccatcccatctctgtacactgcggtcactccagctgtggccacca

SEQ ID NO: 336184 - DNA, 1000 bp, Homo Sapiens; identical to SEQ ID NO: 157628

SEQ ID NO: 336185 - DNA, 1000 bp, Homo Sapiens; identical to SEQ ID NO: 157629

SEQ ID NO: 336186 - DNA, 1000 bp, Homo Sapiens
ctctagttgtcctcactgatgcaccacttaccacttcctgcttctgccctctgcctgaaccttccctgcctccccccgctcctctgtctcccatgtttcccggacacactcacgtccaggaggccctccctgatttaatggttatctgggaactcactcccccagttctacaagcaccccgacccctttttgtctcacacacacacgcactcacacaccttctttccacggctgcctcactttcccttccctttcctgaggactaagcttgagcacatgtgtgttccctgaggaccccctgtgtgtctcccacgtctccctgttgatgtgggctttgctggccactgcaaccttcacaatccaagtgtgtgaccgtccttcctcctttcccagagacatagccctgctgtggacgcagggcttgggcacttacgacaaggtggtggcggagactgacggagactgagggatggtgggcttgtgcatagtggttctggcagctcatctgcaccttggttctctgtcgttctagggtgaatttcagtcatttagccaaaagactcctgcaggtgttccaggaggagtgcgtgcagaagtatcaagcgtccttagtcacacacggcaagaggatgaggtaacagcccctcctgagctcctggagcccagggcctggcctggcccttctaggcttcagaggacccagggctttgtggagccctgaggcagagggaggagtgagtgaaggggtgtgagcagaggagtggttttctgtccctgggtggaccaggcagttggctgggagatttctgtagctcagcttatttactcctacaacacctgccctatacagtagatatcatcaccctatttcctaggtgaggaaactgaggctctgagaacaggtctcctctgcacatcacatggctagtaagtggcagacccaagactcgtatgtggctctgcctgcctctacaatctagattcttcagggcttttgagg

SEQ ID NO: 336187 - DNA, 1000 bp, Homo Sapiens; identical to SEQ ID NO: 246411

SEQ ID NO: 336188 - DNA, 1000 bp, Homo Sapiens; identical to SEQ ID NO: 157306

SEQ ID NO: 336189 - DNA, 1000 bp, Homo Sapiens
ttttttgttttgttttgttttcattgtactcattaatcccctcctcaatttttaacagaattataaaagcaaagtcaaaaggtccttcaggatgactgggaggcttcctaggctaacttttgcatttgaaaatggaaaaaataaattacttgatatttgtgataagactaagatttcttaaaagtctgcacatcaatatattacctggcttaggagggtgagggcacagtatccatctgcaccctctcctcgtattttttaaaaacaggcaaaatatgtaagaaaaggctggtgcacgttggaagacagagcgtgcctgtctatgccagtgctgctgtgccctgcagcctggcagatggagtcggatgctggggcctcatgcccacttaggccaataacatactcaagactctacagcccgttcaccagcaaagtatgccctgaggggcaacactggctgtggaagtgaagacacacaaagcagggactaaaggcaaatggggcttcacgatgcagcgacatgaagacagaactggtgtgggcgccaaaggcaacctgcagggctcacataaaaggaaaataggacagaaagccacgagttccacaagcagaatcatttctggtcttacatctgagggcatttgtagagaaaagtccaaggcaatgtcccctgggtctgagagaaaaatcctacgcaaaagagggcagacaatgcggtgctcgtcttgagggagcctgaccctgaccctgaccctgacgggctggatgcgagaggggctgagtatggctgtattcagtaaggaaactggtagcagacttttctagaaggtggaaagaaaaagcaaagactttcacagatacaaaaattgttttcaaaacaattacctagaaagttcactgcggttgggtggggaataagtgtaatattttcatttcaaatgagccatggtgctactaatggattataaaagaggatggccagttctggtcttccttccct

SEQ ID NO: 336190 - DNA, 1000 bp, Homo Sapiens
ttttttttttttttttttttttttttttttttttttttttttttttttttcagtggtatatttgttgttttactgttaatttgacacatctgaaccaaagcattcacaatacttgatatactttgaagagagtcatatactatagtcttaaacataaccacggaacgagcagaacaattaaaactacataaggccttaaaatatatccacagtgtgtattatttccatattcattcatttacaaattagactacataccattaattttatttttatttttcattgttttattcagacagggttcattcaaggaaaggcaacttagtttttgtatgtgtgagctttatttttttactatattggttaatataaaagttatgaattaaacgtattcttatctcctatacccaggagtgaatccatgaaattctcagatagtaatccaaaacaataggtcctatttttaaaaatagctaaagtgggccaggcgcagtggctcatgcctgtaattccgacactttgggaggccaagggcagatcatgaggtcaggagttcaagaccagcctgatcaacatggcaaaaccctgtctctactaaaaatacaaaaattagccaggcgtggtggcaagcatctgtaataccagctactcaggaggctgaggcaggagaatcacttgatcctgggaggcagaggttgcagtgagtcaagatcgcgccactgcactccagcctcagtgacacagcaagactccatctcaaaaaatgaaaaaaatagccaaagtgaaaagggatctgatagccagtctgttagtggtctttaagatcaactcatggactttcgggatttcatacaatgaagactactgcaattctatgaagactatgagatcagtcaaaatttaaaacatcgtatacaaaatcattcttgaaatctctaaatgccttttaagtaaccagcatgaaaattttaagtacttgcctcacagtaccaaacttaga

SEQ ID NO: 336191 - DNA, 1000 bp, Homo Sapiens
cagtggggaatcgaagcaggggcttccctagcttcatatcccccaggcccctgcgcctctggaatgtaccaacaaggggcaggggtttcagggggctcagcctcttcatggggcaggcctcagccctgggtttgtcacagtctggccttgaatttgcctttggccttgaccttccgacaggtgctaggaattgttccgacttcaaagggcagaggcaacaaggcacttccagctgggggcctcggaggcacaggagagcaggagcctcggtgtgaaaggaggggagaagagggagatgatcagaagtctgtggaggaaggggcttctgagggagaccagctcttcccttggggtgccagccagcctgggagctgccctctgcctgtgccctccagccctgaccccgtgctcagcactgtccactgggtgtgagtcacaggtcgaggcccacctttcttggcttcaggatgctgggtgccaccttgaaatcaaggttcggtgggagggaaatgaagaccttagccgtgggtagagtcctcaaggccttgcctgtggtcgacagggccttagtgcccaccagcttgctgtgctgtcgtctgaggacctggccctggtgtcggagtacatggggagaaggcagctgggccttggtgtggaggctggggaagtggtgacgggcttccccagagcctcgctgggtcagcagagggactgctgggcggacccccatccgccgatgacacatcgccatgggcttcttgatggtgaagccctctaccaggagccggatgcccacatattgaggcacctccacagcaggctgcttatagatgagctcaaaggctcctgtgtcacagttgcggtccagcctccggtcaatgaccacgcgcagggtgtcagcttgcacgccagcacagagccgggcagtgactgctgtggagggtgccatcgtggggctggcgttgatctcaatcagccagggctggaagtcctccccgaa

SEQ ID NO: 336192 - DNA, 514 bp, Homo Sapiens
tttttttttttttttttttttttttgatttaataaagttttatttttccaaatgtacagctggttggacctattcatgcatcttcaccagcagctggagcatctccacccttggtatttctggtgtaaattacttgagctctgtgctttgaaaccagtttgataagtcctttactaaggagctcctgaagggctgccctggccagggagcctcgaatcttcagtctctcagagaccacagctggggttataagtttatagttgggaacttccttacagagtttatcataggtagctttgtcaaacaagactaagttattgagcttgtcccgaactttgcctttggaccacttcttctttttggccttgcccccggatttgttcactgggtctttgtctttcttggccgactttccagcgtccttcttcttcttgtcgtccttaggcggcattgcgaagctcggagaatagcagcagacaccgcagcctcgtcaagatgtcggacaaaaaggaag

SEQ ID NO: 336193 - DNA, 1000 bp, Homo Sapiens
tttttttttttgcttggcaaccagagattaaattattcacattgcagtaaacttctttttaaggtctctgagagttacaataggaacatcatgtgcaaaactgacagccgtccaagggcccagccgacaggactggctctccctgcccgctcggccgggccctccccgagcggggacacactgcagggcttggctgagccctggtggacaaggcaaagagccttccaccccgcactgaggctcgtgtccctcggcagctccctgctccttcacagtagaggacctgggccgcccggggccatctgcaccgggcgcctctccctggccaccaccaagggctgacacgcaggtctgggcagctccttctgggaaggcctatgacgactgcgcggaaggtgtgggtgcccccccatccactgtccatcatgctgagtcctggtccatgctgcagcccagcgcctcaatgtcgctgctgatgtccgagatcatgcggtcccactcatccccctctgagggtgccgaccggtcatcagagctgcccgtggccctgttcccattggtggtggaactggatgtggtgctcagggcccgccggtgcctgccaaagctgtcagtgatgatgccgcggccatccttcacgccaatggtctccaggaagttctcgaagtgctggctgtccttctcagggatgaagggcctcagaccaagcagcaggaacttgcggctgtccccgtagagctgccgcaggttgatgcagaactcgtggatagaggccccattgcggtactcgtgcagcagtgctgcaaactgctggatctcctgtgatgacagcttggtgcgcagcgtcagcatgtagtcctgcagcagctcagtggcgctggcgctcagctcgctctcactgatggtcttgctgtggggtgatgcaccacccacatccacagattcagggaagcagaaagtgctggcttccacctcgtaggtctccttaatgtccactttt

SEQ ID NO: 336194 - DNA, 1000 bp, Homo Sapiens; identical to SEQ ID NO: 157630

SEQ ID NO: 336195 - DNA, 1000 bp, Homo Sapiens
ttttttttttttttatttttttttttttttttttttttttttttttttttttttttttttcggggtttcctttttatttaatcaaagactggtgaataaacataaatacagcacaattacttcagatcattcttcataccgtatacacacaaacccatgaacataatctgaaagaaacctgtagacagcaatgaaatgcatacagctttttcttccctcgctcaaaaaaaagtttaaacacacaaacttagaatctcatcagcacacactctcgtgacaaatgattcagacataaatagtgggtgcaaagaaactatatgctaacatatgaataacctttgttaatgaaaaaacagaagcagccataatgattaagatacattcagttaccgataactagttgtgccccaaagggcattatcaaaagagaaatcgtgctgcaaagaaaagcaatatatatgtacacaatgagaaaataaactgcaagattaatgcatgcatatttaatactggaaaaatcacagtccaccaaaatttctgcacgtttgttataaaagccctctgcactcaactaaaattaaaatgatcttataaggataatacttgtaaagtttaagtcttctcagccacagaaattgcaatggaaataaatgttcagagtcattttcaaaacaaaatcaaaacaaaaatctattcatccgatgacatgcaagatacactgctctactttcccaatgactagggaaaaaaaaaacctcaagtcaatttttagtttgcagatgatcaagaattttgtattccagcaggagttcaaatcttttggatcttctcgccaacaactactggattttcttttctgattttctcagcggcatcagctttgtaattttaagagcaattgtgtagatctgagtaacagtgtacaccacagtaaacatttctacaccgcattcaaacctagtaagtcccactttcttcctgcacatgaaacagagattct

SEQ ID NO: 336196 - DNA, 1000 bp, Homo Sapiens; identical to SEQ ID NO: 157632

SEQ ID NO: 336197 - DNA, 1000 bp, Homo Sapiens
ttttttttttttttttcttttatcatttatactgtattctcacgttacattatttcatttgatcctcacaacagccctgtgaggtaggtagggttatgtattactgttatgcctatttcacagatgaagaaatggaggtggctcagtgaggtgagtgacttgcataaagtcacacagcatgttagtggcttcactgcttctgcaacttctctaaagtcaagctgcttggattagggagcaccgaaaagatggacagttttatggaaaaggagaaagggcagtggtgatttgtaagatttcttcctcaaattgttttgttatgaccacagcttctgctacttggtctaaactaggttctccatgaggggctctcccaagtacccttggcctgggacagctgtctttttttgggatggagtctctctgcaatggcacactctcagctcactgcaacctctgctatctgggttcaagcgattctactgcctcagcctcccaaatagctggggttataggcgcctgtcaccacacccagctaatttttgtatttttagcagagacgacgtttcaccatgttggccaggctggtcttgaactcctgacctcaagtgatcttcccgcctcggcctcccagagtgttgggattacaggcatgagccactgtgcctggcagaaaagctgtcagagagactcctgggtcccaccgtagggggaaaagggcctttactgctcaagggaactggcgctgcccatggcccagtgtacaagctccctactcacagggcctatctatgggaagcccctttctgggcccacctcccatgggtgcctgtgtcaccaggcttccttggctttgaggacccctgcccagtgggggaggaccctggggactctcaaggccaaactcactttagggatgaatcatgacgtgcagtttggaggcctgcatggctcatcacccggtgggaagcagtgcttgggttgcttgccctggatggca

SEQ ID NO: 336198 - DNA, 1000 bp, Homo Sapiens
ttttttttttttttttggacttctgaaaatattttatttatatttcatttcagtcaagtactcattttccaaatctataaggccatctgtctagagttcaaaatctttaatattatctgaaaaactatttttttaaaaaaggattgaagaacatgtcaagagtgatgaaatgcacaaatttaaaatgttacataaaacaataaagtacatacatataacaacaatgaaaattctttatttaaaataccaagttattaaaatgggtaaaatgacatagtaaaataaaattttttcaaaacaactttaaagaaaacatacaatgacatcgattataatatatacaaaataggaaattaatcatcacctgtcattaatgggaagatttgcatgtattcaaaatattcataattttaagtcagataaatagaacactgcatgggggagttctatatttagtctcttcagaggcgttttaaattccgcttactctgggcacttcctgggagagcatcttttctatttcttggctttgctgctcctctactacattcttcagacccatgataagcacacagacataacacacaaaagtcaaaaccacaggctgttctgctacacagtccccttttcttatatggctggtacttagcaggggactggcaccttgggcaaggttttaatgcttcatcagtaaaaagtgttttggcaaccttaacatattcttcctgtttactacttaagtgagtaacagaagagcttgctagaggtgtcaaaacttctccccagggagataatgttgacccttgctctctctgagaaccaggtatcctagcctgtgcctgcacagatcttaaagctgagcgatttaaaagctggagccgagtggcagcatcctcgacatttaatacagccccctcagaatctgttttcagttgtgtgatataaaatttcctcctccgatttgcatttttatcttgaacaacaatttcacgccaatttc

SEQ ID NO: 336199 - DNA, 1000 bp, Homo Sapiens
ttttttttttttttttttttttttttttttttttttttttttttttttttttttttttttttttttttttttttaagttttccacaaacgtttatgtacacgccaatgtatgcatgagacatctttcaattaaaaatgtttaaactgatttttttttaaataccactataccaatgaggataagctgattttttaacttagattttatagctctagttttgcagttttggaaaatagcaggttttaaacaaaattaatatatgagctatttaaaatggtctttttagagtaagtcttacacataatggtcatttgctacttggattttcttgtccaattaatagtgacatttgacattgtatttagtctttccttccattcattaaacaaatcttactgtgcatgtagggagtatagaatgctacatttaatcttacgagatcatgctgtttaccaaattttatgatgaaattaatgctttcttcagtaggcagtcttacattgtaggcagactcctgtcaagttttgtctttcaaaatggtcctcattagcaagttaccaaaagtaaaaatagggcaataaagtaacagaattccttttaaacccatagtaagctcttctggcatgaatttatagccctcttctacccttccagccaaaggtcattccaaatgctatatgtggaatttgtctgaagggtaaggagtccaacaagaaaggaaaggctgaatcacttatacactgctcccaatgtgagaatagtggtaagtattgaaatgtctttttaaaattttaaccaccgtatttatcggttcaaaaactagaatttatagtttcaggcagatttcaaccaaagagtcaccaaattaaatacacagggtagcttgtgaggcatagacacagcccatgtgttttcctctacattgtatattcatttctctttggcgatttgacattatagccattctctggaagtcctaaagcaaactagtattttatg

SEQ ID NO: 336200 - DNA, 1000 bp, Homo Sapiens
agctgttattattcgatatttttatacattgttactcattatgacatttcatttctgcattcccttcttccccaggggatgcagtgaggggagagattgttggggtacagttctttctggggacagagggatgcacaaggtaaccttggggactcctcccgcccaagtattcttagattacctgtgcccgctttgccccccttccttctagcagtagctgtggtctctcacaagtcagtttccatcccagcaccccagtttctgtggctccctgcctgtggtacccactggctggatgctgttgctatggcaacagcattttaaaagccgtcggccctctctgaggcaacaggcatggatggagatgggctgatcaacgcctcttgcatctttgggcctgtctggatggaaggcagggaggggaatgcaagaatcaaacctggctttgggtggaggactcaggccccagccccgggtgttccccaaatgcacccccactttgctgagtcacacaggaagagcacttggctacaaacgcagattccagccacctgccagcaccaagagtctattttaatgtctggggtaggattccctaggaagccttttgaccggctctgctcatggctctgaggcaggcaggccctagaccacacctggggaagtcttcagtcttggaagattcctgaagccattttaggtatcaagtgtgtgactcttggctgagacagctcctgagaagccctagttgtcctcctgtgcctggcccaggcctgcctctctccccttcacagcctcattgtgggggacctgtgccccacagcctctttctggagccaggaaaattcagagctaggtgaccaagaggccacttcagtaatgcatcctactgcagaggtaaggcaaacactttcagcttaatgacactccagagaggcgctggcaggggccactctggccagtatgaagggtggggcttctggatgctccatctaagatc

SEQ ID NO: 336201 - DNA, 1000 bp, Homo Sapiens
tttttttaagtgacaccttggccttgtgggcatttcttcacttatcttacccaaaagtgcctttgggcccagccactgactgatttaaaacccagaaatgtggttttaaacaatgtggtcgtggtggaattcaggtgatttttattttctatttggtagtatttttcagatttcccacaaagaacatgtattgtctttgtaatttgaaaaaaaaatcaacacaggatagtaaagatatggtgggaaaatgggtgaatgtatgccacaaaagtttacatcattttctgtttcaagcctgtgggtacatgcgacaaaatgagttcaatgttctcttcttaaccctagagatcagctcagtgttattgctaatctgaaagcgaattaccagcaggaagccgagacagtagaactttatcgcttggaaccacacctgagaaaatcctttggtaggtgagaggagagtggggcagctcctaagggatgcattggcctgtctaatgtgagacggtgaattacctactgtaaccttgggccagtgtaggttaccagggttttgagcactaaacttaattttagtatatgctactgaaagaggatctttagatcttggagtttatccacgggaactacaaaactgatcaaaggctggaaaacaggcactatgaataaaagatacggtagctgaatatattaccttaaatatgcaaactctggctaggtaattagacaaattcccatctccatgaatagctactatagccttttcagacatggaggtgagacctgaatttattaacagtcttcagttgtacaaaggacaattgcacagaaggtaagtgttactttcacactgaggctaaggtgagaatgaacacaagttaaccaagcagaagttatttaggtcaggcatttagaagaacgtgctgaacaagattgggcttatcagttaataacttttgcatggattagtaggaactagattgaagctagagttcaatat

SEQ ID NO: 336202 - DNA, 1000 bp, Homo Sapiens
gtacgatctggatcttcctttccagcatgagtggggtgaatgccagcaggagacagtgtgctcaccaccgcaccctcagggtccacacctgtcacttcacaggaatggaggtccagagtgatgagaagtcacccaagatctcagagtttgttctcagcgaaaccagggtgccaagtggctgactccagattcactgctcctgctgcatcatgcctggttcatatgctgccagctagggcagaacgagacagaagggacgctcagagggactcctgctcggtgacctgctgcagtgatccttctaagggggacgtagctggttgatgaaatgcttccctcacatctctttcccttcctcctctctgaaactaagcttttcctttgatatataatccaacatttgcctaaaagactcactccctgatccggctacgattaaacaacaacactggagatagttgagggtctagaaaagactgggtagagtttgtctctacagatgttctaggcttcaatcaaaaaccatccagttgggccggggcgtagtggctcacacctgtaatcccagcacgttgggaggccgaggcgggcagatcacttgaggttgggagttcaagactagcctgaccaacatggtgaaaccctgtctctaccaaaaatacaaaaattagccaggcatggtggtgggtgcctgtaatcccagctacttgggaggctgaggcaggagaatcacttgaacccgggagagagaggttgcagtgagctgagattgcgccactgcattacaacctgggcgacagagcaagaccctgtctcaaaaaacacaacaaaatgaacaacaaacaaacaaacaaacaaacaaaccatctagttgcatggagatgcctgccggccttccttcactccccgtattcctaaaaggcacctctaacagaggacagagctttagcacatgtttttataaggatgtcgctgccagctgcattgcaaaggagttgcc

SEQ ID NO: 336203 - DNA, 1000 bp, Homo Sapiens
accttgtactttacaaactttattaaataatggacgttactaactttcattatcttatatacagtatttaaactatgtttttctagatgcattttttccccacaaagaatagagcaggtgaaaagtaaacttatataaaaaaaattgaaccttcagtacaggaaactagtaagaacttgacatactttaaagtacatataacttttcctcgttatatacatccccaccccacctctaaaacaaactgttttaaacaaaagcaattgataactttcaggaaaaaaatacaaacatgattatatatatatacacacagctctcaaaatctgtgtcctggccaacagaaatggtctataaatctacacatttgtcctaaaacctaaagccatgtagaccttttatacagtaagatacccacttacgtgcagtgaggtgtattcctataggtgacatcaaagtcatgcaacaagacactggcgtgaagaagtaatttctgagagtcagacagaacaataatatgaactacatagaactggataataccaatcaaaaagcgaaaatgcgaaacagctttcctgggacaagagtcaggtaattttgttcataggtaatacaaatgcacttacacacacctctaaaaacatactttcttggccgggcgcagtggctcatgcctgtaatcccagcactctgggaggccgaggcagacggatcatgagatcaggagttcgagaccagcctggccaacatgatgaaaccccgcctctactaacaacacaaaaattagccaggtgtggtggcgggcgcctgtaatcccagctattcaagaggctgaggcaggagaatcgctggaaccggggaggtggaggctgcagtgagccaagattgcactccaacttgggcaacagggagagactcagtctcaagaaaaaaacaaacaaacaaaaaaaccaaccaaacaaaaaaactttcttgtggtacttatcttttttgatcattt

SEQ ID NO: 336204 - DNA, 1000 bp, Homo Sapiens
tgggcggagagtacattgttgtattgacgtcactgtccctctcacgttgccattttgccattactgtttattgtttagctcccccttcacaaaaccaagagcaccctgaaggcagggaccagatcctacttgaaaatctcaatgcccgacacgtagaggagggggcctccagccagcgctggctggctttggaagcagcggcaacacattcacctttaaaagcgtttctgctggaagaactgcaaatatcagtaagggaaaagattgaagttaaacttacaacttctaagaaaacgtgagagctaatgagaagcaggctagcatatctcttttgtaaggtcaactgagtcacacccccttattcagcacactgctcttctcctgcagttagttgcacagaaattttattatcgtagcataaagcacaactgccacttaacagcacagaaagaatcagcacaatccctgccctcacggcacaacatctgcctcaaccacattccttcagatgacggacaagtgtccaagagacctaccaagaaccatgtggttgctgttaatgaccaactacaacaaaatgggcaaccccaggcagtggtgagaatgtgggcttgaattctgtctctgtcccttaccaatggcacaaccatgagcaagttaccaaacgactctgtaatgccaggcccctaatctgcccagtggaggaaatactccaactcctagaagtaatatgagaattaagactgcacaaggagctgacccacaggataaagacagcagctgttccttccctttcccccaacatgtatttccccagatgccatcctacatgttcacattgaagagataagcctctcagaaggaagataaccatagaaagttgaaaagagaaacctctttagatgctggtttattaagaagaatgaaggcagatgtgactggggccaaagatctcagtgcacattcctgacactcccccactgatcatgaggcccaagga

SEQ ID NO: 336205 - DNA, 1000 bp, Homo Sapiens
ttttttttttttttttgtttttttttgtttctgttgaccaggctggagtgtagtggggcgatctccgctcactgcaacctccaccccaatactttcatttttaaatattatttatggcatccagatttgcataagatggactgggtcaatggccatgccctttataaatcaatattcttcagttctgcaaattcagtttcctaaagagccaaatcacatcctactcatcagcaaggcgggtagacatcattttcacaatcacttctaattttccaccattataaaaaaaaataaaatatgtaatcactttcttattgtaaaataaagaatttacttttccaggacctactgcctccctgtcccccccccccttttttttttttcaaacaatcttgaaccctttgtcacgagtcagttgccaagagaagcctatttgttggtttgagagcagttcatgcagacacagaccacttcctctgagaattcacttgcttcctcaggatggaatctggctgggcctctgaccttgctggtcacgtgggccggggcctccatcagtcataccctggactcctatctgtgtctaaacaccacgccccacccccaactgcacggcagccactcgcatagcactctgggagggctgtgggcatgagcagcgaggactccatcagcagctcccccacatgagccctgctgatgagggggcttgcgaagcagctttgatgtgctggtaaatccaggtgcaaaacagaactcaagttaaggcctccgcacagcactgcgttctaactgtgaaggattcttactctagtgtcctgtgtggaggtattggaattgtccattgctaagactcagaggagaaaagcacttagcatcgcaggacttggagcaccggtgctgaggcaacccttcattcattcgtcggatgtgtgttaaggcccagggcaggggtcacggattctcctctcacacagcacgtgggtggcaggaccaacac

SEQ ID NO: 336206 - DNA, 1000 bp, Homo Sapiens
ttttttttttttttttctaagttgcctatgagtgtttttaatatgctttaatcttccatcaaaaacttgtctgatatgtgactgtaaggaatgaaaaagaccttgagcttggttcaattaacaatgtaaatgttgatataattgccaaacattggctatacttatacggtttcttgatctctctattttctttaagtaggtttaagtgggttttcttccaatgggaaaaacgagtactcctgcctgaccatttctgataccaaagagagctacaatatagagtgaaaacagaaaattcacttgaaaaaaacttttgattctgtatttgggattgaagttgtgcattagataagctgactgttgtgtcttttgttttagtccaatatattttaaaattgcatccagagaggagtctctgaatgccttcttctttcttggaatcaatttactccatcaatttgtcagtaggtcacttttaggagacaggcaatgaaaactggcatagtcattccaagaaacttatgagaaaggaacttttagcttttggtacactgcaaatgtaagctatcagtagtattagtttcactcataaacccacgtaacaaaattctgaggaataataccaacacaaaaagcatgagaccaaatatgatgcattcccagttatccttaatcaacatgtccatatcctagagagtcacttttctctctaattacaagtcacaaatgtgctggcattggagatcagagctctgttttggggtgtgtcgctgcatacttgggggccagctcttgaatgagattcacatagtcagttttttctgcacaggccctgcactcctccccccagctatgcaggatctgcttcagctctgccactctcatcttccgcaggtcaactgatgccaagtccagtgttttttcatatttcagctcacagatctggctatccaacttcttcagcttctcacaaatcttcattgcaggcatatgcacactc

SEQ ID NO: 336207 - DNA, 1000 bp, Homo Sapiens
tttttttttttttttcatcatcctaactccattttatttttaaatataagatttataattatcacttaaaagatatatacatcctctacatttcatttttttatccagaaactttaattgcagagatggctggcatgtaaatggacgcaaggggccacagtggcccacagaaagcaaatggaagggactgacctactggtgactttcattctagaatcaggtatgtgttgagtgctttgccccgcaggttcctcatctcctcgagcagcttctctccggccttctctgctggttgtgcttgatctttcacttctttctccttcctgatgtccttgtagttcaacatagggaattccactttgatcatttctggagtcaacataacttctacattctgctcacagagctcacgttctactgtttctagtctgtcctcttctggtaaggcatcaaggatggcagggacgtctatcggaagcataaatgaattgaaggaatcgcagctctttgtggtctccatcttggaggggtccggcagggaggagagaaccagggactggaagcttttccagtgcattattccgggaataatgtccgtgtgatggagaaactgcttttgggtgacaggaatgctggacccgtggcgggactctttggtgaatttgtacttggggtgagagcatagatggtaatctatcaacgtttctgcataggtcagaggatgcattacagcaaataatcctgggttgggattaaaaacatacagaggatcataatctagagacatggctaaggcctcaggtggtttcatgctcaagattgatgttttgccagagagctgagttgtggagtcctgtttcggaagggctgtgatggtggtgacttcatcctcagctccttgctttagggctcgggcaagcttttgaggtctgtaacttgttgaagacttgtggacagagaatggctgatatctcttaattttgtacagttgaggaacctg

SEQ ID NO: 336208 - DNA, 1000 bp, Homo Sapiens; identical to SEQ ID NO: 157636

SEQ ID NO: 336209 - DNA, 1000 bp, Homo Sapiens
tttctaaggaatgattttttgttgtgggcataataacgaaacaacaaaaacagctgctgaggacatagcacggcctcagtgagacccaggatgccaatattgtctatcaaatcaagagaggacgtgtaagaggatgtgacaggacggcatgggggaaacacagaaaagtgttctcgtagttctatacgtggcttcattctctacttgggtccagttacagttcttgcagctatagcagaagcaaatattggacactcatttgaaagctgctgccccgttgggaactaattttacttgatattttggttattaaatggttttgcatgttcttttcatctggagagacagaatgtgtatatgtaacatttgtttgcatccatgacctttatattttcatttattcatgaaagcaatatgatttaacttttaaaaaaatattgccaacatttgtcaaatctgccaaggaaattttcattaataaattgtctcaaataccttaagtgtgcttaattccaggatgtaacaggctgcttttggccaacaggggcaatctggaaagtgctcagcacatctgcgtaataggaaaaaaatttggtctgggttgtggaatgtgaatagaatctaccattaattgatgctgctttcaaactgattgtaacatttttgtgcctcatatttggctgttatgagtgtgtaagtgcaagacagaaattattgaataaagaggaagaagatattaagatatattttaaagaccctgaaaatcaaatcacagagtttaactcaaaatttcacatgatttcactcataattcaaacattcagaccctttctttgaagcagcttataataaatttaagacatataaccacaatctctcataatgggagtgaggaatttctgtgtggaaactatttgaaggaatgtctttaaaaatgatgtcaaggaatgcatatatcttacgcttttcagcatctattcgatctatgacccctgctgag

SEQ ID NO: 336210 - DNA, 1000 bp, Homo Sapiens
ttttttttttttttttgttttttgttttttttggtgttattgttgttagaggcaagagtctcactatgttgctcaagctgaacttaaactcaggctcaacctgggactacaggaacatgtcactgtgcccagcttcaagaaaatgtttttaaaaatgttcaggccttataaggtctattacatcaaaatcctcaggggaaagcctacatttgtagatttttaacaaaatgtcctcaggtcactgtaatgcacaattctgagaattagtgcagcaatcacttcagtctcatctctcacccgcatggctagttccctttatcagttggacatgtggccaaaaagagaaaagagtaagagatagtgtcatttattaaagctccagttaagtttcctgggtatgggtagaacacaaacaagtaaactcaaaatcccacttgattttgctatttacaagctccttatctcccaccttcccaccaagacattctaggtttgagaggagtctttagactcttatctaagtggctgtttctgccaggatgggcaataagtcagttaataatttgttccaccttctgctgaagggtttctcacttcaccaccacatattcactgccaatctggtttcctcaaagtcttcctaaaattcatctctaggcgagtttcaactcactctcattttcaaacaaaaaattattagacccaaagctaaggagcgccttgtctcaacacataaactggaacaacaacaaactaagagaaaaaaaaaactcttcatagcattttccctcattacctaatttccaagtgacctgcatatttctgattgctctccttttcccttcccatttttccctcttaagccttgtgccactgagagatgatacatcagtttttcagaaaattatcagcagcagcaacatgtccacttattgtaagttgctttagttttgtttgagttttaagataaagcctatttccagggcatattttctttcct

SEQ ID NO: 336211 - DNA, 735 bp, Homo Sapiens
tttttttttttttttgttgtttttgtttttacagttttattggttttatttaaaccccaataaaacaaacacattcactgtctattcactttctgcactgtgcaggctggcattggcattggtgactctgatgaccacctgggctgctctttccaagatggctttgcagttcttggaagaaacatcatgagtgatctcaacacagtaagatttgttgctcaccagcagtacttccagctccttaacgttgtggaccaggaacttccagaagccactgggcagtatgtgctttgtctttttgtttctcccataaccaatgttgggcatagatctggccctcaaaccttctatgaaccctgttgttaatacctctgtgtttccaccagttacccttaattttgacatatcagtctgactggttcccagtgaacttggtgctctttttgatgatcttgggcttcgcgagcggtctcaggatggccatgatggaggagatgggtgtcacctccataggcagtgccaaggaagacagctcaggtctttcttaatgaaaccgatatccttcgcgtactgacggaaacactggcggcacatattgaggccatatttccggatcagaccgtgccggtttgaacagacacgacaagagcgagaaccctggccgaattttcgcgggtggctccagtacagctgctggtgacccatcttgctctcagcagtgcaacgaggtaaaag

SEQ ID NO: 336212 - DNA, 1000 bp, Homo Sapiens; identical to SEQ ID NO: 157638

SEQ ID NO: 336213 - DNA, 1000 bp, Homo Sapiens; identical to SEQ ID NO: 157639

SEQ ID NO: 336214 - DNA, 1000 bp, Homo Sapiens; identical to SEQ ID NO: 157640

SEQ ID NO: 336215 - DNA, 673 bp, Homo Sapiens; identical to SEQ ID NO: 157642

SEQ ID NO: 336216 - DNA, 1000 bp, Homo Sapiens; identical to SEQ ID NO: 246412

SEQ ID NO: 336217 - DNA, 1000 bp, Homo Sapiens
cgctgtgaaagccgtaacatttattgaagagcggacatatgtttgcaaatcacagtgtgcatgggcatgcattacatggttcataatgctattccaattaggcttttcatagtgccttctcataacgtcctttaaaaaaaataataactgaaagggaaaagaaagtgtcaattgcaattacatttacaaaaccaaactgctgctttcaattagagtgaatctgtgcttcgctactcagatatacacatgtagattttccaaggcccatgcacacacttctgtaggggcagaaattttctatgaataatggctttagcaacccgaatagtatctctaaacattgacaagcttggggaacagggcaacaagtgcaatgaacaatacaatttctaacgtttgtcccagtcaacataccactttgccctggagatatttaacacagcatttcatttttggaatgataagggataattcatctaattaagggtattatacagaatatacctataaaagacatttcccatcttaaataatatttagaaagtagatttattgtagatttatttccttttggtccagtagaagaaattttggcaaaattgttaagaaaaaaatactacttagctcttaacatggaatttagcctcttgttttcctctgaaaaggtatctctcaactgcagtaataaaaaataacacttaatttccaggagtttaaacaattttaaaaaattatctatttcataagtagaaaagttatgttcttcaatttttcttttttcttttcttttttttttttttttagacagagtctcactctgttgcccaggctggagcgcactggcgcgatctcagctcactgcgacctccacctcctgggttcaagccattctcctgccttagtagctgggattacaggcgcacaccaccacactcagctaattttttttgtatttttagtagacacagggtttcaccatgttggccaggctggtctcaaa

SEQ ID NO: 336218 - DNA, 1000 bp, Homo Sapiens
aattagagaaatggaaaaggagtggtgtgtgtgtatgtgtgcatgtgtgtccatgtgtgtgcgtgtgtgtgcacgtgtgcaagtgtgcgtgtgcgtgtgtgcatgtgtgtgcatgtgcacgtgtgcatgtgcttctgtaagcatgtgtgtatgtgcatgtgtgtgcatacgtgtgagtgtgtgcatgtggctgtgtgcatgtgtgtgcatctgtgtgtgcatgtgtgtctgtatctgtctgcatgagtctgtgtgcatctgtgtgtgtgcatgtgtgcacgtgtttttgtgtgagcatgtgtatgtgtgtgcatgtgtttgtgtgtacatgtgtgtacatgtgtatctgcgtgtgcatgtttgcatgtgtgtgcctgtatgtgcatgcatgtgtatctctacatgtgtgcatgtgtgtgtgcatgtatgagtgtgcatgtgtgtttgcatgtgtgttcatgcatgtgtatctctgtgcatatgtgtatctgtgtgtgcatgtgttcgtatgtatgtgcatgtgtgtgctttcgtgtgtttgtgtgcatgtgtgtatctgtgtgtgtatgtgtgtatctgtgtgtgtgcctgtatgtatgtgtatctgtatgtttgtgcgtgtgtgtgtatctgtatgtgtgcttgtatgtgtgtggggggtgcatgtgtgtatgcatgcatgtgtgtgcatgcatatgtgcatgtgtatgtgtgtgtgtgtgtgtgttggaagttcttagcaaggcagtgtaatagctggctcgacatgaaccattgtcccctggcagattgtgcccaaggagacctatgtatttagccttgcaggagaatatgacctctcctattccaccgaattactgtttcattgacatctggctttgggtgtttacctcatatgtgtctgcaggcatgccttttgtggcctaatatttccgttgctgcccctgcccccttgggacagtgacagatatgtcatcagcctctggcaggccctgctgtg

SEQ ID NO: 336219 - DNA, 1000 bp, Homo Sapiens
tttttttaaatttttttccaagacggagtcttgctctgtcgcccagactagagtgcaatgacacgatctcggctcactgcaacctctgcctcccggtttcaagcaattcttctgcctcagacccccaagtagctgggattacgggggcatgccaccacgcctggctaatttttgtatttttagtagagacagggtttcaccatgttggccaggctggtttcaaactggcctcatgatctgactgcctcggcctcccaaagtgctgggattacaggtgtgagccaccacgcctggccatgttctttcttttgagacagagtctcacactattgcccaggctggagtgcagtggcatgatcacagctcactatagcctcaaactcctgggctcaagcaatcttccctgccttcgcctcttgagtagctggtaccacaggcgcacaccactacacctggctaatttttcatatttcaaattttttgtagagataggggtctatgttgcccaggctggtctccaactcctgacctcaggtgatctgcccgcctcagcctcctatagtgccaccgcatagccactgcacccaactattttcttactgttccttgctctatctccttttttttttttgagatggagttttttacttgtcgcccaggctggagtgcaatggcgtgatctcggctcactgcaacctccacctcctgggttcaagggattctcctgcctcagcctcccaagtagctgggattacaggtgcccgccaccacgcccagctaattttttgtattttgaaacagggtttcaccatgttggtcaggctggtcttgaactcctgacctcaggtgatccacctgcctcggcctcccaaagtgctgggattacagacgttgagccaccacgtctggcctgctctatctcctttttttgttttcctttttagtcttaaaatatccactgcttcttttgctttgctttttcctccagaaaattaaaaga

SEQ ID NO: 336220 - DNA, 1000 bp, Homo Sapiens; identical to SEQ ID NO: 246413

SEQ ID NO: 336221 - DNA, 1000 bp, Homo Sapiens
caatgttagaaacatttacttctgacgataatccatatagctttctctgatgttacacagcgattacatctccttgtgtctaaattaaagtcaaagtatgaattttaagatgatttttaattatttaacaagtagaaatacgatcagtgacaattatcaattaaaacattaaacaacccagttaccttttcttaacagtcatgatgaaatatccctttcctgtcttatcagaagccttaattattctctaccacacacaccacaaaagcttcttaatagagcatcagtgtccatcacacctttgtgtagaatctctggcaacaaggtgctgtctcctcttgccctgcccccacatctgcttaactactcttctttctggaatgcctcttttgctcccattttgtgagctcctgcagatgtgtttaaggtccagctcagtgactacctcctagagccttgcttgaccacttaaacatacaaactaaaagcacaatgtggtcatttcggaaagatgattgataaattctcaagccacaatgtctagtttttaaaaaatgcaagcagggaggaacagaagtgacatatcaagaaattaaaaacacaaattatagattgaaaagactatagtaataaaaaaattcaatttcacactaaaatatttagtgttacagagaaggaaccaaattctagcctttatattttgtcttaaatataaagaaaagctttatatttatagaaatgtttttaagtttggtaaataattactactaaaaatttttagagataagacatttctggttaaataacatgaagcatatacacaaagataatatgacaagcccttcttagtcttctacttatgtcgtattttttattactcacaatggggcctcaatatttaagaattaaatatgtaataccaaatgaaggaaactgacaattcagtgaataactaaactgaaaacacttcacatgaaataaaaatttaaagagttaagga

SEQ ID NO: 336222 - DNA, 852 bp, Homo Sapiens; identical to SEQ ID NO: 157644

SEQ ID NO: 336223 - DNA, 1000 bp, Homo Sapiens; identical to SEQ ID NO: 157646

SEQ ID NO: 336224 - DNA, 1000 bp, Homo Sapiens
ttttttttttttttttttgttttttttgttttttttgctcaggactatttgctttcagagcacaaaacaggttacagacaggtgtgtgccaggagtcgcaagatttggctggatcctcccaggaggcttgggggatggggcacagcttggctggacccaggggggacagggacattgatgtctgacccaaaatgatccctcacctcaatgccttctgctaggacctatctatctggccctcctgttctctccacaaatggaattatgagaccacctaggggaaaggggacctcctatcccccctcccccgccctgccaagagaacagagagtggatgcgttgagctggtaaagtgcatggaggagccggtctgtaggtgctttcctgggtttaagaacctgatgccatagactcatcttctctggggcctgggacccgtgcggctgggggaaagccaacagttaggaacggaggggaagctgggctggggggactggcttggatgtgttctcaaaccatctctgccagcagcgtgctgggtcctgccccatctgtacaatgaggggaaccccgctcgagggtggtgggggtgggggacactttccagttctgactcaaatctgtgtaaatgcagagggggctggacccaggggatgcaggggctccaacgaaggtgcaggggtcgggaggtttcccagggcctgaggcttatcctgtgggccaatgctgcctctctctggaagagagatggcctctgtcccaggagacatgggtcccatgcagcactgggcatagctggagacagtgaggtccttccgggggggtggcaggaggctgattccccacagaagtatgggatgagacggccaggatctgggccgggggcagtatcccgggccggggtgggggtggtaacctatgcctctgtacaaggatgtggctgcacagatgcagccagaggctcccaccagctgggaccaccctgggaccgagaccaccc

SEQ ID NO: 336225 - DNA, 1000 bp, Homo Sapiens; identical to SEQ ID NO: 157647

SEQ ID NO: 336226 - DNA, 1000 bp, Homo Sapiens
ttttttttttttttttgggaacaaaatattttatttctctcacaaaactatagtttacagtagtatttactaaataaattatataatttctcttttacaagcaataaactagatcacaaatatttcaaagacaatgtatgtacacgacataaggccttttataaatagctttgcttttctcatttcactagtaaacagtgaaaaaaatctttatagaagctagttttctataaagtgaaggcagacctagtatattgatctttaaatgaaaccaatttaaactttcaatgacatgaactataattttgcaaaagaatttatacttaatttaccatgtgtgtggatggatttttaaaaatatataagcagattacatatgttgcttatgtataatcactggatgcatgcacaatgaaataatgcaaaagtccataggaaaatagcacttccaactccaaaaaggtgattggcaatggtacagaaagcagcttaaatatagttcatgcagttcttcacagttcagcaagcaacagcaaatgatagaatagggtagtatttttcacatcccatctgctgatcagcctgaagttgacatcttgaaaactcttaagtcaggttgatgatttctctgtgtgtagtggggctcagccaagttgctgtggataattctggtgcggagaaacttctctgccataactgtgctcacgtctcatccatgtgcttaggtgatcaccattttcacttataaatagacgtcaagcacagaagcattgtcatcctgcacttccagagtgttgggctcagcggtcaagtagatggtcccctcttccaaggtaaatgttgaactggaaggtaaccctttgctccatactatatccagattttgttcattttccttaatgcctttttccgttccagagtcccactctggataccatgtgacatttaggtgtcacatctccttaggctctcatagactgtgatggttttttagacttct

SEQ ID NO: 336227 - DNA, 1000 bp, Homo Sapiens
ttttttttttttttttttttttttttttttttttttttttttttttttttttttttcagcagtgcaaaaattttatttctgtttcccctccccaccactttacaagatgtaaaattttacttaatccaccgtattctctttttttaattatctgttatcagtcatgtcaaatgtgaggaaaaaaacactaatcaattaaaaatatccgtccctcttccccactgctacagcaaatttaggataaatctacagcattcacttactttagctggttctgatactgaggaatacttttttatttgagaatcaacacctaaagacttggctaattgtacagcatttgaatcatcactgataagtgttccaagagccacaagaagtctaaaagtggcttctaggtcttgtactacttccaagattgtgctaattagtgacaaacattgggctttcccttcaatgttatggtctttatgaaaacaaacagaatagttcagggccaatgtagccagagcaatgtgaatgttcttattgctccctgatttcagttctattgcatgggacatcagtgattccctctgggacatcatgagtttttgtcctgcctggccaacaaaacaattgcaaaaagtcctgagagcaagcagctggtttgctggctttcctttagggttcagaagattgataagatgactgctgaactgagccccttccttttcattgcagaagttctcattcacactggggtgtttaattgacaaccgaagaatgtcaagtgcaggaaagacaatatcttcaggacagttaatagctttccacaaaatctgaagttgctggactgtgggtttttctgaagaactattacatattagagacagtatcttctcaagaagtatcaagtcatcctcagttaacttcttctcttcaggtgcagttccattaagttccttcagtttacctaatatttgtgtagggtttgcttggtcaaatgtgacagcctctt

SEQ ID NO: 336228 - DNA, 1000 bp, Homo Sapiens
ttttttttttttttttcttttttttttttttttttttttttttttttttttaatttctaatgttttattatagatttttaagatacatatttatttttatattattagcttaaagaaagtaagtcacacaagaataagcttttgcatgtctgctaaggtaaattattatattataagtttgttatgaagttataaataaaacacatattgtgcttatgtgaataaaaccacagcataatcggagtgcatttgaaatgcacagagtattctcattgtttcaataagacaaaagaagaacattacctattagaattaaaagcttggccttcggctatccattagtcaaaaataattcatcatgaattactcattgattacaaaacaaaattgttaaaaagcaaaggtgactaaaataaacatgttcctgggcctttcatttaataagcatttaggaataactggaggcaaataaacaaagttaaaccctcacgtgggaagaccaggctgcccaacagcattgtagcttgagactcaaagttaaagccagcttctaaaaagcctgttagtcctaccatcaatatgataaatttggataaagatggtaaaaaaaaaaaatgttttaagcagtaaaaatgcaaatatgccaccttggtaagacaggatgtcaggcaacttgccaaaagagttatttcaagtcagtggctcaaagtaggattccagtctccaaacttttgttaggctaattttcattaagaggatgatttataagagaagaaaaggatcttaaaaatcccagagacagtgagtaaaagtggagactcaaaagagccaaggagtactataaatctgtagaagcagagggagacactcgggtcaatagagggaaaattgaagaggaagataatccaaagctcaactgtccagggggcgagcacagcccataagggtgctaaaagtagtacatgaatgtgagcctagaaaagctacaattagattttca

SEQ ID NO: 336229 - DNA, 1000 bp, Homo Sapiens; identical to SEQ ID NO: 157650

SEQ ID NO: 336230 - DNA, 1000 bp, Homo Sapiens
tttttttttttttttctactcaaactataagcttttattattgtattttacagatcattcattcaggacatgctgcatctggggttggcatcatttcccttttgaatgacagaatgtgcataaaagtctcttgcccacgctgaactcacacgtgcccggcaggaaggagctctcacgaagtgccagctggatgtgagcttgctctggcagcagcagtgctgtccttgtttctgagctgccacctattcactggagttaggtgggtcaaagctgaaatttagcttggaatttaagtttctaattttatacttttcattgtggtctggtcagattttagtctgcttcaaaatcaaaaggtcactcagtcactctaatatgatcattttgaatatggaaatttgttatttacatgctgtacctcaaatcaaagaaaaagcacgcgtcaatatcacgcgtaggaaaaactagaaaattgttccttttccattttgccaccctgctcagttttcctcataaacggttccagcttggaaaacaagagcttcccctctcagacagatgcagcagcgggaggaagggctttggtcttaaactagaagctgcagctgaaactctccccgtctaatcctgctgtgtgtatggctcacaccatctttcctgagtggggaaaaccgctggcactgaatagctgaaaggctcgctgaaatctgtgcttcaagaacgagttaaagacaatacaataaaacacatagacactgaaggggttcaactaatgtccatcacttattctgctaatgtcagtgcctttcaataaacttctcaacatctgtgttggtaaacttctcaatatttgttctagcccaaccacggtgacaaagctcccttgcccaaagatcgtgagcctagacaaaggtggataagaaatatgaagtctaaagctatagaatatagcagttagtgaagtaaattaaacatgcccctcgcctgcatgctgatcaga

SEQ ID NO: 336231 - DNA, 1000 bp, Homo Sapiens
ttttttttttttttttttttttttttttttgatggggctttgataatgtgattattctttattcagaattgaaattttcataaggataatcaagtttttggcatacaaactgttattgtgatttaatgtaatttttttgagagagtcgtttgttattttttaagtaccacttttcctccaacaaggagtagtcatagcaattcagaaaagtagggaaggtgcaaggtgtgaggaatttccattctagcatgggttgtaactatcaaaattacaaaattgattttatactccacatgaaaaatgataataagtgaagaacaattttccagtaatttttcttagcaaaatagaaaacaaaataatcaataacagaaaattgtgaaaataaaaacccaatacacatatagagaataaggatataggcactaaatataattctttaaagcttccagaacacatagggcagaagtgatgcagccatcaaagttggactgagtaaatccatcccctccacatgcaaggaaaggtttgtgatgcagagtcatttggccaggacagttggcagcagcatttgtaacctgtgaatgtctccatttttggcatttggtagcaattggctgaggcaaacccggcaaaatgttttccagctgctggaagactaactcttgcacatcctcaatgctgtgttccaagtatgtaactccaaatgggacagtggtgtgaatcacgagggaaggcccaatttctgatgactctatattgcgcttcttattatcaatggagacgaagcgtatgcagggattactggtgatgtactgcccagcccaagggacatcaatcttcgtaccagcttcataaaagaggcccagagcatatcgagaggagtagctcacagcctccagttgctgcctttggcattcactaattaaggtggtgatgtcaccttgaagctgcagaatctcaggaactggcattgtgagaacaataagatcaaactgct

SEQ ID NO: 336232 - DNA, 1000 bp, Homo Sapiens
ttttttttttttttttttctaggtctgctttttattggccacgcatccagccgccagcctcagggcacacacctggcagggggcaggctcgggtaggctgccctcgctgggtgggcagtgagggggcagcggctgctgggtgtcaccctgcagcccctcaggtggacctgtattgtccccagggcctgcccacgctgggcagctggcactgggaggggttttctgttgatgtgatggccaagtttcagctgcagggcagaggcctggcagtggcagcaaaggcagaccgcccccaactccaacttcaggggctggacatgctggaacgggggccagaccccatgggaggggaccctggcctgccatggcactgcctgccagcttacccctgcccagggcccccaactcagccacctccaagcagtaaagacttgcaaagcattgcattttgattaaaccttgctgggctgaagggcaggcagagctgtggtggacactggcaggacgcagcaccccccgactggcccttggcaggctgcaccgggcgcatgcgggtgtgggccagggttgcctttaggaagcaggtgggaggctggcacgtgcaggcggtccaggagggcaccaggcctggcagggcactggtgcctgtcgggttcccagccacaacaccccaagaaggctccaggagggccccggctgggtaaggcacggagttttggtttccggggcccagtcccagcctggcccccagaagagcctctcttggcagaatggcagcatgtcctgtggcctgggctctctcacttggccttgggcctgggcctgaggccttcctggctcctggagggacgcttcttccttcgcttcccggtcccctttgaggcccggccccgggccctggggagtgtgcccgaccccgaggagtcggtcaccgcatcctcggagaaggacttgtccagggatgtgtccagtgcggactctggggccgtgtcctcctcgt

SEQ ID NO: 336233 - DNA, 1000 bp, Homo Sapiens
ttttttttttttttttttgatcgaaaggcaaatatttatttttcaggaagagaaacaggagacctcgaggcttctggacttaggaggtccgggcagctggtccatggttgtccaggtagtgccgcagggctgtgggataatccgttatgacgccagtggctcccacgctgaaggctgcttcaaaatccgactcttcattaaggcaccaaaagaccacctgcacccctcgctcctccaagtgtcggatcagactcttcctcatgatcagccatttcgaaaccacagccaataactggttcaggcaagagcaggaaaatgggaaataggtcctgttgatgatgttgggcaggaagcagaagaagaacttctcagggattgggatgaagggcagcagccccaggtagtaggaaagcagcacccagaatcctcggcttattgtgaaggacaggggcatctcggggttggcagccttgcatttcttcatgaccgagctcttctccgaggcccagatggtgatttcattacggtcatagcgtctcaccaagcctgctatctcacggatgagctcttcgttcttccctttgatctctacgctcatgggtgtccttggaaacctctggaacaggtcctccagacgaaccatgcgccggtctgacccgtgagcaaagtggcctggagagaagtaaacctccagcttctccttgtagaggggcaggtcctcgaagtccaggctgcccacatccctgtttaggcccgactggcggcacaggttctcatcatgtgacaccaccaccactctgtcccgtgtcagctgacagtcgagctccaggaggtccgagcgctgggccatggagttctccatggcctccatggtgttctccagcagctctccagatcctcctcggtgggcccccaggcggatgcggaaggtgggagccctgggcgtgtgcagcagatgaggccggcgcaggaagaagatggagagcatggcatagctgcc

SEQ ID NO: 336234 - DNA, 1000 bp, Homo Sapiens
ttttttttttttttttgtgataaaaataaatacttttattggtctggttaaaagatacaaatgacttgaatctgataagcctgctgaatgaatgaatgaatgaatgtatccatctattatgagggttgggctttggctctttcctgtagtgagggagaaataatactttgaagatgtttgacggggctgcggtcaccaaggcctggtgctgcgacgttcctgcaggtttcgaatgaacctggcgttgagtatgtccccacccactgtccaggactgggctggcggggccggggcctgtggaggagctgtgtgcatgggcttctccccagacccatcctgtgacaaggcctgctcctcactggcagacctattctttgtttcctgttctccctgcttggagtcttggttgcctgtattgggggatgaggaattcacccccccatggcggctgtagcagcagctttgggctaccagacctgggggagtccccctggtgcgacgacgttgagctgggctgcccccagggtcagcagccaacagaaggcgggcggtagggtgtggggggcagaggcgcaaggaacgcagcagctcctgctctggcacaaaggggcggaggggacctcgttctggtgagtttcccaggctgctggagcgggggggtgggtgggctggaggtgtggcgcggcgaggggccctgtttaggggccaaggaggctccacagctaccttcagaaattctcggtcactagaggagtatggcttgatgtctccctctgctctcttgggtggcagcttccttgctggagcagcgggcgtgggatcgactgcagcagcacgagagtgtcgagttgccctcagagagggagcagggggccgatgttgatgggcaaagaagccttcaaagatcacaaagttgttcacctgtgggactgtggtctccagattgtagtgcttattcaggaatttcagcagcttctgtgagggtcggtcaattgccagt

SEQ ID NO: 336235 - DNA, 1000 bp, Homo Sapiens
tttttttttttttttttttttttttttttggaaaagtttcattgtttaaagtccacatatttgacaccttgataaggaaaatgtaaatgtgtcatataacatttattccatcaatttaaactgaagtgtctcatggagctaaacactaaaagaatttaaataaaaaagcagtaacctgtatgtacacaaaatgatcattccataaatatttacatgacaagggaaaaaatggagaatcactaaaactggaaattgctacaggtgtgataatcctttctcatgacactttagttaggaatcatgtaagcttttaaaatgaaaatacttgtagaagcgttaactaaaatattccattttagttttcagttactatttaaaggagccagtaggtcataaacagtccaagatttcaggaaccaactattcagtttagttttcagtatcaaatcttttccttcatccctcatgatgaaaccaaacttacttacagaaaaaataaagagtacgctaaaaggtataaataaaaattccagttcatcctcctttataaagactggtaagccgctctaattctttacagttgtccatgctcaaggcatctgccttccttcggagtcgatcatcacggtatacttttgctgcatactgcatatctgttttttgttgtctttctttccagcagttatttcgaatattagtcacataatcttcctccacactcttttctaccttttgtaataacattcctttatattcatttttgaagtccttgttgacataataaacaacacccaagttttctgtttgcattttaatagtttgcccagttccagatctgggatataaggaataaggaggattagagaccatcaactggcttaataatgacacgaggatcaatacaattatgggcatcagctggataaacacagaaaaacctccatctcctctttcctcttctctttcatgtccactatgtcgatgctgatgttgttggcta

SEQ ID NO: 336236 - DNA, 1000 bp, Homo Sapiens
tttttttttttttttcccaaaaaaaagaaaaaaaactttactcaaatccagtggaaaaataaatgatagaaactatacacaacataaaaatagccacatttacaaagctgcagccttgataaatgacgggccatggacacagcacagagcttatcagtcccaaatcccctcatctgtgttaggggctggttcatttgaggtttagttgggttggacttggtttcctgattcttcttttttaataaaatttcttaattattttttcttaaatagagacagggtctcactcactgtgttgcccaggctggtcttgaactcctgggctggaatgatcctgccacctctgcttcccaaagtgctgggattacaggcatgagccactgtgcctggccgtgatttttaagagttggtcagatgatctggagtagcttggtccaggcaaacagaaagtgacctttgtcaaatcatgaagggttctgttttgttcagtactgaagattcctttgtactcttggctgtgacctatccctgaggtatcctgagttctggaatctataagattcctctagtttttctggctgctgatagcccaagtcagactgtggtaccagcgtgacagctcctcctggtctgtggacataagcagtagcttctcatgagggaaggacagactgagcaacccaccacaagggcctcctgagtggccaaagaccctgctgagatgacactgggccatggggtagagggccttgcaggcaaaggtgccactccgcagcaggtgcagtggaggccgaggcttggccatgaggagcacatcagtgaagaggaagaacatgcggggccgaggctccccatggggaggcaccactaacagccagccctggcgtaggaaccagcgccctgaggtcagcccctttgcctggcgtccactgagcagagcctggacacgccgaaggtgctggtcattcttctgtttctgaccaatagtatggactctctg

SEQ ID NO: 336237 - DNA, 1000 bp, Homo Sapiens
ttttttttttttttttttgtttttgtgtgtcatcctcagaccagccatttgcctcttccaaaaagctggggctaagcatgtgggtggttcaagaggggcagcccccaggccccaggctgggccgcggtaccagtggcaggtccccctgggtctcaggagcttagcttctacggagctcaggtgtcatttatggggttgccagagcaagctgttaaagggcgaatttggtaagactgagctcagagacctggtgggagggcaaggactggcgggcacagcaggaggagattagaggagggtccacctgaatctttgcagcaggcacagagcttctggctgcatctcagaagggggcagacgcacaggccagggaacacggggctctaggctgtggctccgagtgtccctggtgactggaaagcctgaggggaggctggaagctgatacaggatgccggtggcttgtgagacagaatgagctctttcttcctcgatggccagtaccccgatggcaagggctccggccaagtagacgtaggtctcgaaggtgttgaggatcaccgtgtaacagccctgcttgtttaggaataggctccttcccaggaggcactcctcccggctcagcaggaccccgtcccgactttggggttccctccggcagcaggcctccggcacctcttcactatccagggtcaggagtcgaaacacagatgcaaacttaaagtcttcaggcccgttgaccccgcagcaaccaaatgtgatcatgaccgagttccaggtggcagagaagacgtctgtgtcgttattgccctggtagtgcttggtgagctccttggtgaagaattctcgggtgagattttccctgaagatgaaggccaggatggctgctgagagctctgccaggaagatgatcaggatgaacaggaagaaaaatagcagcagacacttgttctcacggacggccccgcagcagcccaggaagccgagcagaaagagcaggc

SEQ ID NO: 336238 - DNA, 731 bp, Homo Sapiens
tttttttttttttttttttaataaaatcaatacaaatcttttattaaagatctactcataccatggctgaaatcatctattattgttgctagttagcctctcttctatagttgggtaatgttgtcttgccactgtgtttgccatctctcccaagtgaaaagaacactttttaaaaaaaattaattgctccaagttttcaggcccaggggaggctctcccattctcctccttcaatagtcccgtccaggaagggtgatcttgtggataaattcatcatacttcactttgccattgggttcgatatctgcttccctgaagagatcatccacttccttgtgggtgagcttctcccccagactcgtgagttttgaccgcaggtcggacgccatgacgtaacctttcttctccttgtccaccatcaacatggctagaagaatttctttctttgggtcttcttgttttatttgcatgtgcataatggtcagaaaagtggagaaatccagctctccatttccgtctatcccgtgggtctgcaggtgccgctgcacctcccctggcgtcgggctggcccccaggcacctcatggccaccatgaggtcggtggcttttatcttccccctctgctgcttgtcatacagggagaagcattccttgtactcattctggggcctcggctgctacccgtgggcttgctgctcccagaaccgcgttcagttccctttcctccagcc

SEQ ID NO: 336239 - DNA, 1000 bp, Homo Sapiens
tttttttttttttttttttttttttttttttttttttttttttttttttttttttttttttttttttttttttttttttttttttttttttttttttgggttctatcctgactcatgttttatggggggctgggtgggagggttctgtgctggctgaggagctctgctctgctctgctccttgggagacggcctagtggctgccggtccttggatgctggggcttggctggaggcacagcccccactttccaggggtcccctgcacctgccagcttcctcagcctcaggatttcgtgcttgtacctgcccaggtgctggtccacgtactcctgtagctcagaaagttgctcttcagccatcgtggcccggaccagcagctgtgcccgctcccgttccagctctgggtgctgcgggagaagtcccggagcttctggtggatctgggcccaggatgcagcgtccaggccctgtggctctgatgttcccccctgggaggctccaccgggtctcttttttggggatgagagcagtgccccaggcccgccgtgctggtcctcccgatggctgaagtcagtgaccaggggcacgggcaatggttccaggtccaagctggctatgtcaaaaatagcttgggggttcccaggtgccctgtaggcaaccagtagctcttcatgcctgcggctcagatccaccagcctcttgtggtagctgcgggcagcccgggccagctgctgctcacggctgcggtgcgctgcccggatgtcctccagagtcgcctccaggaatgtccggagggccgtggtggctggcgcttggcctgcaccatctgcgtgctccactgcctgccgggcgcagtgttgcagccgtaggacgtactcatccttcagtttcttgagctgcagctgcagccgggcattttcagcctctgcctgacggagctggccttggcagctgcacagcaccacagcctgtgtggccagtcgctgcccggctgccctgg

SEQ ID NO: 336240 - DNA, 1000 bp, Homo Sapiens
tttttttttttttttcaaattagaattcttttaatataaaaaaaagtactaaaatacccacgtggttctgctgtgttatttgccctaaaggaagtgaggggcagagtgaagaatcccagtgcagctcagtgggcccagaaatgggcctttccgtaggctaaggcgtgcccactccacctccaccagacttctatcccctctgctgttcccagcccccaattcctgcagcaggaaaccccagtggtctggctttggcactgggagtagaaggcacctgaagggctggctgggtgagtgaggacaggtgacctttaaaaacaaaacgacaccgtggggtggggaagcaggtcatgcagctgtggcagctggcagggcccactcctccatggcacaggtgggcatgggatggccacttctccagaagtgaggaagcccagatcccaacagaatactttctcaaaattgtttttggtacgaaataaatggaaagaagatatggggtggggtgctgtggaggccgggccagccaccctccccagaccttagatcatagcgatgctctcgggggcacagttgaggtgggtggaggtgctgctgctcccggaggacttgcaggcccggccaggggtaggctgcagtgcagccaccagtgtgtctgaggagactgccccaaactcgtagctgaaggtgccatagaaaatgaggatatcgatgacacacacccactcacacagggctgccccatgttgcagctgagaactctcatggacaaagaagactccactgaggaccagggtgataaaggcgatgacagccagcacacttcgcagataggccacagccaggtccagcggggcggtggccccttggtaggagagagcacagtgcaggcaaacaaagagcagccccgcagggaaggccacgccagctccaacgtagtgcagagacctggcatgatccacctgaaagttgccaaccaccaagaggcccgcagcgttgg

SEQ ID NO: 336241 - DNA, 1000 bp, Homo Sapiens
ttttttttttttttttagacaagccaagaaatatgtttctttattttcattcccatatagcagagatggaaccaggacagtgatgctggaaaagcctgcctcgatcaagtcatcacataagttaatgtcagaaaacctgtatttgaatttgactcctctatccttactctggaaaattggacatcttgacccagtggctgtgagggctaaattagatgatgcagaaagtgcttggcatgcagtagatatgcaaaacaataacttatgacactctccaagcagggaaaaaagtcttcatgccttctaactaataatacaaacgtatgcagtgtctttccaccctggcttgagtttaacaaatacaaattgaatagaaaaaattagtcaaactccataaacaagtttataacaaatacaaatctaatcgaaaaaactagtcaaactctataaatccaacttgattttaaaattctagtggctacaacactcaataatgttttcacatcgtttgtgaatccattccctagatgcatttaaagatgtaggagaaactgtttcagatcctctgggaggacgagtttggttatcttatgatgctgctggattccaaaacacttccgaattctaaggcggcataactgcatcaaagaagggggcccttctctctccaagaagagctgggccaaggggctctctggaggcaccagctccacaggacgtttgccttcagcattcttggcctgggtgtccgctccaaaatccatgagcaggcaggccagctcttcactggctgtcctggccactgcatgaagtggggaatcctgacctttcccttggttcacgtccgctcctgactccagaagcttcttgacacaggctctctgttggttttcacaagccaaatagagtggagtgcccaggtggctgatcttatggtcaatgttgcccccataagctataagagagttgacacactccacgtggcctctcctagcagctt

SEQ ID NO: 336242 - DNA, 1000 bp, Homo Sapiens
ttttttttttttttttctttttttttttttttttttttttaaaagataaatggacagttttatttttcaatttcaacagaatgaaaaatgtgttacagaaaacagttttataaaatatggcaacccaataaacagtcacacaaccaatgaatgtgccacccctacaaaattaatttgtatagatgttaatatacctttaagtacttgctattgttcataattgagtagcatctattttaaaacgttgtctgtaattaggtttcatccacatctctagttaagttcaccttgacctcatcggtgatttcgctctttcctccacgaagaccagccaagtaaatctgaggcctgggcaccccagtgctgtcttccctcatggactgggtgctagtgtcctttggagggtacacttgggaacaattttctcttctcaagtgactaagatcagtttgtactgagtgagtaactttctggcgcaaattagccaattttatagcttttcttcttaattcccattcattccactcatatgatctcacaatcgttggtggcagtatgtgtgtattcgtctgtgtgctactttcacattttgtaattggttttatataatgtttgtcagcatctctcatctgagaatatggaataaatgtttcaaactgttgatgaagttccaatagttgaattaactctgtattctttttggccttttctctaactatgtcaatataatgttcaggattttctgcaaatgaatatgcagcatctttactattgaatgtgtaatatttttctttatattttaaaattccaattgctggatttcctggaaggagaagaccatctgttgcagcaaacgtgtaagcacaaaatccccgatattgaattaacagtttatcaaaatttgctgttgtttctgggaaaagccattctagttttctgaaatctgccacatttactctatcttccatgtgttctttcattctacacacatcagttttca

SEQ ID NO: 336243 - DNA, 1000 bp, Homo Sapiens
ttttttttttttttttttcatagttcatagtttattacaaatgcatattatccaactcagtagaaatccatgtaccccagaatgtacagaaggtatgcaatgttccagagtgtcattgtcagctctggctttacatatatattaaatatatatatgttttgagacagggtctcgctgtcacccaggctggagtgcagtggcacaatctcagctcactgcaacctccgcctcccagcctcaagagatccccccacctcatcctcctgagtagttgggactacatgcgcatgccaccacacccagctattatttttatttctttttgtagagacaagggctcactatgtttctcaggctggtctcgaactcctggtctcaagtgatccttctgccttggcctcccaaagtgctggaattataggcatgagccactgagcctggcctgattatctgttttttgaatagtgaccctaatgtgcttttccagttccagtaacttttgataaaatttttcagcagtgtcttcatctaggtccatcttctgggtcataatgtaatttcttccaaagccagtggtggcactcagatatttgatcagaggattgacagattcaggcttttggtggaaaagccataccagagcttctgttccattatatggtgtcaaagtgaatgcatttgcaaaaaagcgaagctgctggttgaaagttcctgttcaaagccacactcaaaaggtcagtggcatatttggaagagctgtagggttccttgcctttgctgtgctggaagtcctcgaggctgaaattagatttccttgcattgcgagatgatgtccagatgagctgagatggattgtcactgtgacagaggagaggctccagttcccgaatcaggataaaatggccaaagacatcggtctcaaacacctcctgaagtccatcagcagtgatcttatcaccctgggtcagcaggccttcagctgtggagaacatatgaatca

SEQ ID NO: 336244 - DNA, 1000 bp, Homo Sapiens
tttttttttttttttggtgaagaaattttcattttgaaaatgcagactggctttagcatgaatgtcaacacagagcatttgtgtagcaatttacagtttctagaactggcaagattcattatcccattttaccctcaagaattctatgggaagttaagtcgtctttacacaaacatggagtctgaggtcattaggggataagaaatttagccaagttcacacagctatatagagggcacaactcataccccagctgtgtttaaaatagataatttatcatatatacatggtccactacatagtcaaacaatttctatagtgggcagtaaatagccacccagactatactcacatcaagaaatgtcctcaataacacagttgacaggatggtgctttcagaatggatcccctgccagtaagtccaagattcctgtgtcccaaaggtccacagagcaacttccccatgcaccctgacccccattcaaacccattagaattcacacacaaggttgcaatgggcaaggcacttggcaagaggagggtcttcagaacacactttccagcttggcgtgtacttcccactctcctaccctgagggcacctggcagcagacaccctcaggggctgaatcagaggtgactgagcttggcacacagtgaagaggcccatgcgctccagtgtgtcttctgatggccaacacctgtgctcctttggaaaagggtgagtaagcacttcttagagagtgtgtttctctatcagtacaggtccaccttgtgaaagggctggaagccctctagaatggtgttcttcttgtcctgcggcctcagggtctcataggtgggcaccatggcattcagagacagaccttatacttctctagtcagtctgcccctttggccttaatcttcagggttagtgcatctatttaaaacaagagatgccatctcaggtggtgctggcgatcagcagttggctgtggccctggcaatgccatctgatc

SEQ ID NO: 336245 - DNA, 1000 bp, Homo Sapiens
tactgtatatatatattttttaataaattaaagatatttagaatgacaagaggtattagaaaacaaatactgtgtagcttcacaatttctcctcaagcttttacactggtgttactgaaggactgcggtccttggcctataaaggaacaaggtatagattctcccaccagaaaatttcaactctaatgtggaccgctggaaatcatttttttttttttttttgagctgcaccaaaggcgtaccctacctcgctttattaaagggcccgtgccgcagagtcaatataaaaacacaaagtcccatcagtttaataacaataaaaaaatccaaaagtggaaaactgagggggcaggggaagagacccctgggccaggggcacgaggagccctgctcatggaaccaggcctggccgcagggtcccccggtattgctgttgctacgaggtcggggggtagcgattgtcctatgggagccaccgttcgcctgggtcggggaccctcacttcttctggggtgtgctcagcttctgcatggcccggatcttgtccagcaggccagagatgaaggcctctgtgggtttgtaacagtcaaccagcagctccttgaccctggaagcccaggcatcgtcactctccatgtccaggagctcatccacgtcaatctctagttctgagatctcctcttcctggcagtcgtagaggcgcgtgagctgctccaggatccactcctctaggttgaggtgcttccgtagctccttggggtcatacttgatggtgaccttcccttggcgcctcactgggccctcatcatccgcgcagcccgggccctctcctgcggccccggggggggctctgctctcaggctccagtctgcagcagatggcggccagcgggaagaaggccgggggacaatctgtgggaacaaacttctcccagaaaagcttcacgttgaggccaaagtccagtgttcggggaaggcagtcaggatctgcatacacctgc

SEQ ID NO: 336246 - DNA, 1000 bp, Homo Sapiens; identical to SEQ ID NO: 157656

SEQ ID NO: 336247 - DNA, 1000 bp, Homo Sapiens
ttttttttttttttttctctaacacagtaatttttatttaaaaaggagactaaacagaagtcaggggtaggtggttctccatgactgcaaataataataataatgatgattttttttaatgtacagctctcacacaaatttcattttgtgaacacactggtaagtacacgatgctggggcttccaaaatgtggcgtatcccactgatggctccaacttgcgagtgggctcagttctgtaattggaatgaaaggaattttaacactatttagacaaagatcaaacgcagcgtaaaggggaaagctagatttcctcatatgatttttttttttttaaatttagagacttattgtaatgaatggcacttactcaggatttaggagttctttgtaagaaaaaaaaaacatgtatttgtttgctactcccactatacttcaaagttttcagtaattgttatttctaaaaatgccttttactaggagttaaccttctcttacagccagccactcaaacctcatttttgccagcacctttgcatttgattttctaaagtttgggggcccaaacctgcttattatattcaactaccttgtagattcctatcaaaatgcttaattctacacaactatattttccttccaatccaggcctcatttgtcatgagataactgcaataactacatccagaatatcactcttattttgagaatgtttgcctaaaatctttcatcagatgcttttttgttaaaagcattctctccatttctgcttcttcagagtttgtgtatctcttagttgtgatgaggaaaaaaaaaaaaaaaggaaagaaatatctgaagtcaagaacacttgacttcaagctcatgaggggaggtttactattaagacttttgttaagcaaaattaagtgtggattcaggagcctgtctaaactagcacataaaggaaggtcaaaatgtcgaggttacacactgtcttcgtgttttgtaaaaaataggcag

SEQ ID NO: 336248 - DNA, 1000 bp, Homo Sapiens
taaagacataaaatgatttatagttggggagaatttatgatcaaaggattgtctccaatagggtatatctgaggttccataccaggagcgtcattaaaattgatgccaattttatgaaatatgttcattttgaagcagatgtgtattagtagacaagccaataatttaaacatactcaatgaaaattccatagtgcaattttatctaaggtattttatgattactctcttagagccacagttttaagcagctttttcctaaactaggctcgttattaattttcaacacttcatactatgatgaagacatcacatactttagacagccttaatagaacaaattattcaacaaagttgattatacgttctataaagtaaatcacattctctcattgagtgagctgagtctttttgagtgtggggacagagtccctgcagtcaggagctccaaggcatagaactgcctgccctgctctgtccagcaggtaatgctgcattccacaggcctcttcttcagccttgcccactcagcagagtacctcaggttgtgaccatgaacgactgatgagagtaacttctgacttgctcaggggatcctcttgccatcaattcccttcagtatgaccaaccgcagtggcttactcgcttcttgtccagaccatccaccatctgtctgccccatgatgctctcaaaccccaaagtcctaatatcccaggcctctttgtctgtgagaggaaatggttccctcactttaagttctgtaggctaatcagaaagggatctctctatagtttcaaaaagtgaaattttacttgcactacagaaataagaaacttacagatttgtccttgaagacctactaacctgcaactttagggtcctgaaagaggattagtatgtttataagtacttttattacagtattttttatttgtttcggagacagggtcttgctctgttgcccaagctgaagtgcagtggtgcaatcacagcctgctgc

SEQ ID NO: 336249 - DNA, 1000 bp, Homo Sapiens
ttttttttttttttttttttttagttggcaaatttattttaatggcagtatggtaagaattcagtccaaagagcaaagattcattttgatgaactatttgatcatacaacatgcagcggcaaattttcaattcataaactatttttatcactcagtgaggattactattatagttggcataatcatgagaactttttcctgcttgattaaaagcatttaccattaccgttagattggctatgacatgcaagaggtccataaccccgccaaggatgtggcattcacctccccagcatgctcagttcgtatattaatggctgccttgattaagcttgaacatgaaacacaacacacttcagaacatgtgtctcaacagagcttcctacaccttccccactagctaatcagacacgggtcatcattgtttggcttgacttctccttccagcagcagattcatcaccgcctttgtcaaatagctgcatgttcctctttttcccaggggaggagtgttgtaaaaggaagtcatgtcatcttgtttttcaatttcctttagccgactctgatctttttgaaattcattaaatgcttctttgaccagtctgtctagatctactttgtcttgaaattctagctcggggtttctttccagtacaatggatacaaccataagtaactctacaacgatctgtctgtactgtggctggtcaatatttcccaacgtgtcttcaacaaggagagagaaattcatctcatacatggtcatatctgacagggttggttgctgaggcaaatgcttcccagcaacaatgatcccattgggcgtgcgctccagaatctgccacactcggtcatagaacccggtgggagttctattcaaagacccatcgatctgacgcctgttcagccaacatcttccattctgttgaggctgcagaatatccagcagaagctgtttaacttcactaggtgacagctgatacaagtccaaggctggcttg

SEQ ID NO: 336250 - DNA, 1000 bp, Homo Sapiens
aatggatattttccatttttattaagttctcaaggaaaaggagagaggaggaatgataaatctcagtttattattattattattattatttgagacacaatttcactcttgttgcccaggctggagtgcaatggcatgatctcgggtcactgcaacctccacctcccaggttcaagaaattcttcggcctcagcctcccaagtagctgagattacaggtgcccaccacgatgcctggctaattttttgtatttttagtagagatggggttttgccatgttagccaggctggtctcgaactcctaacctcaggtcatccacctgcctcgcctccaaaagtgctgggattacaggagtaagccatcgcgcgcagccaatgtttttttttaacatctctaattacaactcactttcagcaaattcgtcctgaagaggcagcaccagagactacggtatctttgttgtacgagcagtatgctaatattgtccactagtattgtccatagtattgagctgcttctgaattaactccttatgtcagccattcacttattaggaagctgcgactggttcatttgacttgaaacgtgattagaactggtgcatcctgttacaaactgcttatagatccagcgggctgtgtgtgtgtgtgtgtgtctgtgtgtgtgtgtgtgtgtgtgtttctgtgtcagagggagggagagggaaagaagtttatcaggcaaataacagcagccacagcggtaggacggaagacagtcatcccagaggaaatggagcgagtgtgagtgcgagtatgagaagtgactcatttatcactcatcttgggacgggagcagccccctttttgtgttcatctgaaaaccccccgacctggagcttacgatcacgagcaccagtatctcacaggctttttcgattcttgtgttctggttaacttggagcacagcggtgccatcagtactttttgcaaaactaacccccacacacacccccgccgc

SEQ ID NO: 336251 - DNA, 1000 bp, Homo Sapiens
ttttttttttttttttttttttttttttttttttttttttttttttttttttttttttttttttttttttttttttttttttttttttttttttttttttttttttttttttttttttttttttttttttttttttttttttgagacaggcagaaatttttaataaaaacaatttgtacctaactcctttcaaatgttaaaaacattttttaacagtttagaaaattctaaccaattcattacattaatcttcatgcaatacatactactgtgagtgggagagattgtttgacaaaagacaaagagcatggctcagaactctgcttctgagtctaatgaggggactattcagggttaaatcagagggcaactcagagtaaaagagagggaattgtgtttcatctgaagatgaagggaggcatgagaagggagcatgagacgagaaatggggaatgcaagaagacttcatcagcatccttgtttgtcctctgcctgtcctggagttagcttcaaattcttcaagatccatcactctttcacggcgaggtccgtgttgtcatcgggaagcagaatgaccatgctcagctcctcttccacatagggcagctccaggacctgggtgtgtacctcatccgcataccccattttaaacttagcttccttaaacatcatctgcactgtctttttttcctcgttggttttaaagagcattccccttgtgtactttctgtcaaattgctcattccactttcccttgaaataaatggcattcacaaggaccagctttgtcaggggatcgactgtcccagcatccagtacctctgaaatcttaccttcagtcttctctgccacccagtcatttatatgcttcctgcactcttcagtgtcttcagcaaaggacaactcctccagctctgcctgatagaacttctgacagtattctttaaagtctggaaggaaatcacacgtcttttctccaaagagtctgttggcagttcta

SEQ ID NO: 336252 - DNA, 1000 bp, Homo Sapiens
ttttttttttttttttttttttttttttttttttttttttttttttttttttttttttttttttttttttttttttttttttttctcaaaaatccacactctgtgagttattatttgctttacctactcatggtggttaagaaagcagcaacaggtaataccttcagattcataaagtcacaggcagtctggttcatttaaacttgacatgtagaatggattagaaaccactttgatctggtcagcctgaggccacatggttgtatattaaatcttttgtctcaaggaccaagggcattttttttttccgttgagaaaagtacagtccactcagaggtgctaaaataaatcccacatttttttttcattattttctggaatagtgtttgaatgatgggcaaaccctcaagtggagaatttgctttcacacacgtagcagcttcaactgctgagatcatgttgttcagcacccattctaatccacatggaaaggggcacgggggtgttgtgggtggggaggggtggtgcagctctgggccccaggggtcttgggagtgatccatttctggatgtctgcattgtgtggggtcccgtcattcactctgtcacttgctctgacttgagttcgctctccagatcgatttcattttttttacaggtgggaatcttgttactccacgtcccatccttcagacactcaatctggaatgtgtccatctccacattatccttcagcactttgtagcctgtgtcacagctgacgagcacttggtctttgaagaaatacttggcttgggagggctcgattttcccatggacaggaggctgtagctctgggcactcatttcctgcagccctgtatgagagcctccagccccggttctctcccgagttgtcactatggaacaggatcaggacactgtggctctgggtgctgatgggttctggggctttctctccacagaaaggccccaaaacttttggaccaactttgatcttg

SEQ ID NO: 336253 - DNA, 1000 bp, Homo Sapiens
tgagaacagccaaatgtatttcttcgcccacactcactacacaaaactctcctccatgttgctgcagagtaagaaggagtccaccagccgaggctggaccaactgctgaaagtcagagtcctggaggccttcagggcagaccccagccaatctacgcagagcagccaggcaggccacaagcacggcgtcactgctgttcctctctgatggggatctgcagagctcgatgagacgggacatgcagctgagccgcacggcctcccgtgccacatctgggtctcggctgagacgagccagggtcactgcagctttctgctggactcgctcacaggctgccacttcagcaggagtcccagaccttggtttttcagacagcatgcccatgataagctggaccccattttcctgaatgatgtcagaggcacactgttctaggacagacatgtttgccaagatggtcacaatctggtcccgagtgtaaggcgtgtccactctctgcttgtcactgcaggcttccaggagaacacggatggcattcaactgcaggagcatctcgcaggccattgtgtcaaagaacgtgatgttggcaagggccgcagaggccagtaggaagacttcccctgatgaggcctcttggcacagtttgacgagggctgtcacgatctcctccatgctctccaggaagctactgaggtgctgggtgacgggcaggtgtggggaggtgacctgggccaccacagccgcagcctcagcccgtgtggcctctgagtggctgttgtcagtcaggatgtcggccaagcacagaacgccatccaccttctccagctggtggacaccctcttccacgcagcagatggaggccagcgtgcggagcgcctgggggtacaagcaccggaaactgtcctgccggcaaaccttgaagagtgctacgaccccaccctccttggctatgatgcggcacaagggagccccctcctgggtcaggctgaacaggttccct

SEQ ID NO: 336254 - DNA, 1000 bp, Homo Sapiens
ttttttttttttttttttttaaacttttggaaattttaatgttaaaatcaaattatgtttttctgggctcttaaacacctctgctgtttatgtagttatgcagcatgtcaagaagcatcttaagacagaaagtttcaaataggtcacattcttttggtctttctactcaatttctctctgtgatcaacagcaggctgatgcctctgtttgacacccccttctgttaagatattattgcaattagatatatttacaagaagactccccccgacggcagtggggaaggtgggagctcctcttcggcaatccactcactagttttggtttcgggatatgaaggccaggactcgtcgaataccattcagtctgtcctttaaggacctcattgctaggaaggggagctgagctcggctttccaagggaagaactgctaacatccaccagcaccaggctgggccattcgggttcatctgaggatcggcgtctttctccggcatgggaccaaagtgattgagtatccgattctttagggataatttgagcgaatgaaaccacaatgatgcttgctgatagacacagttatgtaatcccatgagctcagcacaatcctctccctgaaccttttggtcttcaatgtattcaatgtcggctgtgttgtagccatcccgctggctctgatggagcaccctgaagcgcctcttgcctatgctgtcaaccactgagcggccatcagcaaagaattgaacatttctgatctctaggatgcagccatattctgcaaaccctttgacaggatctccaaggcacatgccaaactgtctcgtgcctgtctcaatgcatctacgaatcatcaggcggtaacaaggctcaaagatgtgcaggggacaaggaacggtgggataggccatagtacacacgaaaataggcacattcttattaaggttagaaagttcttccatttcctcttcataaagcttccttcgttccttcagttcttctg

SEQ ID NO: 336255 - DNA, 1000 bp, Homo Sapiens
ttttttttttttttttttttttcaatagatcacacatttgtttaataacttatgaaaaagaatgaattctgatgaaaataacttcagtaaatataaatgaaaaatgttagcaacagtttatctgccctgcattgaaaatttatcaaggaattacatgggttttgtgtttgatctggaaaaacacttgtacaatgaaaattcatcaatgtaggtgtcattctgaattaaatgtctgtattcacaatcatggtcctcaagccaagaggtcctattcacccactcctcccgtgccctagggaagagaggttactgacaaagtccagtcccaggctcagctgttttcctagccattggcttcaagacattgggaaatcttggcctagccggattttaacagtgctcaccttgctttgcaaagcgtttcttacgcctcattttggtccggtgtctagcaaacaagtcactgatcctctcagcccaggccgcataactgttggtatctgtaaccccgcagcggggacgagtcatctggcgcagggtggcgcggtccaacacgccgctgacaggtagctgggacacccactgaaacgctctgatggcatcgctgaatcgagtggaggtgggagctttggggacctgttcattgaggtatccgtacttctctaggaatgcctccgcctccttgcgcagctcctggcctccgcgctccgcgggctgggcgtccaggtggccccacagtagcagctgcagggcgcgcagcaggaggccgacgcgcgcgaccatctcgccgcctccggtgcagcccggctcggggagctactgcgcgcagggaaccagccggcagtcagccgcgcccgggaccccggggatgggactgctctgcgccgcccccgcacggagagggactgtcccggggtttcgccagtgccctagctgcgcgctctgggccgctcctccgctgcccttcgccgggagccggccagacgtcgtccagcccggg

SEQ ID NO: 336256 - DNA, 1000 bp, Homo Sapiens
tttttttttttttttaccaaagggaattctttattgtaaacaagatataaagtacaacaaaagaaatattgtgcaaattgtaagtcacaaggattttttttaattaaaacttttgttttccaagggtccaagttttgatgtcagaaatctacacccaatatacaaaaacaatgttaaatgggaagatatagtgacatttttcactatatattttaagcaatgtacttttgttttgccactgtgtatatcatccactatataacagaataaaagagaaatactgttaacaaaagtgaatgttctaataatttttctacccaactacctccacatccccaaaaaactcctataaattaacaggacaacatttgtccacctgtgaataatggtcactaattttctaattcaataaagcacacattatatcctcataacataaaggtactttactgatgacataagccatctttttcaagaagttatctaagattcttaatatcccttctttacaatatatatttcatcttcagttttttttctaaacaaagtgcagtgtatcttagagtctacagaaaacacattggtatacaattttcaaatctacacaagaaactgcaggcaaactaaagttcaaagcataatgaaatgcctagatacagtcatttgttaaactttcaaaacaaaaatgcaaaaacaaattgtagctatgcttcaaagcaattaaattaaggaggattccaattctttgggccctcttagcaatatacagtcgttcaattccaaatattcacaatagtgtaaaaatgatagttctagatatatttaatcactacatccacgatgttgactggaaagactaggaataataaagaagataactctagaaaaagatgacaatatttgtaataatacaaactcattttacatctccatgtctgtaccgtaatgtttatttccttccagcctccatattcttgaaaccagtgctttagaagaatca

SEQ ID NO: 336257 - DNA, 1000 bp, Homo Sapiens
tagtagagacggggtttcaccatgttggccaggatggtcccgatctcctgacctcgtgatccacccgccctggcctcccaaagtgctgggattacaggcgtaagccaccgcgcccggccctttttgtactttctaatcaaattatgctgggaaatatagggcaaaaaaagctcggcaaaatttgtttctggtaacaagacaatgcaataatgaatccaaatgaaacataagaccagtgtttacaatttctaacttctaaacaaacatacacacacttatctaaaacatattttggtagcaaactggatgactgaataaatgttttgctgtaaataaaaaatacaaatttccaattatagccttatagctagctaaacagcttttcaaaacatgtacagctagccaacaattctctaaaatatgtatgttacactaaaagatctctgctaaaaatctactgtatgtaaatgggtcttactgaaataggactttcatgatactgtgtcttaaaaagtgagtatgatagggctacaacaacattactattaataaaggttacagaagagattattgctgtacttttcctcataaacaccatcaaactttgttgcagttacaaaaagtacaaccaagttacttttcctcttactgaatttcattatgtttcacatatttgcagtttttattcagcagagaataattcttaaaatcttttctgtaagaattctaagtatttaaatgtgtagcttcacattatactaccatgtttcacccttcgtttcccaaatacacaaaaaacatatacattttttcaaaaatgaaataagatgcccacattaaaaaaataaagcctacaaaaagttccagagctaaaaaagattattcatatggcacaaagtgatctcctactagtccaaagttcaaaaacattttaatgaagtccatttatatatattttgtttgcttttcaatgaaatactacatttattgaggcgaaatc

SEQ ID NO: 336258 - DNA, 1000 bp, Homo Sapiens
ttttttttttttttttttttttttttttttttttaaagttttacaataaagattttaatttattgtagagggacatgtttaaaacccatccattagtaattagtcaaccatagctttcctgaaggtaggctttataaccattacaggcatataagacatgaaccaggggtaggagtccataagtaagatgggaatgtgatgctgccttctagtagatctatttttgatgacattttaaggtgattacccctctgcttgttgaagactattgtgaagacaattgacaaatgttgctaatatagttgctacattcatcacttgccagcactgggcaagaccaagagtaaaaagttcattccagtaagctttcaccagtgatatgctgttttcttgccctagagcctggaaagaaggaatcgaaagtgcccagtgcattgataagaacagcagtctggaggcagactccccaatgtagtgcacattcaggtactcaggcataggagaaggcatggtgagcctgaaagctacatgtgaatcgctgagaagtggcccctctttttcggtgtaatttatgcttgaatctccagtgattaggtgtacacttccttccatgcccgctactgagctctggcaggctgtgctctctccaggattcaatgcttttgcaagagtgtcaaatgcccttgaaacatcaccgttggtctgcatttcttgaaattcacacaaagaggtatcatcattgcttaagctttcaatcatagacatttcattactattttgagaaagatctttagtttttccaagattcgctaatgatgtaaccacattggccaatgtacttaaatctccctgacatgattcagccttatctgatgtcatcagcacagctgactcagtttttactccagatggatgaatattcatgaacattcctgaatctaacagtcctgttgaccttgtactttcactatctgttacaaaagttggagttgcagttaat

SEQ ID NO: 336259 - DNA, 1000 bp, Homo Sapiens
ttttttttttttttttttttttttttttttttttttttaaaaaaatacaacatctttatttggcattggatatcctgacatttgttcattacagttccttaaaaaacaaaccaaaaaatcagaacaaattaatcaaaaataaagatccaatggctctatttacatatagcaaagacagcccaggcatcttccatgcacacacacaccccgccccgatacagttaaggggttaataagctttggggagcgcaggaggcaggttccacagttcatcaatcccaagacacccccatgaggtaggggtgcctcacacagccagacggatatcaagagtatgattggtagctttttcctctcctagacatctccaaaaataagcctacatctggcaactgacagtgtcttaaatacaatgagattcagccacttcaaggacctccatttttcccacaccctggatcattaatgatatgattacaccacaaatcccaagtccactaaaaaaaacaaatggcccctaccacaccttctgccagaagggctgatgcaaaaatcttagctcttgtccctttctccctggggactcacaaggagcccatcttcaaggtatcaaggaagctggcccaaggccacacaaaagacggaactagtaacatgatccagagcggtggtaagggaggagagaaggcctcaaactatgggcaactgaaccccacaggtaggcatcggtcattcctgaagagctgcgggagttttgtccagtgtgtccttatggaggtggagggactgctgggagggactctcccagacgagaaacctccagaagagggcacagggtcggggagggagcagacaaaaaaaaggccttgaatgacaatacccccaaccctgcctccaaagaggttagagggagcagaggcggcagctctaaaaccccctccaggggaagggggtcaccctaccaggaagggttcacgtgacacccagctctagtcccaca

SEQ ID NO: 336260 - DNA, 1000 bp, Homo Sapiens; identical to SEQ ID NO: 157657

SEQ ID NO: 336261 - DNA, 1000 bp, Homo Sapiens; identical to SEQ ID NO: 157658

SEQ ID NO: 336262 - DNA, 1000 bp, Homo Sapiens
tttttttttaatttttatgtattcgtttttatttttttgcagagacagggtctccctatgttgcccaagctggtcttgaactcctgggctcaagtgatcctcctgcttcagcctcccaaagtgctaggattatagccaccgcacctcgtcttgaaatagccttttaaatgttcacctcagcttgcctcacagtggtaaaaataagcatttttttgttttgtaggatcagggagcttccaaggcatttgatacctttttgatgggaagaagggctctgaggagctccaagataccccaacctccaggcccttcattagggggtagttgggtttctgtttggcctttccccctgggccccataggcttaaactacccccacccccacctccgcctcctacctcagctgggagcactgtcttccatggggcttccacttctctcctcaacctggggaagaccacagggcagtgcctgcctcaggacctgccttccccaaaagctggcttcttgctccaaggagagagcattgacccacctgccagagtcttgccttttgcccaaaggagcctggtcttcagggctgcataggatgcaagtgccttctctgcttctcaccgtgggtggcactaatttcctccttaaccagaactttgttccagccactgacccattctaactcttccccctctgactctcctgcgcagggtctgttcctggtttcccagatgcataaaggaagacatatccctcccctgggcagcaaggctacaatgggagggagggagaacatgggagcatgtgaataaaatggcattaaatactgaaccagggagtccagcctctgctgttgctgctcttttctttctctgcaccccaaaacaaagagctaaccatcttgacaaatcctctgtcccctaaagatctaatagagatgcccttattatacagactactgtaagagttatacagccagacagctagaggaagagctgttcagtcc

SEQ ID NO: 336263 - DNA, 1000 bp, Homo Sapiens; identical to SEQ ID NO: 157659

SEQ ID NO: 336264 - DNA, 1000 bp, Homo Sapiens
ttttttttttttttttttttttcacaaagaatcattttatagattttttttcctgtgtggattctctgatgttcttaccacccctattacttttataggatttatcaccaacatggattctgtgatgaactgtaagatttgatcgccaactgaagctcttaccacatatctcacatttataaggtttctccccagtgtgaactcgctgatgagactgtagttgtgaagaccgactgaagactttaccacacacatcacatttgtatggtttctctcctgtgtggacactctgatgaagttgaagacttgaggcctgactgaagtacttaccacactccccacatttatatggtttttctcctgtgtgcaccctctgatgcatgtcaaggttcaagctccacttgaagcccttcccacactcatcacatttgtatggcttatctccagtgtggactttttgatgggcttgaagatgtgcactccgaccgaaactcttcccacattcttcacatttgaatggtttttctccactgtggactctctgatgggccaaaagatttgaggcctgcctgaagaccttcccacactcctcacaattatatggtttctctcctgtgtggatcctacagtgaattttaagatctgctctacgactaaatcccttgccacactcttcacatttgtatggtttctcacccgtatggatcagctggtgaatctgaagtcgtgagctctgattgaaaccctgcccacactcctcacacttaaaaggtttctctatactgtgggccttctgatggatttgaagatacgaactttgactgaagcccttcccacatatctcacatttatagggtttctctcctgtgtggaccactagatgaacttgataatgggaattcctcctgaagctcttcccacactcattgcatttgtatggcttctctccagtgtggactctctgatgggcttgaagatttgaactcagagtaaagccttt

SEQ ID NO: 336265 - DNA, 934 bp, Homo Sapiens
ttagatttcaatattgtttaattattatttgattatttgattgaattatcatttaattatttacacttaattattattaaggaaaataaatctaggcctgctgaattgactggaatcaaccctggcaatatgattcatacttcaactttgctccgagggaggtgcctgctaagcactctttgaatttttcatccatttcctggttctgaatttcactgaacaaatttttccaatcaccaacttcacctttgcggaaaaggaatgggccgacagcaccgtgtgtgtcctgagacttcgcacgcatggcttggaaggtgctctggactgagatagtttgaatttgctccccagttagaaagaatcccaagaactcagcaatctgttttattccagcagccagattctctttcaggtcttcatataatatgaacttaacattgtcgccatcaagatgtttgttccaattgattgcaaaatcaaaataccttccccaagaaacttgtcctttcatgaactgtctgaagaattcatcccaagagccatagcttggaatatcggggacatcgttgtggaaatgcaaaaaagatactgctgtatctttagggtttcgaaatatcaccaatatcttggctttattctcgaagatagacccaggtaatttgtcatagtggaggtgagttgccaaaatccttggtgatggaaagcctttcattctctgatatttttctgaatccccacattcaagaactgggaattctggatatttatacttttttttagaaacagcatatattaattcactgacaatgtggagaatccagtttgaaccgcactttggataagatgctagcacgatgtcatcatgtctggcttcgaaggtgtccagcgcttggaaagtttctgaggtgcacatggtgatggggtaaggaatccc

SEQ ID NO: 336266 - DNA, 1000 bp, Homo Sapiens
ttttttttttttttttttatagctaaacaattttattggctttttgtgaaataaaaaacacacaacaaaccaccatggttaaaggccataatcagcatcaaccaaatgaaccagccacttggttacagtagctgataacaacactagtggatattattgcttataccccaagttcatttatacatccattatattttggcaagattacaatcaaatgggagctttggttgtaaaatttcaactatgactactcattgaaaactcatcttctaccattttatggtgggatacatgtcaattcttccacatcttgtctcctttctccttccatcgataagatttacaagcctattgaaaataattaagatggatgcatttgtaactatccctactctactgccttctcttttgtcatgacaaggtgatgcatttctgggcctctcctaagatcttctatctggtgtttccactgccagtaataaatgcccatctgtaatctagatagattttcaaatgcatatggctgtcagcattggggtttggactcaactgtctcatttccatcttctgaaaagctagaagaaaaaataaaaataaaaacaaaatcaacagtccttggcattggtaatttgacctcccaacagaatgagccccaccccctgccacattaacatcccatggcaggtgtggagctgtggccttgaaatgctctctgtgtgtgtatgtgtgtgctgtaacattttaatttacagagaagcaatgactgactgcctcacgaaagctcccctgctgtcacacttcctagtttaacactgaaaactcagaatgagaaagagtcagaacgaactcacaatagcaccatttcctagactcttggaattagattcctttccgtgtaggagaacgcaggcgcccagcctccagctttgtgctttcacaggctcccaatgcatttcagcagaagtgggtggtctgccttagcctacttctgcagcaacat

SEQ ID NO: 336267 - DNA, 1000 bp, Homo Sapiens
tttttttttttttttttttttttttttttttttttttggtgggcaggatcaccagaaagcttttattttaacccagggccagggaggccgaagcttcaatcctgctgcttggttcgggaggcctctgcattggcccggagcacagcccctggggatggatacggccgctgctggaagaggggcccagctgctgtggtgtcagcgccagtcttggcctcattccgcttggggagtcctgttgaccacgtgccccggggggcgtctgagtatgagctagggtccatggggtctaactcttcatcctttcggcttactgccttcttgctcttgggatagggagccagctcctcccggcgatggtggcgccgttctttgccctcttcccggtctgccttgtcatacccgcggtcccgatcccgttccctgtctcgctctctctctctgtctaccttgtcatagccacgctctcgatccctgtcagacttgtcgtggccccggtctgacttgtcgtggcccctgtctagtttctcatggctgcggtccgacttgtcatggcccctgtccgacttgtcatggctccggtccaacttttcttcagcatctgcattactgcttctgagcttcttggccgatttggtaaccacggagttggggtcatgtggggagagccaggatacaaggtctgtgtctgcattccagtagtaagggagcccgcaggaagggtcgaacaccttgtaccagcttggtggtaggccctccaacctggtggcctcgtagtccacaggatcatcgtcatagtcctcggcaatgatctcttcctctggttcaggctccagatgtttgaggatgcctctcttggccaagcgggtctgcagcgcaacgggcagcggcatagctgatagcagacagacctgggcccacacgactctcttcccaaaacaccgaatgagaccttctctcaacgaggccttcactccccgagcctgaaagtaactggact

SEQ ID NO: 336268 - DNA, 1000 bp, Homo Sapiens
tttttttttttttttttttttttttttttttttttttggtgggcaggatcaccagaaagcttttattttaacccagggccagggaggccgaagcttcaatcctgctgcttggttcgggaggcctctgcattggcccggagcacagcccctggggatggatacggccgctgctggaagaggggcccagctgctgtggtgtcagcgccagtcttggcctcattccgcttggggagtcctgttgaccacgtgccccggggggcgtctgagtatgagctagggtccatggggtctaactcttcatcctttcggcttactgccttcttgctcttgggatagggagccagctcctcccggcgatggtggcgccgttctttgccctcttcccggtctgccttgtcatacccgcggtcccgatcccgttccctgtctcgctctctctctctgtctaccttgtcatagccacgctctcgatccctgtcagacttgtcgtggccccggtctgacttgtcgtggcccctgtctagtttctcatggctgcggtccgacttgtcatggcccctgtccgacttgtcatggctccggtccaacttttcttcagcatctgcattactgcttctgagcttcttggccgatttggtaaccacggagttggggtcatgtggggagagccaggatacaaggtctgtgtctgcattccagtagtaagggagcccgcaggaagggtcgaacaccttgtaccagcttggtggtaggccctccaacctggtggcctcgtagtccacaggatcatcgtcatagtcctcggcaatgatctcttcctctggttcaggctccagatgtttgaggatgcctctcttggccaagcgggtctgcagcgcaacgggcagcggcatagctgatagcagacagactaaaagatgtaagaggtaggtggcaatatcatcgcaactcccaccaaccctactgtccccgaaaccaggtgctccagggccctgttcct

SEQ ID NO: 336269 - DNA, 1000 bp, Homo Sapiens
tttttttttttttttttttttttttttttttttttttttatggtgaaagaagcaaatttattagaaacgactttgttacagggtagggcatcctcagaaaggagaaggaggaatgcgccattctttgttagtgtcttcgttgataagaaattctaaggagctgtcattaaaattggaatgtgcagatgtgctcactaaaggtagggggtattggtgctgttaaatcaagtttagcctaaagctgcctccttacatattttaagtttggcctaaaatttctctgtacatggtgaactataacctaaaaggatgtgtaaacagactgcaacctactcttgtgccaatcactgagtttcggccaatcaaaggtggccaactgttcaaatctcgttcaaataaggccaatgctgagctataaccagtctggctgtttctgtacctcactttcattttcagtacatcattttccttttcctgtccataaatcttcttccaccacgtggctgtgttcaagactctctgaacctactctggctcaggaggcttctagatttgtgaattgtctgctcagttaaactccattaaattcaatttggccaagaattttcttcttaacagtggtattgatgaccattaatccttcaacctaaacctgctcattaatgctgcctttaagtgggctgaacttttaggacacctggacattttgtaggcttagtgggagatgttttgtatggccttaaatattctgcaattataattggtggtcagcttagactgtggctattttcagacccaagtattaagcctgtaggttccttttgagtgcctagctacttgctttaagatggagtcactctagccatcttttattaaaccagaagcctggtaagcagaggttactttaacaatatgcaagagtgtgggaatgtttgctgagacaggagacacaagaggtgggcaggtcttagggatttaggagttgggttcaaggcacccc

SEQ ID NO: 336270 - DNA, 1000 bp, Homo Sapiens; identical to SEQ ID NO: 157664

SEQ ID NO: 336271 - DNA, 1000 bp, Homo Sapiens
ttttttttttttttttcacttagaaatgtttatctttatttcagaataacctataggaccatatccagataaaggtcctatcagtacttctcatgagttatcactcagttttgcttctagagacccaccagtcaaagcagtaaaactaaatctccttaacaaaactgaagtcttcagaaaagcatgctaaatgggtgatgaaaccttacttaaccactccctgtatgcaagatgacttattttgcattcctaaaacttctactttgattctcaatatatccgttttttttttctttttttcaaaagcattattttggtgaaaatcccaatatatgagtttaaaaaaaaatcattaacatcattaacagtactttaaatcaattactccttttgcctgcaacagggtccagcaaagccttaccacctcaagcaaacccactatacctatctatgctcaagaagtagtttggctactgaagacatgctggtctcttccaagtctttcctcaggatccacacatcagacattcatctctattctccaaagagcacaccatggctgctgtgttcctctccttctcttcttcctcttttgataccttttctttatcttttagcttctccttatttagagtgaactggattggattagctgctggtcttgtccttaaataatacatcccagtcttcaaaccctgcttccagccgtagaagtgcatactagtgagtttgccatagttaggctcagcaatgtggatgttcaaagattggctttgatcaatgaaagcacctctctcagctgccatcttgagaacagttttctgagagatttcccacacagttttataaagttgcttcaggtcatcaggaatttctggtatgctctgaatagagccattgcatgcaataatctggtttttcatctcttcatgccataggccccgctcggtaagatctttcaataagtgaggatttacaatctgaaattctcctgacaaga

SEQ ID NO: 336272 - DNA, 1000 bp, Homo Sapiens
ttttttttttttttttttcatggatggcaaaagtttcttttatttatctgctagaggaatcataagaggcaaaaaagtactaccaatattggacaaaacagataactgacattatcgatttttagtaagattcttagtttctttgtttttgttttttacaatctgactgcattaagacacatatactctttaatgtaaaaaaaaaaccatcatatgcggaactaaatgcacaaagacctcattattggaacattagccatgattattttaatattctcacagctttgcaattttgagaatatactagcattatataagaaggaagaggagaaggaggaataagagggaaaggaggagaaagagaagttggtaaacagaggcctagttaagaattccttgccttagtggtgaacaaggactaaacacagacaatgggtgaaacacagacgctaattcacataacagagagtaggcaaccttaagaatgaattgatgcagactcctatagaattcctctgttatgactgggttcttattttctcctccttgtatgtagttgaaatttcatcattatgaatagttccttggatctttttttaaagttgtgaatgcaagtgtttggctttgtaatacaactttttagtatccagaagataaccagtgctctaccaataaagatcttttgatacaaagggttttaacttctgccagttcttactcatttttttcaggttttttatacatttcttaaacaacacatacattatgtaaaatataagaattaatgtacattctcaaggtcagattcagtgacaaaatgcactacccgaatctagtaacacatttactccttgctgcatataagtggcgtgtaagaaatacagggtatattgttttgtgatccatgcagtaaatgttcacaaatatcaagcaaacaactagacgttcttcagctactaaaattaactgtcccagtcacaaaagacttaacaaaaataaa

SEQ ID NO: 336273 - DNA, 1000 bp, Homo Sapiens
ttttttttttttttaaaagtatttattatagtaaaggttactgttgtaaaacattagtgactttggtccatatcttatttgccatttgtctttaaaacattttacattatttgcatcataaattgtaatttttatgactatacataattggtttttttcctgacccttggaatgttagtttcatgtaactttttaaaaaattaaaacattgcagactaaatgtactgataagtacatactgaacacatttaattaccacagtaattaaaaagtcctgatctttacttcttaagatgaaaattcattaacttgcaatctctgggatttctctattatccacaatgagagtatgaataatcccttctttccgcttcccactactgacagcctttatgtaacagtcatggttcccgatactgaagtgagtttcagtcccatcatctacaaactcacccgctgtctccaattttttaccattgcaccatacgtccatagcatctttttccaaaacaattctaaagttctcaccatccatgtgtaatacccaagtattggtggtttttgatctgtcctccatatacttcttgagacttttcccattaatttccagagtatattcataagcaaaaccactgatagcgtctatatttatggtcgcttttgtctttgcagctccaacatagaatgtttctttgcccactaatttgaacatccactcttttcttatctcttcctttccatctacatatactactcgtttgcctgatgtagtcccatgttcaaattcgatcttgtggactccgtcacttaaagcaacatcccaaacagctacgagatctgtcattttttctaggctgtaaggagggctgtgctctgtgggccgcgggaggctctggggtaggtttcaccaaacaaccggttggttccgactcggctgcgtaggccgcgtggccttgctcccctggccgagaaacaggcgcagccggcgcggaggttgaaa

SEQ ID NO: 336274 - DNA, 1000 bp, Homo Sapiens; identical to SEQ ID NO: 157667

SEQ ID NO: 336275 - DNA, 1000 bp, Homo Sapiens; identical to SEQ ID NO: 246414

SEQ ID NO: 336276 - DNA, 1000 bp, Homo Sapiens
ttttttttttttattactaacagtgtttttatttacaaataattgtttttattaggccatttggaaaaccactaacattttttattttagaaaacattaaataataaacaagatgttatacagtactttggataacttcttccatcagtttagtgcaatgtatcattggcatcgaaaagtaaaattttcatttattttcccctttcatcttcagctgtgcagttatatgaccataaaggaaatgaaccattaaaaatggatctacagccatatattctgccgttactcaaaggcttaatgatttattttccccctccagccctgcctttaccaggttaaatgacagaagaccttctattgtacctattgttcaaaaaatattactgttctgtggaacctgggagagtccaattgataagagaaactgaatcatactgatgaggtgaaggaaaggtctgccggtgtggggcagggcactctttctcagcagccaagataacttgtcacacacgaagcagagagaatgcacccgatgaaaatctctctgaactgtgttccttgaaggatctcttaaaaaaaaaaaaatctgaaacatcatccattgaacaaatgaaaggcttatacctttaacatgaagaaacattgaaaaccaccgccacactaggacattactgagatactaaaatatctgtccatcatactctcatttggaataaatagtttccttttttctttaatactgctaggattgccataagggagagatatttcagtgagctcagcatttggtgggctcttcccctttcaatccctctccattaggaggtcaagagggaaatgcctaaattaagccttgtccaaattatttagttctaaagattttcactgcatactactagtaggatcaaaacatcttttgggaaattctataatttgttacttttccttgggtaagaacatctttaaccatcttaaatagacaaatttttatctaattttt

SEQ ID NO: 336277 - DNA, 1000 bp, Homo Sapiens
agtgaaacattttctttttattgagaacatctcaaatcctttgtctgtatttgacagcgtctcatgctcagttccagctggtcttgtgcgagaggaagctcatgcagttgtaacgtgtggtgtatacacagatttacatacagagaacactgaggattgcatctcagcaacatgtttctcagccgaattacattcatagaaagtgtccagattctaaaatcaaattaaaagcatgtaatccaaagcctgaaaaagcaaacagctttaggggctgactccattagcgttccatagactgtgcttttaaccgttcagttcatgtttaatggcccatcggttccttacataccatcagcttatgctgtggccaaaagaagtgttcttgtggcttggtactcgtcccttcaaacagtaaacaagaaagtgcagacagtgctgccagagacaggaggattttcacatgagactgaaaaagccgacacacccttacaactaagtcatggtcgagtcggacctgccatccacctccaccagtccctggaacccggcaggtcagagttttctctaattctattccccggcatcaagtgaacactagaactcacacggaaggccccgagcaaccactggcctcggggctgggtgcacccactcctcacccagggagattgtcacaaaacacgctagggggcagagacgctgtaaactggacacacacggaacacaatgccctttccacttacacagcgtggggatgataaaaaggaatcttttgagcaagtctataattttacagaatttagaggtgggaaagatggccaattttccttctttatgcctggggcagaccacctgcttctggggtaaagtgtttgagaaggaaaaagagccactgtacatgtgtttgttttgagacatgggcaggtccggatgtgcagtctccacagcttcgctaatcccatcctcagatctgtgcacaatgtgaagacggagccgtccc

SEQ ID NO: 336278 - DNA, 1000 bp, Homo Sapiens
acattactgtagaggcacacattggactctgacgattccccttgcagcagacatttgtgaagctgctggtcggcacacccatcaatcagtgactcctgcactgcagaggggccacatgcacgatgctcacgtgtgcacaggggggaggacagcacccccaccaggcagacgggcccagaaacagcatctgcccagcactccagaccatgcctgccaccagggcttctcagttctctagcatttgaacctctgatttaacattcatctctctccaagactgggtggggcactgcctgtggccagacgtctcccacagcagggacagcaccaggcaagaagggggcctggtctccaggcaggaggagtgcagcccacctcccctctggctgacccctgggcagtgagcctttccatcacccctacacacatcaggctcagagacaaaaggcaggaacttcttggtacatgattttataggaagcacatttgtgttcaagtgaaggcagaggcgtccaccccaagtcaccagagcgcaggtgcagagaggaaaagctgtcagctagtgccagcctccaagggccagcgctacccttcaacagctggaggcaccactgtgcgaggctttccacaccggcctccctcaggaacaagacatcctcaccaggcaggggtgaggtatgggctccaggactggcttcagcaggcaccaggctggggcaccagctggggcctgggtacgcccagaaggtcacacagacggttgcgctgctctctcaccactgcaagctccgcgtcccacgcagtgtcatgcatagagcagccagggccgagactgctgcatccttcatctgctggcgggagtgacttgagatgagatggagatgtctcaaagtgtcatttatcagccattgccaaccatcaattacggtgtcacctctaaagggcattttggaaagtgacaacttttctattaaaacacacactgcttgtctcatgagct

SEQ ID NO: 336279 - DNA, 1000 bp, Homo Sapiens; identical to SEQ ID NO: 157669

SEQ ID NO: 336280 - DNA, 1000 bp, Homo Sapiens; identical to SEQ ID NO: 157670

SEQ ID NO: 336281 - DNA, 1000 bp, Homo Sapiens
ctgaatgtcactagacaattaaacttttattgaagcgtaaattgtggtacagaaatacatttcaactgatttaagtccaacaccagtgaaaggagaaattatggcaccaaaactttccctcttctatcatacgatgatttagattatgattcaaactacatttctcttttctaggctttgtcccataaaaatttgtgcagtttttcaacattagaattcttaattctattggaaacaaaacaaaacaaaacaaaacaaaaacaaaaccaaaccagacctcaagtcaacaaatctattgggatattgtttacgaacaaagtccaccttaagcattggtcctcaaaacagagctcctcaaaatattaggtgctgtgctcattacagaatcaaactgatcacactgattgaaaacttcctcaatgaaattttcaatcaacaacatgcttcaaataaaagtcaaacagtgttccaaccacttgatttcaaaccaagtagattttaggtttagaaacactaaaaaaaggtgtttcatttataaatacggaaggaacaaaaacatcactgcatcaatccagaaattatcaaaatatttagaggacaagaaatataaaatttagtcaactttgctgttttctcagttccttaaaatcccagagaatctgcaaatatagctaaaaggtaccaactcttgaaagcctatattactagtcatttcccattgagtattttggaattttattattctatttattcatattctacttatttataatgtattctgctttatgatgtttatctgaataatctggacaaattctcattctgggcagtcattcatttcatcctatgaatgccatggtaagggaaacaccgtagttaagaggaacagatgaagtcggaacactcacatgcatcacagtcacagaactttaagtcacgagatggaaaagacattgattctgctttggatcaaagtttatagaacactacttaatggaaa

SEQ ID NO: 336282 - DNA, 1000 bp, Homo Sapiens
ctactcactttctttttgcatacacaaaatagtattatggaaacatgagctgaaaattttacctagcaaaatgtacttcagtgctctgcgaaaccagggatagaagaaaccatatattaacggattacatgtggagttaaaatagccaaaccatgtcaaggcatcaaacaaaactacaggagtagagaagttcaaaaagggatccaataaaattgtgaagaaacaaggaaaccaacataataagaaaactcctatcactattcctaaagttttggcagcttttttgtctttcttcacttgattattttgattttctcgcaagttattgatggcatgagcatgttttctggatactgcaaaaattttgccataaatccccaccatcatagacccaggagtgaagaaacctgccataaacaaggtggtcccccatagcttgttgaacatcactgggcaggaactggaacaagcaaccaagatgtcatagccctctattccatctgcataggcctctgagaagaccaccccgaaggcaaatgctccagggaccgaccaacatagaagtagcaatcttttaatgactggaatagttattttggtggaataaagtaatgggtaacatatagcataaaatctatcaatggccactgagcaaagatgaaaaatggatgttatgctaagcatcaggtcaaaactataataaatcttgcaaaatgtaagcccaaaataccagcagttctccaccgatctgatcatactatatggcatgatggtgaatcccaggaggaaatcagtgatggccatggagaggatgaggaagttggttggtgtgtgaagctgcttgaagtaggaaatggaaattatcatggcaagattgccaaatattgtgatgaatatggatcctgccataaatgaatacatagccactcggacacccagagatctttcattttctgggcaagatctatttccatattcagagcaattgaatttttccttt

SEQ ID NO: 336283 - DNA, 1000 bp, Homo Sapiens; identical to SEQ ID NO: 157671

SEQ ID NO: 336284 - DNA, 1000 bp, Homo Sapiens
  misc_feature (748)..(748): n is a, c, g, or t
tcaagtacttttagaactagactgtattttcactgccacagatgtatcatgcagggagtatcctggtttaaattctgaagtgctttcactcctacttggttcaccttgaaatcgtctaaaaagaagttggcacattattttgcgaatgttactggacatcaggaaatacatgactggatctaagcaactattgaaagatgagagaaccagcatgatctcattggttttgtgaacaatttctttccagtagcaagatgatacatttagctgtgaagaaatgtagatgaatcgaaaggcatgatagggaacaaaacatatagtaaaaatgataagtacaataaaggagttacgagctgtagtggcatatttaccagaattaggaaattttgacctccttttagaaatcctcaatagattcttcccaatcttaatatatgaaaggattattagtaagaaaattagccagaacattaccacaagaatgaagttaaaaatggcttctccttttgcgttatgcttatctctgtaatggaaacacattgtggaattatgccctcctttcttaagtgttaaaataatcatagttaggaatccaccaagagcaagcatccatactatacaacagacataaatactttgtttcataaataccagtgttcccacaaccttgcacagaatcacacctagtgtccactgtttttggttaatatgatacattattcggaaagggaggcagaagatgagtagnaggtctgcaatggctacgttaagtagataaatttgaatggaatttcttttacggtgaatacccagaaatacatagagggcgattatgttcccaaccagtcccacgatgaaaataacagagtaggatgtggttaacacagtagatagcaatttttcatccatgggacaggtagtaacatttggtgttgctgagaagttttgtggcggttggtcgctatgattggttataaagcgcattctgtgggaggagtaa

SEQ ID NO: 336285 - DNA, 1000 bp, Homo Sapiens
tcaagtacttttagaactagactgtattttcactgccacagatgtatcatgcagggagtatcctggtttaaattctgaagtgctttcactcctacttggttcaccttgaaatcgtctaaaaagaagttggcacattattttgcgaatgttactggacatcaggaaatacatgactggatctaagcaactattgaaagatgagagaaccagcatgatctcattggttttgtgaacaatttctttccagtagcaagatgatacatttagctgtgaagaaatgtagatgaatcgaaaggcatgatagggaacaaaacatatagtaaaaatgataagtacaataaaggagttacgagctgtagtggcatatttaccagaattaggaaattttgacctccttttagaaatcctcaatagattcttcccaatcttaatatatgaaaggattattagtaagaaaattagccagaacattaccacaagaatgaagttaaaaatggcttctccttttgcgttatgcttatctctgtaatggaaacacattgtggaattatgccctcctttcttaagtgttaaaataatcatagttaggaatccaccaagagcaagcatccatactatacaacagacataaatactttgtttggttgttattgccttccgttgctgtatagaccgattaatttttatatagcgatccaaactgatgaatccaagcaaaataatgctaatgtacatgttcatataaaacagtgttcccacaaccttgcacagaatcacacctagtgtccacttgttttggttaatatgatacattattcggaaagggaggcagaagatgagtaggaggtctgcaatggctacgttaagtagataaatttgaatggaatttcttttacggtgaatacccagaaatacatagagggcgattatgttcccaaccagtcccacgatgaaaataacagagtaggatgtggttaacacagtagatagcaatttttca

SEQ ID NO: 336286 - DNA, 1000 bp, Homo Sapiens
tttttttttttttttttttttttttttttttttttttttttaaagctaacgcactgtttatttgggggattggggggaagcaccgtgccgctgctcactggtagccagccagctgcagaatggtggggtagcaagtacgatgggccatgcacttctggcggtcgatgaagagactgttggtcatggcagtgacgtccttctccaggctcatgtggatgtccttgaggttgcgcagggactgctccgcttgtagaagcttctcccgcagcgctgtgatggacttgtacagctcctccacctcactcaccagcttgggggtgttggggggtgtgagctggggctggggagggcagaagtatgcacctactggggtggaggggacccaaaactcccaatgggagctggcaggaggtcctgggaagacgccatgaaaggatcctaccaggaaagcggctctagggcagagcataaattacgagggtcctcccagggagcgcgggcctgagtgggaatgagtgacccgcgtgcaatctcgaccctgacaggacaggactggcctcagccgaccaggctcagttctttccattcctgatatttgacggaaggaggcacccagttccttgaaggaactgaggggcagggaaggaagaaaggtacttaggctcagaaggggccaccaggcatccgttaacaagggaaacaaaaggacggcccatctatgcctgtagcccaggcgtaggtcatactttccaccagaggtggggacagcaccctcagggcagcagggaatggccctctctggcctctctggccccgtggcctccaggagctcatcttgtctgaaggagcttcctcccgggaagatgaggtagcacagggtggggtgagaccacgtgggcacaggtccctggcacggggaggcccccgacccatgacctgcccagtgtcatgtctatatctgtgtgtttaaggcgtgcttgcatgttgtgtgtggccgcag

SEQ ID NO: 336287 - DNA, 1000 bp, Homo Sapiens; identical to SEQ ID NO: 157673

SEQ ID NO: 336288 - DNA, 1000 bp, Homo Sapiens
cacctaagaaagaggtcaatcgatactaatcattcgtgaagacaggcaacacctgagagcaatagcaggctgacctaatttaattagatcggatatattttcaattgtttctcatgaaatcataatcttaccagaaatacagttactaaagacaagtattgcagatattgaaggataatgtagggagtatgttgaaagatactgttcctataaattgtcaggaaaaactggccattaattttacagaagtgaaaaatatataacaataaagttgcagatctgagctttattatcagaataacatcatttcaggatagaattgagggattcttgaaaatgcttttgataatggcataaaactcaggagtctcagagctgcatgcctgcttatctgttcaaatatacctggaagggaaatacacagagggttcagcagaataagcaagaaagttgacagaagaaccaaatgaaaattcctcatgtcaaaagcactttaatgccctatcctccttcaatcaagagatcaaaagaaacggcaagtcctgtacttacaaaaccgatgaaaatcacactgtaataatcagtgaatgtagaactgcacagatctgtgtttccaactttttccaccatgattctacatcaaggtaaaaaaagattcttttatacaaatccaagaagaatgtggacagaggtggcagcaaaacgtcaaggatggtgcacggacttacgactgcagctgagacaggacgtgggggaggagggtagagtcctcgagaaagaaccctacggagagggtggctcagtcagtggtcgatctccggtaccaaaaccgcgctctgaagtcatcgctgcacgtcatgaacccggggttggtgggggagtgcactatgcagcgtacaatattgttgtgccccaacgacagcaggtttctccgctcggctgtcctcgagtcccagcagcaaagactgatcgtcctctcgtcgggcagcaacacatagtc

SEQ ID NO: 336289 - DNA, 1000 bp, Homo Sapiens
ttggcgtggacttcggttaacgagtctcaaatttttattttgatggcaaaaatcacacagggaagaacaaaaattatccatgacaaactaggagtggaaatgggctgggagacacagaaaatgggtgcccacagttcctgggatccctcctggaatcctgggtttccctcctaggaccctgcaaggtaccctacgtgcctcctggaacccccccaccccggaggtcccaaggaacccagtttgagaaccaaggctttaggccaaggacttccttgcacaagaaggtgcagatgtacagggatggttcagacagtggcctcaacctcaatggcttcatcctcctcctccagcaggctgtaggaagcatggctctggcaaggccgctgcagggggtgggccaacagtttcgccatgcagttgtgcaactccagggctggcccagccagtgccacctcatacttgtagctggtacccttggtatccaggctgcccatgaaggcaaacatatccttccaactcatctcctcctccttctcctcagtgccattgtggatgtaaacaacgtcaaagaagaaatatgggcactggaacattttcttcatgggctccgtcaaggagaactggggctggcaaggtggacggctgtagacaaggatggtgcggaccacatatggcgggggaatcgtctgcacgttctctgtgaccggaagctcagttttctgctggatgaggctgaaaagtccttccagattgaaggtggaacaggaggccgtctccagatcatagaggcagctacagagctcgcgggggtcggaggtcaggccagacagccaggccgtgtcatcgttcaccaccaccagtgcaaactcgtggcttttgtcgatcttgtgttttgtccgcacgaacatctcaatcatcttctgggagacattgagggcgttggttttggagccgttgaacgactccagctttggcagtgacatttcctctgacaggtcca

SEQ ID NO: 336290 - DNA, 1000 bp, Homo Sapiens
tttccaggttgccctggaacaaatgtttattttttgtgttttgttgtttttttttggggggggaggggggaagggagggttcacaagggcaaagttttgggttttatcatttttttgagacagggtctggctctttcacacaggctggagtgcagtggtatgctcatagctcactgcagcctcgaactcctgggctcaaacgatcctactgccttggcttcctaaagtgctgggattacagccacgagctaccacacccagccaagggcaaaggtttcataaaggcaaagccgggatatttttaacaacagcaaccaaaagactgatttggagatgttctttgtctgaatttctgcagataatgtgttcgttcagccacccaatataatcagcaaaacaagcctgggtgtggggtcttggtctggaaggagggaggctgccctctttagaagcatcccacaagagatcaaagagtccccaatttacagtccagctgcatttgcatttcagacaggtacatcgtgggacccactctgtttcttatttgggtgttggtccacttggattgagcctgtctttgaagtctaggcagctgggtggtgggcagagcagggtcagtggacagtaatcaggcgcttccaggaaaagctgcagtaggtggcaatggtggctgccccaggccctccagggttacgtctcaaagtacttgtagatttgggccacgtactgcatcacactctgccagtcgggccggtctgtgtacagcatctcgctgagttccaggctgggtttgatgcctacactttcagccgcttcaaatgccaacaagagattcctctttttctcctgactattcagctcctggtaggggatgtgggcaggcaggtaggtgtggagcagagcacagaaggccaggccatcgctccagctgctgctgaaattggtgatgtcaatgttcgcataaccttgtgtcttcttctggcaccatttcagtagagca

SEQ ID NO: 336291 - DNA, 1000 bp, Homo Sapiens
tttttttttttttttagattattccacatcacatgctttatttggacttaaacacttataatttcattctaaacacttggttgacatacattttgatgtgtgtagttaggctatacagaatatacaaaccaaagctgtatgaataatacataggtttttcaaaagttatgtttcataaagaatacagagaaaggaaaaatagccacacatccaatatctcacaacttctaaaaataaaactacagagatgtaaaatataaacaaatcaaacaacacacaaattatcatccttgaaagaaaaattacaggccagcatcagccattctttgaagaactaaaattattaaagaaaacataaatttattacaaagctaactatgagtgtactaataggtaaaataatatgaagcagtataattctacattaacaagtttttccataatatagcataatctctctaatcaaaatttctaattctatctagtattaatttaactactgactttaattcataattggtagcctaatttctggcatacaatgtgaaatgacatataatttcattaaatccatagtactataaatagtcaattttacactatctcataaaggtgtatgcaaaggcctttttaaaaaacaaggctatctgaatataataaaactagttttccaagattcaaataacaaaacagttatataaatgcatacattacacttcctaggttaaaaaccatcaaagatcacaaaaatattaccaaaaaggaaagtcatattttttcaccactcatctttgtccctgcatcttcattagagctgtctaattcagcaagaccactttctgattcagtatggctttcctgcattgtcactgggtttccagcatcactgttcgaagaagtagctgtggcagctggttcagcagggctttcttctccctctactttagctagcctgtaactagtcagcatctcctccagaagttgtcggtagtttccccta

SEQ ID NO: 336292 - DNA, 1000 bp, Homo Sapiens; identical to SEQ ID NO: 157674

SEQ ID NO: 336293 - DNA, 1000 bp, Homo Sapiens
ttaagattgtgcagagtagctttatttataatagctaagaactggaaacagcccaggtgtccatacataggaaaacggataaacaaaccatggtgtattcatacaatggaatactactcagcaataaaaagaagcaaattgctgatacatgtagcaacatattaagactctcaagaaaaattatgctgagtcaaccaggcccagtggcttatgaatataattcagagctttgggaggctaaggagggaggatcacttgaggccaggagttagtggccagcctgggcaacatggtgagaccttgtctctacaaaaagtttataaactagccaggcatggtggtgtgcacctgtagtctcccagctactcgggatgctgaggcgggaggattgcttgagcccaagagttcaaggctgcagtgagttatgatcacatgccactacactccagcttgggcaacagagtgagactctgtctcccccaaaaaatttttaaaaaagtaaaaattatgctgagtgaaagaagccttacaaaaagagtacatagagtttaaactctgtaaaaaaagatgcatactgtataatttcatttttatgaaattccagaagagataaaactaatttatggtagaaaatagaaaggtggttgctttggggattggagggtggacgactgaatgggaaagaggtgtggggactttttttgttctatatcttttatttattttttttaagagatggtttttgcaatgttacccaggctgatcttgaactcctgggctcaagcaatcttcctgcctctgcctcttgagtagctgggattacaggtgagtgtcacagtgctctttgttctgtatcttgataggagtatgggatgcatagggcatgtatttgtcaaaactcagcaaatatacacttaaaatttttgcatctcattttatggaaatttggtctcaagaggaaaaaacttccttctttccctgtagtcccagttgctcagga

SEQ ID NO: 336294 - DNA, 1000 bp, Homo Sapiens; identical to SEQ ID NO: 157675

SEQ ID NO: 336295 - DNA, 1000 bp, Homo Sapiens
tcacagtacacagcagttatttatttaaatacttgaaaaggctgatgatggaaaaaataggtttatcatgagagtttatattcattagatttattttatcatttaaaaaattactgcctctaggttatcctagcctgatatagaacacttggtgacacatgcagttactgtaatatactataacagacacagccattatagaatgatttacacttgggatgaaattcaacagtagtaagggtgactctttatttaaactaaaaacattggtaatatacaaattttttttttatttcattgaaagggctataaaattcaacatactgacaaggaagcaacataatcacatagataacgcctctgctaattgcttttacctaacttcacccttaaaggtgagctgcacactcagctacacaagtttctagactgtgcgatggcttcaaggctggcctaccacaactgactgaaaaaatgtcatgttggtaagctgacactgacttgtatgtttttaaaaatggagagacaatggcaaattgtaccttatgtccttatagaacccaaaggatcattctgagtaaatgtgaaataaataaagtgatccatgagtaaatacaatctctgggctaacttaaacctagaagagtgagccaagtgagcactaacaataccacttagaaatgtctagaaacatcatttctagaactcagcttgggagaccatatcttgcctgaatatgtacatatatttacaaaatattcccttttggcctctggaatttagccattttagtttggctgttagctgttttctttccatatgctagccaatactgcagttataactatcattaaaatactcttatgcatgaattacaaatattaataaagtaactctgcatgtataaatatctcaataattctagcagaacttaaagcattcagaatgtacataaaagtatttgtttttggtagggacagtatttctttttatatcatcg

SEQ ID NO: 336296 - DNA, 1000 bp, Homo Sapiens
gagaagataaagagtttctagagtttttattattcaaaatgagtttcatttcaattcaggtacttgaaagaaggttctagtctgttactttgacacagcacaagatcagtagtttattccaatgaagtattccacccaaatgaaagcataacatgcaagtagttatttatttcaatcactcctatttgaaggtcctcatttttggagaacagccaggcattttattatccactctttccattccttaaaggcttccacgggtttcggtaaattcccattatcctcgtgactgtgttctggagttgctccaggtgtgtcagaagattcatcatcaatccacctcaccagtgctttgtatctttctacaatgctgaagccaacagcacactgcaacttgtgcaaacagatagggcaaaggtttagagggcgccggtcagcttcttccaagtggttggagccttgcatgaggcatgcaagccactggcagtgtcgcagtccaaatatgtgtccgatctcatgggttaaagtcttacaggatcgaagtagtaaaacactagttatttctggaatataatagttgtcgaaaattgaatagtcacttgaagatgttttcttgagcttcttcactttgcctttatagtgcatgctataaaaatcactgccatacctggcaaagctgaatatccccacaccatctgtcaaagaggcctgtccaaagacaaaattccacgagtctcttgggtaaagatcaatcattgttattcccacaacacagaaggcatcttcaggtttcttctttttcaagaacttcaggatgtcccctgcatgaatttgtaggttgtgtgtgttctcattgactctaaaggaacatcttgttacagaaacaggaactggttctaggagttttactctcaagccatagaaatatgctttacagtagcccgtgagccatttaatatattcttcactgataattctggtgtttcctagagagccaatg

SEQ ID NO: 336297 - DNA, 1000 bp, Homo Sapiens
tttttttttttttttttttttttttttttttttttccacatcatcggaacattttattcctcaggacgctacacgctcactttcctggcggagcaggtcagtgcatcgagttctgtttccgtggaaaatgtgcaccttggaaaccgcatgacagccccctcggcagggtccccgcggatccgccgcgacgcaggcacagcagcaagttcctccagcacgaagctggcctgcccgggcccaggtgtgagggactgttctgctcccagcagcgcccgctgacgcttccctctgcggtctcggcgcaagcgtctgtccctggccgccctcggagccgtgcccagcctggcatgcatatgcggtggttaaggatacagttaaagggtcaatcacgcgtgtccacgacagagacgcacgcggcctcacaccgactcctcggtggacagcaataatgggttgatatactcaaagccttcgaactctgactggtcgatcctctttatggcatcctcatcgtctggggtcagctgcacgggctcgctggtgaactgtgtgtcaaagttgtccagaccgtagtcgtctgtgatctgtggctggaatggagggagcgcctgcttcttctccagcaagtcccagtctatgctgcggaagaacgcgtgggacttgatgtcagaaaatccagtctgtggccggcagccgagcctctctttggggtccttatttaaaaatccttttaaaacatgggaggctttgacggacaggaaccgggggatccggatgggcttctccaggatcacttggaaaaggtagtcctctgtgttcatgtccgggttgtcggtgatgatgtcgaacggggagcgcccggccatcatctcaaacatgaggactcccagcgcccaccagtccacgctgaacccgtactcctctccccgcaggatttcgggggcgatgtaattcggggttccgcagaaagtgctcgttgtgtcaccagggcccaggcctt

SEQ ID NO: 336298 - DNA, 790 bp, Homo Sapiens
tttttttttttttttttttttttttttttggcaattaccctttattttcagaatcacgagccaccattacaaatgttgcatccaaaacaggacaaaattcatcaccatgtaactggaacatttgcatcttcacttccatggatgtcttcccgacccagctaacatggccactgaacttaatgtcctgttctgggctcaagctcttcttacacatatcaatcttatccaccagggctgtaactatcgataaaggagacatcttggcggagtggattttgttgtgcatgtaacaaataagaactcccaagctgtcaagatcctcaagaatcctgccaaatcttacggtgttttgaacagtcaaatatttctctcgtaattcaggctcactgcccaaaggcaagagaacttcaatataactgtccttcattctcctaggaggcagtccatcctgtgatttagccaagaaactatgaagtaatttcctttcttccattgccttcacatggtctctccagtttgtggatgctcctactatctcccgcaacttatctcgaacttcatgaatgtggaagattccctgtttcttggggttctggggtccttgagtcagtcctcttccaggagtaagctgccctttgcccaaggcacaaagccgcagtgctgcccgcctcattgcgctaggctgccgtgcgcgcgatggagaaccgggccccgcgcgctagtcggcggagggaaactgaggcgataaaagacgcacgagtaccagaccgcgcccttgctgaggaccccc

SEQ ID NO: 336299 - DNA, 1000 bp, Homo Sapiens
cctttttctattttgggtagaaatattcctgggaagctagatagaaatgcattttcatttcccaataattcttaggcacaagttagaaaactgctgaccttcactaaaatatgtcagcacttcatgttataaaaaatgaaattcagaaccgcagcatgtgtatatacgtatatctaaatatacacacatatcggtgcagtacacaatgattattcaatgtatattgaaaactgagctttttgtaactaacctgaaattctgcagtgaaagttcattgctcaagaacaattgcaagtgtctttcttttggctctaactatggtaaaacgtttgcacatcagactttaccatttacacattcctaagtgccgacaccagggcagtcttacacggggatcagaggaggacgcgcctaggatgcattcgcagctactgagcatgcgcacagggccagctccggcggcaccgggtcggtgctccctcagggtggagaccggaggacgagaagccggagctcccgcaggccgtgtagtggcgtcatctgggtgttgtgctgactctggccggagaggagggccccgaggaggagccgcggtaaacgggagatgtgggcgagagtttaatcggactggtcgggtccccagtttggagcttccaaagcagctcttcattggttcggctcaatctcttcttctcctgggtttccttctcaacatattcctggaggttagcattttcctccgacagctgtctggtgacaactgtgttttggtcaatccttgctttgaggtcttcgttctgctgttggagaacctggatcttttcttctaggataatgttcttttctgccagcttttccagctcaagaatcttcttttcttgctcgtgtatttgctgattcttcatttctaatacctgcttcagactcttcatgtcttcttccaagtgctgataaggagccaatgcaatctccagctgctcctctgtgttcttcctcaagg

SEQ ID NO: 336300 - DNA, 1000 bp, Homo Sapiens
aactggcaaaggcatatttttatttaaataaatcaatctcacaactgtaattcgaacttgaaattagcaaagtttctttcacttcttacacataaaaaccttaaattttaactgtaataaagtgtgaatcctttaataacctggatttttaaaaggtgccacccaatggggtaatgaaaaggggatgttaatgtactagcttccttgaaaatatttaaacattttcatacaatactagaaaacttcccttcttccacgtttagcttaatagaacaaatcacatgaaagtttcatagtggttcttttatttataaaataatcacattcaagtcttaccagagagtagcaaagtcttcaattcctttcctttcctttgaagaaataatgtagagcaatcactcataaatccctctaattataaataaaatccaagatattatttgacaatgagatgctttattaaacttgatacatttactatataagaattctgtgaaaaaatggggtatgaaattattttggatctgaatctttgcattataaaatctaacccaaaactatgtcatttcactgtattctgtgactattagcagatggatgaccaaaggcaactacttcctttcctggcaaaacaagacaagtttcagctgacttccccatggtgttacaagttctcctagtgaagtaaaaagtcccaacccctctttctatgcatgtcatctccaggaaggtgagctttaggaagcacctgcgccagccctatatctgtgcttggcatgaggttcacacaggttcggccttgagatggggatgttcctctcaaccaaacaactctacttgaattattccgagactccttggaggggtgaaacttcaggcctgggtgtctctgcagtgagatgtctgtggttggtaaacagttctgtagagtcttgttctactgatctttcttctaggtctgactctgggattgtagtacaaccacctggcatgaccatgg

SEQ ID NO: 336301 - DNA, 1000 bp, Homo Sapiens
ttttttttttttttttataataaaagattgaagtttttattaacatctggctgtacctcatatgttaggctctgaatgtaccatggataaatcccattgtacagatttacaaatttgacccatgttgatttttctaattcctaaaatggttttattcaataaaagaggtaatccgttttgctgcatttttttttcccaggaagaatctttatcaaattttatttggaaaactaagtttttaagagaggaaggtcaaaaaaggaaaagtttacctaccctaagttgcttagaaaattctgaaattataaagaataggaataatcattaaattacaaaatgacttaacgaggattctttacaacatttgacttgaagtcatatcctacttcgccaaaacaaaagtattttgttgactggtggtggctcacacccagcactttggtaggctgaggcaggtggattgcttgagctcaggagtttgagaccaacctgtgcaacatggcgaaaccctgtctctataaaaaatacaaaaattagatatgtgtggtagcgtgcatctgtagtcccagctatttgggggcttaggcaggaggatctcttgaacccagaaggtcaaggctacagtgagcatagatcatgccactgcactctagcctgggtgacaaagtgagacccgcctcaaaaaaaaaaaaaaaaaaaaggaaagatagtaattccctattaagttaccatcttatgtaagcacagcttgctcatcaagctggaaaacaaatgtgacaaagaaatgagactttctccataaataatactcaaaatgatttttgctttttaaaaaattctttcagttgaggattagctccactgccaatttgagcttcaagaggaaccatttaaattacgaaaattacttttaaaatgattgagtgggactattttccctttcctttttctttttttttctttttttttttttttttgagacaagatcttgctctgttcc

SEQ ID NO: 336302 - DNA, 848 bp, Homo Sapiens
tatataaaaggaagtttattaggaagaattggctagcacaattacaaggcaaagtcccatgatagactgtctgcaagctgggaaagagagatgccagtagtggctcagtccaagtccaaaagcctcaaaaccagggaagctgacagtacagtcgtcagtctgtggcttaaggcctgagaacccttgggaagccgctggtgcaagtcccagagtccaaaggttgaagaacctggagtctgatgtccaagcacaggaggagcacaagcaagcacctggccaccaagaggtctcgctggttggcattttgacatcaccattctcaggtcttgccctcagctctgtaggctcagaaatgtgactccatcagtcctcctgaggaaagattcacagtagccttgctcactagacactgaagagcaaatcaatggctggggtgttaatcacgatgagaaacgcgactgacacgtggactgtaatagttagtgggttctcatcccctgaagtcttggttgctttttagataatgctgtttctcctttgccttcagcagaagtgtaagtccttgtccatgctctggatctgtgccaattcctacagcttcttctggttggcatccaaagccctgtctaaatcggtttgctaaggactgctgtaatagagatcaccaactgagtggctgaaacaacacagatgtatttcctcccagttctgaggatgagagatcatgctgtcggcaagactggtttcttctgaggcctttcccttggcttgtaaatggctgccttatcccagggacttcatgcattcttccctgtgtgtgtatctgtaccctaatctccttttcttgt

SEQ ID NO: 336303 - DNA, 1000 bp, Homo Sapiens
tttttttttttttttttttttttttgctcttggaaatatttttattggttctgagataacagggctgaggcgagctgggacgggcgcagagcgaaggtgggaggctttgccctggggcggacatgctgtgtggggtctgctggcgggctccctggcccacccagccagcagcagctgggcacatggcccttggcgcctggcatgacctctgccggcttggcacggtggcctcctcgtcggcgggcgcccccgctttccagttgcaggagttagtctttcacagtgcggaggggtgggggtccggggtgggcgcctccccggggtgcaggcaggccccatccgccagtacatcctgggctctcggcggctacagcgggtgaggcaagctctagctcctcttagccccgcctttgggagcttggcagtcctggaggggccctcgcggcctcagcgggacatcatccggacaaactcttcaaagtccactcgtccatccccattgaggtccacatctcggataatttcctctatgtctcggtgtcccacctgatgacccaggagcttcctcatagcctctcgcagctcactggtgcttatttccccatcaccattggtgtcaaactctcggaaagcatctcgcagttcctttacaccaatcatatctgctgtctctgccaggagtttaggccccattagctccacgaagtcatcaaaatctacatggccacccaggttcatgttgatctgctgggacagttcgatgagctccatctcggtgggcatgtagcccatggtgcgcatgcagttgcccagatcccggcagttgatgtagccatccttgtccttgtcgaattctctgaaggcctctcggagctcttcaatttcctctggtcgcagtgatctatcctggccaaaggcggagctgagcatggggcgcagccggtggaggaacgggtccgcctcggacgcggcggctggaacggagtccccgcggccccgg

SEQ ID NO: 336304 - DNA, 1000 bp, Homo Sapiens; identical to SEQ ID NO: 157678

SEQ ID NO: 336305 - DNA, 1000 bp, Homo Sapiens; identical to SEQ ID NO: 157679

SEQ ID NO: 336306 - DNA, 1000 bp, Homo Sapiens
ttttttttttttttttttttttttttttttttttttttcatgcaacaaacatttattgagctcctgcctacttgctccaagcaggatgatgggctagacatggagcatacataaacgggcaagattcagtccctgaccgcaaggcacttacagtctagttgggaagggagacacaaatgtacaagaaagtatggtgcaacagcaacactccagcagatgttatagtgtgctacgggagcccaggagaaggcggagtgatcaattttggggaagacaagatgtggcagaagcgttcacaaaagtaatggtgtctgagcagggttctaagggatgcataggagttctctggcagatggttggggaaactttcaggctgaggaaatatctcaagcagacatgtagaggtatgaaagacacagggcagaggtgccggggcatggctctgtgagggcacgggtatgaggctagaggagccctgggtctgcctttacttacccgggtctgctctagccctagccctcgggagtcagggaaggggaattgcctaagtaacaaagggggcttttgggtggggtttcccacccaagttcaagaggaggagcagacatctgtgctactggagagcagtgtggccaggccagtcgggggctggcttaagccgtcgctgggcaggaaacccgtgcatgcctgcgtgtacccttggttgtgttttgtcctggttatcagcggtttcttaggaaagttccttgtcaaagctccaagtttcgcttggctgatccaagggaaaaagagacttagccgcagttgggtggggaaaccagagtgttcagaggcagtaccaaggggtacagggctggagccaaggcacttctgggcagcttcatcagctactgttcttggagcaacttcctgagcccttacccatcttgcttcccctccacacatcaacggcagtttgggcggctctgagaggaagccctgcacatccttcaatcttgcc

SEQ ID NO: 336307 - DNA, 1000 bp, Homo Sapiens; identical to SEQ ID NO: 157680

SEQ ID NO: 336308 - DNA, 1000 bp, Homo Sapiens
ttaatgggaagcgtcagtgccattgcctgggctctgggggcagctgtgagtccagatctcatggcttctgttcagggcctggtccacatccagcctctgaccttgtgcccaaaggccattcaggcaaaaagaggtggaagagtcttctcctggtaaagcccccaggaagagacgcccttgaggcttggcccagaggttaaggaggggagccaggcctaagggaggcagggcaagggccttcatcttcgacccttggctcaagaccaccctggacatactcagcttcagctgaagagggagtcccaagaccaggggcagatccagccctggccccgacccagaagacaacaccaccttttgatcttggaggtggagactgagccaagatgggttctctggtgtcccaagagcaaggaggtggcctgagcctgctgcctgcttgagtcccaggtccaaagagaaggcccagggctctgcatgaggctggggaatgtctcggagattgaattctgcctgagtccctggagggagaaatatcccgggatttgattctacatcacagcttctgaggctagtgggggcagatgctgagatctcggcctgtttgtccagccaggaatcccggcgcaggcagccatccagggcaggaaccagcggcaaccgaaggttggaagcggggaagagcagccccccaagcgcaatcctcatgatgggatggcgtttgctggtcaggggcccagagacctgtctcaggcgcagcacctcctccccatccacctccagcagcacagagtccccctccatcttgacttccacctggtgccatctcccatcatccagccgtggtccagcacccaccgtaagctgggcccagtgattgtgcagttggatctcaggcctgccgtctcgaagtcccagcataaaccagtcatccttagggttggtatccccataaaaaatcactccctctgggtcccaggttcgaacctcaaaggaggag

SEQ ID NO: 336309 - DNA, 1000 bp, Homo Sapiens
ttttttttttttacacttacattttttattctctttttctaattaaatgcacatactaagaagtaattaaatcttcaaataattgttgttacatatcttaaatctgctaaacattgagaaaaatatagtatatataattacataaaaattttatttaatttaaaaatcacgtttaaattatatcttagctatttacatacatgtttagtaactagtttacaattgtagctgatacttaacaaggataaatagggctattcaaattttgttaaatatgccttaaaattgaatccaagtcacattactataataaaattagcattatcattgatgtacgctacaaaataacttttcgatgttatgaaagctatattttgtagagtacaagaaccaagtgaagagggaaaattgtaagtgctgtgaaacttaaatcctggtgttttttcccattgacaactaaaattgatggtgatcttcatgaccagttgatttctattggttcttctagagtaacattgtgtgtggtcagatcaatacgtaatatcatgttggtagtgtcttcattaaaaggaagcgaatttttatttccgttatacgttagagtaactgcattgacaggagtagttcctttcccccatacatgaagggatccaagcctcgtttcacttttatttatgtaacctctcttcaatatagtgcttgttaaggtggtctggtttaaattaaattgtacagataaatataggtctctttcataggtgtctatactctctccatcatcccaaaacagagaaccctgtgccatctgattatcatctgcagcaacaatgagcttcatgtgtttttgtcgactgtaaaatgtgttttgagctggctcttgacatggtaggatgtgaccaccacggacatgtaggtttattgtgtcataagaagcattaaatgtttgaaattgtcctctgacgccaatatctttgcctgtatggtagtcaaaccaccgagc

SEQ ID NO: 336310 - DNA, 1000 bp, Homo Sapiens; identical to SEQ ID NO: 157681

SEQ ID NO: 336311 - DNA, 1000 bp, Homo Sapiens
ttgacgtgcgaatgcagcggcttctttattttttcccaagatcccgcaacaggagctcccacagtcagaataagaatccctccaacaagggtgtaagagactctaaccataaacagaaacccctcccaaagatgccaccaatttagcaaactaggaatcatttctcttacggaactaaaactaaacaccaccagagggcaccaagtgcaagtttgtatcagaagtagatccaagtagaaacctagaaattctctgaaaccaccaaactgttccatccactctcaaaattctcccctccacttgagagagtatttctgggctgcttgtctcaccctgccctccaaggtgccacatctagtgcatgagagtttttgcagccaactctccatttctcaagacccctggtccactccaggtgggatccccagagggaggctgtgcaggtgtgcaagaacaataaattaacacaacagcctgtcaggctccctttgggcacccacctggccttgtgaggacagcacggtgaagacacacatgaggcctcacttggtccctgcccccgtttccccaggcaggtctcaggaagtgcagatgggtttctgggctccgtgtcttacagagcaagagcagcatgaggcctcagtagatgtggcttgccacgtggcctccaccagcttgtctgatgcaggtacctcctagaacctgctcactgtggttcatttaccctcttcctcctgtcccccatatctctgggccatctgaccaccaaaagctggaggaatgttccagaacacacacatcaaactcagattggccagagtgaaaattaactatgaatgtttctactcaaaatccctcaaagcatctatccactgacttcattttagagacaaataaatctaactcccaggctgaggttcagacatgagagggctgtctagggtgggcaagaggagggtctatgtaccttccccaaccaccccactaaactcagccagat

SEQ ID NO: 336312 - DNA, 1000 bp, Homo Sapiens
ttgcatggacacactatttttcattttagcttcttacatcttcctttcctgatgccacagcagcacatggattagaaggttctagtagattccagcaataaaattatatatgctactcagaaaatatatggctagcgagatagcatccctgttctctcctacgcagtttacgtattcatgaacagtgaaacctttagaagcaaacagatatcagataccaatgatcataccaagaaatgatacaggagactttcacagacttgattctaaacctaatcctaactgatgatagggtggttttcatcacctccatccacatcctcacacgtccaaaataggccagctcagctgtgtcacagtctaccatgggaatatgtccaggggaatccatggaaataagtggctggaggccttgagtctgggcaccagactgtgtccctgtggagaaggcccttccatcatcaggcttagctggaaactcattcacttggaggggagaaggcaggcgtgcctcatcagaactggaggaggaggttgtggagaagcctttttcctctcggtgagtgtgttacacagcattcaagcggatgtccccacaaggaatttctgttggtgtttctggggtaatacttttaataatacgctctttaaatgtccctggagtgatgatcaaccgataagctatatatgtggggatgcaaatgaaagatgaggttcctatgcagtaacccaagatgatactccagtaaggataattatattggaaaagtcgtagttgtggcgggctcatcagaaaactgcaaatgatgaacaggagaaacagagggctgatggccacccagcagatcctccagaaccaccccgggctgaagccgagcatttccttcacgtccctgcagaactgagtgatgccatagaaccaagacacagcgactgcttcgatcagcgcgacagtgagcactgcgggccccgtggcatactcctccagcagcttcaccac

SEQ ID NO: 336313 - DNA, 1000 bp, Homo Sapiens
ttttttttttttttttttttttttttttttttggacattaaataggtttaatgaatccacttcctttattgcagtaacctctgtacaaagcagcaactgcaatactcaaggttaaaacattagaaaagcatttgtgtgacaggtatattacagtattatcaaaatattacattttcagacttacttagcagataatcatccaccagagcttaaatctttaaattatttccatagtcttaaaaaatatgtaatgtcagaatgcatataaaaagaatgtaaaaggaaacctaaaatacaaatggaataatgtaacaaataaatatttgatttcagtaactgttaataatcagctcaacaccaccattctctctaaactcaatttaattcttataggaataatgaactgtcaaatgccatggcataattatttatttccaagctatcatcaatgattagaactaaaaaaaatttggcataaaaaaatcacaattcagcataaataaagctatttttagcttcaacactagctagcatctctaagaattgttgaaataagtactataaccttgaaaattttcgacctggtgtctagtgttaagtgaaagtaatgcattttttttaagtgaaaagcttcttacattatttcacagacagtattacccaccccacattatgaatagttagatatattttatgtactttatacccacatgtatgacgcatgacatttggttcctgtagtacagatcacaatgttgttttcctgaatgggaaaaacttaaaaaaaaaaaaaaaaaaggtaagtgtacctgtgcacatttcaagatagcagcactcagtccatgccctattatccatcttaaaagttcacacattattgtttactgaataatatttctactgtctttacccccaaacattgcaaaacctgcaatggaacaatgctgtgagttataatgtagaaattttttttttttttttttttagaaaatcagttact

SEQ ID NO: 336314 - DNA, 1000 bp, Homo Sapiens
tttttttttttttttttttttttaaatggcaaagtctatttattatgttgttaaagacaactgaaacaaatggcatttaaaaactccagatgagatgataaggcaaagcaatgccagatgaattcatcaagataaaaagcagtatggcaatgtttttatcaaagtagaattcaagtcatgaagcattcaacaggaagattattttatattgataacaggtacaggctatgaggggaaagctttgcaaagcaacaacagcaaaacagaaagcaaaaactattagaaggaagattagctatggaagaaaaagaaggctgtagagaattttaacaattattatgtttcaatcaacaaagaacaaacaggataaatcttaaaaagtggtcttgttattgttacagaaagtgatcattctttacactacaagggaaaactcaaaatctacaaaagagaaatttcacagacaacaatctctactatatccatacgtggggaacagaacaaaaaaactaggtctagactagaagacagagagaaaccatgtcagaccagagcacattgatggctcacggtgagtgacccatggcctaaaggtgcctgtttagggcccaggagccactcacacaggcagagcagcttactccgtatgaaccaccaccagcacccctccctgcccggtgatgtcacccggtgggctgggctggaacaagtccagatgcctttgcctcaccttggaagggccacgaggagcttcctcctctatccccaagttctccacttatacacagcacctgacacgaaggttggcaagtttcccccgggccatgactgcacaatggctacccccagcctctatggcctccgagagagggctcctagacagattccagccctatagggggagggaagcaacactgcagttgaccttgaagagatcactgtagggggctatagaagggattgtgacatttattgttctgaaaatgccatcaaagacagt

SEQ ID NO: 336315 - DNA, 1000 bp, Homo Sapiens
acagttgttaatctttcaacaacttttattgaacatgtagagagagaaggggaggttattaactctcctgctcgtactgggataaatgaagaagaaggcataaggacaataaacatggaactccactgcaaatggattttatgcagctgaggaaagtttgggcttattagtatttgctccagcgaacctccaagttttctccattgcggacaacgtaactaccagctccttggctcagtggttcgcctccactcagaagttcccagtaggttctgtcattattgttggcacataggccctgaatacaggtgatatagggcccccatgagcgctcctccattgtgaaaccaaatatagtatcattcattttctgggctttctccatcacactgaggaagacagaaccatttagcacagtgacattggtgaaatatgtttcattgattctcacagagtaattgacggagatatatgattgtgagtcaggaggtgtcacagttataggctcatcagcggagatgttgaagttacctgaagcagagacgcaagaagagtctttgttaatatccaagaaggtctttcccatcagggcaggtaagacctgggctgcagcgtttggattgctgaatgctccttgagaaatttccgtgagcactgtattcagagtttgttggcaattccagtcattttcattataatagtctgatgatacaaagagggcctgcatggcttctcctgtgctaaatgtgtttccaatgagaccattttcttttttctcagacagaatcttttctaccagtgactttgtataaatactgatgttctttaaactgccttcatctgctttgatctgcccatttattagactcttcttcacacaggtcagagccaggacagccattgcaccagtatctactgagaactggctaccaaaataatagtttttattttcaggagtgaagtggttgacaacttcggcggttgagtagttcccattgaa

SEQ ID NO: 336316 - DNA, 1000 bp, Homo Sapiens; identical to SEQ ID NO: 157682

SEQ ID NO: 336317 - DNA, 1000 bp, Homo Sapiens; identical to SEQ ID NO: 157683

SEQ ID NO: 336318 - DNA, 1000 bp, Homo Sapiens
ttttttttaaaacaaacaggtttattgataagcaggaatgccgtccagcatacagtgcaaactttcattgtcttgggatcaacacacacacacaagggaaccaaggccccacagagtctccaaattcatcgcttcccggctctgccctgtgatgccaaggaagcctgaggttctcccaggactgtccaccagggggcaggtgcgctccatcatgtcctcatgtgggtccaatgtgggcagaaacctggccagtcccagcagtctgactttttttttctttaagagacagggtctcactctgttgctcaggctggagtgtagtggcgcgatcatagctcgctgcagcctcaaactcctgggctccagtgatcctcccctcagcctcctgagtacaggtgcacgtcactgcagccagccagtctgacatcttgattccagggtggaaaacccttcttgtctccatggtaatggctgggctctcccaccctccaatagttcagctgccaagctcaagtccagtggaatttatcaacaatttatcaccctgcccctgctctgctagacaatttcatgccttctcctttatccccatgctcctgagactgagcctttccaggagcccctcaacctgcttcctcccagaatccgggcaaggctacactggtttcccctctgcagggccctggccctgggagggggaaggctgactctaatggggaggaatcccagcttcagtggcttcaaggcaggccattcaacttaccgaccttggctacacacacccacgacacgcaacacagacgcagacacaagactggcacttgggatcacactggccatgtaccaaagtggcagggcagcccgtttggggcccaggaattgaaggtggggagtggggaagaggaacccacccctctgggggaggaggagggtctaggctgaggtaggagtagagagatggctacgaggactcagtcatctctagttcctgaaattccct

SEQ ID NO: 336319 - DNA, 1000 bp, Homo Sapiens
tttattaaagtacaaaattgttggaatttagctaatagaaaaacatagtaaatatttacaaaaacgttgataacattactcaagtcacacacatataacaatgtagacaggtcttaacaaagtttacaaattgaaattatggagatttcccaaaatgaatctaatagctcattgctgagcatggttatcaatataacatttaagatcttggatcaaatgttgtccccgagtcttctgcaatccagtcctcttagaaattggtttctctctttgggagattcagactcagaggcagccagaggggacaggtcaagagctgaaataatcacataactactctaattttcttcattctattgactgtgtcaagttatagacacagccaaagtgtttttctttggcctctgatgatttgagaagatgaagaacatgagcaatttctcattgcttaaagaaaaacttggcacataagaggctgagtgtagtagagtatctgtactagaaccataaagttctatctgatggtaaattatgtataaaactaagataaaacagataattatgctctatctcatatctactgaaagtagaaaaggaggaagagtgacacttttaaatcaaactgctctagttttagcttagtggatggttaataaacacactgctttacgctgaagtgatcagatagctatttctacagttcagaagaacttaaaaatcaggttttaaagacaaaagaaagcagactcaaaacacagacaaagcagagaagaaaacaatgcccatgagatggtcactatttagacagtattataaaaagctaaagaacacttgggctttacttcactttgatgtcttgtactaaaaacaccttccccaaactaaattcagaggggaggaagttaagagcttcaggtaactttaaaaccagtcttgggcttggtaagataattacttaaaataatcgcctcacattttaaaacagatcatcttcatctga

SEQ ID NO: 336320 - DNA, 1000 bp, Homo Sapiens
cacagttccatttttaatgtttaaatttcatttcaaaaagcaggtctgtagtttgtaaccatgacaattaaaatctgtgctaatgcacggcagtctataacaattctacaagccaatcagacagtacgtgacatttcaatgagtaaaaaagagcataaaactgtatgtgtaagaacaaaatgttaaaaggcctaccacaataataaaaaaccgtcaattacatcatcacattaaaataagccagatgtacaaaagtctgagacagagaagacaaaaggacaacacaagatatttgttgaaaaatgtttgtgctctttgggcacttaattaaacattgcaaaatcaacatcatcttcttcttcatcagactctgcaaaatattttacttctttcctagcccgaccggttcgtggcagagaaggtggctcagtagggaagtctgaggggaagatgtccacatctgaatcctgatcaaaagatgtcttcttcggtttcttgcttgttgttttggatgttttcctgccagggttataatcgccttcattttcagagccagatgctttccttttctttgcccctcggcctttaccttttggtgttgtagtcttctttggaatgccaaattctgaatccgagtcagagtttacagcctctactactttcttctgttttggggctctcttgggcttagggactgtatctgaagacggttttccctttttagcagctaccgttttacttggaactttatctgtctgtttcagaccaaatgatggtgaaaaaacagaagcagaatcttcttcattactgtcaaatttagctgaatcatcttctgacttctgagaatatgaaggaaatgagaagagatttccaaaatcctgactttttttgtcatgcaaagatttttctggagtggcttttgatttgcctggtgaaaatgtatattcatctttatctaacccatctgaaggaacaaattcatcttccccatcatttgtta

SEQ ID NO: 336321 - DNA, 1000 bp, Homo Sapiens
ttttctacacatgcttttttattagtatagataccttcacagacaatactgtaatttttagaggagttccacatcattacatcaacagtgtgaatttctaacagaggcaaaactgagcaccatagtttacaagtagaaagaccatgcttgaggacaacagaagttcactaaggatgcacgattgatctgagaagtttttaagcctcgtcctcgccctcctcctcctcgaactccccttgttcgtcggccgtggcgtcctggtactgctggtactcggacaccaggtcgttcatgttgctctcggcctcggtgaactccatctcgtccatgccctcgcccgtgtaccagtgcaggaaggccttgcgccggaacatggccgtgaactgctcggagatgcgcttgaacagctcctggatggccgtgctgttgccgatgaaggtggccgacatcttcaggccgcggggcgggatgtcgcacacggccgtcttcacgttgttggggatccactccacgaagtagctgctgttcttgttctgcacgttgagcatctgctcgtccacctccttcatggacatgcggccccggaagatggcagccaccgtcaggtagcggccgtggcgcgggtcgcaggcggccatcatgttcttggagtcgaacatctgctgggtgagctcgggcaccgtgagcgcccggtactgctggctgccccggctggtcaggggcgcgaagccgggcatgaagaagtgcaggcgagggaagggcaccatgttcaccgccagcttgcgcaggtctgcgttcagctggcccgggaagcgcaggcaggtggtgaccccgctcatggtggccgacaccaggtggttgaggtccccgtaggtgggggtggtcagcttcagggtgcggaagcagatgtcatacagggcctcgttatcaatggagtaggtttcatctgtgttttccaccagctggtggacagagagggtggcgttgtagggctccacca

SEQ ID NO: 336322 - DNA, 1000 bp, Homo Sapiens
ttttttttttttttttttgtcacaggaagaaagaaatcttgcataacaatcttttctttcttgctggaataaactgaagttgtcctatctatctggttttccagcttcaaatgtcagacataactaatctctttttcccttcttcccttttctagcaaacttccagaaacaaaacagacaaaactttgtgatgataaatatcacagttgccacacaggccagcagaaacccaatcacatccaaagagtggtactggaaccaggtgaggtcatgggctgcaactcgaaggtgtttggctcctttgtggggcatgacaaattcaatccagaagactgctcgatccaggggctttactggttgatcatgttgaattcttgataatttcataatattctctttatataaaggatcattaattactgtcttcagtgcattcagcaggtctgtactcgacattgtgttgaagtccaatctaacagctgctcccttggccttcatgtgagcaatgttatcaggttgatcaaaaaacaatggaatgcccaccatagggatcccatggtagattgcctcatagatgccattggctccaccatgagttataaaagctctggtttttggatgacctagaaggtcattctggggtatccacttgtacagccgagtattgagacctaaggcatctggtttattcccgtcaaatctccacagaaccttttgtgggatcttggcaagggctgttgcaattacattggccctttctgctgtcatgttacttatcactgaccccagagaaaacaccacaacaccattttctccagagctctgtacaaactcctccatttccttaggtaggggtttggcaggtttgcagtggaatcctccaacaaaatcaacgtttggtaagaatggatgaggaaattgaaaactccaggagtttcgcataagccatatgtcagcttttcccattgtctcaaataaggtagtgggtcttcctaaaact

SEQ ID NO: 336323 - DNA, 1000 bp, Homo Sapiens
tttttttttttttttttttctaattccagaaattatcactttactatacaaaaaaacctaaacatttacaaaagaaaataaaaagaagttgcatttttaggccacattgggaaagttgcacaggagtctgatgaacaaacttcgtgaaacatctccgtaccatgccagtactatacagagaaacccagtcaaccattataccataggttgaggtatttagtacctgaaagtcaacccagtgctccctttgcttattatttgtctataaaaatataaaacccggcatctttacaaaacctgaaattattgtcaataaactatataggaataaaattttgtgaaagggaataaaatagaagaaagatgacaaaggtcagctgtcagcaaatattaatgtgaaattttcctaacatgcattaaattataatagtccaagcaacactagttattttaacaatctaaatatagagtgttgctattttaagcaatcttgctatggcataattttattttacatatgtacaaattatgttattgtatatacagatcaaggaactcctccagttctctcatcttgatggcagttactgttcttcaggcagcaagttttactttgacttcttgctcacagcaagggacatagatgggcatttctttccaagttcaatacattcagggaagtctgcctctcagctcattgtttttctcaaggaatgatgagcagtatcaaggatttgcacagataaatagtgtctccagttgaacatatcaagcattagctacacttttgatttctgtgcttctacaagactatatgaccccttcatgttggcttttcttgcaaagtaaattatcattccaatggcaggtattattaaggaggatgcaaaatagagcacgagaagctcaggagaaaaatagtctttgttgttttctcttccttgaacatcaagtgttaaacttcttaattgtgagccaactttgtttttagattcacatt

SEQ ID NO: 336324 - DNA, 1000 bp, Homo Sapiens
ttttttttttgagatggagtcttgccgtctcgcccaggctggagtgtagtggtgtgatcttagctcactgcaacctctgcctcctgggttcaagcaattctcctgcctcagcctctcgagtggctggaattacaggcacccaccaccacgcctggctaattattatattgttagagggatgaggtttcaccatgctggccaggctagtctcaaactcctgacctcaggtgatcaacctgcctcggcctcccaaagtgctgagaatacaggggggtgagccaccacgcctggcctacaaatattgattctatccatggtttggtgaaaaaccatacaagttcagcttattctctgtggcatcagcaggggtcatgtatcaggatggcagagtgctgtccagcgtgctgcagagggaaagtgctgagtgaacacgagttgttacccacttagctgtcccaagttaatcggaatgcggatggacgccgtgcataatcagcatgaaattttatgaagacctgatttgaggaagccacgaagggagctatgctggtgtcgcctccgcagtatggtccagaggatggagagctggcgttgggcccatcatagagtgtgagatagttctggacacagtctcctggatcgtcaatgctgatgaagtagaagttgatggtgacaagccttccagcaggagcaacaaggacccactcgcagtacgtgttgtttgggtatgtgcctggatagccggggctggtgaatgagcctctgtctccataaagagttccaccacatccagagggtgatgaagtccagatgatttcatatccacgatcagaagttacactatcactcttaaatcgtaggtatagttcattattttgagagaagacagggtttggcagcagagttccacagtacttgcccagtaatggtgaattgctgttacttccatttctcacctccaagaaatcgtttctgcattcaactgagttctcgatgccaa

SEQ ID NO: 336325 - DNA, 1000 bp, Homo Sapiens; identical to SEQ ID NO: 157686

SEQ ID NO: 336326 - DNA, 1000 bp, Homo Sapiens
ttttttttttttttttttttttttgtgtcccctcagcatttattttctggatggtcacaacgtattcaatgtgtccttgagacagccacccagcccttagggtggtccctgcgtgtcctggggcgggcgacttcctgagggtgcagtgctggaaacagagactgcttcgagcctggccaccttccctcctgtgccggctgcttctaggagatgctgtgggacggtgcccggcttcgcggtgactaccatgccctaagggagcagagcctccaggatgcccccgggctgcgctggacgctaagaccccagcacctaatcacagtcagcagcttccctccactgacagtgatctgcatggtccattcctggcggcctgggggcctcgctacagttcaacctggctggcttcccgcttcctccccaggggagattagtgtcgtgtgtaaacttggacaagtcactgggtcctctctccagggagtgcctggagaaattcaacccccagctcagctgcagcccttcctgggtcagctctccacccagagaccccggagcttgcccgcagactgcccggcctgccccagctctgggaaagtgaactccagagtatgcagacatggagatgcgcatgctgatcctgggcatgagggctgggctgcactcgtccattctgtgcatactgccttgaatttttcatatccatcatagaaaaaagtgattaaaaataaaggatgagataaacttggagagagaggatgtaagatgggccctgcttgcccgtcctgtccctgcctgatggcgagacagccgccacccctcatcgcccctcctctgcggtgggcggctgcaggtgggcgaagctcaggaagacctgttccagcgagatctggctcacggagtagtcgtccacgccgtacttttccttggctttctccagaataccgaaaaccttcgcccagctgaggtcacggcccggcaggtggtaatggaccatgccttg

SEQ ID NO: 336327 - DNA, 1000 bp, Homo Sapiens
ttttttttttgcgaggctctgagggtttattgtctgccccagtgaggctcctgggcttcctgggaggaactgggggaggaactgggggctggtcacacaggtctataggtcccattgtagctaaaagggggaggcatcgagcagtccctgtcctcagggatccagcgctggacgtagttggggccgttgtcccgaggccacacgatcacagtgtctctggatgccagggaggggtcctctgggaagaagttgaatggccggagcaggaagcccacggagttcccaggtgtggctgtgttgggaatgtcctctgagtgggggatgtgcaggaagcccaccgtcacccaggccaccaggtcctcattttcaatgttctcgttgttgtgaagaaactgctcaaagaccacgggcgggtgccaggggtcgttctggtggtagatgctgctgctgcacagctccgactcccggtacttggtcactgccagggggtaccttgcccaggtgatggcctgctcctcctgccagcctgggggcagcacctggtcggccatggagtggatctgcaggcggtacgtgcgcttgtggccccaggggttctcctgggggctggtaaagagcaggtacttaggcagcttccttttgaagcggaaggccgcctggcgctcccaggagtactgcgtctgctccagagttggctggaccacgcggtgtcttgggctccaggggttggtgatgttttctagcttcatctgcagtgtctggaagctgttcttggtgcctgccacatccaggtctacgcggtagtgcaccaagtgagtgtgtatgttgccaatcaggtgggtgtgcaggcgagtgccgtggcgcagcccctcgggggtgtagaaggtggcgtggacgtagccagtggcatgcatcttggcctccatcaccccgttggggtagaagataaagtcccaaatgtaatcataattgtagacagttgaagttgtccgcagcacca

SEQ ID NO: 336328 - DNA, 1000 bp, Homo Sapiens
tttttttttttttccttcaaaaaatagtttattctgcacatttcctagtaggctctctgcccaccgttccagggtagcagctactcataacttgtctttctctccaaaaccaagagggccttcccaacagaaaaaccttcagttcccaaagcagcatcgattcttcccctcaccccagcaaacctcggggtggaataatgaatcattcaccttctcccacccctcactgccccgccccaccttcatttgccaggactgtcactggctgatggtcagattttgtctttttcaacttggataccctcaagcatcccagcttttggaggcttccctgggcaacctcatgggcttccacattgaccaggcattacattcagcatccttggacaaaccacccatcagagcagtgggttgtggccagctccctccacccccgactccgccccaatggaagaaaccagaggatcacagggccccaggctgtgccgcctgcagagccaggagctgctgggtgcattgcaacgttctccctgagcaaatcggcatggtcaccacagtccagtcctcagtcaccgacagctctgcccctcggggtcagatcccaccatcggtgctcatcaagccagcaggcgaggaagcaacagtaactcaagtggccctccaagggagcagtggtgaccgtcacagaggtgacactcgtgagcaagctgggccgtgggtgtggtaagggattcctctccgcctctgtgctccccacttgggcaagaggagggtgcatgcgcaggctgggggccaatcctgcagggggaaggggcagtcctcattttccttggagagaagaggtgggcagaggacctcgagctatgcgagagcatcctccagaagccctgaaacctccagctgggtacttccattcattttgctttccctctctcaaaaagagaatccctggcaaccagtgctaaacatggcctatcagtgggaccctcctagtgattca

SEQ ID NO: 336329 - DNA, 1000 bp, Homo Sapiens; identical to SEQ ID NO: 161191

SEQ ID NO: 336330 - DNA, 1000 bp, Homo Sapiens
ttttttttttttgaacttcctaataatgactttattcactattttacatttggctcactgctagaagacagttacaagcatagaaaatggacccaaggacaaacatttacttgggagggaaataacacaaagaagcatatcaatcgatgtctttgtcagtcattctgtgaccaaccaggaggggggatggctttgctctagattctggcagccagtagaaaccatctctagaaaccatctcatctttatccataatggtaatagagcacagtgttctctagacatgtagatctgccacatggaaagctatatcatgatttcttcttgcagagtgggcagtttcagcaggacctgtaagtttgcttaggttttctgaagatatcggcattaaagacttacacattccttttgtcctcctaacgtatttcgtaaccacactctcaacattccaataagttttgaacttggaggcacttagaacataacataattacatttctaattttgtttcagtttgatatgtgtcccttccttcctttttttggtagagacagtgtctcactatgttgaccaggctggtcttgaacacaccaggcctaaagtgatcctcctgcctcagccttccaaaatgcaaggattacaggtgtgagccactgtgcctggcctatacttcctttcttaatcaactttgtttttatttatttatttatttatttatttatttatttattgagacagggtctcgctctcttgccctggctggagtacagtagtgcactcttgggtcactgtagcctcgacctccggggctcaagtgatcctcctgccttagccccacaagtagtggactataggcacacagcaccatgcccatctaagtttttgtattttatgtagagacaaggtttcaccatgttgcccaggctgatcttgagctcctgagctcaagtgatctgcccacctcggagtcccaaaatgctgggattataggcgtaaacca

SEQ ID NO: 336331 - DNA, 1000 bp, Homo Sapiens
taaggtgtgcacttttattcaactggtctcaagtcagtgtacaggtaagccctggctgcctccacccactcccagggagaccaaaagccttcatacatctcaagttgggggacaaaaagggggaagggggggcacgaaggctcatcattcaaaataaaacaaaataaaaaagtattaaggcgaagattaaaaaaattttgcattacataatttacacgaaagcaatgctatcacctcccctgtgtggacttgggagaggactgggccattctccttagagagaagtggggtggcttttaggatggcaagggacttcctgtaacaatgcatctcatatttggaatgactattaaaaaaacaacaatgtgcaatcaaagtcctcggccacattgtgaactttgggggatgctcgctccaaccgactgctgtcaccttcaccgttccagtttttaaatcctgagtcaagccaaaaaaaaaaaaaaaaccaaaacaaaacaaaaaaaacaaataaagccatgccaatctcatcttgttttctgcgcaagttaggttttgtcaagaaagggtgtaacgcaactaagtcatagtccgcctagaagcatttgcggtggacgatggaggggccggactcgtcatactcctgcttgctgatccacatctgctggaaggtggacagcgaggccaggatggagccgccgatccacacggagtacttgcgctcaggaggagcaatgatcttgatcttcattgtgctgggtgccagggcagtgatctccttctgcatcctgtcggcaatgccagggtacatggtggtgccgccagacagcactgtgttggcgtacaggtctttgcggatgtccacgtcacacttcatgatggagttgaaggtagtttcgtggatgccacaggactccatgcccaggaaggaaggctggaagagtgcctcagggcagcggaaccgctcattgccaatggtgatgacctggccgtcaggcagctc

SEQ ID NO: 336332 - DNA, 1000 bp, Homo Sapiens
gacttgaaaacagtttatttaatttatacaaataactactaaatacaaaaagtagattaaaacaaaatagttatttttttctggcagagtttaaatgcacgtaatggataattctgaagaaaatgcattttccccgtagcgttcaggactaaaattctactgaaatctttgcttctaaatcgataatatattcggtggtgtcacgtgggtaatggctaaatacgttctgcatatgaactgaaaaaaagttacagtctacacacatacaaatgtgaagcacttaaaatgtgattttaactgataataaaagaaaatgtccattttagagtatagtgttaaaaacatttctgtaataaaatcataagaccacataaaaataagctttaacatatgcacaaagcagttttgtaaaaactactaagtgcacaagtaataaataatttgcaaagttgtgtataaacaattcctaatgttcggcatcattgtaaacatcagcacatgtgtaaaatgcagcaaagtctgacattacattttgttttgccaaattgaattcctattatccaaagacagaccagtggagtacgcagccaacattttggcaagttgggtctttaaaattaagagtaacagtgcaagtaaggaatgcaaagaattcctagtgcaataaagaagagaagcacaggcaatattgctgattaaaaattcaccacctccttgagtttcccgtggggagtgtctaggagacttgtgaaagctatgcaaagccactgacttaatgcccagatctcttttaggatttctctgtgttcctccagtccctacctttgcaacagtgtctgtccaacattagtctctgcagtgtgaacagttcgtgaaatgcccagttcacagtcatcgagcgaggttagggtggttttgatgtctccccaacacatggctgggtacgacgtctgccttgtcaaagcagccatttggggagggagacagatggattccattc

SEQ ID NO: 336333 - DNA, 1000 bp, Homo Sapiens
ttcagatccactgagtctggagagacactcatgtcctgggcttagatgcttgactctttagggggcaggtccacattggtgacagaggtcaccagggaaacgagacagtccgaggtagtgccgttgaccgacctccgaatcagggacacccgctcctccacacagcccgcggacaagcgagcctctgcatcatggtcccagcactcctcgatggtcacacaaagctgggccaggcccgggtgtttcaaccagtgatctttaatggtgggcctcatcttcttgtgcaccaccacctcctgcagctcctccaacgaagggtgctggccaatctcttcctcaaagggcagcatgtactcatccacgggtccgtctgcagccttgcagcgagacacaagctcccacagcaccaaccccatggcatacatgtcaatgcgcaggaaggcatctctctggaagttgatggctccctcgagcacctcaggagccatgtaccgtctcgtgcctacctgtccgtgggtgtcccctggaggtttccctggctcaaatcgaacagccaagccaaagtcagccagcacggctgtgaggtcgctcttcagcaatacattcttacttttaaagtccctgtgggcaatagacggcttgtggccctcgccacggcaccagggcacatcctcatgcaggtatgagaggcctcgtgacatcgtctctgctacatgacacagttcgttccatgtgatgatgttccccttgaggtaatccgtgagggagcccttgtcatggaaggccgtgatgagccacagctctacttcgaggttggagcctcgcttctcggcagcaatgaactgtagcaggttctcgtgcttcatgccaggtgtgctgaagatctcccgttcactctgccacgactgcttgtcctggagtgggaagatcttgacagctacaaagtcattcatgagctgggccttccagacacagccaaagcgcccccgagccttgatct

SEQ ID NO: 336334 - DNA, 1000 bp, Homo Sapiens
tttttttttttacagaactcggtcaataatttattagtaaaatatacatttctcattattaaagaataaaagctttcagccctgctgaacacacatctgaggtctcaagaaaaccagacaagatagctgactctcccacatagccctttccataaaggcgattcctaagcttaaacacacacaaagctggggctgtccctcttgaatcccatgggaaacaggccccaagatcaggggacctggagtcgggagcttggggtgcagtctgctcactgacaccctctcgaagagcacgcaggggaacctggtcctgggatggagtctttctggggatgccccacgtctgtgctgcctggaaccgggtgcccagggcagccggctcagcaggccccagagcaggggcaggtgtggctgggaggggctgtatatgtggcctcctgaacacagcgggagaccagcggccacctggagacacgtacacacacacgcacccgcaagcacacagctcatcccagcctggtgcctgcagacagctggggctacacgtggccaaggcggggagaaggaattggctgagggcgtggacagcaggagcctctcaggtagatgcattcctgaggttagaacagcagctgagcctgcaaagtcagggtctagggctgagcggcactagctggaccgtggaatgctggaacgcatggcttctctgccgcaacttctccaaatttccacacaggcgcaggtgcccccctagggtgctgtgggagctcggctccttgcttcctctggatggggggcttcagggcaacctttgggccaacagcaccctcagctggaccagggttggccgcaccagccccgggtttgactgggggcactgggggtgcgaacgttggcttgatgacctgctttggtgcctgccgggtgtagacaggaactgggaagggtgggctggacacagtgaccggaggagcagggggcggcctcttcagagccaccg

SEQ ID NO: 336335 - DNA, 1000 bp, Homo Sapiens
ctctttaaaatgccaattatttacatctgtttcaaaaataaatttggaatgggacattgtgctgtttcaccttcaatgctgttaaaaattttaggaaaaaaaatgtcagaaggcctatctacaattttaactactacttaagcaaattactcatctttagtggttaccaatgatcagtgatgatatgctgaaaaaaccgtttaaatattttgataaagacacagcttttcttttccatatcagacagaaaacataattagcatatttcagatatatgaaaaacacaaataagtaggctacaaataaaaagaatcatttcattgacataatttctatcaaagcatgaataaaatttcacctattaattgaaaaatggaattgaattagaaagtttaaaagacgtaagcagaaaccagacatctacatcatgaactctgaagtagtatgtgctgctatgtccagtttgcacaacacttaactgtgttcttcagtatagtcacttgtgcccgtagcagccatgtgataaagaaaaaatgagtatcaaaaccaactccatcgtaacagaaaggtaaattgattttcatttcaaaactgcctgtgtaaagcattacagaatcctggaccactgaataccaccattctctgttatcctgagtatgtcaattaaacagtaatttttaattaagagcggaaaaattttataatacaaagaaacatccatattgcaatttctgtttacaattgcacacagaagtacagtgtacgtaagaaatacatgtctgcatataacaaggtatgtacattggcaagtgatgtctccaatgttgaggtggtcgagcctcctagccttgattggcagttgaaaaaaatatatttatttcaatttgtggtaaaagtttattgagagccaagtttgcctgcaagtgaagaaaatgcagcaacgaagaacagggaacacggggcacataataatattctaagactttgtgccattaagtta

SEQ ID NO: 336336 - DNA, 1000 bp, Homo Sapiens
ttttttttttttttttttgagtttttcaaattgctaatttaatgtataaaaagcagctaaacactggtactttataaaaatgaaacagcattttgaaacaaatgttacagatctataaatattcattatatagaataaaccctagttacttgcatgcaccacctcaaatcatatttctttacactgacctattatatacacaaagtatacagtggttaatgatcttctcttctgtttgtttgtttgtttgtttgttaggaaatttcctcaataagccagaaaaccttaggtattattttcacaaaagttaactcaggagaaattgtaaggaagtccttgacccatggagaaggtcactgtttgtttgtttgttagatacgtgtgtctgtcataaaacaaaatgacaccagtaattacttggtaatttaaaaacaagttcataaaaagaaaatacctgcaggtaatttttatggtcagttatattctataacctgaacactgaaaactaaaaacttttacttacaaactattattatctgagcacagcacagtgctttgctttaattggaaataaaaatgcatgagtgagtggtagtcagttatttgttaaactcccaactggggtttctgttgttactgaagaaaaaaacaaatattccaagagtacaaatatgctgacctcagagaggcccagtgcactaatgtgtttctatgttatattagcaacagaaaccttcctgacttgccaggagagcccccgccgggcagccctggtcactgctagatcttgagagcacagatttcagtatagtattcatgtgaaaccagcccttcatgtaaaaagttttggtgtgtaaaaaaggcaacttaagcgaggctaattgcccttaccagcattgttgccatgaaattcctttatacagcaagttcttctattcatactgattccacttatgtgcagcacatgagagctgccactagtctacccagcacctttgtg

SEQ ID NO: 336337 - DNA, 1000 bp, Homo Sapiens; identical to SEQ ID NO: 157688

SEQ ID NO: 336338 - DNA, 1000 bp, Homo Sapiens; identical to SEQ ID NO: 157689

SEQ ID NO: 336339 - DNA, 1000 bp, Homo Sapiens
ttttatgaaataaattttactaagcaataagcaataatgtagaaaaatacattttacctacaaactcaataaacaagaaacaaagggttcatatttagtgcataattacttactagtggctacagaggggtttctaaaatttacaataagtgcctgcatcaaacaaaaaaaaaagtgagaagcattcacaagtttaagagaagtgaatgaaaaatggtaaacagtacttaaacagtgcaggagggtaggaaggagaggtctccataaaaccacaaaggaaaagggtagctcctacagagcaggtttcaaaggagaggatcctggccatttcacaagatgagaagcatggacagcactggagaaaaacacattgtactttgcatccatttccaatacccagcgcccaaagtcaggaccactgggactggatttgccctcagcttcccagacctggggcaatctcaaaccagtccatttccagggtcgtcctcctaccacctcaggctctgcctcttccaatatacctctatgtccttcactttgttccaattgccctaatttggggatattagattccctggccactcaggaagtacagaaaagagagcggtctaacgaagccgcccttttctgtacagttcctcaactcttctcctagggagaggcgtgaattctggggagaagcacaatttggatcgagctgttgttttatcaggagaattttcttctgggctgagagtctgaagagagacaactacacataaaaggagaatcaaagaaagcagaaatattggaattgccacccaaccagggggacagagcccagttgagttaggctgggattgaagcagcctgccccagagactcactgggaaagaatgcccttcagcaattctccatatctttacctcaaaatctccctggagcagggcatcattgtttatgtacagtagcaaatggtaagtagtaatatcttcaggcctgtcatggataaaaatac

SEQ ID NO: 336340 - DNA, 1000 bp, Homo Sapiens
aggggagcatggctcaggtggccagattgtcagcagggaggccagacatgcggatttgggagctgctcttgctcaggatggagagctgggtgcccccattcaccccactgctggccagagacgggtgtcggtgcttgaagtccacagcgaagtaacggttcaccttccagcttcgccattttcgcttgatctccgcttgtacctcaccattcagaaaacagtagagaacagccaccacaaagccctggaaggagcccagccccagctcaaacacgagtctttcccttttgctgacattctctggggagaaggcaaatactgtgtagtggattccgaatagtgggatgagcagcagggtggaccgggccagtcgcaagtagatgctggactcattgcctcccatgtctggagactgaagtttctgcacaaggatgacgataatgccaataaaaagcacaaagttaaccatgatagagccaaccacagggcctttgatcacccaccacagagctgtgctgtcattcatatcccagcagcctgtgtcatcaaagtagagtctcagcgtagcccacactgtcacacacacagttggggtcccccagccaatgatggtgtaccagtagaagtatctcctttcagggaagaaggtctccaccagcagagtgaagaggtacaggccctcgatgaacagccagaagtagttggacacaacacagtagtggaagaaaaccatgacggccttacattccacagtggagatgaagcagtggttgctgtcctgctccgcatacagaatccagtctttgatgaagacggagatcgccctcagcatgaacgacacaaacaggttcatgtggatgaagttgcgtgtgcagtgcagcttccggaagcgacaaaggatgaccatggcagtggtgagggtgacgagggatgtgctgtagccaaccgtgtagagggccttcactgacaggtagtaataatcctggtccccagtctcaga

SEQ ID NO: 336341 - DNA, 1000 bp, Homo Sapiens; identical to SEQ ID NO: 157690

SEQ ID NO: 336342 - DNA, 1000 bp, Homo Sapiens; identical to SEQ ID NO: 157691

SEQ ID NO: 336343 - DNA, 1000 bp, Homo Sapiens; identical to SEQ ID NO: 157692

SEQ ID NO: 336344 - DNA, 1000 bp, Homo Sapiens
tttttttttttttttttttttttttttttttttttttttttttttgccatgagcttgttttattggagtgaccttggctccctccctctgcccctactccaacactgcagcaaccccatctcttacgagactggcaggtggagcaggagcctctacacagcctctggctcttaggtcccagtcatgtttgcaccccctcaaaggggcaggaccagcccttcctttcagtgtccataccaggggccttccatgtgctgatgggtgatgtgactgtggtcagcaggcttgggaagtgctgctgctgtagcttgagttgggctggggtcttggtaggacgctgatctcagaagtccccaaagttcactgtgtaggtctctactgttgtgaaggggaatgcctggccagtggctatctcctcctctttctcctcctcctcctcttcctcaaactcgggttccagctgggtctcaaactcaggctccaactgggtctcaaactcgggctccaccttggtcccaaactcgggctccacctcggtcccaaactctgtcaccacctctgtgtaggtctcagtctccgactcctcccagccagcggtggttggcggtatgaggccccagggctctatggtagtgctcagggtggtggcaggggcagggggcagcgtgggaggcacagtgtgggggcctagggtggtggtggcgttgaggcgccgcagccgcatctgtgcccgaagccgcaggcggtgttgtaggcgtcgctgctgcaggcgtcgctgttggggggtcatagggcgcgatgggtctatgtgtgggataggccggttcccgttcatggccatgatctcccggatgcgcttccagttggagcgagccaggatgaagttgcactgagtggccccgatgtcatagtcaacattgcaggtcttggcgctcggggtgtagccctccgcgtgggctgtcacgcggtactcacccgggttcaagattcgccagtaatc

SEQ ID NO: 336345 - DNA, 1000 bp, Homo Sapiens
catttggagatattttatttctgtgataaggaaatctcacataaaagtctttatcatttcattaattcacaaaaagtgttaaatcagttaaaattaaagagaaaagttcacaccgaatgaaagactcgttttgtcttctcttcccctgaagtaatttaaactcccaaagcagcacgagtttttgaaatcagtttttgtccctcttcagcaaagcagacttcctgttcctggccttggcagcatttctccaacaggcctgagaaatctgcaatgacagcctcaagttgttcctctgttatttgtggcttttgcttcacaaggttaatgagaaactcttgcttcatcgtttgcagcgctacaccctgagcttggcacagatccttatggaaaatgaacttgtcatcagagaatgcaggagggacatatgtttcatccaccaccaagctgctgaagcatggcctcctgttggcatatgaagaagtgcagcactggccaacaccagggtttactggagtcatttcatgtctgatacataagtgtccgataataatgtcagccgctccctcgccacaggccaatagtttgtcctcactgagttggcaacaagtggctgctgtggctgccatttttctggtgatggccatcagctccgacgaggtcagctggggggctttctttgtgtaagcaacgagaaacgcattttgtaagtaatattctcctagtttctggaagaggccgcagcttcgctttgccaatgcttggctctcctggatgtatttctgtaattcttcttctcctttatcttggcattcaagagggttttcagtctggaaacacttctccaataactcctggtatcctttagcaactcttagaattactgagacagcaagctgaggatgtcttcttgaatattcatgaacaaaacttgccaagaagatatttttttcccctgaagaaaattggttaaaatctctatctcctaaaaacctgtttagat

SEQ ID NO: 336346 - DNA, 1000 bp, Homo Sapiens
tcaagatgtgtcaggtgtttaatcatcattgtggggggctctggttgtagaagaaagcttggcaaggtggggttatacaggagagagattatacaggagagagttggtctgaggccagaacagttcaagggaaaaagaaaagggagctgatggatgggatctgtctgtgggcccctcaaggccctccagtactactctcgcctgcctcaggttcctccgactgattcagttctgcacgctcctcctcttcctcctggttttctggggccttcctctcctctcctcggcgttgccgcctttgccacaagatgaccccaatgagcagggcggctgtccccaggcctcccaggatccccagggccagggctagagttcccagccctgatcctcccacagagcctgcagttggcccctcctcgcctggttcgatgatgctgatgctgacagcacggctttcctggggcccgtggctggaatgggtggccacacagctgtaggttccctggtcctgaggccctatctcagggaggatcagcacagggctggggggaaggggcaagggcacaccatccttcatccagtggatttgaggagagggctgggcagggacttcacaggtcagggttacggttccaccaggagctactgctccaccttctggctccaccaccaattggacctcctccagaggcacaggctcccagacacggggctggatgggggctgtgcgcaaggcccggtgtcggggaaggcctgggctgaagctacaggagaaggtgggacggggatctcctccccgggctggggtcaccattagctccgactgcagtgtgaagagccctgtctcagggtgtctcctggtctgttccttcacagatactcccttctcattaggcaccaggggcttcccatccaagtgccagctaagagtccctgcagggtagcttccctctgacacacatgtccccaccttattgggaacaccagccgtgagttcaga

SEQ ID NO: 336347 - DNA, 783 bp, Homo Sapiens
tttttttttttttttttttgttggtcccatcctttattcgagtttccttgcccctaccctagccccgaccctgacgttggccagctaggtgcggctgcagggattcatggcagtacccagcttgcggcagtagcagaaggcattgaagaagcggcagtagcacgtggcacatgggtcacagcaaggcacctgctgtcccaggcaggactcatgcagccttacgcagcgacgtgaggagcggggctcgcggtcctgcaggtctagtacctctgccaaggcctgagcctcctgcaacagatcctcttctgcctgttctgcagttgtcttcttcagtggggcccgcaggcccaggcctgggagctctgggagcagggcctggtcaggccttctgatgccctccatgggggccaagcccatctgggctcctcgcgtggcaggcagtgccagcagcagggcacagctcagcaccgctgcggtcagcatggcctctgcctccgggattcttgcctagagagttcccggccaccccgtgcccttggcttatatggcagggcctaatgaagggccacacgtgactgatccctgcagccaggccgtgaaggacccttcctggagggtgggggcacagttcaggccctcactccctgaacctgagccttttgttctacaagaggagtgcctatctccaatttggggtgaggtttccaggagccgattaaaatttgggagcaagagagggtgcccagggtccacaaatttccacaggacagggacctaggagct

SEQ ID NO: 336348 - DNA, 1000 bp, Homo Sapiens
tttttttttttttttttttttttttcttttgccaatattttatttaaaatagttcagtcctagttcttttccatctttagcgtaaaacaactttttattattgttaaactcaatttgggttcaaaatcctatttccagcctaggcaacatagtgaggccccgtctccacgaaaataaaaaaatattagctgggcatgatggcatgagcctgtagtcccagctactcaggaggctgaggtgggaggatcatttgagcccaggacgctgaggctgcagtgagccgtggtgatggcaccactgcactccagcctgggtgtcaaagtgagactctgtcttaacaacaacaaaaaaatcatatttgattcataaaaggtgtggagtaatatgtattatatccccctattctagtcttgaaatgatttatataattgtggctatttgccatatagatctgaatgaagaaagaggaagagagagaggaaggaagataggaaaggaggaaggaaggaaagaggagtaaggtcccaggtgatgcctctagagtaaaatgtgttcactgggtgcagagaccatgaaaaggtgcccctctagggagggtgggacatgggaagagggtgggacttgggagggcagggctataaccacgaaggggtcagcttgtggcttgggtgatgggggctgaaataaccaaagggtggcgacgcttagatggccacactgttttccaccacgctgggccgcaggtactcgtagggcatgtccagctttgcattccggatctcaatttccttatccagggcagccagctcctccctgaacttcttcagcacagccttaggctcagggcccgaaaaatactcctcctcatgctggcccacagccaccataacgggctggcgtctgcccagctgccaagtgatggacatctggagagaagcctggtggaagttgggcagtgtcgccatcactgtctccagcgttgcatccttggtggttggcg

SEQ ID NO: 336349 - DNA, 1000 bp, Homo Sapiens
ttttttttttttttttttgttttttaatttttattttttggtagaggtggagtctcgctatgtcgtccaggctggccttgaacttctgacctcaaatgattttcccgcctccatctcccaaagtgctgggattatgggcatgagccactgcgcccagtctctttggcagccacttcttggtggctgtccttgagttgggtgaccataaggtccaatcagtggatgctagtgggccctggggcgggattatgtgcttccccccacggctgtaaacgcaaaacaaaaccaactagcaaaaccctcaaggtgggctctgcgggcactttgaggcttggagcctccaaaagactcagtggttctgtcctgagactctgttcttggtagattttctgctttctctgttttgattttgtttctgtttttgtgtgtgtgtatggtggtgggggtgagttacagagtctggttgtcccaggagaggcacatgggggcctgttttttctgaggagtccttttctctgggtgccagttatcctagagcgatgtggtcaaagggatgtcatctgggcctgtgttcccctgggatttagatggagacgctgttctcgatgaggggagggtctaggtaggtgtagggcagcaccaggccccggttccgctcctggatgcccctcgagatctgggccaggcggctctggaaggtggcgatgctccgccgaggggcctcctctgtgaagtgctcatccggataggtgcccaggggcctttggtctccaggctccttgctcagcaaccagagagcaaggatgacatcacatgtggcattgacaggtgggagggtggctatgaagccctcgcatgttgccaggcctttggaggtgggtggtggcagctgcatgctgggtggcaggttgggcatccaagcacaggagtcaaactgccctgcactgacagccgcatgcttggctgagcaggtgaatatcaccatggtgacatactgcac

SEQ ID NO: 336350 - DNA, 805 bp, Homo Sapiens
ttttttttttttttttttcttactgatatcaagacatttttatttattaaacatgttgtcaaacagaaaacaaaaggtccaggtagctctttctttgggcccttggcaatgaatgttgccaccactgttctgggtgcagaggggaaatggaaggcaaggacagcagagccagcacttgaccaggggcccgctggttacggacgacggaaaattgactgatccaagtggacaggtaagccattttcacaagcaacaacaacgtttctgaaccccgctgtggctcggtactggcatggaggccagggggaacctccatgtagcttgcaagtggtgacctggaaagaagacttgcttattcttaggttttctctgtgagggtttccattcttgttttcacagatggccttgatgctgcgcttgttgccatgaataaatgtgttgatgtctttgcagggtgaggtcaggccccgtctcctcatgatgctttcacagtatctgtcatcccggccctgtggtttggcatcatagtgctgggtcaggaagtgtgtgtacctggagttatcctgagccagggtcggtggggtcagacccagacccagcacgaagaccaacaacaaaacgcccaggcccatcaccatctcttccaacacaggctcctcggcctcagaacaagtccgcagaaacgggcaggacaatggaaagaagttttgtttctcacccgcttcttcctccctagtacgatgatggggagccggtagaaaacgcaaagatgttcttttgaatcctgctttgcatctaggtgggg

SEQ ID NO: 336351 - DNA, 1000 bp, Homo Sapiens; identical to SEQ ID NO: 157695

SEQ ID NO: 336352 - DNA, 1000 bp, Homo Sapiens; identical to SEQ ID NO: 157696

SEQ ID NO: 336353 - DNA, 1000 bp, Homo Sapiens; identical to SEQ ID NO: 159979

SEQ ID NO: 336354 - DNA, 1000 bp, Homo Sapiens; identical to SEQ ID NO: 157697

SEQ ID NO: 336355 - DNA, 1000 bp, Homo Sapiens
acaaagtgaactttttaattaaatccaagtacatcttagaatgtttctggagttgaaaggcacagtgcaaatagaaattactacaatcaacaaaattgattttaaaaagtatttttagcacaaaaaagttttctttatatcatactaaattcagagcattacatcattcccagaatacctagtttgaagcttatttttttttccattcacttgcaagctggattaagacattaactataataatatggaatgttcagcatttatgtttggtaaccagatgtatatggtttgtataaccatactttagaatttagttcagataaattggttttggtatactttgactacagaaagtgatttcaacataagatgtgatgaaggaagtctcccatgaaaaacttagtaaggatcaactgatgctatggacaaaacctaaaaaaagagatttgtagatgctttcaaggctttgactatgaaatatagaaaactggatgggcattcttactgaccggatgcttacaatttcaaatgaagaaactactagccactctaaaaattggattagggaaaaaagtgattttagaacagtcttccatttaaaaaatttttcactgaaaagaaaatatggaataatttaatatattcaatgtctgtgaaacacaaagtagaaagtaatcttttaaaaacatggaatacatatttatttctactttaaaatctccatttatatcttataagctttgaaatgcaagtacagctttaaagcatcataatgactaattataggtgaataataatacagacagtctatattctaggaggcagctgtaggcgttttaattggaaataagcattctgagataatgataatagcagtgtagaaaaatgaagttaaaaaaattcaaagtgttgagaatcctcctgtccttctgggatttttattttaatcatctcctccacagagaacaagcagtactttcctgtagtctccagatgtgtc

SEQ ID NO: 336356 - DNA, 1000 bp, Homo Sapiens; identical to SEQ ID NO: 157699

SEQ ID NO: 336357 - DNA, 1000 bp, Homo Sapiens
ttttttttttttttttttgcccattaaaaaattttattgatacataatatttatgcatgtgatattttgttacatacacagaatgttaaatgatcaagtcagagtagttagggtaaaaactaaaaatagaactaccataccatccagcaattcttttgcctatttttaaattacttgccttttattgagttgtaagagctctttatgtatctggttacaagacttttatcaaatatatgatttacaaatattttatcctattctgtgggtttcctttcaatttcttgatagtaacttttaaagcttttgggttttcatgaaaactttggtgaaagttcgctattttttctttggtcccacttagatacagtgtctatattcattctgacaagaggaaggtgatagcagaaaaggacaaatgaaaaaatgacaacttcacagttcatattagtaatgaaattatttagaaaattgcctttcactatatggtataatttctgttggtggatagaagccaagtaggagtcacatgcaagtcatcacctattccatttagctggatggattgaagagacagagtaatgacgaatatcaccctagaggaaaccaattagtgtttataacattgaaaatgatttatagattgcttaagcatatctatcaaatctaaatggaatactttaaatcagctccatagaaaagcaacactgtgggatgatttctgaactgtggaaactctgtctttcagatctagcatcttccagcacagagataggacagattgccatctgggaagaggcactctgttttctccagaagtttgcatttgattcagatgggtacattccaaggaacgtaggatccaggttcatctctcggaatcatttttgtgaacttgtcttcacaggccatcctaatcttctccggggtcagtggactattaagggtcaagggtccatgcaggcctctctcctgtcgtgctgcactcactgcgtcatgg

SEQ ID NO: 336358 - DNA, 1000 bp, Homo Sapiens
ttttttttttttttgtttttcaaaacaattttgtgaattttatttttacaaaaattttttaaattcatattttaaaatgtataccaaggcaaaaaaatcatataagctatatcataaatacaagagtttcaaaacatacaagagacatataatgtaaaaaaaaattatatatatgaagtccaatgtaatttataatacaaaaaaatacagcaagggaaaatgctttagaaatgctcatctgcaaactacaaaacaaaatcctcctcttgaccgactgcatgaactgccatgaaatttgcagctccatcatactaggtatctcttctttcttcatgttaccttgtctttcttcccatttttcttttaagacagggtcttgctatgtcacccaggctggactcaaactccagggctcaaggaatcctcctgtcttagcctcccaaggagctgggattacaggcacgtgccaccgcacctggctcctaatttctttttaagacaagggccattcaaggctttttaaaacctgatgtgtgttgttatactttataacagtcagtggcttttaattccaaaaggtaatactttatactctgcctacatgagatgagcccctaacagtgtgtacaaataaaattatgatttgggtattctaaggagacataccatttacagaaatttcttttgataaaattaaggtttcacttttcacatttgcttaaatcacagtaagcctgtaaactagctccttgacccaccatttaaaaacaaaaaacctccttaacaatgcaaaggattgtattcactgtatttatgattccatcaaaggctaaatagcttatctaaaatacatctgagtgatctattcccttaccctctccccgacctaccccacagttatactaatatgcaccaacaataaaaacaagttatctactattaacactagtaatcatttgatttagttccagttacagaaacaaaaaaaatctttgaattt

SEQ ID NO: 336359 - DNA, 1000 bp, Homo Sapiens
tgagctgcttgaggtttatttataaagtacaaggtacacttactgggcctggcctttttaatttttactcttttgccttcctttccacccagccaagatttttgcttgctctcacctgggagttgagccgatttcacaaatctgctcttggctgtcatgagccaaataccagcacaaccttccctggacctgagggtggcttcatcttagaaggcccacaaggatcctgctgaagcaaatgactctgctccagtcagctcaggcctctatggagcaaagaaactggtgtccttcttggagcgctgccttcatctccttgaactgagccaactggcaggcctcctccagccccagccagcggtaggcttggtgctcatgggagaggcggatctccacgtcatagtccttcacctccgccagccagtaaatgactgttttaggcttgttcctggccacataattgagttcccttttgaacccctcaataatggtcagctggcctgcttctatgcctgcttcctcttgggtctccctcagggctgtttccaagtcatcctctcctggttccacatggcctttgggaggagtccagtgatgaatgccatctgatgcctgcagcagtaaaaactcaattgcattgttgtccactttgggaatgaggcatcttcggaagatgatcaagccacatgctctcaaggccatggtcttatcctaaggactttgtgtataactgcaggaccctggcaactaccctcagtcaatgtggcctctatcccaactcctccagggctccctgtaaaacagggctggcatgtgtttgttgtgacactggagatcctcagaagcaaacgcacccattccagaagccaaaaggaagcaccccatcactgtagaactggtgaacaaagatctcatattattggtccgtggttgaggcagaaacaggtagctgatcccatgccctccccgaagcagaaggaggtaggaggcggaccttgga

SEQ ID NO: 336360 - DNA, 1000 bp, Homo Sapiens
ctcctgggatgtgtgttcggcagggaggggagtccaggaggaggatgctttaagccaaagtggtgctggaggggctgggcctcagcgcagagagggcaggtctctcaggatgaggctgagcagcccccgcctgcctggccacctgccagggaaggggccttccagagaggtgggtttccaggggatctgtgtgcctaatcttcagcttgtctcactggtggtgggagcagggaagggtgatatgcaaatgggactgtgtgtgtgtgtgtgtgtgtgagagagagagaagcagacagtacctgcctgtgtttatctaatggttgataacttgaggacaacctggtaaagcttcagatgccccatgaattgccaagctctctgtgacactatggtgtccttgcccaaggcagttatttccccttttatcctggggtgagaaggctcgtattagaaaacacacatacgttgaaattagaactagcaatagaagaggtttaaggttggctcagagattctgggaagaaataatgtatggtgccccaactacatggcaggcagtgcataaccttaatgacgtgggctggccctgggtactaccacattcccacagataaactcagagagcagggatcagcaactgggttttaggcactgctgaatcagctgctttgctgccccgcgagctccttttaagaagtctgcacctcctgggaagggaggattctccctcaagcagtgacagcccaccccctggacacacccagaaagccctccaggatggtcctgggtcagtaccaggtgggtgctggctgctctccatcctcaagggagtgcatacgaaacttccctggtattgaaaaaaaaaaaaaaaaaaaagcaaatcggagagagtaaagaggtccttgtggattcttctcttcctgtgtaaaaccaaatgctgggcgcgagaggggaaagtctcagtggacacagggatgcagcacgagaaacacaaccacga

SEQ ID NO: 336361 - DNA, 1000 bp, Homo Sapiens
tttttttttttttttaagagtaatttttgttgctttattaaattttttctcacagaattctttataaaaacaccatgtccctaaaatgtcattcaacatatatgcacaccttcgatgtataggacactgatcaaaaaagacagagaaatgtgtccctggtgttttgtttttgttctgtttgtttttaaaggcagggtctcagtatgctgcccaggatggattcaaactcctgggctcaagtaattctcttgcctcagcctgggactacaggcacataccaccacacctggcttcatgttcccggtattagtacaatgccaaaatatttaaaattcttaaaggttaactcaaatatcttaagttttacttcacttacaatttcaataatgctgaaattttgattgaatattgtgtttgtagtgctacctctttttcgttcataagaacaaaagcctatcattctcttagtttctaaaaaatatatgttcatatggtttagatacatatataaatatgttacacaaaacaatgttttttgagttgtaaataaataaaaattttaaggaaaccaaattaggataaaagttaaagttataatacatttaataaattaattctaaagtttagacgatgttttggttcttcttcatgaaagaaatgtacgaactgtacccttgattgtactcctacaaataggacactttcttaaagaaggagcacaatctttgcatactactagatgaccacaaggaataaacactatggacacttctttgtccatacacactttacatgttctttcttcttgtagtctccgcaattgttcttccactggtagatctgaaacatcttctgtgggaatatattttatgtcctgttgcacaaataaatgctcatataacacagcttcagcttcttgcagagagtttctgaatacagtggctgcaatatttccttttactaaaatcgtatcaatcagttctcttgcttgtaaagacgt

SEQ ID NO: 336362 - DNA, 1000 bp, Homo Sapiens
taattttaaagaatagtattttattgaatacgttttattcacagaaaaataagctttaatctacaatgaatgccagattatacagcagaaagcaattttcttagttttccacacagaaaggttctaagtgaaaaaaaccataaaattatattcacaaatatagtactctgtctcaaaacatttcacatgattattcacaatactaatacaattagatcagtcagtcaggttaaaatataacagtaatgaaaaaaatgcaaaatctaacataaattacattaaaacccttgttacatcaaaccaaaactgcaaatttcttactaaatccagaaaaatggtaacatatatagtaatttaaaatattacattaatgatacagaataagaaagtggtaaactccaaaaatctataggcatatctgcaaacttcagattcaaagtagaatctgaccacccaaacattaatgtagcatttgtctaatttttttgttttgttttgtttttgagagggagtctcactctatcacctaggctggagtgcggtggcgccatcttggctccctgcaacctccgcctcccaggttcaagcaattctcctgcctcagtcgctctagtagctgggactacaggcatgcgccaccatgcccagctatttttgtatttttgtacagacagggtttcagcatgttggccaggctggtctccaactcctgacctcaggtgagccgcctgcctcagcctcggaaactgctgggattacaggcgtgagccaccgtgcccggcgccatttgtctactttgaagatacaattgtcccttgctatccctggggttttggtttcacgaccccctaggacctgaggacgcttaagtcccttagataaaatcacacaaggccgggagcagtggttcacacctgtaatcccagcactttgtgaggccgaggcaggcagatcacctgagatcaggagttcgagaccagcctggtcaacaccgcgaaac

SEQ ID NO: 336363 - DNA, 1000 bp, Homo Sapiens
tcagaccaggcctgactcctgggccagtctgtaaaacaggcccttctgggccagcagctgggccgggctgccgctctctgccacctgccccttgtccatgaccagaacccgggcacagtccatcacggagcgcaggcggtgggcaatgagcagcacagtgcactgtgcaaaccagctcccgagcatggcctgcatctgcagctccgtgccagggtccacggcagcagtagcctcgtccaggatgaggatctgggtcttccggagaagggcacgtgccagacacaggagctgtttctggcccacgctcaggtcctcgcctcggtcagcacacttgtactgcagctggccgggcaggctggccaccaaggctttgagctgcaccgtctccagggctgcccagatagcctcgtccgagtgctcctgcagcaggtcgaggttcatccgcagagagccagggaacaggatggggtcctgggggatgatgctgatcctggagcgcagtgtgtgcagccccacgtgggcaatggggaccccgtcgatccagatcccaccctcagctgcctcctggagccgcagcagcccactggccagggaggacttccctgccccggtcctgccaacgatgcccaccttctctcctgcgtggatcttgaaggacacgccctgcacagccagcgggagctcaggtcggtatcttagcccaaagtcccggaactcgatctgcccgccctgaggccaggggggctgagctgcacatgtgggcagcctccagggagcctccttgggcgtccaggcatagtcctgcatccgctccactgacacgatgctgttctctaggtctgtccagttgcgaacaacccactgcagtgtctgggtcacctggagggcagcagagacagagaagcccacgaggccagcactgaggtgggctttgctcagcacagcacacgtggcagctgcaaacaccaggccattccccaggagctccacattggccgca

SEQ ID NO: 336364 - DNA, 1000 bp, Homo Sapiens
tttttttttttttttttttttttttgcttaactttttattcatcatggcacaagatagaaccttaagaaacaccactgggaatttcatcaccaacatgaaaattaagagtagcatgttttaaaaaaaaaaaatctttttttataatacactttcccttcgaagtgaaaaaaaattgcataaaatactgaagcgtatcgccttctgctggtcaaaaatagttatgcacttgaaaacttcaaactactaaagtacggtagaacattttacaatacacataaaaattcgaaagaaaacatttcctcagcctttggcacaatgtaagtacaaagctgtaggccttttaccaatgtgatttagtttttaaggaattgcatgtaatttggcaaatactgattatggggcaaagggaaaaaacatgttctataatttgaatattctgtgtagattcttaaacactttatagttggattccagtttgtagttttgaaaaatacataaaaattatacattataaatatatattatatatggcctatataaaactgaatttgatgtaacgtgggacggacaacttcttaatttctttgtgaggcactgcctttttcttgtttggttaactgaatcctttctaaacaagttctaaaaatatatttcgtaatctatcagatttagcattttcctgaaaacgtattcaatatctaaaagcattcagtgatttttctttttgtatctgactcctatgtaaaaatatggcttctcatattctgcttcctcttgttagtgtttggtatcgaaggaagggttatccccagttataaagctatggcaaaagcacagaaacccgcttgtgcacattctagaacattctatagaatctcattgtttagtatatctcattgcttaatataagtgaagtgattttttttttaaaagttccttttgttttctctttgtgaatatatcatatatgattatacataatctgttacagaatacaca

SEQ ID NO: 336365 - DNA, 1000 bp, Homo Sapiens; identical to SEQ ID NO: 157704

SEQ ID NO: 336366 - DNA, 1000 bp, Homo Sapiens; identical to SEQ ID NO: 157705

SEQ ID NO: 336367 - DNA, 1000 bp, Homo Sapiens
tttttttttttttttttttatagaacaagggaaacatttattaaaaatatttaactgtctagtacattatactttaacccatatttatagtaaaggattcttacaaggaagaataaacggctttatgatacaattagtataagaaatatccacatgggggacttctttgtagtgtaaaaacaccatacatctgaaatgaccatttgcatataaaagctaccaatgatgcttctgtgcacaatgattaaaaaattcaacacaaacagaatccaaaatatacaattaatgcaagctatccacagctagcccaataatcaatgatgaggaaacactggagcaggcttagttccactttgtctgaagttacatatagtaagattgacttgtatcaatggctctgagatggcttttatgaagtcagtacataaaagctattctctccttatccagtaagcttcacagactgtaaaactccaccagtaatgcactttgatactatagctgttgccaaagcaacatgtagtgtttacagcggccatggcaagtcactaaagtcaacagggccacccagtccagcatctgcttccaagaggctcatgatgacagccattgctgcctcatcattactgggactacttgatccttggtcgttgtcaatcatgtctatacctatgtgggggttctcaccaagaatagaagaactatcagaatatggataacctgggttctcctgagcctggcctgatagtaggccactggaaggaatgtctggagtccctccatttaaaatcttcttgcctcctggagaagaggcatcagggggaggcgtactcgtgatgttcaatgggctggagccacagctagaaggcgatgaccctcttatcctgtggatttccatgatttcctcagcaatcattcggcctatttttcctgccccagcccgggttccccctggaatccctggaacagtggggtgggtcctctttgggccaccttctcc

SEQ ID NO: 336368 - DNA, 1000 bp, Homo Sapiens
gagattcaagcatttgtttcttctttcctacgccattgaagaggctgacgattataataattacaatgaattacagaaggaggtgggatctcagtcctccagggtcagggactcttaaactacctcctttctctctttgctcagctcttccccatacccctgtctcagtgtttcttcctttcctcaaaatcctcaacagagaagccagagctgggcaggtgtggggtatgggttagccagaggtgtgctggggtcaggccacctcgccggtggcattccgccttttctcacacacccagcggtacacctgcaggcagaagtcatcgttccagcggccatccggctggacttcaacacagtcttcacttccacccagctcgtgcccgtgccaattatctggctgagtgacagcccagttcttgtagttgtgcctatagtctgtgccatccacccatttccaagagccatcactgtccgtgagacctatccaggtattgaaggggttcgtgtgttgtacaatgaatttctgctcctcccaggagttgatgaccaccaggtgtgcgttctccagctggcagtacttctccgcctcagcccaggccttcccggagtgagagaaccagtagcagctgccttggtgctccacccagttgacggggcagcaggtcctttgggagccgttgctgtggaggagctccatctggcaggccacgaagcgcaggtccacggggaagtgcttcagatggaagagcagggcatcgtgatctgctttcaggtcctgctgctgtttctccagcttggctcctagggatgtgatcttgtcacccacgctgcctccgtgggtgctgattgcctggacctccgtcagggtgctcgaggagaagttgctgaaagcttccttcaggctccgcagctcggcttgcagctgtgcacctctgtgaccctcactttgggacccagtcacacagatgaccaccagcagcaggatgttgaagctcag

SEQ ID NO: 336369 - DNA, 1000 bp, Homo Sapiens
ttttttttttttttttttagtaactatggctatgttgtaacaattttattttgatttttaaaaaaggaatctcttgatttaatcagggctttggggtcatagggggattagtcactgtcacagtcataataatgcatttattcagggaaaactttaattttctttgtcttctccaaaaacagctgctggaacacctcaaattaagggatgttcatctaaaacacctttactgaaacttgattccttgggccagaggaaggtctttactgtagttgatagtacaagtagaccttctcatgtactgtttccaggcatcactgccagactccctgccaccaccagtgtgcttttctcctccaaaggcacctccaatctcagccccacttgttggaatgttgacatttacaatgccacagtctgatcctttaggtccaagccagcgaaagattctgcccagatctttggtaaagatgctacttgaaagtccctgttttacttcattattccatgcaaagacctcttcttcattcttgaatttaaagacatagagaatcggagcaaaagtctctgtgtgtgcaatggacgcatcgtggccaagacctgtcacaattgtcggttctacataatttccagggcgatccataaccttgcccccatagaccactgtgccaccttctttctttgcttcttccactgctccaagaaacatgctcactgcctgcttggtgtggagtggcccatagagaacattagggtcccatgggttcccaactcggatctgtgcataggcctttttaagtctgtttacaacctcatcatggatgctttcatgtataaacagtcgcctcgcagtggtacacctctggccagctgttcccacagcagcgaagagagctgatggaacaactaagctgaggtctgcatcttcaaaggcaataatggcattgtttcctccaagttccaacagacttctcccaaacctctcctgcaccatcaggcc

SEQ ID NO: 336370 - DNA, 1000 bp, Homo Sapiens; identical to SEQ ID NO: 157706

SEQ ID NO: 336371 - DNA, 1000 bp, Homo Sapiens
ttttttttttttttttttttttttttttttttttattaagaaagcagtttatttcttaataactgaatgtatattattttacatataattaatgatcagagagaaataacagttgctgagaacgtaaatttatgttgtactttagaattgaacagatacaaccacagattcataccaaatgcattacttttagattattaacatattcttttacataatttcatttcacatatatggagtccaaccaagatacatctggcatagtaagttttcatcagtagcttcttgtataaggtaatgcacatgtccttcaatagataacggcagtcctgtcactctatttcgagtcttgattacaccttgtagtcgctgctcaatgtcaagaacatgggtcttggccttttcattgacaacttctccagtttcattcagtggcgctttggaatgccctttcactggtttactccattccacaagaggatcatgtagaaaagtctttaagacactcattaaaggctctcgctgatcacgcatcagcctcattgtaacttcacatgctcttcgaaaaagaccctctgttcccataggacccattccattaaccatattatgagtcaggcgaaatggcacaatttctggaacttcaaaggtttctcccttattgaaaagacaattgaaatctacatgtacgcattcaccagtcaaagaatcaaagagaatattttcaccatgacggtctccaagccccagaatataaccaaccattgacattactgcagtggaacggcagtaagctgatctactactgtaccatgatgtaggatcagggaatgttctcagaaaccactcatgaaaaataggaggatgcctgggcaggagaaattctcggaatactttgagtttttcagataaagctgctgactttggtagcatacactggcgaagttcttttcctgtcatatacactcccttttctttatatagtttggtcagaataggt

SEQ ID NO: 336372 - DNA, 1000 bp, Homo Sapiens
cccgaggtttttttttttttttttttttttttttttttttttttttttttttttttttttttttttttgaggggattgcacagtttatttccaaacactcagaggatagggggtggcctatgggctccatctgcctcccctccctgcatttggctgaatcaagaacttctcccccctgacccccaagaccctaggctgtgcccaatagagaaggcactgtcaccccccaccctgaggagacctagacaggtgaggagcatggagggtgggggaacagagttcaagtattcacagttcccccatctacacccctggattacactgtgccagagccatgagggaggatcccacctctgggattcctagtggtgttgatagtccttctcccacttagaaccctccagatgaactccctactccttttccctgaaataacaaaccaagtcctaagccctgtagtctgggcaaggaggagccttagcaggccactcacccaaggcccccagggatgggggtgagagccttcacctgtagtgaatgggttgggagcaagtgtctataaggagagaggaagggagagaactgagaggaccttgggaggcaggcttggaggcttctgacacgtgagttcagacagctctggtctgcgactccaccccaccccacaccccaagcccagaatccctgagagtccaactgcaaaggcagtatggccggagggaggaatgggagcaggggtagagttgagcaggaccttggcccccctctcctagtaggtcctgctcctgggacacatgcttagggacggccaggaccaggctcaggtcctagtcccatctcttagggtgctgatcttccagaatagctgaatcctggggaacatagacccaccaatccccacaccccagacgtcctggcctcaggtagaatggtgggaatgggctctcacaagggtattataaaaagctaaaaccgttaaacactttctggggagaagtgg

SEQ ID NO: 336373 - DNA, 1000 bp, Homo Sapiens
ttttttttttttttttgtgtgttctttggcattttatttcaaaattgcagcaaagacagagaaaaaaaaatcaacggcagcaccaggggtctggcctgagaacggagagatccggaatcggggccaaggtgtatccttgaccgcacgacaaggagtaatgggcggacctgaacccgcgacgaggggctgggggccaagatgcctgggtcggcccttacggctttgggagtgtcgcaaccacatgggggcgccagagacccagacgccgcccgctggccttttatttcgtattgcacttcaggtgagtcattggtagggaggcgagtgctggcgtgacgagatgctacgggtcggtggatctggagcacagcctgcagcttcacaccgggaacatccactcgtgggctctgattccgtactggatctccttcagctccttctggaagcggaggatcagctcaggcccattttccatggtgggaatgtggaggttcctgtctttgtacaggattcggtgcactgggcagacctggcaagcggtgcccgagccaaagacttcccgcacgcggccctcctccagggcccgcagcaactgcttcatggtgatcgtgcgctccaccacccggaactcaccccaggtctgagccatgtccagtagactctgtctgaccactccaggcaggataacaccattcagcgggggcgtcaccagctccagcaccccatcttcgtgggtccagtagacaaagatgttcatggttcccacctcggtgagctggtggtcgggcccatacagccagaggacctgttcacagccccgcttgagtgcctcctgttgcactaacacggtgggcccataattcccacctaacttgtagttgccgaccccgcccacccaggcccggatgaaggctgggtcggccaggagggagaccggggtcacggagcctccagggaagtaggcacccactgggcagagaatgacgaacaggagcgcgcg

SEQ ID NO: 336374 - DNA, 994 bp, Homo Sapiens
tcaggaaaaaaaagagtttaatcatgaaaccaaggaagtttctaccattaagctcccaacagtaacctagagaaatatatctaacataaagagtttccacagttagaggacaaaaagctgtatcggcaactgaaaaatacagtcatcctaaagagatctgacacatcatctattctgacaaaagatttttaaagtggcactgctcgagtcgaaatggttaattacctagcagaaattgatttctctatctccgtagcactcaaagcagctggcaggctcttgcaatagtcattcgttttcgtggtgacaagaatggttgcgccttcctccatagctgggagtggaaagcaatggtcagagtcgaccttcggtttgctcttgatgcagtcttcacaggtgcattcttccaccgtgtactcgaggcctctcggaagaataatttcatcaccagtcctgctcttttccaggtcaatgttagccatgcccaggagacctgatcctgtgtttttaaactcgtcctttaatggttcagagtttatcttccttagcaaaaacattagcacgaaaactgccaaagaaattattaagctcagtcccaaacaggtccagagaatcgcattcgttcctttcactgaattggtcacacttgcattacaataacgctgacatgttagaggaggagtattagaagaacatcgaagttgacaaggtatgcaagcatgcaacaaactgtcaaaatattcattttgggagcactgcccagccatctgcaacatgatcacaaaaagaaaacaagggagctacagaaagaacagcctggaaggacaagtaatatctctacaagaattccagagcaaatgcagcaagagcagctagaatgttgagaacaatgaacttcgcctgcttcgtgggttcttacgggggctgtctgtgtcttcgcggcagctaaggatttgaataccacatctaattcaagtttctaagtttgagtctt

SEQ ID NO: 336375 - DNA, 1000 bp, Homo Sapiens
ttttttttttgcaagcaaagaaaacattttaatgaaggcttcgttggcaatgccagatgggtcaactatggtctaatccaaacaggaaccctcacccttttatcatttgctctaaaatatcaaagcattacccctacagtggccccaaatacattttatcccatcaagcctgggcattttaagagctcttctctcctgatttcttcttgtctgactttgtctttccaatcatggtctccacgatcacagcggtttcttcatatgtctgaatgctctccgtggaaatcttctcgatagattccaccacttccactgtcttataggccaaagccttgggagggcctttttctggcaggcttctgctcctagtcccaagcacctcagctccatcctgatcagccgcaggctttggaggctcaggtatagatggttcctctgcaccgggtgtgaccatggcacagggtctcctggactcttcgtcccgctcctcaccctcacgtttctcttcagggccttccagctctgcaccatctggctcaatctccttgtctataggctgctggtcaattggttgtccatcttctttctcctgcagacccacctgcccattctctaaagggggcttgggtgactcaggagagggctccacctggccgtcataaagcacagagtcttccgcaacagaaacagccaccccacctttagctgtgatggaggagacatagaatctagggtccacgtaattggcatcccctgtgaccagcacgtgccgctctttggtgtagagctcagtgggggtctcaggctctttggggcttctcactttctccttgaccttcctgtatagtttcccaaagcctttgcttatctgccctccatctggcacatcctctggagccccttcttgtgtcaggggacttacttctttactttctgattcaaacttagattcactttcctctttaagtaccacctgtaccagctttgtgtcttccaaacc

SEQ ID NO: 336376 - DNA, 963 bp, Homo Sapiens
ttttttttttttttgctggaaaccaacattttattgagcactcctgctcctcggaatctattccagtagattctttgccgagggcatcacatatcacacaggggtgtgaccagcactccccctgctacctgccgtgtgggcaggggcaggagtgaatggctcttcctgggcacaggccacagttaaccggtgacaattgcagagccataggaattcatcttttagaaaaaacgaaaactggaataaaaaaaaaacaaaaaacctgagtataaaacctcagcagtgttccagcactatctcggggtttaaatataaaaaggcatcatgagaaaacagttaaaaagataacagcagcaggccgccacctccagggcagtggtcatgggggtggggccagccccgccctgagccgccggggcctcacttgagcagcaggtgcaggcccccgctgagcagcggcagcagcagcgccagcagcagcagcagcgccagcagcacctgttcgcaggacacccaggacccggggttcggggatctccagaacctcattatgttctccttaagtgtggtgaaaccgtccatgaaacttctaagaacatccctgatgtcctcagtctggtcgtagatgaaagccagacccaggctgtgcatggccacctcggagagctgggccaggcgcggggccctgaggctcacgtccatctcgtccccgatgcaggccagccgcagggccaatgcgtcactgccctccatgcattccaaagaatcgaagtcctccatagggtccaggtcctcttcagagtcagtcatgccaagaacctccatggtcgggggttccaggagctgctcatacaggagggtctccatcaagatgtctctggagaggggtcttacttcagacatttctcctctggcggcggcgatgctggcagcgtctgtaagccacccgggaggcttcgtgtc

SEQ ID NO: 336377 - DNA, 1000 bp, Homo Sapiens; identical to SEQ ID NO: 157708

SEQ ID NO: 336378 - DNA, 1000 bp, Homo Sapiens; identical to SEQ ID NO: 157709

SEQ ID NO: 336379 - DNA, 1000 bp, Homo Sapiens; identical to SEQ ID NO: 157710

SEQ ID NO: 336380 - DNA, 1000 bp, Homo Sapiens
aggagttttcatcacctttcttcctacctcttctctcttccctccaccagatctggcatttaagggcacgatgggagcgggagacaggaggggcatccggtcctggaggctggactttaagtgctccacgcagcagcggcctcccatagtgcacaatggtggaaggaggcggttcgtatgtccccagggcggcatcccaatgccagaccttcctcccatggctctgttcaccctttacaagccagctacttgcagaaaagtggggcactgtgttccatccaacctgcaggcaactggtgcaaaacggaggggtgtgtggctcagcttagcagcctagagctcaggaaccaggacagatcctgaaacaggagctgaaagggccagaactggcacctttgggatctcacaaaaatggaaagagccgctttttcacaatatagaggaccgtagcaagaaacaggcgtagcgcaaggaagatgagaagcttgtccgtcagctcccggcgattgtattttgtgataagcttccggcccagctggatggtgcccgacatggacttaaattcttcatttgcatccaggatcgttcgtgaagaagtgactagagactgcatggcctcctcgctctgctggacctgctgggccatcatcctgctgatccccatgaggctctcagtgatggtactggatgtctgggccaggctctctttggtggttttcctttgccttaagagatctcctccctgaagaagttctgctttctctagattgtcgattgcaattttgcaggtgagattagctttcctccatgaggcctgattgctgagcatctgctttttgtgattctccacttcctggagtagaagttgtttctctgattctttgtcttgctctttagccaactgctccaggtcctgtattctgtgacgcaactgttgaaatttctcttttactttagtattcagttcagtaagagcacttaagggtcctgaacaatcacg

SEQ ID NO: 336381 - DNA, 895 bp, Homo Sapiens
tttttttttttttttttttatttttttttttttttttttttttactaggcaaagaactttattaatctttgtttcaaacttgattcccaggcttcttcggcttaattagctgcaaagaatgaattgtgtataagcaaaaactgaaaagagctgcagtgtccaaggggcttgggcttaaaaatattagagatctagattttatcagatccataaacaaaaatttcttaaaaagcagtcataatataaaatagcagctcccagtaacttcttcaggttttatcttcagaagttgactcaattcagtttgcctcattcttggaagcctcatcaaaattctccacaagatctggaacttcatcatcatcatcctctccagtagcaagtggtgcttttccatccacagattgtttgggcagagcttcggccagtctccttaaactagtcagactatccgcaccaagctggtttaagatgctgggtagcatttctgtcagctgctttgtctcagcatggcctgtaatggtgaaagtgttcgctgccagagatgcctgaactttagggttgttaaagtggatcactgttccttggtttgtaaacatattcacctcttcaataccagagatattgtttacccctaacttctttaaggagaactgaagttttttgtcatctgctgtggctgttctatgaaccaccttcttctttctgcgagcagttcctttcccaccaatgcgcacttgtgcctgcagtttggcgagtttttcctggttcatgattgtttctttcatcttgtcggagcgaataaggggccgcgcgggggactagggttggtgctcaaggggtctcgggtggaccacctgagattaggcgcacacacgcggggacgcaagatggc

SEQ ID NO: 336382 - DNA, 1000 bp, Homo Sapiens
tttttttttagaagcacaaatttaacagatactattttattatttacaaaatacatggtgatcataagagaacattttacaaattacaaatgggaaaagtacagggaaaagtagagacaaatgggttaaataacaaggtaaccatttgtaatgagtctgtttagaataaaatagttcttcacaaaagttagacaaggccatgagtaagtatatcactgtataaaaaatatcagtgacgtcaaaatatacctgtaccaaaaagtagaacagcaatggtagtgcatctaaatgtgtcctaaattaaattacagcacatacagtttcagtgttccacaatacaaccattgctctgaggcagcaatctgtgagacttgattgcctagctcactgaaagagcaaagccccaggactagttaacttccctaccttccataaggctttgttcaggtgactttggaatgtagtgtcaaaaaccccattcatttctgctgcaagctccccaagaacagacactgtggcctcatcattggcattcagaatccgcacaaagaatttattccacaattcaccatcttttagctcagaaatattttggctaagtttccagaaggacccatcccagaagacctgtaggtgttccttgaacaatagtaaatgtgctaaatctgctataccaaacaggtctacctggtagggagaagaacagttagccaggatcttttgtccttccaggatctgtacagtccgaaagccgctgagggtaaaaacatccagctgcaccctaaggtcaacactgtaggaaaagtccactatcttcaaagcttgattgttcttgttacaatcatagggatcgtggattctgtttctgagaatcagacaccttggactcaagtcaccatggactatttctgctttgtgtagcatctccactattgtcaaaaggttataaataatcaacactgttatttcatgggtaatatattcactgtgttggagaaga

SEQ ID NO: 336383 - DNA, 1000 bp, Homo Sapiens
ggaggagataaaccaattttatgtctatcatgttatacaaaaatctagaaataatagatttgtacagaaaaaaatgataataaatgagaacacaaaacatataatttaaatttggtattttttcccccatgatattaggatgataatcatttcaaagcacatgtctagcttcagagtaggatttgttcactggccaaagcctgccatgaaactatggctttcagcatctgtctgctctactggctcttgacaaaactcttgaggtcttcaagaaaagtaatgtactcctggtgctccagggctgtgctgagctccaccagctcatctgcaaaagtgttgtccacccctcggtcggcaaggaaatccattaggtggtcatataaggcccagtccaaggaatctgtgttgagtgtataattagtatccttccattcagactcgccagtggactgaaagctaacttccctgatagagaagatgtcactctcagcctcgtcttcttgtccaacctcatcctctggataatgacagtccaacacaagggccttcttgccatcatcattctttataacttcaaccacgaaattgggagttgatgtcagttcaggctcctgttcttcaaccttctgcccttgcgagggttcctcctcaccatcaaatgttggtgggatgctgttgttaatgttgaaagtgaccgtgattttttccccggcaactttccgcactaatttcgcttctgtcccattcagttccagctcccaacctccagacatcttagggagggttttatgcttctgaatttttctttcctccttaatttcatcactcaggaaatcaacaaaagctttgtctccgtcggtgtgcagcgagccgcagccacagccacaggcgcagggtccgcgaggccgcaggaggcccggccgccgctcggaacctgcgcgcacgctgagcagcccgaagggccgggtgcacagccggggtgccggctgcaggagctgcc

SEQ ID NO: 336384 - DNA, 1000 bp, Homo Sapiens
ttttttaatggtaaagaatggctttattttacatgcaggcaaaccattggcagtttaagccagtggctaagcagagaggtgatggggtcaggtttgtgttctggaaagatgtctggagctgctggatggagaatggattgaacactgcgttgtcccagcatgtgagctgctgcccgtctccctgtccgcttcccattcctgtggagacaggccttgtggggcagtggccatggagcctacggggcagcctacggggcaggctacggggcagcttacggggcaggctatggggcagcctacggggcaggctgcggggcagcctacggggcaggctacggggcaggcccttgcactgcacatcgcacgttgagccacagactcagaaggcttcttcagggtccaggcaggtggggagggatgggggtgacctggagactcctgccccgcagcagaggacagtttcatctgttcactggggagtgccttgtgggcctaggagttcagtgctgtttttttctgattttccaagagaagctggaaatctggatatttataagaaatctgaatattgagtgatggcaaaatctcaacaccatgtgagccaaacagaccagtcaggagccttggttcaggtctgcccaggagcttctaaaggtctgtgacgtgaagacatttgtcgttgtgccgaggcactggttggattcgggggtgcgtgtctccctcatgtctgcccggcatcctcggctcagaacccctcctgctgctccttcttgtttgctcgttgtcttgtcttcttttgaggtgagaaatgtgttttccctgtggggaatgtggtgttgagaaagaaaaaggctcacagtaagtggcctggggctgtgcccgaaaagtaactgattctgacggaatctcgctgtgtggcccaggctggagtgcggtggcgcgacctcggctcactgcaagctccacctcctgggttcacaccatcctgctgcttcaggct

SEQ ID NO: 336385 - DNA, 1000 bp, Homo Sapiens; identical to SEQ ID NO: 157711

SEQ ID NO: 336386 - DNA, 1000 bp, Homo Sapiens
tttttgaatgtaaacagttttatttagaaacagataggtacctgttcgcattgcagaatataaaacttggtttacactctataaaaaataaccaatatccaaattcaagagagctagcattcacagaacacacaatatgggtgtgtagctactgttcaccagcctcaggcttgatttaaacaaacaaacaaaaaaaaaatttcaaagggatcattcaagatgaccgtataatgcttgctgctgtctttgcagattaaggtttgcttttcaagtgcatgattttaacataaggcctgggctctctgcacctagtgaggtgtgaggctctcttgccacacagttcacactctcacttaactaagccagagttggtggcattattaaattatcactggtcttcttaatagtaaaaatggggaacccagagggcaggaaatttccattaccctatattggggctaaacttaaaagagtatatccactatcaagagcttagtacaaaggctggggtgaagttacattatacctggctttttaccataccagggagcccacctcaacatgactgtggaagaccaaaggatatacctaggttcagattataataaatcacccagcaccacctgaatgtattatccacaaagatatagcaataataaaggttatatatacatatatttatcttggtaacctgagggctaaaaacgtggaatacgataattcttctcaagaggtccatctgtaagaaagggacccaaaaggacagtgtttgtgttgcataaaatatgggtaaagtggagttgggaacaaagggtggtttctttagctctttccacatctctctttgataaggactgaaaccctgttgattcatgataaacgtttccttttttttttttttggcagcggggagagggaaagaggaggaaatggggtgtgatgggtcaaaggcaggaaaggtaagccatggtcctcaaaccaaagagccctctctgtaggt

SEQ ID NO: 336387 - DNA, 1000 bp, Homo Sapiens; identical to SEQ ID NO: 157712

SEQ ID NO: 336388 - DNA, 1000 bp, Homo Sapiens; identical to SEQ ID NO: 157713

SEQ ID NO: 336389 - DNA, 1000 bp, Homo Sapiens
gaatttcgaatattttattaagggatgatttaattcctggatttcaaaaacctttaaaaacatcaaacaataaacttttataaaaaagtgacaaaatacaagttaaatcagctagatttttgtgtaaccctgcagtttattaaaaaataatacaaatgcttataaatttttatttatctaatttcctgaggattttgtttctccatatcaaaccctttcaccatggccaacatgaactttttttttttttttttaaggcagttctctgctaggcattaaactttaaaacatttgaatcattagaccataatgcttcaccctaacgatatttatataaaaggaagagaaagacattttcttttttttgagacggagtttcactcgttgcccaggctggagtgcaatggcgcaatctcggctcaccgcagcctccacctcctgggttcaagtgattctcctgcctcagccttccaagtagctgggattgcaggcatgcgccgccatgcctagctaaatttttttttgcatttttagtagagacggggcttctccatgttggtcaggctggtctcgaactcccgacctcaggtgatccgcccaccttggactcccaaagtgctgggattacaggtgtgagtaaccacgcctggctgagaaagccattttcaatacagagtgtaaaattagatagcctctattaattaattagattttggaaagaaatgcagctttttagttagcattgaggcaaaacagggaacctgcttctttccaattgcacttgggtctttgcaaaagtccactcggcgctgagaaactttcctgttcaccagtgtgaggagttctgtgaactctaaggaggagccatattttcccaacatctcacacaaatcttgaatgtaccatgagccgttcacagtttcccggtgagaataatatccttctgcaacagagtaacacatgaggaagtcagctccagcaggcagcgtgtaaacggagg

SEQ ID NO: 336390 - DNA, 1000 bp, Homo Sapiens
ttttttttttttttttttaggaattaagcaaccacatttttaatcaataaatatgaacatttgttttttaaccagttactattaggcagaaaaaaacagtcatttatcaagaattcaaaagataacaccatcttgaaaacaaagtgccaaaaatctttgccataaactcttcctcacttatagaactaaaagtaacaaatatttactcaaaataaggcttggaataatctaaaaagttccagatatattttaaagctataacagattttgcacataaagccaaaacagattgttttacacatacatagactatctgacaacccaatgaataaatgattgaatggataaattgttgagcattagtgattacttatgttcacattatgggccaggcttacatccatttcttgttcttctcctgcctcactgtcccttgctcttccaaggtccttggtgaggtggcttccagataggcctgggcagtaaggtgctggtggaagatgtgagggcaggataggtgagaccaaggtattctcttatctgtctcagctcactccatctcagtcagtggctttgttcttgtcatggctccattttccacaatccattggtggtcctaactcccactaggcagcccccaccatggttccagctcctctggatgatcccactactggacacaggaaaccaaacctcttcccattatcctcatagccctgggtgtggtaacagcttcttgctgtttggcttctcttttatcatctatgtaagtcaatttcctgtattaaactccctctgttgaaacacctagaatggtttctgttttccagactggatcctgatggatacatatcagaatcattaagctttttctcctctaactcatatgagaacttttgcatgaaaatctgccctaagccaatgaaaaatcattcaaatcacactcaatacccacattctgcaataaagagcagtaaatatccccttggctgtgttttgt

SEQ ID NO: 336391 - DNA, 1000 bp, Homo Sapiens; identical to SEQ ID NO: 160511

SEQ ID NO: 336392 - DNA, 1000 bp, Homo Sapiens
gaattccttttttttttttttttttttttttttttttttcatgctgccccagatgtctttattgaggcctctcatttgacccaaatacattaacaagtgattgctgagatacagtcccaaacacagtattctcccttccttctggccaaggacaggacagtcagaaagatacaggattagagagagtgggggaaagctgtgcatagatggagggaacagaacagagatggggcccatatatatggctagaggagaatcacaagaaagagtatggagagtgatggaagagacacataatagatacaagtaagttatgggataagaaacagaagtcagataagagagagctggcctggtgtctagggaaaagtagctcatttgctcatcaaatgagggggatcagtgtctcagcacccagcatatagaccccagttagctctatggcagagaataacctagtctccctggaggaactcagggaaggacaagggaaggcaggagagagcatgaaaagaccagtggggctgaaagatggttgccatagcaactagtcatcatcatcatcgtcatcgtcctctgtgttgatctcgccctccaggacatcctccagccagtcctccagctcctcagcagaaggcaggtcctcctcatcgtccatttccatccatacgctatccgcatcagtaacattgacgactcctatttgtggggctgacaagtcgatgtcaaacgtcttctcccagtatgggaccagcagggggaagtcatcagggtcaatccagatgatgctaagatctgggttttcagtgttatcttgggccacagccttgagagtctctaagaactcgaaaccatcaggatcagcttcctctgcgaaggccacaatgtggattccatccatatcatcctcccaggtctcatacatactctccggcttcagtttcctcagggttgatctcctgtgctcctccacgaagttgacaatctcctcttcgctatt

SEQ ID NO: 336393 - DNA, 1000 bp, Homo Sapiens
atttccaaaatatgagtttaatgacagaattagttagctagtattccacaaaaagtattgctctattttccaaaaatttgcacagtgtcttacacatgtgctaaaagattgagaaaataaattagaaaattatactgcacacttaacactaaatctaccaagcacaatgtaacttttagacagctcagaaggcactttgggatttttttttttttcagtgcctcagggcatcagtatgaactccaattattgttgccctggccaattgtgggagtactgataactggagagttaattgactgctggataaagcaatctttaatctaaatgggaaggctcactagcagctacagagaaggggtattcagatcccagcttaggctaggaagccagctgacccaatcagagacatgaacccatcagaaaaatgtaaaagttttcatctttctagttttcccccaccctccactcctgctgatgaatatgtgagacttgccaactagagggaagtttagagagcaaatcaacctcccatcccagtttcctaatatactagaaatgatggtgacacctgtacacatttcaagccctctccatagccatccaaaggcttgaatatccaagttcatagtgatatgaatgaccatcacttgaaataagtttaacaaagccatgagaatatgatttataagtttgcttccaaggctgagccttctctaagaaggatcatcttggctggaggagggatcccaactgatgttcgaggtatggagggagctaaatcattaatcatgtgtcttccctgggctctgattaaaaggtcactctatgcctgtgagttagaaagctgtcaattttgttactgtcataatcaaagacaagtaaacttgtgttaggggattgttcaccctagactgccatgttcaggcactgccatgacccttgatggtccagcaaagaacaagatctgttccgtgacagtcaagacagtcaacatggg

SEQ ID NO: 336394 - DNA, 1000 bp, Homo Sapiens
ttttttccacgctccaacaaaatgtcattggaaaagttttattgaaaaaaaaaatgtacaaataagttcttggattgatagcaacaaaggctcatgttcccccttccctccctatctttgaagaactaaaaaaggaagaaacaaaacaaaaagttcatccccacaacgccagacacgatgcttcttgaccagagtctgcccagaagcccctcctgggagctccttctcaatccgcctcactgcggccaggtcattctgggggtgcctggtcccaggggctgcagcacctagttttatagttgggagaggttgggatagagctggggaggcagctgaggtgttttagtgtcagaagagggctggctgacccccctagctcaatttggtctcacaggtgagaaggtacctggctataaatatgaatactgattgaggcaggcttgatctgggactttcagggcaggcagaatgactatggcccaggtcccacaggatgtggagtttccgggctcagcatcatggtatctggggcccatgtccaagtggagtgaattctagctgggaaggtccgctcaggcacacgggaaccccggtctgtttttccacccccaccccatggagtatccaaggctggtacctcacctcccccccaaccccaatagcacccatgtgtctcaggagcctttggatgcctcctgccatcctgtgtgcaccctgaggccctataactcgtctcgcatcttgtcacccttaggccggaccaggcgcccaatgaatagcagggagccgctttgggtgtcccgcactaggaagatgaaggggtggtcggcgtagaacagcttggggctgcgcagctcctcgcgcccgtagatgtcctggtcaaaggggttgccatctgtgtccaactcaaaggcggtggcgtggaacacgctggccaggtacaggtccttcttgcctgacatgcgtgacaagtcggccttgttcttgtcaatggcctcag

SEQ ID NO: 336395 - DNA, 1000 bp, Homo Sapiens; identical to SEQ ID NO: 157714

SEQ ID NO: 336396 - DNA, 1000 bp, Homo Sapiens
aaaaaaaaaagaaaaattatgtgtttttttaaagaagtttttttctcctcttctttttctttttttacttaggaaggggtggaagtggtggaggaggttctgatggcagaggtggtggccggggtttgtctgtattgccagatctcgaggagattccaccagaccgaggattcagatagtcactataaggacgaacaaattcaaatgcagtgggctgagtgggctgaacaccctgggcactgagcagggagtgaagcatattcacagtgtcttgatagtctattgtctgggtcgtgttgtgaccattggccccagtgggccctttatccagtttcgaatgagggacacgagttttacagctgggctgtgaaaaggaaaggccacttgtgtctgagctatgcccaggcatctgacccattgtaggaagtgaagggaaggagaaatttagggaagaggatttagtactcttggcaatcttggctggatgatcaaacacagcccctccagtctcttcagagggtccccttttacgagtagaactggaagaggaaaaagaactagacaagctataggttttatgtgctaagttgcttgtctggctactatgttttggatcaccaggacgtttgttcccagtaccaactggaagttgggaatgagagtgcttgtgtgagtggtgattatgatgatgatgatgattagatgggtgagtcttgtgcttttctttgtgctctcggctctttgtaacactgtcctctacagaattgtgcttatcagctgcagcatggacttttatgcgcatttttatctcctctggttttgaagacgcagctttatctccacctgccactgggattctcattttgagagctgttttgtcagccttttccagaaaaggccgctcggggttttctgaaccctctatgggcatttttagaatgactgaagaatggctatcatgatgagaaaggagattctgggcagcatatgcatattgtga

SEQ ID NO: 336397 - DNA, 1000 bp, Homo Sapiens
gaattcttataattttatgttgccttggcaaccattttgtatacaagtttaatttctcataccagaagccgggcttagtcacccttgatatgggtttctggttctataccacacctctggccagagacaagaacttagaggcatctttcctgcctagcagactggattccccacttctctgttgcttccttcagacagaccattcaggcatttgccagtgaattgagagtgaccacaccctatttctttacctacattgttaactgtcttgctgtctctgtctgacttcttattcctgcctcatgtaacctagagaaggaggactgcccttcagactcattatgccctttctgtccaggatctgtaagtaaaagtctttgaacttgttttccattgtggtggtgtattaaatttgtgctttccatctcaggaacagggggctgtcccagcctggttttccctgggggttcctaggggtggggtcatatggagtacaagatcagcctcctagtgccagagtgacagtcagacaggcataaactgggcatggttcagtcacaagtgtatctgccagtatagggaagtttcctgtgtgagagagtccttgatcgcgacttggacaactaagtattaggccatctgcagataaaagaagtatcccgtgaagggcacagtgtaaacactcacacccagctccccttcatttcccattagggcagagttgctagctgctctggtactgaagccccattttaactggaggctctcaaaacagaagaaatagatcaagaccatacagtgaattagaggttgggctgggacatccattcatcccttctgattctgtgtggggctctgcccaccacactacattgcttccctgcctgctatctgaaagatacttcactaaaaactctctttttaaccctggagctgtatctttccaagagacagaaggagaagtatactatttaataccctgtgtagtttgtcttggtct

SEQ ID NO: 336398 - DNA, 1000 bp, Homo Sapiens
ttttttttttttttttttttttttttttttttttttttttttttttttttttttttttttttttttaacattcatcataacatttaattttctctggaaaaatataaagactttatgtaatataaattctatttacactcttctgaactttatgttattatagtttctgggctatataatattggtatttcaatattacatttgatgtttgacccctctacaaaccatcatttttacaacaagtatttgtttcattttgctcacatatttgctactttcctaggttttcattttttttggatctcaaaaatctaatctgggatcactttcctaatacctgaattatatgttttagaatttatttgagaaatcttttctttattaacactcacatattttggttttccttaaaatatctatatttcactttcagtcttaaaatgtgttttcattgagtaggctttctaaaacaacatttatttctcttaagccatcaaagacatctttctattgcatttagccttccaatattgctcctaaaaaagtcagctgtcagtctaattgtggttttttgcttgtttgtttgttttgttttgctttttctgagttggagtctcgctctgttgcccaggctggcatagatggagttgaactcagttctcttggacagaagtcctgtggtctgccatatatacgaaggtatttatatagtccatttacaacaaaaacattaattttaaaagaattggacacagtgttatgggctaaattgttcccttctaaaattcatatgttggaagtcctaaatctcaatatctcagaaggttactgtatttggagggtctttaaatagttaatttatttaaattaggtcatggggaggccctaatccaatatgactagtgtctttataagaagagaagattaggacacaaacacactcagaggaaagaccatgtgaagacacaaggaggagacagccatctacaagccaacaaga

SEQ ID NO: 336399 - DNA, 1000 bp, Homo Sapiens; identical to SEQ ID NO: 157715

SEQ ID NO: 336400 - DNA, 1000 bp, Homo Sapiens
ttttttttttttttttttctctctttttcaggggaggtgggtgcagataagggtgggcagggcactgtatagggaggaaaaaaatactgatattgatgggtcttgggattgcaataagtcagtttaccatttaagaggaaaatttaaatattcagtggaatgaggcactcaaagggttgaaatgcgatttttctttggtttccagggacctgtccctgggctctcactccaaggttaagttccaaaactatactttttggctcacagggctctctgtgatgctctggtgccagctgtgtactcttgagtggttaggcagcagttcacattagatgtgtaaaattaattaaacctaaatctctaggctcaagtccaggatgtcccagactagttcagaaactaagtgctctctcctccccttaaaaaggtgttggcaaatgcaggtctccaaggaagtacgtggcctcaatgggagatgcccagagactgcaacaggtgaaaggtggcccccaaggcccagcccgtctctatgttgttcactttctttgtgagctgtaagactgtgctgtctgcaaagccaaagccatcctttaacagggctgtgatgtagctgagatccatgcacaggaaaggactgcctgaggtgaagttttccaagttatcacacacttccctggcttttctttcaaaatcttcaacttttaaaataccccccttttcataatcaatcatgtctgtgtcaacagctcggtcataatagtaagagaaagcatagaaggaacctctctggacctcctctggctggtgaagttttcctcgtaccaccctcagcacttcggcatagcagggctcaaagcccacctccccttcttggttgccaccatactggtatttcacacccccaaagatccactctgcttccaaccatctcggtaaacaggcactccggaaagtgtgcccatcagtcccttctgtctccagggctcccagggttgctagt

SEQ ID NO: 336401 - DNA, 1000 bp, Homo Sapiens; identical to SEQ ID NO: 157716

SEQ ID NO: 336402 - DNA, 1000 bp, Homo Sapiens; identical to SEQ ID NO: 157717

SEQ ID NO: 336403 - DNA, 1000 bp, Homo Sapiens; identical to SEQ ID NO: 246417

SEQ ID NO: 336404 - DNA, 1000 bp, Homo Sapiens; identical to SEQ ID NO: 157718

SEQ ID NO: 336405 - DNA, 1000 bp, Homo Sapiens
ttttttttttttttttttaaccaccaatacccatttattttaatggaaaaaaaaatctctgcattctatatgttccaaaaggatttaccattgaaacaaatacaatatatggaactctatctgtataatttcactacaacaaagacaacatatgacttctacttcctacagaaggctaactgaaagcacaagtgcaaacatagattgcataagaaagcgtgtgtgtgtgcatgtgcggttaaaacctttagtaagcaactgcattaaaatatgctaagacactcaccttaccctagttcgtggcgagctctaataaaaagccacaagctgtcactagttttatttgatagaaaaatttggtgtgagctttgatgattcatttatggtttatcaacaagaaggtaatcttagaacaagcactaactttccgcttttacatgctcacagaatacaaatcagttacttttcatacataatgaacgtcttttattttcgggtttgcaaacaacggtagtcaattcacacaaaagggtacttttaaaactacctgtatttactctattttatgcctgtatatatgaaacaaacagcgtgaatgtgcataaatgtatgtctgtacatgtgggtatatatgtgtatacaagatggtacctgtacacctctttgtatgcatgtatgacctccatgatgacaggtgcagttgtacatttactgaggagggagagattctctaccatgatctgtgtccccattagaatcagtacgactgtggattcgggacacatacaaatgcaggttggtgcccatgaaagaaaatgtcagcccttttcttggcatttggtggtgaaattgcctgctctgctcctcacctccttggctcaggatcacggcatcagatggcagtgtaaattggttgtagtcctcgaactcaataaagagaaaggacttctttctctgctctccctctctgtggacctgcctggctggttgtggcagcatt

SEQ ID NO: 336406 - DNA, 1000 bp, Homo Sapiens
ttttttttttttttttttttctgctaaaacttggaatttaatgaattttactcactacagttatactcattttacattaaagtaaaaaagaaaatagccaggagagtaattcatctccagaaagcagtttaaagttattgtttttattatttttatttgctaccaatatttttattgtaagaaatacaaaaggtattacaaatatacaaactatttgctctttttgcctcattcaatttagctttcacataagtgaacacattggacagtgatatttcaacaccaattttgaaaaaaacaatgaacttcatcatctgacaataaatacctacattttcattctagcacccagtaagacatccagtttccaaaggattattggtatgcaaccctctgaattttctgacatgttacctttgccactgcaacagaaacaccactgcagttctccctttcccaataagtcagagtaaggggcaggtaagaatggctatctgacttcagaaaccctgggtcacaaagcatcccttacttgagctacttttaaaaccagatttttaatgatagggtacttaaagttttggtggtccttgaatgacatattttacgttacatatttaccctacttttctattctcctcctcagataggaagggtatagataaactggctatattttcatctgcctcttgggaaaggagcaagagcattcagctcagagcattctgaagacagtagccttagagataagctttctttctttcttcttcttttgcttcaagagggctttctgtgtgtaatggagggatggttgctagagtgagacagcccttcccctcttgctatgtctataccatacctgaggccatttttcttagagggcaaaaacgttagaataggtaggaaggttcttgctttcagagagctgtgctgcacccacagggtggacccgacaggccactgtggtaactctcaatctgtgtacagagaaaagagaagc

SEQ ID NO: 336407 - DNA, 1000 bp, Homo Sapiens
accacatacaaagacaaatgcttgcccctagcacattcacagcttcaactgctacagactgtcactgaaaaaaatgcattggtcagtctgaaccatgtcaagtaaactatggaagtagcaaatccacaacacaaactgtgctagcactttcttttcaagtctaactccaaaataggtacaacttggaagccactaccccaatctgtgaaaagtggtggaacttggctactggacattttgaagatgtggttgtacagtacattctcatggcccataccaggttcccgcagagagctgcacagtcagccctgcagcattcgcaacagtgcatggacaagattccgatgcagctcagtaccgatgtgtctgatgtgagtactgtggaggctgctgggaggtagctgagtatcccatgctgctctgcggctgtgatgtgcttggtccagggttgggataggcagcatgtggattggaacgctgatagtctgaggtcatgataagtccacctgaggtagtggtaggaggaacaactctcactttcttcaacgggggtccctgtgtgtgactgctgtcttgattccctgggtggccagttccattagtgtggttattgccctgctgctgctgctggttctttttgtctcctttgtcatcaggttcttcttccgttaaaaattctcgttttgggtaagggatttgacaaccggcaaaaacgtctgatgtaggaagtgggtcttctaagaaataggggtcctgcatagcctgttctgaggtaattcgctttattgggtccatggtaagcagcttctgaagcaagtggaatgctttactatctggtttaactttatgtttttccatatacttgataaggctgcagttggtatacgtatttcttctgaaatctttcattaatgttgaatgttcaggcatcttttttatatcttcccaatctttatctgcaggaaatcccattacattgaatattctgtccagctggtca

SEQ ID NO: 336408 - DNA, 1000 bp, Homo Sapiens
ttttttttttttttttttcctgttttgaaagtgttttaattagacaaaagcatcaggacaaaccattttaaaaacaaagtcttcaacttgggtgttgagattggcaaaaggggaagcaagggaaaagccaaggaaagataaaatattcagaagaaagtcaaagttatctgcaattacatgttagaacagattttgcaggttaaaaagatgttgcttaaatatattcataagcctgttgtaagattttcacttatgcagtttcagaaaatttagctgcttaacatatgacagaactgtattttaacaaatgacattaaaagtcaggagagctactcagttaattgataaagtagaggcaacgtgggggagccctccccacgtttattgaagatttgtggctcccccagccccgtttgcctgcatcaggctaacaacctcattcctcccatagagcctggccaaatcacaggcggtgtcccccttatggttccgatgccccacattgctggccgtgtgcttcaccaggaactccaccacccggaggtggccttctttggcagccaagtgcaagggcaggttcccttcattatcctcgatgttaacatcagcttgaaactccagcaaagtctgtaaagtgtccaggaaacctgctctggccgcatcatgaatgacagcgaaaccagttcggtctttcaaatcgggattagcacctctaagtagcagtctcctggcaatctcgggatttccaagtttcataacctgcagcgcagtccttccaaatccattttgtgcattgacgtttacattattttgcaacaaactagtaagttgctctaggtcccccctggcagctgcggacgccaactcgttcccccaaggctcggccattctttagggtcccttgttcacggtggtgacttgagccgtgtgaggcagaactgcaggggcaggtcctccagggggctcggtttccatccgtctcgccgaagggatagtcctg

SEQ ID NO: 336409 - DNA, 1000 bp, Homo Sapiens
ttttttttttttttttttaaatccaactaagccctttagaaagtactccagactacatgaggaggaagtgcaggagaactgacttcctattgtgccttgcataaaacattttgctaaaattaaaagcagctccaagtgcaaaagtaaatatttgtgcaaaaaggcacactgccaggtgcaatcttaaaacatcgtcaacttactcattttatagtgtttgactcttttaaattatgaaacctagcaagtaaggggaaggaagttcacatcagaaaatacactttagaaaaggtacaagacattttgctggcaatttgctacttatttcataacatagatcaagtaagtgtttgttaaatattcacagtaatttcagagagaaacatatctccaaaacttcaacctattgcatttttaactatttttctgtacaatttataaaacatctgtcagtgtttttctgaataattccttcttgtcagtccttccctctctggatccagttataccttcaaggtgggttgtaggattcctttctcaatgagatgagtcttcagggttttatatatatttaactgctgttcaggttgaagcaccaacaactgctgtagcactttgctgggatttgggccccggataaaacttgtgatgtacacatgtacaaaagttgccatcaaatactgacaatcaaatctgtccattatcccaccatgtccaggaatggtatttgcaaaatccttgattttgaaggctcttttgaatccactagcaaagaagcctccaaatgggccaattaaagatgcaaaggttgacagtgcaatgctgtggatctggaaagggtacaagctcactctttcctgtctcaagactgcctttagaaagggtggaagtgagtaagtctgaagctggaaaagttctgagggctcacattctgtcacgaaggagtttacatcacttcggtattccactgggcagacaaagtactggtatttggataaca

SEQ ID NO: 336410 - DNA, 1000 bp, Homo Sapiens
tttttttttttttttttttctggaaagctcatttatctctttttctttttagaaaaaattcaactgtgttcaaatactccccacttcccttcaccatatcacttctccccccatggatccagaaggctttaaaaactctggcttggatgttacacagaccaacaacccaaacagcagcaacaacaacacaaactccccccacccccttcttcatcagccccaagattgtgaaaatgacaggaagtccaggttggctctggcatttatagcactgacatacattcagcccagagaagctctggtgacaggctctctaaacaagtccctgttcgggccccctggtcaggcctggagtccaataaccaccccctcataccacaccctgtgcatacaccagccaagcctttcctggtctgggaagggaagagaaaaaagacgcaggccacctgggggttctgcagtctttggtcagtccagctttctatcttagctgcctttggcttccgcagtgtaaaccttgcctgcccggaggcaggaggcccagctggacctccgagggccatgagcaggcagcagccatcttggcctcaagcttgcctttcccttgagtccctctctcccctcggctctagccagaggtgtagcctgcagatctaggaagagaagagctggggaggaggatgaaggcctggttggtgtggtcagtccaggcaatgcttctgccagtccggaatgaagcccagcggaggctttctgtctcctcagtggcagaaaaagccagatgggaaaaagtaaaaatctgggagagtatatttcttgaggccccaaatcccacttgtcttactcctggctcccatttttcctctgagagccaggtctgtaggtctatggctgtgggtgggaggggaggggtctctcctgaggagtctagcagagtccacgctcctcatggctcagcctggaattgctctgccgctgcagaccccggtgggtcactggg

SEQ ID NO: 336411 - DNA, 1000 bp, Homo Sapiens
atacatacatacatttatatttatagaaatctcaggaagaaattgcagcatgggaagatggacagcaaagcaccgatgacctgctagaacgtcctggcaggtgggggctggcagagttggggcatgggctttaaaaccctttctggaagcaaggggtggggcaaggatctgatgattgtttccacgtggcagggaaagagaacagaggaaggatgatcctgggagggtggccatcctgatgaccaacctgttgtggttctgattgacttggggggggggggggggtctcagcaacagcttctccaagaggagctggagggtggggaaggcatgaaggctggggagaggctcagccttccttctccccaggacactgctgggtggagctgggttggtagtggagtgcccgaggccccctgccaggacgtgtctaggtgtaggcagctctgtgcatcagcagaggctgtggggagaaggtatgggtcggaggtgagaaggtcagtagtctctccggtggaaggcagaggccagtcaccaggactggctgggtcagaacctgtttaatggcggccagctttcttggacctcttggtggggaacttgcagctgcggaaggcgtccgtgtcacggatgtgctggcccttgaacttggcaggtgaggcacaggtggcatctgggcgggaggccttggcttccagccaccgccgaaggccccggagctggcaggtacacttccaggggttattggtaagggcgagggtctccaggctgtcgaaggggaagttcgagggtagctggttcaagcggttgttctccaaatggacgtgtttcagcgtggttacacccaggaaggcaccatctgagaacttctccaggttggtgttgtccagccagagggtctccaggtatctgccaaaggactggaaggcattgtccgggatgcttttcagggggttgtgggacagcttcagctcctccaccacccgtagcttgctcaggg

SEQ ID NO: 336412 - DNA, 1000 bp, Homo Sapiens
tttttttttttttttttttttttttttttttctgttatctgcaaataagcactttattaccaaatagttcagcatcagaacaagaattctaattccaaaagggtttcctttacattacatgacattgtgagatacacattagaagaatctgagactatgttccatttcagtttctcttttgcaattaggtaatttgttttgatctaaaaagtacaaatttatctcattcttgttaatgctgtccatgaaatgtaagtatcagttccttctcagctagtgctttatagttatactggtgccaggttaagagacctattttatagtgagtgacatgaaagtcaactacaagaaaagcacattgtcattttcatttacagaggcaagtccctcttaacacaaagaaaagcaaaggaccttatgtgattatgtaaggcagatcagcccaggaatttcattcaaagataatacttcatactccataatcccatgtgagaaattaatgaatgactccaagtaaaaagaaaattaaaattagcccttgggccttgacaatttaattgccagggccttttgtcaattctaaacaatgttctaaattagccacaatttctcagaatgatataccagaagaatatgaacctcaataattacaggctgttttaagtttattttgtgaaagttattccttctcccagtattccatgactaaagctgttctcaggacatactgaagatttataataaattgagtgcctattatacacaaggcactgtgctgagtgctgaaaatgtggtaaggacagacagcactccttgtcaagctatctatgtggtatcagccagctgaataatggaacatttgggccagaatagcatatactgagaccagggtaccaaaggtgtccaatttaagtgactcaaaaagaggaaatggtaaataagatatttcaattttttttccttgaccttagtcacatctgatcagaacattcaatgcttt

SEQ ID NO: 336413 - DNA, 1000 bp, Homo Sapiens
ttttttttttttttttttttttttctattttataaaactctaaatttattcaaaatgttaaaagattttgttctccctccaaaatattttacaattaaaaaaatcaaaactatatcctattttctcagccactgtacaagttgctgtttccatctcaggactagtctctggccctccaacactctgtccctccctcaatcccccacctcctttcaatattgctgttaagtttgtttataaaaccctccaccctctctccccaccccataccctgctctgctctgcccagagtggtgtctctttgcgattccaggccgttggctgcaggtgaagccgaatggatgggtacgatgtacacaagcaacacctgaggggcaagagtatgctttgtgcttctgggagaatcacttttttcttggtcaagtggaggatcgttcttttttgtcccatggacacctgttctgagccaaatatttggcttatagttgcccacagccatgtagctctgcttttttctgcacgttcctctgggcgtgggtccgtgacagatggctcttatgactgtaccatttgtttgcctgtggactgttagggacaggaaaggggcacatgactagaatggggcttgatggagccccaacttctcagagagtgggcacaaaaccccaggggggaagttttggttttctagtaggcaaagccagggccaaccaggaccatggaaggtagggaaaaggggagaaacgtctaaccatatagctctgagtgagccatgttccttttgaaaaccccctgtccatccccccctttattctgtaggtcccaggaaaattccaaagaggaggaaggaaaagaggaaaaggattctgttctgctgatgagaaaaggcaggaactgacacagtgctcagggctggggagaggcccgctgccatctgcagctgtcactgcttccctgttctgtgagggaggttgtgcaggacagaagccaggccctcaga

SEQ ID NO: 336414 - DNA, 1000 bp, Homo Sapiens
tcctttttcttaaatttaatttgtcatatataacgtttttatatacaatcagtgtgcattgtaacagtttatattaaaagtcaatcaagtttatctaaaatgttaacctggctgcatagcacatttgacattattgcccacataaaacgggaaaacaaacggatttacaataacttttggccgttttggattctgaaaagtgtttatacacctacccttttaaaccagatgcatctgaaaaaagtgtttccagagcatgcagtttagattttacatatctcgccattttttaaaactacaaacacaatattgactaaaaaaggaaaaaaaagggaataacatgtatctaataaaatattcagtataaaaagaggactaatggaattaagtggcccctttccccatttttacattctaaacaatgattccatcaagacaaatcattaaaaagtgttattacactgatttttttttttttaataagaaggcctgagttggtagggaaaggaacagtcaaaaaaagcctgagaaagggaaggaagtaaggaaagttcctttaatatttacaataatttacagccattttttttgtaaaaaggcataatagatcacaaacaggaaattcctggctattttacagatataagtacagaatttaaatattcaagcttgtgatgaaaagcggcaaggtggtcgcagtgtacaatgtaaacaagtagctttggaaatgaacaaagtccttgagtgtttttctttattaagaaagaactctctttcattccttcctgaaacatgatcacaggtcagagtaaagttcatatataaacataatttaaatggaggtcagtctaaaatcactgacttaaaaacagttttatccagcctgtatgggagggcagtgttgaggtccctgtaatagtaaacattttccatttctttaaaaaagaaaacaaaaaaaagtactacaattttgtagtacagtgcagcataatccttaaat

SEQ ID NO: 336415 - DNA, 1000 bp, Homo Sapiens; identical to SEQ ID NO: 157720

SEQ ID NO: 336416 - DNA, 1000 bp, Homo Sapiens
cagaggaaagagcccagaacagatttatttttctttagataaagttcatacagaatatgttacagtcaggagttctcagctttcaccaaaaggtcagaagttattgcagttgtgcccagtggataggatggaggaagggaaacttctagaaagctgcctgtgttcagagaaggaatcgtcaatgtttaaagttgtggggctgccctgcaaaggatgttccagggcaggtaggagtcaggagtaggagacaaggcgcgtagggggcgatagggtggcctgggcttgggcaggctggaggctgcctccctaccggaagcagcgtccgggccatctggccaggacctgccaaggggacagcagagccagggccacagggtgccctggggccagccctgccagccggtgtctcagccccgccgtagtgcctgcagctggtgggccactttctccagctctgcttcaatggccgacaggctctccagctcctggtcctctggtctgcggtttgcgctgccctcctcctctttcttctcctcggggtagcctcggacctggaggggcaggcccgcctcaaggctgtcctcccgggaggatggcctccagcctcgtcgcagctgcggcccagggcccctgaagccgtaggcccgggcccggaaggagagcttcatggaactgtcccggttgtcctcctcctcctcctgcccctccagccgcttctcagccgtcagctccttggccagctggtccatcttgctccagcgtttggagtcctcccactccttggagagccgctcctcctcctgctccagctctccgctcttcccaccccggaagaggccttgcgggaccactgccatctcctcctcctcctctttctgctgggagtgctcctgttctcccttcccttcggggtcctgagcctcctcagccccaggcttcccagctccatccacagccagagcctccgaccgactctcgcctttccggatctccttgtagc

SEQ ID NO: 336417 - DNA, 1000 bp, Homo Sapiens
ttttttttttttttttttgggtttttatttttttatttgtatagtacaatctctgtggtagcagaaatatatgcacaaaaaacaattcaaataagagttcagagtaaaaaaaagtcagctaagactgtatcccgcaggacatttcatatatatggatttcacagctacactcgatccacgccccacaccacatacaggctgctgtctcccacaagaatgatgatgtcaggggcatcaggaaaggtaagggccgggaaaccgggcccttggagaaccctgcccaggggaggcccagcctactcacaggatccgacactccaggcagagcagagggcaggagaggcccaaagagctaggtcaagcagctggctcccctgggaggggagccgggagacagggaggtcctcacactgcccccgtggccacgcatggctgtctgcacactccatcaggaggaagggcaggggagaagtcacatgcagtacagtgaaactcatcagtgtcacacacgcccagcaggaggggagagctctgctccacacgctggcggccttggctgctccagagcaatccgctgctccagcttcagccatgggaccaagagggtaaaggagcagcttctggaggccccaggcagaggccaccttgcagcagtgactggcgactttgcagtacatctctgctcacttgctgtcccttgggagtgagcaccgtctataacacatcgccatctacaaaagcctggtcacagtgttcaccagcacattcatgaaaatttaaatcaacattaaccaaagtacctgcaagtaacactgcttactcttgctgtttgcctcatctgactggaaaccttagcccccaaatatgaaatgccttctctagattaaaaggattcagagatgttgcactattgcactatatttctgcttcccgatctcgtttctgagtcctagtgaaatcgtaaacaagagatgaaataaacgtcgctccattttaatac

SEQ ID NO: 336418 - DNA, 1000 bp, Homo Sapiens
ttttttttttttttttaatttaaaaaccatttaatacacaaagtgaaaaactattagaatataaaagcatttcacattttttaagacaaataatatcttctaaattacttagcagatgatagaggtccacagtcctttctctgaaacccttggggcaagttgtttcagaattatgaaattttagattttagaaaagtagttttgtgcatataccatactacattaaccagccctcaccacagtctgtggcagcagccctccctctcatcatcaagcagcaaaataaaggaatattcacactaaatgggataaaaagattcaaggtcagttcagattagattgcaagcaaatgaattttgtcaccaagcttatggaaaccttgttttcagagctttttggattttggaattacaattacagataaaggagtgcagacctttataaatttgtatgacaagacatgaaagattgtttaaacaaatgactcatttttacaaatgaaaaaacatgtaattttcaaatacattataaattaacaggcatcttctctttgatattattaaatgtacatcttaaatacatatacacacaacaacatgatttatgaaagccaactaatattagaagcacagatacacaatcccttcgatgagaaggggatactgttaaattttcagtggaatttaaaatgattacaccaactccttatgatgccaggaagagaacctgttcagtgcaacacaaggaggtagaatttattcttcaagaaatagaacttgtgagcagcctttttagaaaaaaacacaggtagacttttacttaaaatgcctattacttgaggttttcttctctgtatacaaaactacatttggtcttacgcccaaaagttaaaagttgacactaatacatagaaggtatttttaatcagttaaataagtaatgttttaccaagactgaaggcaaatgtgtcgtgatgatgcttctaaatagctgtggtatt

SEQ ID NO: 336419 - DNA, 1000 bp, Homo Sapiens
actttctgggtttctagtgaatttaatgcatgagtctcaaaaatcaatggcaaaggaaaaaatgaataaaattaaaatggggtcaggagaaaagggccatgggcacacacaggaggggcagtcagtggctgagctaggagctgaagcaggggaattccttaggtgtcatatctcgtccaacccgtagtcctcctccgggaagtcccccaccgtcacgactgctggcttgacaaaggcgccatacttggcctggcattcgaagtagcgtttcccattcacactgccatcatttttccccagtggctcatcatagcggacaccaatccagtagccaggcttgaaatctgtgagacctacatacatgacggtgccccggcgaggggattgtcccgccgcccgcacctcacagcggctgcccacggggatggagctggcctgggccttctcctcggccaggcgctgggcggcctcggcctcctgctgagcccgctcctcctcgttgtaccggccgagcttgctgcgcttcaggaaagagcggaccgtgtcttgcctctggtcgtaggcttcttgtgagatcgtgtacttctccacccgggacacgtcctcatactcaccaaggcgggcgccactgtggtcaatgacgtggatgcggcagccgtcatctacagggtaggagcccaggagcgcatcctcttgatccagcttgctgtagaacttgtcgtcaactccatacagctccagttccatgcaggaagcagggctgcccaccagcaactccagtttacacttgaactcagcgatggtgaggctgcggctgtatcgcttctcggagcggaaggtgttgagggagctgctgatgaaaacggtcaccgtgggtgccgacacccccgtcacctccatcttgccgcgccctgcggatgcctgcagcgcggtccagccgcctcacacccgctccgcagccgccgccgccgctgctgctgctgggctatcagccccgcct

SEQ ID NO: 336420 - DNA, 1000 bp, Homo Sapiens
tttacccagttgtttagcattttattttatcgccccctacaggaagtctaaaatacatttagtatatcgccccctacaggaatacatttagtataaatgtactatatacatttagtatatcgccccctacaggaagtctaaaatacattttagaaaattttataatcaaaaaaaggatgaatgatttattttatttatctgacaaaaattcagccctaggctattgacagctgcagttctcctatccacttccacataatttttaaaatgtgaatgccaggaatggtgctgttgatatgaatattaggacaaggagcagacgtttcatcaggactaggtgtctctggcggagtctgtggaggaataaacaaagatactcgtgcaatgttggatatttctgatttcagatcgaccttatcaacagcctgaatagcaatgaaaagatctgtgccattttcaaaagtaatgttttctggtttaaacaaaaagacttcctcagagttggcttcctttgggatgagagcagtagtattcacttgaagagattcattgaacttgtctctgagatcaagaatacttgtacttattcgaatgatatacttgtgagctgttccatggtcataatcatccccaggagctgtccaagtcagattaatgagactgcccccgtgaatttccgccttcaggtcggtgatttggccaggtgggaagagatcaggtatgggagcatttgggacatcagaagccacaaatgagcctcccgaggatgttctgctgaaacacacttgcttgtgttgaacatcatccttattaatttcaggtcttggtggattccattgtatttcatcattctcaatccagccaggtatgtacagtgctccactctgctggggtatcactctccgtctggctgcgttaactcctcccagagcccgcacttttacactgtatctaccattcgtgtcataagttgtgaaataccttgagtagacaccgtcat

SEQ ID NO: 336421 - DNA, 1000 bp, Homo Sapiens
gacagaagacattttattctcacatgttagggttacaatgagaactcccaagttccaaaggttcaaataaaaatagcattttacaaattaaaaaaaatacaatttatatacacagtggaattagctaacatcatacaaacaaacagtgcaaacagaaaaaaggaagctgcgactgcggcaatggccaaggtccgcagagctgtggtgcaatactgcacatcaatactgcagggctggcgaggccaccttgggcctctcgaaaggctttcctgtcacccagggtcatgtcagtgcataattctgcatcacaaatgccatacagtggactgggtcctgaaagtgtcccttccagctgggaactgttaagttaatcaaggtcaggagcaaatcatccctcagcacaaggtcccaaagccagggccgggggcccattggccccactccctgatcacctcgcctaggggccatggaacaccaagctggagatgaaacacaaaacaccacttcttaccacccgtaggctccccatccacagatctgctttactgaggcgactgatcactgggtgatggggctgctaatgggtgagatgctgaaaaggctggtttctaatggacagaaatggaaggagcgagggtcacagttgatttgtcatgagtggagaagttgctgtctttgggcttatctggaaagcgcagatgcagagagaggagaaaaggaaaccacgtgcctttgcatggggcctgggtttggggcctccttggcagccgtccagtcagtttaggggagggaggtatttgcattctactgtctatctctgggctaaactgatgggaacaaaatatctggtgacttaaacacaacaggatgtgcacgagggatgaattccaataacattcaccggggcagcctcagggcaggcggctgctgatccagccctcgagaggccggggtcctcctgcagggcgttagctctgccagctccaggaaggggcgggga

SEQ ID NO: 336422 - DNA, 1000 bp, Homo Sapiens; identical to SEQ ID NO: 157723

SEQ ID NO: 336423 - DNA, 1000 bp, Homo Sapiens
ttttttttttttttttttgaaggtttttaaaatttattttttaaatgtataatgggcacataattgtacatatatatgggatacaatgtggtgtttcaatgcatgtacacacagtataatgatcaaataggcgtaattaccatatccaccactataaacatttgttatttctttgtggtgacatttaaaaacctgcttttctagctatcttgaaatacatgctacattattatttgctatagtcaccctactgtggtgaataccaaaatttattcttcctaggtgtaactttatacccattgaccaacatctttcagtgcctctgccttctttctctccctagcccctggtaaccacgattctaccctctacttgtgtgagatcaactttttaaaattccacatatgagtgagatcaactttttaaaattccacatatgagtgagatcatgtggtgtttgtctttctgtgcctggcttatttcatttaacatttcaaatgtattctatcaattgtaacttgctagtgcattgcatgtattctgaaatatactgatgacaggatgtatctcaaagattatcaacatgattgcatttctctgccacctaaccatacactatacatttatcttgactctatggttttcaaggacagtactttgagtttgctcattgccttacttttctttgaacctattaaaacgctacttcatttaaattttatctaaactccacccttccaccaaagcctaaaatattttccttttttgaagctgcacttatgcttgtgtttctcttttgagggagcaagagttaagttcagcttttgtttccagatttgaatgatttaagagtactttaacaagtgaatctgaatacgtatagtaatgtaacattttaacttttgtagaaagttttgtaattatctaaggactgtttaccttatccttttatggacaacaagaagaccttttggtcagccacagtttttattttcctttt

SEQ ID NO: 336424 - DNA, 1000 bp, Homo Sapiens
tttttttttttttttttttttttggtcattaacacagtttattattggcacacttatcagtaaagcatacataaaatacagctgttttttaacacacggagccactgtgcctttacatgtgtggaggaacatattaatatgcaaatggaaaaattaattctcttataaagtttcacataaatacactggagttgcccaaaaacgaaaagtccccataaaagaaccaggtgagagctttacaaaatatcatacaagaaatatactataaaaagaaaggatggtcaactcaggtacaattagaaaacacacaaaggttcaggtttattaaactgcccacaaaaccaatggattacatggcttgaaaatatttggatcaacagcaactttacaaatgcataaattcttaagggtccaattgtctttctttacttaaaaatctgccctggtgtctttgatgaaaaaaatgacatttcttgtttcagcacttgggctaaattgagtcgactcaagacaagaaccaattgacatcagctcaaccataaattaccttgctgggccctcttagctgttgcccaatgaaagaaaacataaagaaaaaaaaaataaggtacatttaaattactttccaaagctgatttttttgtcttttctttttttactgaaacaagaaactctcagatgcaagtcaaaaagcagaaaatattttacaatattaaaaagtcatctgtagttaggttcggcatattaatgagatcctgagcactgagcatttatggacaatatggccttcgtttgatgcataaaaaggaaattcaacacaaacacgttgttaaaaccgtgccagaagatgcgctagagttttctctcattttaattacaatcagtgccagtatctgtattacctgtgaaggcctccaagaaagggtcatggaagcttactgggaataatcctctcaattagaaaaaaagaaagaagaaagaaaatcagatcattgtggtt

SEQ ID NO: 336425 - DNA, 1000 bp, Homo Sapiens; identical to SEQ ID NO: 157724

SEQ ID NO: 336426 - DNA, 1000 bp, Homo Sapiens; identical to SEQ ID NO: 157725

SEQ ID NO: 336427 - DNA, 1000 bp, Homo Sapiens
ttttttttttttttaatgctttgaaatgatttattcacctgggaaagtgatcacaacttgctgctaattaaaaccaacaatagaacagtgagtacaattgaagtccatcattgttattatcataaatatgcacccaacaaaaaacaaactaaaagaaaatacactcaaaagcacacagtgggcacattttgtctttgggtagtggaagtgtaggtaatgtcagtgtttggggtttttctttgaatttttaagctgttttagaaataagttttgttattaggaaaattatttttaaagaaatatacatctgagggaaaagagaacaaaggcatgataaataaggggtccttggttggagatgatgcatccagaacattttggataaataagctactttgagttaagggccttctcggcctcctacatcaacacagaatctcaccccaccctcctagtagacactttcctcccaaccccctatcagctacaaatactgtcagcttacacagcaggccttattattattattattttttttttttgctgacaagtccaagatggcagtcggaactctgacccataaaaccagaaggcttagatgaagaacaaaaagaagggaaaccaaccctgcttccttttgcctgttattaatcgctgcaataaagccattagaatctaccaacatatcacccaacttgaaaagaagagagattctgaaaaatagtcagaaaagaagggtaaatggaaatgatgagtccctcccctttatggctattttaagaagcacaccatgttattcatatggcccgtgcttagcccactccctgaattgtttgattttagtggatataaaaattcttcctaagggctttcttagttccactgccagcagtagttccccatttctatttctcgttaggtctcaactcttccgtcatgagttctatgttccccaggattccaagagcccaaatcctgcggtgggagtgaaggggaggca

SEQ ID NO: 336428 - DNA, 1000 bp, Homo Sapiens
tttttttttttttttgataatgaagttccccgttttaatcattattaaaaagtaacctgaagaaaactgatgtcaaccaccctgttccggccgcatatagaaagtaactttgaaatgatgaatctggccctgtgcagtggctcacgcctgtaatcccagcactttgggaggctgaggcaggcaaattgcttgagccaagggtttccagtccaacctgggtaacatactgagaccctgtctccacaaaaaatacaaaaattagccaggtgtggtggtgtgctcctgtagtcctagctacttgggggcttagatgggaggatcacttgagctcaggaggtggtggctgcagtgagccatgattgtgggattggacttcagcctggatgacagagtgagatcctgtctcaaaaaaaaaaaaatcaatctttttttttgttcttcatttctttctgcctttgacagccccttcctgtctataaaactaacctcttctacccagctcattgcagcactctctgtattttatggagtgaatctgttcctgattcaatgagtctgttgcctgattctagaattgccaataacgctaattgagacctttaaactaaatttgttgtaatctggtgttttgacaggctgctgctctgagggaggcggaagtaaaggccgagagtatcaggatcactctggctgctaggtgcagatgagatgggaggagagcaagagagaggaaggacaggggccagttggaaaactattacagcaattctccagcctggccaacatggtgaaactctgtttctaataaaaacacaaaaattagggccaggcatggtggctcacacctgtaatcccagcactttgggaggccaaggcgggtggatcccaaggtcaagagatcgagatcatcctggccaacgcagtgaaaccccatctctactaaaattataaaaattagctgtgcgtggtggcacgcgcatgtagttccagctactcagga

SEQ ID NO: 336429 - DNA, 1000 bp, Homo Sapiens
ccgaattccggtttgagatgaggtctcgctatgttgcccagtctgctctccaactcttggcctccagtgatcctcctgcttcggcttcccaaagcactgggattataggcatgagccaccatgcccggcagtgaagtattttctatccttgaaatgtgttagacaaattcctgaggggaaaccccacacattcaataacactttactttttcagcaaagcttcccatgtattggagcctcattttatccctcacccatgaactttaaaagtggaaaatcattttgttcttaaaaagaggaacagtcaggaaaaggtagggctctcaaatgatagtgagagctcagggactcgaacacttgatgcaacttgtcgagctcaggcccagccccgcgaggagctgagtcggggctggcgtgctggcgggacggtcagagctgcagccactgaggtcacgactacggaaaagcatcttctcttgagccgtgggggaaggtggggcgctggggcgaggggcgcagcgggcgctggggacacacctgctggaactgcgcgcgggatccgcctcaccccaccttactccgccttctcctccctttcctccggcatcttcaccgacaggatctgctctcccggctccgggcccgggctcatgcagatcctcaccgagtgctcttcgggctcggccggcccctcctcctctccctccggcctcccaagggaggcaggcggtggagagctcggtggagaccccgggggctcggggggcgtccggggcgcgggtgggtcggtggcggcctcctttgggtgcgtgtgctggtctggggcggcggagccttcctctcccttgacgtcttgcgagctcttggcctgttccaccaactcttgctgctttgcagccgcctccagcgcggccagttctttgagccgggcccggaggtgagcaagtttgccgccttttgcccccttgccacccatctttcctgtcatagcgagggcagc

SEQ ID NO: 336430 - DNA, 1000 bp, Homo Sapiens
tttttttttttttttttatttttaaatccaggtctttatttttcctgtgcaaatatgaatgcaggcataactaacagttaaggcttttaaaatatatacattttgaggaggaaaagaggagagagaaaaaggaagaaagaaggaagaagaaagaaaaaaggaaaggaagaagaaaggaaaaaggaaagaaagaagaaagactcatctttgggtaatttgcaacatgttacataagtgaaggatggaatttgaggtcataatttgcaatcacggaactcaaaaatataaatctgttataaaatgttaatgaaattatatttactggggtttgttttttaaaaaagctaatttctgcaatctgtgagctttcggtgagccaaaagctttgccttgggatgcaattccaagggatcttgaggcttcctcttcatgggtgaatgggcagtttgcaaagatacgttcctaatggtctaatcttctaaaactctcagttgtcagcttttttggtttagtacaccattccaaccttcaatctaaaatgctctccctgtacatagctctcctccttgagttagaataggtcacctagggccctgactcaagaatggaggataggggctgtctttgaatctctttggcaagtgagaaggaggggatgtctcttctcctaactgagatgcttttttctgtgaagcagattctggtttcacagtggctgaacggcaaggagtctggatttgcttcacagattttaaatgacctcaaatggggcagcctctttccatccggcagaacttctacttgccatagcactcccaaaagccagggtttctagggccccaaagaacacacgaggtgataccagattaagaaatatgcctcaaactgtcttgtgtaagtctgaattttagtcactatgttgtaccttcagcttcctgttatatacccattatcaggtggtggtgaagttggacaggagaaaggtgactaaataatcttt

SEQ ID NO: 336431 - DNA, 1000 bp, Homo Sapiens; identical to SEQ ID NO: 157726

SEQ ID NO: 336432 - DNA, 1000 bp, Homo Sapiens; identical to SEQ ID NO: 157728

SEQ ID NO: 336433 - DNA, 1000 bp, Homo Sapiens
catcgtaaaataacttttatacaggattagtagatctgtttacatataaaaaacagaaaggacctcattacagttagatttcacataaattacaaattgacttttaaaaactactattcaacttcatttaaagtcccttttaaaaatttcattttgaaggcacagtgcatgaaataaaccaaagactgaagcacttgagatgaatgggtgttgggcacctcacataaacagctgtagattgctctagaactgggagtatcacttggaaaaactggagaggtgaaaagctgatttttaatctgagcataaaaaaatactattgtcatacctccagaaaatctgtagcatggccagcatagaaggtagttagtacactcatgttatgccatttataaaaatcataatcatacatatttacataatttatatccaactgcctcaaaatggtaacctactttcaaatttcataatgtatgctgtcaaatcaaaatcaaccaggacaatattctgaaaatcaagtggaatcattaacgaattattgctaaaaataggataaatgggtattgggagagatttcttcatgaactagaaatccaagttcagctgacattaatcaaagacccaaatcatatccccaaaattttagctaaaacaaatcagaaacccaaagagttaccaaaaaagttgctatagaaaatcactgaacatcaatcatagtggaatttttggtaataacaataaaacaaaaatatattggaaatcctgggttgtcactgttaaaacaattccaccagaaaaccataatgtagggcactattacagaattcattgccaagaagcttttcatacagcagggacaatacctggcacaagtgcatttctggcaacaacaagataaaactatttaatgttgagaataaatggaaatggaggagcaggtcatggttactgagtaacctggtgttagctcaaacacaataagctcagacataaacactac

SEQ ID NO: 336434 - DNA, 1000 bp, Homo Sapiens; identical to SEQ ID NO: 157729

SEQ ID NO: 336435 - DNA, 1000 bp, Homo Sapiens; identical to SEQ ID NO: 157731

SEQ ID NO: 336436 - DNA, 1000 bp, Homo Sapiens; identical to SEQ ID NO: 157733

SEQ ID NO: 336437 - DNA, 1000 bp, Homo Sapiens
tttttttttttttttggtttcatttttcttttatttttttaaaaaagcccctaaattctatggcttcaagggagcatcagagaaacgtaaatgccatttctgtacacttggtaaagcaaaaactagactcacagccaccgccctgggcacggccccaagctgctccactctgcccggcagcctccagggcaccccactggggaaccgcccgccagtccagggccgcccccaggcccctgcaatatacctgcagggctgggccgggggctttaaggcgttttgtctccggctgcttgccgggtgtcggagcagaggcaggaagctccgtgcccacgcgccccacgcggcagggctgagggccgagcagggtgacaccaaccggtcctcccacctcgggttccaggcgccggggcgcagcctccgggagcaagtgcgtcgagaagcacccgcctggcagcgcccacccgccccttgccagggccaggctgggaagagactgcagcagccgtgcccgcggcgcccgagctttggtgcagcattttggttggggagccggcttcagccacggccccacccctgccttcccctttggtttcggggaggcctggggcacggcctcacccctggcaacaatgcctgtccccctcccaggagggcctgggcaagacagctccacagcacccctccaggccgggcctgccctcccctcgagaaaacggcctttggatcgagggagacaagctggactttatgacgctaacgggggcggctggcggggcggggccaggccggggggcctccaggatcacactactcacttcagcaaagaaacggaggggcaggagtggggtagggcgggcctctgttttttttttcctcttttccttgttttaaatagttaatgctcttggaggggaggactagacacaggtgtagaaatttcggccaaagtcttacatgaaggaagtgaccccacgtcccgggggtggggccgcctgag

SEQ ID NO: 336438 - DNA, 627 bp, Homo Sapiens
tttttttttttttttttttgcaagaagcagcactggccatttattgtgacagatacggcccacggacctgaagtgccctccaccatggccccaaacccaatggccttcgccctcggggacttatcacatctgcacacagttgtgctttaggagctgagaggagttctgccagggaaccacaaggacctcaaagtcacagcgcagcttctcctgctgcgcccctgctgccagggggcaagtggtgaggtcgacgtggtctccagtgaccctggtcttgcggcagtctgtgctccccatctccatcgtcaggaagtacttgatgccggccaccagctggctctgcgccttgatgatgtgcgtgtctcggaagtagtagatgctgttgctgcccatgttgtagctggccacggccgcctgcgccgccttctgcacctgcgggtcgtcgggcgacaggtcccggagttctccgaccatgcgctcctgcggccgggcccgggcgtcgcgtggcagcgccaggaggcagaatgcgaccagggccaggcccagcgccagcgggaggttcgaacgcgccatggccgtcagtgccgtcggagccctcagagccgtgagtgccgagcttgcggccgc

SEQ ID NO: 336439 - DNA, 1000 bp, Homo Sapiens
tttttttttttttgcagtgtactaaaattgtgttcaaagtttatttcaagtcacagaaaatatacaaactaagacaataaaatgaagtgattttgttctgagagaaggtgatgggagtcctccacctggcactgatttgagtcattcaagggttaggatgcaggtcatcttttttcaatatttcaacaaaattatagaatttccagatttcttgccaggtatttttgaaaacctatcaaggtgctccagtggatttctgtatttgttcctttaaaatcaggatactctgcctttgctcaggaggcaacatggcaatctggtctgcagtcagttgtagaacctgcataatcaaagcagccttctcatgatcctgtggagtgacttggttctgcccgggactaaagccgccaggctggcttccaccctgtatacttgctccttgcattcctgttccctgcatgactgggacctgtctggatccctgggggacaaccgcccccatgttaattggactgggaccctgcattccactaggtataggtcctctggggccaggcactgggcctctggtatccatgcctctggcctccatccctcggacttccattgcacgggcctccatcgctcgggcctccattgcacgagcttccatcgcacgggcctccattgcacgggcctctaatcctctggcatctaaccctcttgcctccatggctcgggcctccatccctcgtgcatctattcctcggggatcccttccacctctgccatccaagggtggacccctctgatctagcatgggtcctcttggttctgccattagaggtctgggctcgggtaatggccctcccctcagttcatgtgggggtggtcctcggctctcatggccagggacatggtgcatgggtggaccctgatgaggtggtcccaagtaacctctaggctctacctctccagttacagaaagtaaagtgcctccccgtggatcattcggagcatc

SEQ ID NO: 336440 - DNA, 1000 bp, Homo Sapiens; identical to SEQ ID NO: 157737

SEQ ID NO: 336441 - DNA, 1000 bp, Homo Sapiens
ttttttttttttttttttaactttagtttcttttttatttttaaacattttatttacaaaaaattaatttattttcagaaataaaactcttttaaggtgttgcttgttttgtctccacagatctgctgggaggcagtggaggtgtgcagggacagggcagaggggctgaaggaaaggaggacatcaaagggacagggctgaggcccaaagggatggggtgtggcagactggggatgtaggtggagtgagcctgaggaaggtggctgagatgcggagtagccttccccccataggaccagcaggcacgcccctggccagggaagcacagagagacggccagatggggacaaggagagaaggtgtcacctccttgagataaggctgagatgtacacatgtgctcacacagggccacgagaaggcaggaagtggggatggaaaaaacagagacaccccaagagctgggtaaagggggaggccaaagggaactgaggcaggcccaaggaaggagggagagcaagaaaatggtagactcagacggagttaccatgcagacgaggagggtccaagagttaagagaacggggcaggcaaagcaaagagaggctgggaaagtggctcacgcctgcaatcccagcacttagggaggctgaagcgggaggatcgcttgagccccggagttcaagaccagcctgggcaacatggcgaaacctcgtctctacaaaaaattaaataaaaaattagccggctgtggtggcgcgtgcctgtagtcccagctgctggggaagctgaggcggaaggatggcttgagcccaggaggttgaggctgcagtgctgggatcgcgccactgcaccccagcctgggcgacagagaccctgcccgtcccctcccctctcccccacaaaaagcaaagaaggccgaggcaatggagacagctaagagcagacagacagacaccgacagcggcagagaaagacaaagaagcggaaggagagacggaa

SEQ ID NO: 336442 - DNA, 1000 bp, Homo Sapiens; identical to SEQ ID NO: 157738

SEQ ID NO: 336443 - DNA, 1000 bp, Homo Sapiens
ttttttttgttactgatgtttttattttttccaagaacagttaacatttactaggcacctattggcctcagccacttgcatctaaagagcaaagctagtttacccgcggcccatgttcttttcgatggttagccttatttcttagctctgttaaccactattctaacgttagcttcaagttcagttttaataatctattccatagttgtgtactgctccctgccacatgaacaaaaagtttgggggaataaggcgagcagtttacattttctgtggatacttcaagtaattggccccaaagtgaaactgaattggccatggtttatcgtgttctgaggggataaaatgtgtaaggaaacggacctgtagagagggttgatatccaagtatgcgtgaatgtgtgaaaatcctataactccacttcaactggcctaatatcctgagtcactagatggtcagaagaatagatacagtacaaaaggaacaaactgatgtacatttatactaaaaaaccaaaaacaaagtttgtacaagatgaacagcaaatgaaatagcttctgtcaaaataaaatctcacacaggtaatttttctagtacgtggacatacatacacccacacacacagacacacaagcaagaatgtgtattttgtaagatataggttcttggaaatagacattcttagcaaatatggatgacagatcaattgtaatttattttcttttaacactgtatcatcataaagaaaactggtataaatgaaaaaatctatttcaaatatctacatctaaaattttaggcagtgaaaaagcactttgttgacaaggagtgtggaatgatgtatgttaattgtcagaaactgctgaatgccttgtttagttgtcacaaacaaattcacatatcagaacgaacaatactgctaaatattccttttttcctgcttttttttttttttgttaaaacatactgggagaaagtaaagaaaaactggaaatccata

SEQ ID NO: 336444 - DNA, 1000 bp, Homo Sapiens; identical to SEQ ID NO: 157739

SEQ ID NO: 336445 - DNA, 1000 bp, Homo Sapiens; identical to SEQ ID NO: 157740

SEQ ID NO: 336446 - DNA, 1000 bp, Homo Sapiens
tttttttttttttttttttttttgccctgtgagagtctgttgcttgtgaaagggtggtaatactacttgaacccaggagcaaaactgactgaaaaaagaatcagaaaaaaaaggggaggagagatgaataatgttcttccctcatttgcaatagctagcaagaaatgggagaaaaggacaatcttggccttgggagaaattgatcttcagaaagaagagaagctatctctttaaaaaggtccttaagtggttagattccaaagtgtctaaggagaagttgtagttgcttcaattttactttaggaaattctctgtaactgatggtctgaagcaagatttcttttaagaaggtgccttgttctactataacctttaggttttatgctctgaaacagaacccccaaacaactctgaacaataaggatttgaaaatttattcaaaacagtatgatatgaagggatgtggtggctgcatctcccaaccagagggtagaaggcaggtgttctagaaggttccagggacacaagaggtagggttcagtagggaaactactgtacttcatttacacttaagctagagagtttaggatcttaatttatttaaagccatagattcagtttagctttaacctagacagaaagtgaaaagcattttacaagtagaagaggcaatgagaaataaggcaacagataatacgtcaaagctggaacaagggcagaaatcagaacgtgtctggctatcagctttgtttttgactactaaggccaacctttttattcctctggatggtctgcagaccaagttcagaatttaggcaaaaggatttccaaatggatccctatacatctcagaagatacaggttgagaagaagccacagaggcttgtgatgaaccaaaagaatctttaaagaaagggttctcaaatgcattgtcagtagatttggtaactggcagggaaacttgtctgggagctggctttggtggttcattgatcttgtt

SEQ ID NO: 336447 - DNA, 1000 bp, Homo Sapiens
ttttttttttttttttttaggatagtgacgcccagactgtatttgtcctggatataaattactgttgcattcaggcagcgataaatacagaggggcccggtgtgcagggcacagaccccacctgggtacagactcacatacaggacaagcccctcaccacagttacacacgattcatacagaccacagtccacaccagggctcgcgaagcaaaactaatcacaaaggactggtcttgaagatgacaatgacgtaaacaagagtgcacgctggaggccacaagcggccttacaatgcgtgtgtctgtgcagtttggcagatgcggggggtcgggggattagtggcatcaagggccccccaggaggctgcagcaggctgggccaggccacactcctgaggccaaaccagagccacttctgaggtcaaagccacacccaggaaagctccgcaggattggaggcccaggccagctgtgccccacaagggaagggggagatccgcaccgtgggaccgtttctcgtgggggagtcggggcttccccacagagcgggctccatttttggtcagactcctcccggggccagtgcaccatctgaatccttgggcacgtggaggcagctttgtctttggctgggtgcaccccagcctggcccagatgcaggaccctccaccaagctgtctgggggcgtgggagcaggagggctgcaggagctgggtctccacacgctgacgagggataggactgagcagatgtcggctcacacaggcactgggaactgcacatcaacagcgggcaagcagcgtggaaagtgctagcgtggggtctggggctgaaagccagctcctcctccacgtgcatgggctgtttacacctcccaaactcctctgcaccgccatgccctgcttttggtcccttctgggtgctaagtgccccaccctgagggccgaggggcagacactcgggcccggcccacactctggtgctgccagggcagcacctg

SEQ ID NO: 336448 - DNA, 1000 bp, Homo Sapiens
agctttaaaattttattgaaattcaagtttagaatttaacaaattaatacaatattacactgaatactttctaaccagtagtttagctttacataatttctaggcataacttttaagaactgatactttctggttaattttccatgatatgccaattatacattcattaaaatttcagatgctacctgaattattcttatctcaatgacagaatttaaaaaaataagttcaaatactgaaaatctaagacattaacactggggcccttgtaatatagaaaagaagaaaaattgtacaatcttaactgtttaaaactcttaacgtttactgtagtaacagaatatgaatttgtaacataaccatatgaatttctcaagttatttcctactgatgcatgtctgaagttataaaaatctcttttaaacgaacctatactgaattactccaaaaataacagtgatattttagggccttgcaaatttattctagtgcatattttaagtacctaaagtacagcctgtgcactagcaggttactgaaaagaataagtgtggctttctttttttttttttttttttgaggcagggtctcgctctgtcatccacactggagttaagtggcaaagtgtgaatttaaggagtgagtcgtttgggatcacgagggaacatggaggtctgacgaacattatgcaatcccagaaacagcatagtaactcgttccaatccaatgcctccaccagcatgaggaggggctccaaagcggaaggaatcaatgtaagccttaattttctccaaatcaattccatgatgtaaagctctctctgttagcagttgaggatcatgtattctttgagctcctgacaatatttcttctcctctcatgaacatatcgtaagagttggactgtttgggatttcttgggtcaggcatggtatagaaaggtcttacagccaatggatatttatcaagaatataaaaatctgtatcatacttttccttta

SEQ ID NO: 336449 - DNA, 1000 bp, Homo Sapiens
ttttttttttttttttcttaaaaatataaatgtatttatctgcattatcacgtccctggggcacccagctggccggcccgtgggccacagggcaggaagggaacagggcgtaagtctcagcaaggcggaggagagctccgccaggtggggatgtggggcagcctcacagggccccgtgctgggcctggtatcgggacagcacggcgcggtagtgggacagctcctggcgcacggccacaacttcctgccgcagcagggcgttctccttctccaggaaggccgcccgcaccgatatctggttctccttgagccgccgggcgtcacgggaccgcttggctgcctcgttgttcttgtaccgccggctccagtatttctcatccttctgctcctccggcacctggatttttcttgccttcttcatgattggctggggcttaagttcctcttctgagaagcgatgtcttcgagggtcaaaggtctcgtggccaggaatgcttgatagggcaagatcagctgggtcgggttcaaaggtcatcaacacctccacggtgtctgggtccacagggctgggtgtgtcccgagaggtcaggcctgcgcggtggccgctggcggtcccgagggcagcccgggcgggggcgtgcccaggagaggagcggggggaagccgagccgcacgaacccggccctggggagggtgcgggcgtccgcgcgggcgacggctccggcgacgggccaccggggggcggcgggctgggcgggagcccgtgctccagcaggaaggcgtccaggtctacgtactccacatcgccgaacggcagcgtgcgctcccacagcagtggcgccaacagacccggggcgggcaccggccccgggcgcccccgcggggaccctccgcccaccactgccccagccggggcatccgccgggcccgcagtctccaggcctggcccaggggttgtggctgcaggcagggccgccttgcgctccttttccttcaggag

SEQ ID NO: 336450 - DNA, 1000 bp, Homo Sapiens
ttttttaggtgaagaatctttaggagagagcatttaattttttcaaaatgaaaaaacaaaattattgtctttcctttctggccaatgggctttgctgtagcttgctgaaatcaccaagcaggagagatttaaccagaggcgatgtgtccagtcaccagcatagagccatcctctgtgtcaccatccacacgcagggccttctggcagacctcatgcaatgccctccatgttaatattcatcagaaaatggataattaggggggccagcaaaaatatcaagggtcaaatatcgcacatttctgtttaggccatctatggctttcatctcctctgaagtcaactggaattcaaacacctgcacgttctgtctgatgcgctgctcattgtagctcttggccaggaccacaaccccacgctgtagctggtagcgcagggcaatcagggctggggttcgcttgtgcttttttgccaaggcacaaaggactgggtcctccaagagcaccggggagttcgggtccacccatggttcttctcggtgggatcccagagcactataggcaaccagaacaatgtcttttgacttgcagaaatccagcagttttctctggttgaagtaaggatgacattccacctggttgcagacaggcttgtacttgagccctggcttgttgaggatcatctccagctgcctgcggttgaagttggacaccccgatggacttggccaatcctgcatctttacacttctccacggcctcccatgtggcacagagatccactgtgtcaaatagtatttttccattttcatcttttgggatcacttcctcacctggctttacagacactggaaaatgaataaggtagaggtcaacataatccaattgaagatttttcagtgacctttccaaggctggtcggaccaactctggtcgatgggaattgcaccaaagctttgaagtgtagaatatgtcttctctcttcacactgccatctgcaatctt

SEQ ID NO: 336451 - DNA, 666 bp, Homo Sapiens
tttttgaatgaggaagctctcttcatttatttcatatgaggatgaagaagaggattatgtgatcacaggaatgttgcatgcgggataatccaaagctggttatctccaggccctcactctgccaagagatctctctggaagaagcagccagttcacagatgccctggatccctccgtgcccaatcataaaaaagtcatgaccgtccctatcttgccaatctgccaggactccaaggggaaaaagcggataagtatccggtcctggcccagggctagctccttggtgagaaactcaaagaagtgggcgctgtggctgcggttgtcctccgcggtgcccactacgccgatggaggagatggacagctgcgcgcagggctcggtggacccgctcagcgccatggccaggcccggccgtaccgtcacgttcacgcggtccgcaggtttgcccaggatggaggcagcggcggcgcagagtcgtttctccagccccgcgggcactcggttggcgggcaaattcgtgtccagctccaggaacggcatggcgggcagaggaacggaaacagctcctcagatgtccgtgcgctggggcctttccaggacgcggcgcccagtcgtttctgggttaggcgacgcctggaactgggcagggtccctggcaccgggatc

SEQ ID NO: 336452 - DNA, 1000 bp, Homo Sapiens; identical to SEQ ID NO: 157743

SEQ ID NO: 336453 - DNA, 1000 bp, Homo Sapiens
ttttttggccaaaattagtataaatagactttattgaagtcagtgcctctgtactgagacagaagattgtgtctacataagcacaagttgtaacatttcacaacttctaaaaggaatgtcaacaattacaacgatcatgcataccatggtcgataatcacattttagaagcattttcaaccatttctaaagaaatgcttataacattgttatatatagaactactttcaataaactgcaaaacattgatcgacttttccagtatgagctacagtgtcaacacaaaagggaggcataaatgtttaatttatgaaatcagaatggaatatttactgtaaagaaaaattaaaaagctttcaaataaaggccattatcgaaccaacgtgaagagcacaactcgaacttttgagttcattcatcttttaaagctgtcctctcaataacttcagttctaagcactgaattcagtactgtgaatattccttggattgaagtttggcaatgatgcggtccaactgtctctttgcttcacactgtgggaaattgctcatgtcataatattgaggggcaattttcaccaaccattctggcttgatatctgtacatgtccggatgtaattctttgttgttagaacaaactcattataaagcacccattcaggtttgtggtcaagaacagtagagggatgcaactgaaccacctggttatctttcacagttaagtaatgccctgttcgttctaaatgtgccacctgcataaaatacccagtaaccaaagcttttcttatattaatataatagtccctgcttgtaaagtcagtacttcgacgaggcaaattaaatctgtccataattcgagatagctgctggcgtacattgtctgcggacatcagggacctgtagttaatgaagttgtcataacaccactgaaccgattcatgattttgtttaaaagcatggtagacgttcagcagtgtcagatgatctccatctatgtgggc

SEQ ID NO: 336454 - DNA, 1000 bp, Homo Sapiens
gttaattaagaatttattagacttgaaatagtcaaaagatgagagataatttgtttcatttctattcccttttctgtaaccaagatgaaggccaaagtggtcttaggaaccttttgtcttcctgatgagttcttctatggtgtcccactgctccttggtgacctttctcaggtcgttgaattcccctgaaataagtacttcctctccaccgtcaaatttaatgactgctccattaatccaagaagcataatcactacaaaggaaagcagcaagatttgcgagttcttctacagtccccaggcgaccacagggaattctgccaatcatttctttctcaaatgttccagttgggtccagacggctaaaggcacctttggtttttataggccctggttgaatcacattgaatcgcattccatatttaccccattcagctgcaagagacttgctcatggcttccacacctgctttggcagaagcacttggtactacaaaacctgaaccagtctcagcatagatagtagtaatagaaagaaatgctgctcctttctgtgctttaattagttgttttccaatttctagtgtcacgaaggctgtgccatttagaactatgtcagttatggttttccaagcattaggagaaagtctttcagtaggagaaataaaattccctgctgcattgtttatcacaatattaggatgtcctgcaactttgatcagttctgacacagtgttttgaaccatatcaggatccctcacatcacactgaattgcatgaaccttatttccagtttgagaagaaatttgttctgcggtagctttcaaaacatccatcttccggctggctatcacgcactgagcacctaggctggacagaagagttgtcattcctttaccaaggccagtacctcccccagtaatgaatgccacttttccttgaaaactattaggtggtagcatcgctttttgaagaggtgaaaagaatttagattgcaaagct

SEQ ID NO: 336455 - DNA, 1000 bp, Homo Sapiens
gcagtttacctcaagcctttattattgtagattgaaagaagtttatatacaggaaatatttccagcaaaacactcaccaaatggccttcgaatcaggggccctccacctcccagccccacaatcagcagctctgcctaggactcccctcacttggggacctcaggctctccccccacctctctttccccggactccatcaccccaacgtcattccccaggagtctcagctttttctctctccctggggcgctgcgaacctcgccaatgcctctcaagctatcttcctctggtcccaaagcagacaccccaacttccctcccatttaaggtggttacctcacggaaacccagagcaccctccccctcaaggtttaggtgctgctttgaggcccctgcaattcagaactagctcgtggtcaagaccagttagagatagttcgtcatcagcagtggggctcctgtgcacccaaaacaagcgggggaaactaccctgcccacccctccccatccacgacatcacttcccctaccagggacaggaaacagacacaaaagcaacagggaaccccctctccgcgcgcgacaggtgggtgccaggcaactagctcagctgagctgagagtctcctggaacccagctgcgctcagggcgcgcgggcgtggccaaggtctctgtgcagctgcgggaagcaccgggccaaagcacttggctgagggcacgctggggagggggtgtaagaaaatgctgtagaggcaaagtcctgggggcacacggacaagggcaagccatatcccgcgctcaaaagaggatttccagtgagccaggcaggtgtgaatgagacagttacagaagcagagtcccagggaggtaggggagattgttcatgtggctgagggtgcagactcagtctgaaatggtggctcagcacatcagtgtcactggggcctcgccaagcgtgacttggtttgaggcgcttgcacgtgggcttcgaaggctcgaag

SEQ ID NO: 336456 - DNA, 1000 bp, Homo Sapiens; identical to SEQ ID NO: 157744

SEQ ID NO: 336457 - DNA, 1000 bp, Homo Sapiens
aataatttagatcttgcattttccaaagcattgggtggggacactccccacatgttacttgacatcacacagaagggcaaccccacggagcacccagtgttcaggggtctgggctgtcctgagatccacagcggcaatgtagttcaagtccgttcgaactggcttcttatagatgggacaggagtaaaaccgaggatctcgtaaagtattgttttctgcataaatccttatgacaggcatcaactcaaagagcacttttggctttgattcaatgagtttcatgttcctcttgtcccagccagcaccttcaagatataagccatagacatagacaccctctgtgggaggggcagaaatgtcgtccttcatccatttggtgacttcattgcaaagcaccatattgtccagagcccagcctttgttggcccgagttatttcctgtcgcattgcagttaaaaatccctgggggttaaaaaaacccgtcatccaaaagcagtgaggtcggccattgaaaacccacgaggtaaactggctgtttctttctataagttcagtaaaccagaaacccagtgtactagaaatccaagaagcttttttccaccaagcagggattctagcatcaaacatgcaatccaatgcatctcgcagattttcgctcatgatgatggtgccatcaatagcaagtttcagctcagtgagggtgctgcggacaaggctgagtaccctttgcattctgtctatttcctgcctgaggaaaatgttcataggctggaatggccccatcttctgcagcctctcttttacttcaaaggggacatagtctgggggcagcttctccagcatatcatcagccagccgggccaccaccgcctcccgggtctcatcccctccaccagaggtgtccttgggttggatgcctaggatggtgtccagcacgtccttggccagcttgctctggtaggtgatgtcagcattggggtgcagcccaaacacctcaggg

SEQ ID NO: 336458 - DNA, 1000 bp, Homo Sapiens
agaacatcaactttttaatgtagaaagagtaattaaggaattactggggagaaaagacacacacatcactgagtccctcaatagcacaggctgtctatgtgggttctggtgccctgagcagatggaaatgaacttacttgatgtcacacaaaagggccactcctctcaggatccagtgatccggggacaacactgttcgtaaatataccacagtgatgaaggtcaaatcagttcgcctgggtttcttgtaaataggacacacatacagcttggggtccttgggtgccgtggagttaatggcaaagatgtggagcacgggtaactgcgtgaagagtaccttgggggtggattccatgagcttcccattccgtctgtcccaggctgctccatccatgtagagcccataaatatacacaccttccccagggggtgacgtgatctcctccttggtctgtctcagaacttcattgtggatggtcacagtgtccagtgcccagcctttgtgggcacgggtcacttcttgcctcattgctgtgaggaagccttggggattaaagaaaccagtcatccaaaacacattaggcctcccttcaaatatccacgtagaaaactgagcatttctttccaaaagttcagtgaaccagaagcccagtgtggacgaatcccaagacactcttttccagagctgaggtatacgagcatcatacatgttgtccagagcatctctcagattctcactcataatgattgttccttcaatggccaattttagatcactcaggctactgcggagtactgaaatgactctttgcattctgtcaatttcttgtctaagaaatatgttcattgaattaagatggcccatctttatcaaacgagatttcacctcatgaggaatgtaatcaggagggagtttactcagcatatcttcagataatctataaacaatagcctcccgggtctctcccacaccacctccactctctttgggttgaatgtt

SEQ ID NO: 336459 - DNA, 1000 bp, Homo Sapiens; identical to SEQ ID NO: 157745

SEQ ID NO: 336460 - DNA, 1000 bp, Homo Sapiens
tttcaccaatttccatttatttactcctcaacaatcctgatggcaggtattatgtttcccattttgcagacaggtagactgtgtcacagagcggttaaggcacacaatcaaggtcatacagctaggaaggggatgaactgggattcaaaatcaagtccaaactggttcctgagcccttagattttttattttttatttttttgacacagagtctcattctgtcacccaggctgaagtgccgtggtgttagctcagctcatgacaacctctgcctcccgagttcaagcgattctcctgcctcagcctcccgaggagctaggaccacagacgcgtgccaccatgtctggctaatttttaaatatttttaatggatatggggtttcaccatgttggccaggctggtctcgaactcctgacctcaagtgatctgcccatctcagcctcccaaagtgctggggttacagatgtgagccactgcacccacccgtcccccgccccccctttttttttgaaacagagtcttgctatgtgacccaggttggcgtaatcatagttcactgtgaccatgatctccctggttcaatcgatcctctggcttcagtggctgggactacaggcatttatcaccgtgcctggctaactttttttaagttctagtagagatgtggtctcactatgtagcccaggctggtctcgaattcctgagttcaagtgatcctccctccttggcttcccaaagtgctgggattacatacgtgagccactgcacctggccataagggttagatcttataagctctgctgggcttcctggccatgccattacagggctggtagttcttcaccagcggctggaaggctttccagagggctggcagctgggcacacagtgtgcccccaccccgttgctcctctccctggttccgattcatgtcacccacgcaggtccagggcccttttggggacacgcaccatttggagtggtcctctgtgctgttga

SEQ ID NO: 336461 - DNA, 1000 bp, Homo Sapiens
ccggctcatgcttagtgttttatttcctcaaaggagccacgccattggccttcccaaatacctcctggtatccttccaatttccaccactcccaaccgtcagattccattcagcttcctccaacctcagaccaaccactttcttttcacaagctcagaccttccaaatattttaaaaatgaataaatgttaaataccaactttcactattacagaaaggggcagctagaaaagtttactctgtgcacaagactgcgacaccccgctcgtagaagctgcgaggatcctcctttgtagcaatttcgaagtccacggtgaagatgaggtctgcacgggtgaagttcaggtagacaggtaaggttaccacactggccttcttctcggtgtttgtctgcttgacccagcgcagctgcgtcaggggaagggcggttgagatggcattggacagtgacagcttgttgttgttgcacgtggccccttgaagtttcaaacccgtgactccgaagctgcaagcgtcaagggtggcgccctgtgaggtggtgacgttgacttccaggcagagctcctccagggaccagctgttggcctgggccacatactgcctggtggcagtgatgtacgcctcaggcacgaacaggccacccaggcacacgtggatgttctttagctccttggcgccaccagatgcagctgccagtgagatgttctgcagctgtttgatcctctcgctgaagtcggacacccactggatgacggtcatgccggcaggcaccgtgtagtgggaccagctccgaggcaagatccctttcactagctcgttgatcagcgtgcgcaagtagttggtctgcttcttctttccttcgcacacctggacgacatctgcaaggtcctggcgaacgtcctgaagcagctttgcgcccatcttcacttctctctcaaagaacctgaacaaaggatccttgatattctccacggtgcgcttgaggtggctcagcgtctgg

SEQ ID NO: 336462 - DNA, 1000 bp, Homo Sapiens
ttttttttttttcttttaaaataacattttatttttcgttgtcaatgattaacttttaagtctattagaagagtatcatgattatagtgaataaaaaaatatagatgagagaatacaaatattaggttatacaaagttagttttttaaaaatcattgtccaccaaaattttcaggactttggagttctcaaaaaaaaaatgtgtgtgtgtgtgtgtgtgtgttttaacacttccagcagttaaaaattaagaacacatatggataatcattggtggacgcctattataataaacagaaggaccacaaaaattaaaacaagttctaagaaccatcatatatacaaatttctgtacagaatgaggacaaaaacaattcacccaattaaaaccagctcttgtggtacacatactctttttcagaaaagaacgaacacttatcttcctgtattcatttgtttttccatttgattcagtattcttaatgctgtttccaccccataaattagtaactgttcaatagctgagaaatatcctattttcaattatgcaggggaaatcaggagcttccctggaggggttgaacttcatggtctgatgtaggttggagacacacctcaaccaacgaagtcacaccaccggctggaacaaggaggggctggatacaacatcccatgacagtgaggaggattcttatacatcatcactacacagcttcctaagagtgatggcctagcctctcctacttggctgagctcagagcaattgagctctttgcaaatgcaagtcatttggcacaaaaagaaagaatgtttgggcaagactcagactctctcagagccagacacactcagaggcccccaactctgataactacgatagcacatcccggacccatatctacctcccagacccaccttgctccatgacgctaaaggccactcactccatggtgagaactgaactcctttgaagaaaaagcagtcgcacgaaatgttaacat

SEQ ID NO: 336463 - DNA, 1000 bp, Homo Sapiens
tttttttttttttttttttgactttaatgagaattttaaaatttttaaataggtctctggcaaagaacaatgcaggagtaaggatccaggcacagtccaacatctccctgaggcctccacacaggcccctcaaactgcacccattctgaccatgcaccactttccacagacctggtcccacagccgtcccttcatttggggaagtagggaagggatggctttgggggatgcagagcccatcctcagccctgccatctgccccacttcttaggacttcctgggattgtccttcccttgactctcccatccctctggtcccctggtctcacacagcatggcccctcccaccctctggcttctgctggttctaaccatcttctttgatccctagtgccacctccccatggtcccccttagccacctcagccttgccgtccttctcaggtagagccctctgacttgaccccagtcttgtcagtccctactctagagagcccacagtcccagctccctgaggccccgctcttctggacctggctgtacagggctgagttgtggcttttgatgccactgccagttgcagtaccaggttcagggaaggctgggccctggggcttgggagcaaggaggggctttgtgctccgagggggtggcacagcgtagtcatcagtggcagggttgtaggggagctcatagccctcctccttcacccgagcttggcaccaccatgcatccttgggctcccgaggcagatcataaaggccctggggagggactggggccaggccctcaggttcatcatagatgggatcctctttggggtctgtcagcttggccttcagcaactgctgctgcgcatgctcatacaagtcccaatagagaggtttcttccgttgtactccctctcctgcctgagcagacgtgctgtccaaggggtctgagtatagggagtcctgggaagggcatggagcaatgcgcagggagtctaagggctcagcat

SEQ ID NO: 336464 - DNA, 1000 bp, Homo Sapiens
tccaaatcaccactttattatgtggcagtcaccatggtgccagcctctgccttccccatgtcaccctcctaatccagggctctccaaccatattcatgtttgcgttttcacaagtcaatgtccattaaggccttgtgctccccttttcttcagtacagggcagggcccttataatttgggtctcaagaattgatagttgtctcttaactggttctggtgaggcgcactcacagcagtgagtggagggtcctgggagggcatggatgacggaggctgcccctagaggagctggatgtaggagcagagacatttcttgatctttcactctgcaaactggtccaagaacttgaggtaggcctgacgctggggtgcagctgctggaatgaagtggccaccagagtgggtgagggtgatggctccgggaaattggctggccagttgcacactctcctgagaggggatgactttgtcagtgtccccaaaaacatggagcgaaggcaatgacaagggcctttgcaggatggattccttgaacccaatgccccggggacagaaaccagacaccaagaggataaaccgtggcaaggggaagcggggatcgcctgcctggcccagggcacacacaagggctgctagcgcagccccttggctgaaaccaagaaggccgtcaaaaggccccagcctgttcagtgcctgtgccaccatccccagtgattcctccaggcccctgcagacggcgggctcttccaatgcggagaaaacgtcggcctcctgctctgaaaaccaccagcctcgaggctgctcctccggagggcaggaccctgaggcccgggagcgcgtcaaggagccagcggcgccaccttctcgtccctgcagctgcagtcctcgcaagccacggccgaagggggacgcgcggacccctcctgcaccttcccccgcgcgggccggcccggggcgtggggacggcggtcctggccgtggttcaccgtccagggcccca

SEQ ID NO: 336465 - DNA, 1000 bp, Homo Sapiens
aaggtataaaatgaagatctcaatgtttattaattacaataaaaagtaaaatcacagagctattttaaaactaatgtaaccatttttttaaaaaaagaaactatttaaacaagaaaatgatttttaaaaattctaagtaagaaatctagtacaagcaaagatgacattttaaagtatcatcaatgaatttccacacagcctttccatcacaataatataaatttataccttcaatcttatgcagcaacaaaaacacagtgagaaagacagcaattgcttctgaaagaaaatcaaagaagcctatagtggtgaattttttctaaaggatcctagggagttgaataaggcctgcttctccatgggttgacaatgtttggctgtgaagggaatggcagcctcctttcctctgattttttttaccgatggcacacacttcaggggtgggcctgtttcctggtccctgctgtggcatcttcttttgtcactctggatttcagtgtggcgacttctcccttatagggtgcacgctccacaggggtaggtgtgcaagtccggtctcgctgctttattcgtttgtaaatatattcagcaaatggttttcgaggaataaacttcccatctcctgccgtgacactgaacactccggcttcatataccactttgcctcttgaaatagtcacaaggggcaccccgtggcaaaccatgccctcgaaaatgttgaagttaacagcctgatgatgagtttttgctgagatagtccttgtgccttttgggtcccaaataacaatgtcagcatctgatcctacagctattcttccttttcttggatagagattaaaaattttggctgcatttgtgctggtaactgccacaaatctgttttcatccattttaccactatgcacgcctttttcccatattacggacatccgatcttcaacaccattcaccccattggggatcttggtaaaatcatccttcccaagagctttctggcagg

SEQ ID NO: 336466 - DNA, 1000 bp, Homo Sapiens; identical to SEQ ID NO: 157746

SEQ ID NO: 336467 - DNA, 1000 bp, Homo Sapiens; identical to SEQ ID NO: 157747

SEQ ID NO: 336468 - DNA, 1000 bp, Homo Sapiens
ttttttttttttttttttttagtgtttttaaaaacattttttaatgaagaaattattccactccaaaatatagacacacaattaaatagtttaatcacttcaaaatataacatgtccccaggaggttccaacacacacacacacacacacacacaaaacaatacttaacagcaatacaaaaatccatacaatagtattttttttttacaataccaatgaatattgtgaaatctttagtgtctctgaattgattatttcaaatggtgtcaaattgcagtagtcataattaaaaatgtcttacagttaattcgcctcaagatgcaacacttctgatttttttttctctttttggttcaaaagtaaaaatgccctttcttctaaggacagtggagttctcacttgtggctccttgcgtggaatcgaaccaaggggaatgcagcaaccaaaggttgctggatttacaagatctatctacggttaacagccaagaactaataagggtggacaaagatgatcaaaataaaagcagacatcagtgctaaattatgatgcaacagtttggctcatgcatataagaaaatacatagtatatcacaacaaaggccacacactcttaatgcaattcagttcacattactacttacaaatgaaccttccctgccttatagtagatcattcaagaacccatttttcacaatctccagcacaactccctctgaccaaccaaacttaccccaacttccgtcctgaccaaccacaactgtttcctgaatcccatgcagtagatttcaccttcctcccctcctccattaatatggcgctgtggaggagggttggctgtgttagaccagtgcttattaacaggctatcagctctgatggagatggatgtgcaattcattgtggaacaagaaagaaacaacccccgcaagatgtagttgtatctaatggacaggacaagtgaaacttgctgggtttgcacttagaacaggccccaaaag

SEQ ID NO: 336469 - DNA, 1000 bp, Homo Sapiens
atgttagaaaattttaatatatgattttggtagggccaatacatagtaaagacatagctttatttcaattgaaccgaataaaatgatgtatttcagtaaattaaggcaaaggagatagatgctatgaccagtggtgcaaaatttttcaaaaatttatacattagatttacctttacaaggttatagtcaagaataattaatttgtattttaagcaaactctactgcttttcaaaaaatgtcttaatcttgagtgaggaatagtgaaggtaatcttaatatactgtttaactttaaaaaataattttagaattatagaaaagtttcaaaaagagtatagaatttatgcacacccttctgccagctttccttaatgttaacaatgtacataaccataatatgattttcaaaaccaggaaattaacattacagtagtgttttaattttacacatgtaattaatggaagaaatgaaagctaccccaatattcagttatatttataccagtaattatagcacaggaccttataagaaattaacaaattattgttttaataataaacaacacttattcataaattctgcctgctttttttgttgtcattatgcttcttaatcttgaaccaaaagatacataatttttaaagggacttacagagttctcagctaacaccagtattcaagttgattataaaggctgtgtttattttgttccagactcttctggtctagctcagtatgcataatatcctattctagtgagatggcctctttctagaggtaggaaactgagagattttacctttactattaataaaactcctagagactataccttttaggtatattttggttgttcatctgtgtgttagtgaatcaggttgactagcatataatgatactgagtataacaggaggattatgtctctcttattaatgacaaatgcagctactacaaatacatgagtaaagtttataaacagcaaaggaaaacttggaatt

SEQ ID NO: 336470 - DNA, 1000 bp, Homo Sapiens
tttttttttttttttttttatcttaaataaactgtttattcagaaggaacaattaaagaaagcaactatgatatggattacaaaaacaaacaagcatagatcctctccaggctccagggtgagacggccccacgctgcaaagactgccagccctgggctgggtgcatcagtgggctagcatgtgtgtgtgagcgccgacacgtgcgcacacacaagcacacacacgcacacccgccacccacaggggtgtggacagaaatgaatgactgtgtgtgtctgcagcttggccccttccccaccccccaaagtagcagcggctgtgtgggccccgcagcagcaaaagtgaggccttcttcttcccctccccctccgcagctctcgctctgagaccccatctcctccggcggtagtttggccaccctcactcacaaagagccccagtgatcccgtcaagacatctgggggaagaggaaaaaaaaaaacaaaacagcccaccagatgtgtggccgggaacctgcccagtagctcctaggccatggatgtgggcggccactgcacctctgggtccccatcccctgggaggccccagccccgagaggcccaagcccttggtggagaaacagggaggtgacaacaccagtgatggcaaacgcctctcccccaagcagccactgggatccagtgcaacgaggtggcacacacccttcctgaagggggaagcgcagggaggcgcagggcctagccgagctggctgagcacccagggccgggacctgggcttggacaaccacctggagagggaacccccacccccatcccgcaaagaaaaagtaacagtcgcagaagaggcaggctccgagcgtggtcccgccataggcacgttgattaggacggcagcccgcgtgaggtattgcgctctccccccagcaccctgctcaggccgagccctcctgccctcccctcccttgccacacgagtgggcagggacacccgtgggtggg

SEQ ID NO: 336471 - DNA, 1000 bp, Homo Sapiens; identical to SEQ ID NO: 157749

SEQ ID NO: 336472 - DNA, 1000 bp, Homo Sapiens
ctttaaaaaaatcagtttattaatgtttaaaagttgataaagctatgtgcaaaatgatccacaaaagtcagaaacctattaaatactattctttttaaaaaaacaagacatctctcggtttaattgcactgaaaaccatactaaagagacagtaatatatttttattctttgtaatatttatacatatcttcaattactatctaatgaatagctggacttaaaagttctggcgttccctaccagttaaagtaatgcttaagggcacaagagggtggattctagaaaagttaacacgggttagaaaaatccataaaatgacttcttcctgaaacaaatacattcaaaaatcaagaaaagtacttttaacacaacaaaatacaacatgttgttgcttgaaatgaatcacacaagattctgaaataaacatcaacaaaagtgggaaagacggatgtcatatttgttagactcatttgctaagaaatctcccttggtttgcaaaagttaatccattcggttttcactttgttttgcttgtctgtttctcctaggacaccaaggatcctggctaatatcatttagataaagtgggcttccttatgcagatttcggcttcaatggatatgaaatggtaacacatttcattgaaaagatgttttttaaagaaatcaaagtgacttcaaccaaattccaaaaaacggatcccgcttacatggaaactttggcctcagcgaaggacattgttttacacctccaaaccatcttcatcttcccacagcctacgtactcaacatagcctatttgctatagatgatcgatcattccacaaccccagctctgataactctcaggtagttaaagtataaagtaaaagaacgttgaggaggggtatgaagggaagggagggtggggtgtgggatgtacagggcatccctaaagaagcagaagtgcacacactcacttgggtttgaaactaaagtgaaggaaaacatctcctcaaag

SEQ ID NO: 336473 - DNA, 1000 bp, Homo Sapiens; identical to SEQ ID NO: 157750

SEQ ID NO: 336474 - DNA, 1000 bp, Homo Sapiens
ttcaatgttcagtttcctttaatgacccccatctccctgaagggcaggtgcaggcagctaggtgatggcaagagatgttcacttgaagatcttgccctgattgaaggctttgcccacatgctggaaggccccctcccaggaaaagtactctcgaaccagcgtctgggtctcctcgctgccaggatccagtttccgccatgtgtatgactcgtagtccacctgccaatctggactcagcggaaaggcaagctcctggcctcggaagacccagactccagaaatggagctgctattgttggttccaaaaaggatgacactggcgaaggcattcttcctcagcttgtccagtcgctggaacattccagtgatgagattgcagctcatgaaggtctgagtgagttcttcagggaagcgatactctgagtaccacagggaccagccgtccttatcaaagtgctcccagaaatatggcagtgccacagagagtgtgtcctcattggagtacttgcgcttaaattcatccaacacaaaggtactcttgggcaggtgagcgaaggggtccttggccttgggctcagcagccagcgcctgctcacattcatccatctcctcctcaggagcaggggcagccgcctttttctcctccttccgctcagcctggggcttctgcttctcttcccgtgaacccttctctttccgtggtgtgtcctttttaggttgggtctctgcaaactttttagcatcaaactgggccatcttctcacacagtttcacttcgcccaagacagcccggaactggggctggttaatgcaggtgaggaaccagcggttggtattgggaaaggcctggcggaaagaaggctctagaacctgcttatagagccacaacagggtgcagacaactgtgatgtcagccaatgtcactcgttcgcccaccagaaaagtcctcgtcttcaagtaagcatccagcagccccagaattcgcctcacttcctccttt

SEQ ID NO: 336475 - DNA, 1000 bp, Homo Sapiens
tttttttttttttttttttgtcaacttttgaagttttttatttttattttttttggtttttgttgttcaaatttcccttttacagtaaaactactgaggtgacggcataccccgccaccatggcaatatcaacttcctgttccccagaaggagcgattagaaaaatcaggaaggagctgggaactacagcaccagagaggtgaacttgacctctggtggacaaagcaaccatcttggctggtgattgaggtggccaacctggtgcccaacaacagctttgatctaataaaactgagctgggaggaaactgaggcaacacccaattgcacactagagggcaggaagaggtatcagctggtcactatggaaacagtggcctttgctaagtaccactgtcagctagaccagccagtaggccaccattttggtcactaagaagggaactgtgttgagtctgaaaggagtcagaaatgtaggatggaatgaacaagacagccatctgggttactcgggagagcacatgggttcttggggtagtcctgttgattaacagagattatactgggatatggaaaggaaagaacaagacaaattaggcctgccacagcacatggcagtcatcttagctgtcctaaaatcagcacagagcacaagggaagggagatcttgggaagtgccactgaagactgggaaaagtccttctcggtccacctctaacctcttacagtcagtaagttccagcttcctcctgaaaggaagttcttcccgcccttcttctccacagaataagaaccatccacctcccacctcctgatcccccagactaagccacttggagttccagccagaccacttcctgtttcagaagtgctacttcctgtcctggatgaaggcacttccagttcctgctgcactgcttctgctacttcccaggccatttctgtccgggcctggtcacctcttgtctggagcaagtcacttccggtcccaagtggcccat

SEQ ID NO: 336476 - DNA, 1000 bp, Homo Sapiens
acccgcacagaactagtttattcagtagtatggggcatgaaaaaacaacaacaacaaaacgctaccatatttacagcaacaaccaaactgtacaatctgatggttagtatcaagttagcatccagcatctttgtattttttttaagtcatcagtagtaaaaaccagttaaatttttaaccctttgcaggaattgctgaggggagaagacagggggagaatccacggcagaaaagccagaggctggcctcacaaatgagaaacaggagcctttctttcctgcccacagcctctttttctagccacctgctccagaaggaaagtcagtgacaagtctggaatacatgcttggagtaaatggtgactcagatgaaaagcagtcggcaaaactgaggagaggggaggagaggtggggagatgatggcctggggcaaggggaagggcgtcaagcccccaagccagggctgctgggaacacccagcctgtgatggccatatcagacccccgggactggacacgaacccatcccaacgcaaaaagcaaataaataaaacaaatatattaactctctcttcacagggagctggggtggagtcggggagaaagaggaacaggacctggtcctttgaagaagagagccaattccaagaaggggttaaaaatagaacatgtctcagaggccacagcaggttagacaaagtagcatttgtctgattttggggggtggggtgggtgagtggacaccagaacccagacttgaaacctgtgcttgattgagcaccctcagggcagccgagccagcactgtgtttactcttcctcccccacccacatcacagcaaagaagcgcaacttaacacatgactggcctgcccggggcgcggggcgggcacgaaaaatgaagcacttttgggtcagcaactgagcaaacacctgggctgccgcgcacggccagagtccaggaaaaggagaggggctggggctgcccgacccccgcctgggg

SEQ ID NO: 336477 - DNA, 1000 bp, Homo Sapiens; identical to SEQ ID NO: 157752

SEQ ID NO: 336478 - DNA, 1000 bp, Homo Sapiens
ttttttttttttttttttttttttttttttcattgttgaaagttgttcatattttattttctaattgcagtagtttgtatctgatttctttacatcattccatatgatgggaaaggaaacctctaaatcagttagtactaattagctgtcatgaatctatagtaaaaggaatcactgaagatttaagaataaaatattatcagaggtatcaatattaataactataatctttttctaaagaaatatagaacagttggtattttgtaaaatatcttcaagcaaatgagagacttcatctgttagtcttatgccaaattaaatgagtttggtagcaatttcaaatactatgttgacatgaatgtacaaatatacattctacgtgttccttctattgtacgaatcaaagactgcacgcaaaagaaatgggaaatacagaatacagaagacatgcaccttctatcttacatagtactggatatcaagtgaaaagagcagacactgatctaagtacattacatgtataaacatctaaattatcaatcctcccaacaattctgcatgacaggtactgttttcatcatccccatcttagaggtgaagaacctgaagctgagacaagcaggagaatgtgccagtggtcacctgcaggtagagggccaagtaagggtgggggcaaaggccctttgaccccaggatccatgctctcccctctccagtacactgcctcacaagtacctagcaacttgcagggctaggaggggggaataagagaggacaaagtccaatacattctccaaattgctcagttcattctatacctgagagtcttgtgtcttttcacattttgctcttttctgaataggaagaaaaaaagcaaagataaaaaggatggtagtttagggtaaaccaaaaacacaaagcagtgtgcaaaagttcatgggagtccaaagagtataaataaaacttacccttacgaagtagaataaagataagcatttca

SEQ ID NO: 336479 - DNA, 1000 bp, Homo Sapiens; identical to SEQ ID NO: 157753

SEQ ID NO: 336480 - DNA, 1000 bp, Homo Sapiens; identical to SEQ ID NO: 157754

SEQ ID NO: 336481 - DNA, 1000 bp, Homo Sapiens
tttttttttttttttttttttttttttttttttttttttttttttttttttttttttttttttttttttttttttttttttgaactttaaagatcagatttatttggagaaaacaaaaaacccacaacccaaaggatgggattttacatcaagacatctcccaggtaataagtctacagattacaaatcattttcatagaagatatttttgtacaaattttacatgtattcaggagcgggacattaatcaatccctgtttctattttaataggggggacaaggtaggggagagggaaaaacagttttggatataactatttggaaggagagtagacatgaagagggcaaaccctagcttttcattatctacaatcaatagtttgtttttcttttttaaaaaagaaagaaaaaccctttcaatcttcaatactctttaaaagcccacttagctactggccaatccacaccaattatttaaattcacttggtacacacctttgtccactgggtaaattatattcattatgcccactgctgcagcacgcataaaccaacacccctgcatggctgaacagggcctaatctaggactgatgggagaagggcttgcaaaccaagatcaaggtgtttctccgctaatactgtctaccaagctgatccctacaaaaatgcatataaaagcaggcaagtttagctactgtgttgcaagagaaaccaggaccttgttaaatagttctctccattaccatttattctctcaagggaagcttaaaaaaaaaaaacaacaacaaaacaacacattggtctggccacctcatgaatccaacaagcattagtgtggcatttcagtggagaaggaaacttggggggaaaaatcccatcaaggttgtaagaaaggctcccaatttaactgtccctgtccctatttatccatcatccaagaccatccattattctagagcactctgatcaataaaaggggtccaagcatcaggagcag

SEQ ID NO: 336482 - DNA, 1000 bp, Homo Sapiens
tttttttttttttttttttttttttttttcaagtatcacaatgtttattgatagatacaagtatataaaatcagggcatgaacatgacttgataaattaagtagacttaatttcaatactataataggagggaccaattcaaattctcaccatttgtttcacacccacaaaaaccacttcaagggcattaacgatctctcaaaactgatcagttttgtgcaagtaaaccatgtttcttttaaaaagacttgtgcacttgcccaggctcaaggatattaaaatctagcacataaagcccattactagaggtagaaatacaggcaatatactattacggcaacaaccatcaattacagttaagaatttttctgtaacaaccaaatggataatcaaatattgcaacaactcaagtattactgagcaaagtgcatttctacagtattcagtgttgctattcagttttctaacttaaaacagcctatgataactggcagcaaagaaggtccttgcaatagactgcctctgcttgagaacttatgatgtaattattgcatgctgctaatatactatctaaacattaaagatactcctaaaatatttgatggtagactatgattaagacattacactacaaaaaaaccttatgcagaaggaaatcctaactgacgtgcttctgctttaaatattgtgaaaacattacagcggaatgaattttcgcagtggttaggtcaaatgcagttacatcatagcaacagtatgttttgcacaatttaaggctttggctggttctttagtcagcttcttcctctgattcttcttcttcagcagtttctaaccaggttagccactgattcacctggaacaaagccttgccttttcccggaaactcttgggttatatcttctttccaagccaagaaagcttcttcttcaataatttccatgtcatagaagtgcacaaaaaagcgaagtaacatgccttttgggaagttgctgttata

SEQ ID NO: 336483 - DNA, 1000 bp, Homo Sapiens; identical to SEQ ID NO: 157756

SEQ ID NO: 336484 - DNA, 1000 bp, Homo Sapiens
ctgtctcacacagtttatttaacaataggtaataagaaatcaaatttaacagtctatacagtgatccaaagttcatatttataagtaatcaactttaattgcatgatttacaacagttgagggtttttgctattttcaagttttatagaaagtgtgtgtgtgtgtgtgtgtgtgtgtgtgtgtgtgtgtgtgtgagtggggggtagggtaaggaggaagaaagcaagcaaagaagaaacccccagggacattttgcatgttaaaatcatcccaccggaatcgtttcttaccctctttttaatttttttactttgttagatgtaaaaataacgaaaaaaattctttcaagaaacagaaaccacaatatataatacatcaatttggcagctgcccctgtatatttttgaaaaagtcatttttctctctacatgtacaaattattttaatacttgaagttttacgctcagacttacagaatagaaaattttctggagcacaaaagttgacttgaggggaagaaaggcagtttttttttttttttaaacattttttaaaagaatgaacatctttgcacccagagaaaaaaaactggtattttaatatatatttatatatatttatatatatatagaatgtaattttaaagtaacattaaccccttttgtcctctggtttagaaatgttttaactcttccataaagtgaggaaaatagggaaaaatgtcaaccatctgcaccagtaaataataactattaatattacatatgttcattaatttaaaaaaaataataaaacctattggaggtgcaaggcaggagcatattgtttggcttcacaggcctcagcctcctcccagtgcacacttgaaccacacacacaaaggggaagaaaggctggtggtaaccagccataacaaaaatatattctttgtattctatcatccctcaggttcatcttgcatgtttgctttaaaccacaaacggctactgcacagttctta

SEQ ID NO: 336485 - DNA, 1000 bp, Homo Sapiens
tttttttttttttttttttttttttttttttttttttttttttttttttaggatcagaatactttaataagataccagtgtcaaaatacatttccttataaagttaagctcccatacagttataatgttgtcagtaggaattcgacaatataataacgttcatgaaatcgttacgttgacaggtagggttaatatgaagcttggaatatttttcagtgttttagtaaaactgcaagggtaaaatgcccttaatgccagggcaacacacacaggaaatcaaataccagcatttacacgtcagtaacccttcaagttctgccaccctgtgtggggtaatgccgtgcagctaaaatatgatttacgcaacaccatgactaaggaatttctcatagaacttaaatttcttttgaaagctattttttgtttttggcaataagtctatccgggcttactaaatagttggcccaatgtgctttgtgtgtgtttttagaaacttcttcattgtacccattacagaaaagttccatgtaattggtattgaaaaaccagaggtgtcgtccctcttacccagggagttgcaaagtgctctgggaacactattttcagtgcttcctacctacatgtcactgaccgacccagagacctcagccagggcctgtggctaggggccatccctggaggccttgcggggccatctggctgccggctgagtgggggctgcagggctggtctggaccagctgctctcccgctgtgcagcctcctcctcagtccagctccacggggctccaaggtcgtgagcttggaggacgtggacggggtcactataccatttttgacccctcatttgcatgaattcccgtctaaaccatctcatggtagttctggaaatgtccaaatgtgccgtgtgaaagaccatccgagtcacatagctcagtgcacttgaagggctagcaacaaaaccttaagaaaagttagagcacttccccgccccacccccc

SEQ ID NO: 336486 - DNA, 1000 bp, Homo Sapiens; identical to SEQ ID NO: 157761

SEQ ID NO: 336487 - DNA, 1000 bp, Homo Sapiens
gtcagtgaagattttgaatgcaagatgttcaatgcatttttatttatttcaatttttttcaattcccaagaaaaataaataaaaattaataatatcttgtaaattatctattttctccttcaatatcttaaggtacacaattatcaaagctgatattgaacacaaacaaattgatacaattcagtaatccgataatattcatagtcaaataagttactttaaattgcatgcaatacaactttatgttccatagcatctttaataaaaaccgtttaccaaaatggctcttcaaacttaaaaagtgcaattacagagtgcaaaataaaaagaaaatacattatattacatttaacatcatcaaatttgaataacagatatttaaatgaaattactctttttaaaaacattaaaatatacaccagaaatactgtttgtacaagtcattactcccccttctcccatatgaacaagaattttttaacggtcagaatatattgggcatcaaattaaaaacttttttttcaaaagtctacagaatggatattggagcaaaaattacaaagtgggtcagatacaggtttttaaaaactgcattactgaatttaacaaaagtcagacactagaatcatatatttgctgcataaaagttgatttgatacctggtggtgattgaatttagtctcaaagactcataaataaaaatctgacttaagacgtagtcataccagtataccaattctcccatcactttgactttcggcagagagattagagcaaaaaatattcaggagaacagtggagttacattgtattatgtatgtttaatataatatcaattttaaggttaaggttaaggaaatcttaattttaaggttaaaccttgagtactagttatagaacttaatattcctggttaaagagtaagttaactgggttattatgtggccttggttgaagaccataaattatgcatttatgcatttgtggttgctttggttct

SEQ ID NO: 336488 - DNA, 1000 bp, Homo Sapiens
gaattccgggctggctcctgctgcctctgcagaaacactagttaacagtgacctgggctactctgggcacatctgtgatcaatgagaaatctcatactgcaggacgacaccctctgaactccgtcctccccctcctcagcatcccccacctctcaattccggtctccagtgaaggctgtacttggtgcatctcagcctagctgtcccagcacgcaagcaaaatgtacgattccctcctctcccttcctgaaaggcctgtagactgacattaagcaggaatttaaaaagtctgaagcaagtttatccagtagatggctgggggtgctactcgcgctgtctctgaggccctcctttgcagacatcatgaccgtaaggcttttggggccagcatcttcccagttccctgtaggtcacgaggggccacttctcccacttcctggggtcagcactgtcctctgtgggctgcagagcaggcagctcaaggcacttggtttgggaagcctggtctccctgcaaagccgggaggcatcaagctctaattgtggtgaccaggccctcagtcacagctggggccaccagaacagaggggccgccctcgctcagagggcgtctggagtcactgggggctggggctctgggggctcgtggaagtagtagggctggaagagtctctcgtggctgcacagctccatggcccggtaggtgtgtgcgaggaggtgggggaagcgagacgtgaagtagcacacgaagtcgtcggggagggtccccagcgtctcccgcacctctgcaggcagctcccggtagtggtgcttcttatttctcatggctcggaggagatctctgacagaaccacctttataggtcctgaatttacgcaggtctgtctggagggggtcagtgatgttctcccgccagtccatcttcaccacggctctcccgcctctctctaactgcttcacgatcgggccatccagggattccttttctattctgtcgctca

SEQ ID NO: 336489 - DNA, 619 bp, Homo Sapiens; identical to SEQ ID NO: 157762

SEQ ID NO: 336490 - DNA, 1000 bp, Homo Sapiens
ttttttttcacgtgtaagatttttattcaaatttgatttacattccaaaagaaattataaaatgtattcacttgtttataaaaaaaagggggggggggacaaaactttaattcaaattataaaacatgataaattttcagattaaaattgggcaagttgcttggagtaacaagtttttaaatcaccattttccacctccacaccaaggataaccttctaattaatgatcagccatgttgtaataggatagcactgagacttgaggaaacagaaaaactgaagagctcttccaagccccgaccaggaacatttttatgccttctcatagtggcgaacagcaaccacatcaccaaaagtaagggtcataaccattttgccatccttaatttctcttacaaaatttgtttctttgccatcccatttctgtatgtgaacaagtttgtctccatccaggctaacaacagacttacagtttctatcatctgcagtggtttcatcaaactcttctcccagctggaaactaatctccgtgttcttgaatgtgctgagagtcctgatgaccactttgtctccttcttgactgataattaccgttggtttggtcacatttcccacctgcctagtggcaaagcccacgcctagagccttcatgtactcatcaaagttctgactgttggtcagcttccaggtagcacagaaagcctccaccatccttgccctttcccctctttagagacaggagcggggatcttctggtctaattgccactgcagctcagaagaccctttacacctcagcaagcagctcctgccttcttatttggaaagagggtgggcaaaaatccagtgatttaaattgcaaacacacccctccagtgtccctctttccaagaggctgtcacagagagaggagaagggaaggagcgctcgagtgaggctccaatcctctttgtgattggctcaggccactgggttagcggagtaggtcgagttcctcccaa

SEQ ID NO: 336491 - DNA, 1000 bp, Homo Sapiens
aacagtaaaaaaagatactttattgttaaaaaaaaaaatgaccaatgaaactatgtatctgtcactcacactcacagtcacacacacagccacaaaccactcacacaaattggctctcgcccacacatctccctctcgcatgaagcagcagccctgtgggcaaggctccactgctcttccttttgacttctgtctccagaaacaacacatatgaaaaggcagtggaccagagggagggactgggtgggagggagtggtgaggtcaccaaaggccacagaggcttctggtccccaccactcctggctacatacactctacacatgtgtacacacgtactatccatgggcacccacatgtgtagacatgtgcccacattgaccctccatgcatagggttgagtcgctgcaggtaatacttgatgggcaggcgtctgcagtggagaggaggcaatggcaggtgtccagcctggacactgcggtccagctccctgcttccaaccggccctaaataggagttcagacttccttgtgtctagggaagaaaaatcccattgaggaaactcatccagacagcaaggtcaaaaagtgcctaagaatttttaaaatgaagaattagttccttccttcctttggccaaaagtgcctgggaaacttgggatgaagaacccagagttccatgaggtctgaattctttaacaaagaaggttcagagctgtgtagactcctggcaggccctgactggcagccagtggtgtgactctgaggtgggcccgttcctctgcgtgtaggctgaggagcgggacctctggggcccgaggcctggtggtgctcctcggagtccttgttgccctccatcaccattttctccccggtgcaaagcacagtgcctgacgtggagcagacacttgacaaagacacagtgagtgctcgactgaggcaggggcagaggggactgtgcccgctcccctgctgctcacctctcagcccctaggaggatgcc

SEQ ID NO: 336492 - DNA, 1000 bp, Homo Sapiens
gaatatgcctattttattaacatcatgctttaataaataactggctacttctaataaaattaagcctctgtttacaacagcccccaatattccattttgaccactctgcagaatttggtgtaaaaagttgaatgaaatgtagaccctgagctatcaagtaattatgtttcaatataaaaatagagaattactcttacaactgaagattgaacaataacacaaacaacctctttgtgggttttaggttcggtaaaattagttgggatcttaatggctgtctaaagcaggaagagacagaattttagtctttctgaagacttctgggaactcctttgaaagtgatttgttacattatcagagttttatgagctatcatttggtaaggacacaaggaagggattcccaaggcagttgttagtctttggcctgggacaacagatatggccatggcctttgccacttcacccacgtggctaaaggtcaccactaagatgtagtattctcagctctacctactcccaccccaccccatcccccaagaaaaacaacacatacaaaaatctggacacctagttctcccctaagtgggctccttggctgatatcttggatcgtagcacattgctgtgaaccatggcaagtcctttgttttactgataagagggggctaggtaagaaaaagactcaaatgagacaccttatactctcttaaaacaaaaactgggatcccaaaacaaatggagatacacatgcacagacaaaaactttgcccgagtgttgacagctattccctgagcccaggctgtaccccagttctggctagctctcagacagctccctgtacataattgggtttgaaatctcgaccactctaacaaaggatattaattcaaatagggtcagtgtgaacatgaaaactagcacagggtgggctagctaacctgcctggttttaaaaaaaaacacccctaaacccaagtgtgaacatgtgataactgggac

SEQ ID NO: 336493 - DNA, 1000 bp, Homo Sapiens; identical to SEQ ID NO: 157764

SEQ ID NO: 336494 - DNA, 1000 bp, Homo Sapiens; identical to SEQ ID NO: 157765

SEQ ID NO: 336495 - DNA, 1000 bp, Homo Sapiens
tgttatatacattttattgaaaaaaaattttacaacaaaatattttggcaaactgtaaaagtatacataagtgcaaatatatcctccttttaaaatacaagcaaagtgtgagtatacacggtcataaaaatatctttaaaatatggtggtagaaaacaaccttgtaaaaacgttgtattgtcacaatactgaaaaccactttcttaaactagacacattgtttctaaataattccttaataatgttctttggcacctgtatccaaatgtagtgtctggggaaaatgactctcccactcagctaggcaacaagaagaggctttcttgaaatcttgtgcttagcactgcctttttgaaaagcacacaagttttcttagacacacacacacacacacaacttgtctgcttttttcacaccctgattactgaaggcaacgaagatcccacagatacacgttgatgccttacgcatggcacatcttcccacctgagtctgccctctccctcatgtgggagcctgcaggtattcagattggggaacgctaccttgccagcggttgtccttcttccagcagtaggcaaataacagtgaccaacgcgatcctgggcattctggctaagtggcaggtgtgtggcttactgctatccgcgtgcatgtgacttgaatccgtcccagtttctatctgccccctctgaggaggggagaggagagagcggccatcgcttggcctctttccgttcacatgacgcagggcttaatatcctgacagacgctctggtggtgatggtgataatacgacccgctagctgagggatggaaagaagaaatcccattgaagttgaggacgaaatcttttctgtcacacactggagtagagtgatgctggtaacggggcagtcccactgagaggtcctcgcgagcgttctggtgcaagtagctctgctccagcgagtaggaggacatgctggagtgcaggcctgccgaggcggcggggttgctg

SEQ ID NO: 336496 - DNA, 1000 bp, Homo Sapiens; identical to SEQ ID NO: 157767

SEQ ID NO: 336497 - DNA, 1000 bp, Homo Sapiens
accctctgcgacagccgcactttatttggagttttccacctaagcagctcccagctgagctgcatgacatgtgcaaaagtcccctagaaagctgggcctcgcagtgtgtaaaaaaggccccccatggggcagagccgtgcaaccattttaaaaaaagagacagtgagagagaaatcaggccccctgggagcctggcttgggtggagtgcacatcgctcaggccggtccatgtgccaggccactcctgctggttcgggggctgttttcttctctgattgtgctttcctttccaagtccttaaaactctggggttgtagccaccagagagaccagaccaagtcctcggggtcaggagggtatctggccggcggtgcagtttgagggtgacctcacacacagacacccacaacacaatgctcccccactgctcagccccgccagaaactcagggcttccctggcctcgcagccctcgccagccccttgtgtcccagcctctgcccctgagcctggccccagtcggccctcatgtcacattcccagggagggacactgtcctgacacagacaaggtcctccaacccctggggcgcggtggggtggggaggctgggccttcacttcacccccaaggcaggtgtttgtagtgtctgattctgtgcgtgtctgggtgtggcacatttgtgtgtgtgtgtgtgtgtgtgtaatgtgtgtgtggctggaggtgggggctgaggctggggaggcacttttgggattcaagggaccttgactttgaaggggcttccagggacactttcgtcaccccacttgacaatgaggatgtagtcccctttctccttgacagtgtaggtgacattgtacacccggttccccatgtgcttcacgtacacctcctcacagggggtcttggggccgtgcacgcccaccatcatcatgttggtgcctgctttgctgcagtccacggtgaaggagttcttctggcccacgaaggcctgggaca

SEQ ID NO: 336498 - DNA, 1000 bp, Homo Sapiens; identical to SEQ ID NO: 157768

SEQ ID NO: 336499 - DNA, 1000 bp, Homo Sapiens
tgagttgaaagtaatttctttattgagaaaataaagacatggttcctaaggaaaagggctaaaaatgaccatgtttcaagtacactagtgaatagcaagtgaaacaaaatgtcttaagcatctatatgtcttatcttagatacatacaactattgtaggaacattatttctcttatctctcaggaaacatatttagttataatatgaaaaaaaactaaaattgagcttctaatagaaaatcaaaccctatcagaagaagagttacgtggagtaagcgattttataccgatgctgacttactctccctaccataaaatttgataaacaacaaacatttattaagcacctaccacatgtcaagaactctgctaaagacatacaaagatgactaaaagagtacctgagctcccagtctagggattaccacaaggaagagtgacggatcatgagtggaagggagatgagttaatacaaatggaaaacaggtttcattgtaggaaaaaggaaagtgaattaatgctttcgaaagagacattaaagtagatttctgggcaatatgaaactgagagtcaatctcgtcagattctgaaggcatctgtagataagcttcccaatgaaaaacagggcagtgacaataggacaactagaagtaagctataattatagcaaagaaggcaagagctagcataaacttgcctattgtcattgttgaagtcatagaactactcctttcaactactcttgtcatcagaggcttcctgatgcgatcatctgtggtgaggatagcttttcgagccccatcccactttccagggccctgtacacgatagtggattggagtgcagggtcccagtaataagtgtaatgccagcttggggtcagtgaaggccagagacagcagattgggcctgacccccaccaaatcagcaagctcttccatggtatctatgtagtctccctgaatggtatggcgttggctctccacataccttttgtcaat

SEQ ID NO: 336500 - DNA, 1000 bp, Homo Sapiens
tttttttttttttttttttttgggactttcaccaatgggtttatttaaaaggaagcaaattaaacaaaactatggtgataacagcagatgtctagttataattcatttctctaatgctgattaatatattcatgaacaaatcaaatgtattgccaaaagaagaatgctaccattaacaccccagcggctactggtttcagttgtgcttctcaatcaggcaaaatgttctttcttaagctcctatttattttacttcctgacagtctcaaaaataattcatcttgggtgttgtttcctcataaacacttcctggtgcttgattgctttgcctatgtgacatttgacttcaaactgccattttacctttataaacatttggaactttctaagcatgaggagaatgcccaaaaggcatacaaaaataaggctgtaattagatcggcagagtatgttttaaggcatatctagctttctgtgaataccagaaacctctcttttcatccaatattgcattcccaattggggtgcagaaagtaaattaacatctggagactccagcaaagaggctctggtaacagcatgtttaatttattattattgcaaaagaacagtttttctcatgattagtgaaatagaaaactcacaatatacttaagagtctgcccccaaaccattacaaaggggttgagagaagagagaagcagaaaccaaaagagaaacagaagtaataatcagttatcacatgatttttatagtaaacaatagaatatgatgtgcaatagtgcaattttcctttgctagtccagcaatgcaagtaagtcttaataggaagtccactgtgttactttttgtatttcgggatttagttgcgtgcttgccgggggttcgagttcctgccagacttctgactctgagtggaatcactattgctagaatcacttttactgagtccaagatgacgaagcttcatatcccagcgcttaacttttttaccgagtcg

SEQ ID NO: 336501 - DNA, 1000 bp, Homo Sapiens
tttttttttttttttttgaaatgtaacagtggcttttaatcatagtaccacctcattacattatgatatttccttataccatgcccctactgacagaattagtgtctactaaccaacagaaatagcgtaagataactttaaaaaaacagaaatttgtaatgtaaaactcattatcatgcatttttaaataagtaaattatctgtgaaattatacatatatatcatattttctggtcaaattaaaatcacaatatgcaggtttgaatcccaggaaaccaggtaatgtacattcttttctttccatttttttgtgtccatccatcacagataattactctagaagaagtgatatcatggcatctctgttgtccagactaccctttaggttcactctcactttcaggttgctcatcgcttgaatagtcctcagttctccattttttcctttggaaattaactttcaccattatagcaatcagtacacagaaaataataaagaaaggaatgaataagaaaaatggccatctcattggtttggaatggtaaatgttctcaatgtagcgcctttcagggagtctggctggtatagctacaggtggaaaattgccactgtcaatactcccaccaggccatagatctgattgaactgagcaatctggaggtaaatatgaagcactacagtgacagtgctttttgttattgcatacacctctatcattgcatttgtcagtagtacaatcataacccaagtatgaagaactcacacatctttgattcctgcaaaccttatttgaaccacaagaagttccatcttttatccacatcttttggctgtctgcatgatcactggcaaattccacagcaatgcagagatgtccacttatgttggcataaataatagtggctcttggaatttgtaataaaaatttacctacatatttacatattaattttccgcactgcagattgtcagcttcacactgtgtgtatcctgaatcac

SEQ ID NO: 336502 - DNA, 1000 bp, Homo Sapiens; identical to SEQ ID NO: 157769

SEQ ID NO: 336503 - DNA, 1000 bp, Homo Sapiens
ttttcaatctggaacacaaaagtttattagaataaaaatacacatacagtatcaacactaaaattatttcacatcgcatttaggttttacctccattagttttttttaatgcttataaagtctatgctctaaataatttgcacatttgtaaacaaatcttagatgaccaaagatgcagtgtatctatcagatattgaatatcaaaacttaaggatgggaactgatagcgaaatccaattacactaaacattcctgtaaatttttggaaagagagaaaaagattaaaataattcacttgaaatgaggtaagatgtatatgaaaaggtttttagtagcatatatcacaatgttgagatgagaatattaaaaacattcatggaaaattcactttgatgttttgcatagtctaggttattttttaaaaaacaaaaaattaaaaattacccaaattccttattagaaaaagagacaattacctggttctacttaggatctgtgtatgttctaagtctttctctcctttagaaaaaaagagataatctgattctattttggatctgtgtacattctaagtctttctctcatttagagaaaaacattctcaagtctatagaagaggaaaaaaaattaagattaggaccaacatttcaagctgccttttggaaagaaaattaaaaacagaggtagatggttaattattagtggccaagttactcaggtgactaattttttcttggtacacattcaccaaaattttatacttgaagccaaatagtaaataactttaggagtagagagtaatacctagcagaagttattttctttatgtcaaagaaaagtaatagaagcaaaccaggcttacgacccctgttaaggagatgattgtttaaagcactacagttcatgcactttttaaagcaggagaatgaaccttgcccctaagcttcttaggtgtatctgaggccagccacaagctccatcaggcctgttcagtccaagt

SEQ ID NO: 336504 - DNA, 1000 bp, Homo Sapiens
tttttttttttccaaaataagacatttcattttatttctgaaatcagaataagtcggtgagagtagaaaccactaggtcgagagcaagaactctcccccaaagtggagagaatatttctccctaccctgggctgcggatgccctggaaacggggcttcttcctcccacatgttctgctggcacaagtccccttgggcgggctgggctgaagtgggcagggttgggcccctttcacccacccagaaacatgggttcactgaacgtcaggctctaggatctcgagggggtccgcagtgcgcttctgacctggcccagcaagagcactcctgacagcctcacagacagaaggagctgcagccaggtgtgcctgagcctcagtgatcgagcaccggaataggaggctcagcaaggcgatgggtatcacctgttccttctcatgtgcaacctggacatggcaggagatgggagcagcccgaatatcatctgacagtggctggggaaagtggatcgctcggaggaggctctcgatgcatcgagccttggactgtccagagaaccgctgcagcatggccagcgcccgccagaagagcttggagttgctaatccgaaggtccaacatgtggttttgtaggatcttaccaagaagcacatgagcacctgtactcactgtattcagcacccatttggtgcttagctcacgctggaacttctggatgaagttcccttcatattcaaagaaaagcagtggccatgtgatgctgatgatggagggaaagagcttcttcagagggatcggcaaggtctgacccacggtgctgtgtgccagggcctggatgtggttggtcttctctttcacctgctccactatagtctgcacctccgtgaggttgtcatccagggtgaaaatgaagaccacagtatcgatttccgtgagagagggaaggatggaagtcaggaagtcctcctgggagaaggtgaactggggaccctggttggtgag

SEQ ID NO: 336505 - DNA, 1000 bp, Homo Sapiens
ttttttttttttttttttttttttttttttttttttttttttttttttaaggtttcctttgtcctttcccctgttttcaccatgagaattcagctgaaaaacaactctccagaatgcccacccatattgtcctttgacccaccacattccaaacttctgacttctgatcccaagctcttggagccttagcctttagtgatgtatccttctctgatgaggaaatcatagattttccgggttttgttcacatctatcttgatgagtgctcttgcctgcgccagtcttaagcctccttgcttgttacattcgttcaatagagcagatttgtattctaaataggctccagggaccaacctcaccatctgacagagctccttttctttttcattcagcttctctgtgccagggaggccagtgaggttcaagggtggtgcactccgtctacctgaattcgaagccattggaatggaaggactcaggccggaatcaatgtcagcttgccggcggagccactgctggcaagcactactgtcctggatatactggagaacttctgagagcatagtgcgtttaaggcgctcttcctcccgtgtcttcttgaggtgatcgtaggttctggcactacaaaaattggtaatgcctgctgtcctgtattcttggagcctcttgatttcccttcggagttcaaattccaatgcatggctttcaatgaatttgtcatgttccactggccccacaattcttgcaaatcgcctcattgtttcatacaggtcctggacctccttgggataccgccgttccattaattgaaactttctaaggttgattaatccatggtctcttataattttttttcgtctttgtctctcctttaacctggaatgatagatatctaccacagccatcttcagagcatgtaaaatgtccgagtcatcttcaacaaaatcaatgtctctcaagtcccattctgcataattgtcaaattcctcaatgaaatctg

SEQ ID NO: 336506 - DNA, 1000 bp, Homo Sapiens
ttttttttttttggtttctgaatggatgattttaatggtgatatgaactgattctaactgcattctgtcgcaccctcattcaaaagagtaaaacttacagtgaccatgtttatcatgaaatagtattgcatttattttaaactgatggtccccaacttacttaaaaatcgtagaggcttaacggtttttcagctttacaacagtgcacaagtgatatgcattcagtagaaattatactttgagtacccatacaatcattgtttttcactttcacaacagtattcagtaaataacatgagctattcaacacttcattataaaataggctttgtgttaaatggttttgcccaactgcaggctaaatgttctgagaacatttaaggtaggcttggctaagttatgatttcaggtaagagatattaaatgcattttcaatatgatattttcaaattataatgggtttactgggacctacccacatcataagttgaggagcgtctgtatttaatatgagaaattatttttatttttctgaacaactgaaaaggtccaattcaatcgaccctacagagaaaacgaactgaaacatggcctcttcctacccaaatcactacaagagaaaatctacttatgttatttaagtgaactgtacttaataaatgacataaatatatgtttagaaacaacaacactccattttcaaggctgagtggctgtttactgagatctgggaagagcctcagtaactgcctgtaaaataaagaacaatttttattaactcttttccttagtaagaaagatgtaaatcttgatgcaatactcattaactagaatccttccatcacaaaatttttgttcacatatgtttaaggactttttgtttgtttgtttggagatacgagtttcactctgtcacccaggctggtgtggtggtggcatctcagctcactgcaacctccgcctcctgggctcaagagattctcctgcctcagcctcccag

SEQ ID NO: 336507 - DNA, 1000 bp, Homo Sapiens; identical to SEQ ID NO: 157772

SEQ ID NO: 336508 - DNA, 1000 bp, Homo Sapiens
ttttttttttttttttttttttttttttttttttttttttttttttttgcttcctagcacgtttattggagccttggttaagcttggatgcggatcaggagcccccaccagagcccagccaggctgactggggcagggcactgcggggccaatgtcctttttccccattatagacaacagtattaaaaaaaataaactttacaataatacattttcgctcatctgttggggtattatttccatagttttgttgcttaaaaaaaggaaagaaaggggaaaccacacaatatatgtatatggatgtgtatatacatatatgttaggagaggagccccggtatgtacatacagttgacgtacgtctaggaaatgaggaaagagaaaggggaaaggaggaggagggagaagacagcaggaaagcttgagggcccacggtgctgcagacacacacccggctgtggtctctcccctccctctccccaaagggaggcctgccaaaggacccacgagaaagcaaagaagccaacaaaggaccgtttctctctgacttcaaaatttctgccaccgagaaagaagctggtgcccaagttttaatgcctcgccacaagggctctcccaggcaggctgagctctcaagccctcctggagctggcccccagccccaacactccgtgctacagtcagggggagcccagcacggtgcgaaccccctccaccgccatccgtggggaagttcccacaccagctgcagacccaccagccccacccgagggcagagagggagggcaaaaccatctccatccttgaagccaaagggctgaaggtggaccctcatggccagccccgctgccccgctgaccgatgccctctgccagcccccagcgggtccccagagtgggcagcctggggaagcagctgtgttgtcctgcccccagccagcctcaggcacagcccagagtcccttccgctgcaggctcttgtccggtctctgcttcagaagg

SEQ ID NO: 336509 - DNA, 1000 bp, Homo Sapiens
tttttttttttttttttttttttttttttttttttttttttttttttttttaagtcaaaggtttaatcatgatccaagagcccagagagactttaggacaataataggaataaagcaaggcccacaggctccagctcctgatgcccagatgttcggcaggatccggggacagggcagtgcaggcagtagttttccatcctccactcagaggaggagacgagggggcaggagccttcttcacaaaggagaatgactttctaggctgcctcagaacacccagtcctccctaccctaaccctaatctggaatgcaatagagaatggctaacttattagattctggtgatcctggtagtcaagaggaagggctcagaaaggggcttggtggagctggtcaccaccagatgacatggctaaattgtggccaccaaggaggggcagcatgaatcagaagtggagatggggtggagggaatgaggactggaccagtaaggatctggaggtcataacccttagcttctcctgtgccctcatctgcgcactgcacctccttcctgctgctgtcctttcctcaccccttgtgggctgcaagtccacctgggtgtggtggaggggaagagggccctggggaagtccagctaccataggctcaggagcagaatcaagggaagcgtgcaggagaaaagagagggcacccagggctgtggcctcacagcagggttttcattctggtgtgccatcacagcaaaggtagggtgtggccagtcctgggagaagagttggctgtgaaaacgcatcttagctgcaatggcctccgtgaggcaggggttgtgggagaagaacccttccagcatttcacactcctcctgcaggttgccactgcctcggcaggtgcagcttaaggcaacactggtgttgacattgctgacaaagttgggggtcatggcagtcccaatcagccccaggtatgctcgtagacatctggactgctctgttgcaca

SEQ ID NO: 336510 - DNA, 1000 bp, Homo Sapiens
acaaagttagggtcatttattcacgttatattatttaattttaaaggcaaaaatacagttctgttttgaacaccaagatcagacacagccccctacacaatggtaaatacacacatttgcatacacaggaaatcaaaatacacagcacaacaggtctctgggacatgaaaggcgtcatcctggctatgcagagcccccgcccctggcagtacagcagagaccctgtccaggctgtaggcagcacagcatctcctttactgtcctgtgccacctctgcctctctgatctttcccaaaggccagttcacacagagtcaccagcaataggatacacagaaacagaaaagggcacggcacatgacacacttcgcggtacataactcccaggaaaaggaaatgctccctgaacccccagccctgaaatccccagtaaggaaacaggacccgcggcatctcacggaccaggcaaacatccaggcctaactgtgccctggctgtgccttgggcccaggtgagcccatgagagcactacgtcagcaaatggggggagcagtatttcccttggttctaagaatgaaccacatacttgacatgaatgagaaggtaaccaaaaaaaaaaaaaaaaaaaaaaaaaaaaacaagaaaaggtagagtttggttttaagagtaaaataacacagaagttaccactcagggcatttgtctgatttcttttaaggcactttggaaaagtcaggatctgcggacagaaagagaggctttcattcttcttatttcccacaactccctctcaatgcagtcatttctagttttaataatatccttggtatagagtggggatctgacagagaaaatactttttgcatgagtcacagctgctctctgcaatagaaaataatttttaaccaatacaaagccttctggaaaaagaaccaagttagcatctgagatgcgcaaagcagtaaaggcacagataagactggggccaggcaccagctcag

SEQ ID NO: 336511 - DNA, 1000 bp, Homo Sapiens; identical to SEQ ID NO: 157774

SEQ ID NO: 336512 - DNA, 1000 bp, Homo Sapiens; identical to SEQ ID NO: 157775

SEQ ID NO: 336513 - DNA, 1000 bp, Homo Sapiens
gtatactatgctttctattatactttgattggcatgggccaatctgttatttttaagttcaacttttttttaacttttaagttcaggggtacatgcgcaggaagtgctggtttgttacatacataaaggtgtgtcatgggggtttgttacacagattatttcatcaccctaagtatccattagttatttttcctgatctctccctcctcccaccttccgccctctcataggccccagtgtgtgttgtttccctctatgtgtccacgtgttctcatttagctcccacttacaagtgagaatatggagtgtttggttttctgttcctgcaatagtttatgaaggataatggcctccagctccatccatgtccctgcaaagggcatgatcttgttctttctttatggctgaacaattctttttttaaaaaaggatgtttttaggaggaattgtgtacagagactgttctaacagataaccacagagggacctttccagccattggaaagacattcaagaggaagaggaaataggttgtacagcaggtctgactacaggcaataagttgggaaagaagaaaggtttagatgcaaagggagcgaggaagtaaactgtggaaggagacatgagtaagcagaatgtctgctatttcacatatttctggtgcagtcatatatttactgtatcagatttccagagggtgtggctgttagtgtgtctctctactcccaggagccccatgtctatcaggatctaccaccgctccactggatgtgccactttgtccatcaaaatgctcaccatggatgtgattcagcatgagagaggtgggcagagtggggaaatgcagtgaaatcttcaatctgagccaaggctatagacgtgaagtgccccggagagtcgggctcccaaagaactccttccagcagcaatgacgacttggttctttgccttggacctcacggtgatgagggagctcccaaaccttgagctggcttcagga

SEQ ID NO: 336514 - DNA, 1000 bp, Homo Sapiens
aaggatccgcacatgacaggtttattgacaaaggctgaacgtcaccagcctcatcagcttttcttacattttatgggaaggtttttacatcatcaccgcagttgtccccagctgttatttctgtagaaacaaattcgtcagccacacgtgctggagtatttcattgtcctggcacccgactaacccacacggcagctcgcacggtcccagtccacatgagtgcaattgccatgttgatgtcaacaagcagtgactgaaccaccccggagcagacggcgggcgctccacagaggggccttcctgctgctccgggccgagcgctgctgctcctcgtgggcctggtgaggccgcacagcgccattgctgccatcctggaagatggaggacgctcaggcgtgcaccagagcagcatgttttccttctcctctttaactcggcggtgcgctagctagctcagaccgtgggcacagaggacacaccgcgacgtccagctcagacccaccagcaccttgcatctccagcgtcagttcccccacggtggcagatttgctttagggttcctgtgtaactgaggcgcttcacccacagtggcctctccgtgtggctttcctggtcgacggtgtcaaatgtttcctgcagcggcaggcaggtgcagcggcaggcagggttggcggggaggagctgggtgacaggctggtcaccgctggcctttggaccctgcggggcgagcgctttgggattgtagcaattctgtgtgaagagtgcaaggtgaccagtcgtgaggtttcctaagcagccccagggtgaccaggcaagcgtgaccctcgcgaggccccgaggagccagaagccacatctgaccgcagtttagagacatgacgtggccgtgccttgtgtccacccaggtgtgtgcagctcccgagtcacaccctggctgggcctatgcggccaaggctgtctacacggcactgctgaacctcacatccgactgctcggtgctg

SEQ ID NO: 336515 - DNA, 1000 bp, Homo Sapiens
tttttttttttttttttttaatgactcataaattctttattttggctaatactgattgcattcattactaccattttatttattacagctcagaggagagtcatttactagacattcggttgttattaaacactaaaaattaggcagagactggaggggataaggataagagaacaggataaggagagcagaaagacgctcaggagagtagaaagacactcaggagagaacaagagatcctgcccattcttattatgaggatgaactggctacaggacatgagtagcccaatcagatctaacttaaataccagcctctccaaaaaagttttccaataaagatcccctaacaattatttactggacaaaaaaggttgatatttctagaagagatgatctcgttgacacaaaagacccaacttaggacccaacttaatacatagatagcaccatgacagagctgggatccattaagacatgactgtagacaataccatctctaggaacacactgtcactcacacatggatgtgttgttttatggcctaaagatgttgtagacggttctcacataaatttcatcagggggaggcttcttcttgctgccaggttcaaggaatctcttaattgtagggatattacttagtttcactgtgtattcctggaggaaaggaaatgcagacaggatattaggaattttctcttctagagctaaaatggtttggagtaaaatcacatctgcaaggctcagctgattaccaacaagaaagctttgtccgtgaccccttaaaatcttttcaaacacaggaaagtatctaattatagccttctgggccatgttaaccacttccttttgctgatcatctggttttaagaaaggatgcatgataagcagttccagcagatccagtgtcccctccacgtacatgtcaatcagggttctctccttgaggttcttgccaaagagattgtgcttgtctgctatgtagtggagaatgcttc

SEQ ID NO: 336516 - DNA, 1000 bp, Homo Sapiens; identical to SEQ ID NO: 157778

SEQ ID NO: 336517 - DNA, 1000 bp, Homo Sapiens; identical to SEQ ID NO: 157779

SEQ ID NO: 336518 - DNA, 1000 bp, Homo Sapiens
tttttttttttttttttttttagctatcataactttattaaacaagaaaagccctgacgcgtaaataaaaaacacctgagttctgatgccccgccccgcccagtcccgcccgccgaggtccgtgtccaagtcccgcgctctcaggagctatgtttctgccgcttccaaaagcgcttgacgtcgctgtgcccggccggggtcaccaccatgagccgcttggccgagttctcgaacacgagcacgcccagctcccgcgcgtgggccagcagcagctcaaagtccacttgcgacaggaactggttatacaggacaccctcagtgaaccggagtctgtccctttccagctcccagagccggatctggtcggtgatggtggggggcagcacaggtgtctgtttgagcatcactgggtgggctcttgtccttaggaaatggattatctgctgggctgtgatgccactggcgattgcctgctgcacactctcccgggtcacctgcgccaccaccatgttggggaaccgatagagcatctcagagaagagggcaatgagggcaatctgcagctccgactccgtgtaggcatacagtcggtaattggtttccacgacaatgaaacctggctgatgcacagtgcccccagctccagagacacctgatgagagattgatggccaggcgtgtggggtagtaacgccgagatttcctcttcctctggaaaacaagcccaaactcacgcagatgttgcaggaagttcaacagagaatcactcataccttccacagagtaatccttgcccagagtagagaagctgagctggaagaggaaggagagaatctctaccaggtccatgccccggctctgggctgtctgcaaatactgcaacataaagtaccagagctgagccggggtgtccagcaacaggaactggaagccagcggaagtaatgcagggcggctctccaggttcagtactcttcatgagcccagcctggctgaggagct

SEQ ID NO: 336519 - DNA, 1000 bp, Homo Sapiens; identical to SEQ ID NO: 157781

SEQ ID NO: 336520 - DNA, 1000 bp, Homo Sapiens; identical to SEQ ID NO: 157782

SEQ ID NO: 336521 - DNA, 1000 bp, Homo Sapiens
gaagtaactgaagatatttaatctagagaagatttgggaaacacatgatagctatggttaaatacttaacagggcaatcacagggaagatgactagatttcctaacatccatgagtgaaatttatagaagtatactctctgacttgatataaaggaagattttaaaaaacatgactgttcaggagtgttcaagtagggtcagatgaccagtgattgggaatacttcgtaagcaggagcaagtaagatctgagccactgttctatcggtagggtgtctgtggtattccttggtcaaagaagtactctaagcaacttcagtctcacgaattactatcaccctcgtgggcatacatgatggttaccctaaagaggaagtttcagaaggcagtaatattggatcctggaatagtcagacaggagccttcatgcagatacccttttcagttctccatacacccattcacaagtggtcacaaaaacacccagtacctttacttggctttacccacttaacaatatgctcaatatgagcagtttgactcccaagcctaggtcaggcctgagtgtttctcatgagccatagtcttaggctgaggagccttgagagttggtggagggagagcccccctgcccgcagggggctgtgatcacagaagtctgtagaaagagtgggatctaaggagtcctggggaggcaggcctaaaggtccaggcctggcatgatcactgtccagggaaggcccccagttcctatggctctgtgcataggggccatttgttcttgaccgacttcactccaaggatctggtgtgggccaaggctagggagtgggcagaaggcgatggctggttggagagaagccaggccgtctagtgggggaggatggttggaacatagcattgaagtgggctcggctttcaagctgcatacggtggcccagtggggaggcgagtccacggacaaaatggattcgaaccagccctgactgccccccagatacc

SEQ ID NO: 336522 - DNA, 1000 bp, Homo Sapiens
cgtaatttcttgcccaggcagaacaatttcttgaactgaagtgagctttcccattgcctcaccaagagaagattcaaatcctggagccctttgccccttatggcttgtttctcaccaactgcctttctgcttttcttctttggaaggctgcaatctccactggttgcaggccatggcccacttgcccatctttgtccactggtgggggcacaggaaggggcttcatgaagccttttttcccaatcagccagaaggtttcctctgtgcctttgcccttgagctctgttcttcctcgaagctccacttcatagccctcactcagattttgaagaattgtaacagtgctgagactgacatgaatgcgataaggtaagcctgtagattccatccgagaagctgtgttcacagtgtctccaaacaagcagtatctgggcatggtgaggcccaccactccagcaacaaccggccctgagtgaaggccaattcgaattcggaccggcacttctggcatgtgccgcatcttgaaagtgcccacagagctcaggatatctaaggacatgtttgcaatctcagctgcatgcctactgccattcctctttgggaggcctgaagccaccatgtaggcatctccaatggtctctaccttgtagacatcatgactgccaattattgcatcaaagagtgtgtacaggtcattcagaagatccacgacctcaatgggctcactcatggctgaaatggttgtgaagcccacaatgtcgctgaagtacaaggtgaccaagtcaaagccctcaggttcaactgtgcagccctttttgagagattcagcaactgatggtggtagcatctgtgttagaagcttttccgttttctgtttttcaatttccagctcttcagtccgctcccgaatcaaatcttccaagttgctagaatattgctccaacatccgaagcatagaatcaataatattggtcttcttccctttattaaaagttttaaa

SEQ ID NO: 336523 - DNA, 1000 bp, Homo Sapiens
ttcttggaaatatctttattgtcagcaaggcagggaatggtgggaaccagggtgtcccgctggagggtcaggagggagccacaagccgcctgggaggccgtatccggtcgttgatccagtccacatagttggccacgcgggtgtagacccccggcttgtggagccgcccgcagccgtcaccccagctgatgatgccgtagaggtaagccacgccgttcttctcgcaggccaggggcccccctgagtccccctggcaggcgtcggacttgcagtcgaagtagccggcacagagcatgttggggctgatgtcggcgccgtagacctcagggctgctgcacttgtggtcggcgaccagggggaccagggcctcccgcagggagctggagtagccgctcacgttctcatccaagtggccccagcccgcaatctggcacttgtgtcctgcggggaaggtgctgccgggctcgggcaggcagatgggctgcacgaactgcgagcgtgtggcacagcggtcccctttcttcttcagccggatcaggacgaggtcgtggtcgctggggttgaacaccgagtacagggtgtacgggatgtacttctcgatgccgaaggtctgcgtcacgtccgtcgtgcggttgaagaagtgctggcccagcaccacggagacgctgtccctgggggggctgtgggagaagcagtgggcggccgacaccacccagcaggtgtggaccaggctcccggcgcagaagctgtccccgatgtagatggcggccagccaggggtgcgagccgggcagcgaggaggagccgccgatgatacgtggccgcaggaacgtcctcttcttgtgcctcctgccgcaggcctggcgccccggggaggctggctcaggcagggtcgccaggagatccggtgacagttggactctggtgagggattcgcaggcctccaggcggcagtactcccaggagagcgcgctgtccttcaccacgtagcaccagggcct

SEQ ID NO: 336524 - DNA, 1000 bp, Homo Sapiens
tttttttttttttttttttcctggtccacagaagatgtttatttgatgtaacaaaacaatacagttagtgttagatccaaccacaaagagcaaaaggaatgaaaaatttgtacaatgtacatagaaaaaacaagatatttactgtgacaactatatattcctaaaataatgcttctaaaattactcaattattgaaatctacatgaaaaaaaggatgttaatagcgacaaagtgcataaaatcaaacattgtattttgagcaaattaacatactaggcaattttgctaagaatgcatgattttttttttcttgtttacagtctgctcaaaatatctttataccaacagggtaggcagaacatttaggtttaatatcagttacacaatattagcataaacttccacaactacatagggtattgttttcttttgagctggcaaagtgactatagaaacatcagatgatttctctgaattgagaattttatccaaataaatgccacataccttctagatatatgcatatctttctatattatgtaaatggctttacccatttaaataataaaccatacagcatttaagaatcattattatatgattaacaatgtcatgttccaggtttaacaatttcataggccaaaaaaaatttcttcttaaaaactagttttataaacgcagaatatattccatgagtaactgctggtattttttaagaaaatatattgtgcaattgtggctaccacgtactgctggcaaagcattattatttatgtaaaatgtgaaaaaaaaggtgtaaaaatttttcaactgcctatgatcatgatgaaaggttactgccttcttacaaaaattatattggcatcttcttaaaaataattcgaaaaagggataaactccctagccaaaaataaataaataaaaaggtgcattttttaaaatgatgctactgcaatgcaatggtttaaataccaaaaaactgagaaaatgagctgtctgt

SEQ ID NO: 336525 - DNA, 1000 bp, Homo Sapiens; identical to SEQ ID NO: 157784

SEQ ID NO: 336526 - DNA, 1000 bp, Homo Sapiens; identical to SEQ ID NO: 157785

SEQ ID NO: 336527 - DNA, 1000 bp, Homo Sapiens
tacaaacagaaccccactttattagcagttagttcgagattgtacattaatggaggaaggtctcacctttaacacaacccaaaacggctggttcgagagccctcatcaggcgaactggatagccccccctctccccactccccccacccccctacaagggaaggaaacctctgcctgcttccccagtgtgccccccaccctctccagtcggccctctcctctcccaggaaatgacatgaatttcatgcacaaattacaaaaggagccctcttgctaataataaaagctaacacagtcatagaaaaccctctcctccctcattctcctccagggccggaaacagtaagagcaggagggatgaacttcttaggataaaacgcatccagtttcccccaggttcctggcattgaccccacaaaaccctatgccagtcccttagggaagctgaaaactcgccagccgtctgagctggcaagggcagccagcccacagctgtcaagccaggaacccagtgttgcctcaacggcctgggcagcagggggtctaggccgccccctcatcctcacatcaactagagcagaggctgcctcctttgatgtgtgaaaatccctgctgtggcccctatctgctcattctacagatgaagaaactgagggcctgggaggaagatggtcaggcagctactaaatgcacccggctgggatgaaacttcacagctcctgctgccagccagggctcttctcacaccacagcttgcgggaggcagttccccatgtaggcttttccctgctgcaactgagagcctggctctgctccagtgcacacagaccacgggtctccaggaaatgaaaaccctgggaccccaaaatagaaagagagagacatatgatgtgtttggtgccctgtggcccatccccagggtcgaaggcccagccttcaggcatgcagcctcctccttccagagccctgtgtccttccttccaaggcccagatattacgg

SEQ ID NO: 336528 - DNA, 1000 bp, Homo Sapiens; identical to SEQ ID NO: 157786

SEQ ID NO: 336529 - DNA, 1000 bp, Homo Sapiens
tttttttttttttttatgttttatcatatttaggttatttattaatgaaaatatatgacattttcaggaatacaaattttgcaccctgatgacctcaaatgcgtgcaacaagatgtttaatacagaaaataacacaaaaactgttgttacagtggttagaatttttaactttaaaaaaccatgaatttgtattgttttaattgcacaataaaataatgttgatatatacttaagcttaaattaattccaacaggcaaacattttccaacccagagtgtggctgatgctgggtcagctgactctattttggttcacaccaactttgatgtctaggctattcagcatctacctagaaaatctcaatcgttccaagcataccgtgaattttgtgatttctcagaagattttcggagttaaaagaagtgtttatatcacttaatatccaacatttctaaaggggggaaaaccccaccatctattattaatgacatttcccaagtccttgcaccaggcccttagtcaccaggttcccacgttttgttgctttcctaccgtctcaaaccaggttcatgaaagcatttgaacagagttcagtcttcattttacaaaaaaaaaaaattcctaatagtggctaaaatactgcaaatttctccattcgattacaatctacaaagataaaccagcattcctttctctttctctcttttggttacttttcccctatccctactggtggaacatttattttttcacacaggttttaaagaaatacattatgttggtttctagtgtattgtacagaatccattctcattctttacttgctacattatgactatgaggagggcagagtagaggtgaactctctgtatacttgctgaaagtcttcttgtacacattgctttttgtacccgtcgcttctagctatgtatcttcctgttctctgccctcgtctcaaactatgttgccacctcaattaatcaggcacttgaattcacat

SEQ ID NO: 336530 - DNA, 1000 bp, Homo Sapiens; identical to SEQ ID NO: 157787

SEQ ID NO: 336531 - DNA, 1000 bp, Homo Sapiens
tttttttttttttttttttattaggtaaatatttctttattaaatggttaattccataaataaaatcttttcactgaatataaaattaaaatcatttacaaattattccagtattacatttcccctccctccccaaaggctacattttgataaataaaacattcagtcttaaaacacctgatttctgtttgcagtttagagtgcagatagctgcctctcacagacactcatggagtgtcccccttcaggaagggatggaatgccctcccatttacttttgtcaaaggacgaataaaagctttaaactgtccaactaatcttattatctcttttacgactgtagaaccccaaaaggaaaaaagcctagagaaaatatgcttagcaaataatttacaaacagaaaacagaaagtcatcaactccacaagctccaaaatgaagcagtaacatgtgctccaatactatgaagcaaagtattctccaatcgtggctgcattagtgtccatccgcaccagcacccttggcagtttcgaaataccttaatgctcctcaagaatgagcaaggcttcctttctacaatgagtcccatcacccacaccacccccgcccattttctccatgattctgattctgacactcttctcccttgtttgtctaggtgtgccctggaaacccaggtagcatttagtccctaaatttgtgaatgtcattgaacagcctgtagaagggaaacgctgcttcattggcatgcgggcagttgtagttgcatttgcaggactggatcatcatgacgttcttggaaaatgtctccccatcttcgcagcggaaccgcatcttcacagtcctggtcagctggggcgtgcagcatcggccgtccacgcaggaaccgcagtacttgggccggtatttcttcacactcaaacatccagcgtaagtaaacctgactggttcgggggatttcttggtcttgctgcatttcttgccctttttcaggctgctgt

SEQ ID NO: 336532 - DNA, 1000 bp, Homo Sapiens
tttttttttttttttttttttttttttttttttttttttttttttttttttttttttttttgaagttaaatagtgaatactctttttattcagaagaatgcatttttaatagaatttcatgcgccagtaaatcagtacagtgaggagttacaggggtggggaacctctcttcaggaaacatctcaccctggcagagctctcaactcccagaatcccctttacccagctcaggtgattagagaccaaggaacagcagatggggctgacttgcagggtaactggttggatttataggtctctgagagcaagagagaggagaggaaagctcttgtaaaggaggagattattatattggaacgggcagttccacagagattctctgagaggttgatgaaggagaattggcaggggtgcctggttctccttcttggttacactcttcaagggcaatggtctggtctcttccgtctgtctctgagcctctggttcgcagtcgaggccacttcttccactctatggctagcactacccccaaggctacaacaaccaccacgattaggctacttcggacaatgttccctacagtgcactcctgagcaacaggccctgctgcccccaccagctccaggggatcactaggctctgaccagatatcagggtaggcctggaggcggtagctgcagctgtagtttccaatgccttttccttctacgttgttgatgacaaagtctccatcctctgaaaactgctgaggtgcttcttctccatcatgttctaggacaaattcaacacctggcaggggtcctcggcactgaagggtgatgtccttccctaacttgaacatggtgctgggccaggctgacagagagggtttagggggcttatcagtcacccagatctccagggagtcactgtgatttgaagctgcaaagggagtagagtccaaataataaacacagctatagatcccagagtcttcacctctcactgctggcatcca

SEQ ID NO: 336533 - DNA, 1000 bp, Homo Sapiens
ccaaaattgtgctttattaaatgctagttcattggaatgttaatacatgtttcacacacacaatcagcaggagaaaatgtttctatagccaaatgacattgataaacagtgttcttacacaaagttaagcctgtttctttattataagacttttcagatactttcccagtgcatagtgtgaatctccacaaagcaagtgaaacatgaatagctccctaaacttacttgaccacagaatgcttcattctatctccatggaaaccacttgtgaaagtctcctactccaactttcttctccaacaaaactcacctgtttgtgatcatctgaactcattttgtgctcttgcctttatataaaagagaagttctgtgaaatgttgaagaagcagggttatggcactagtaatgatccaggcactatacaaattgttaaaattttccattattttagttcagaagccctaaccataggtattctaacagtggattgtggaacccagtatgagtgtttgagacatgttacaaaatataggagctatttttaaaatgaatccatttaataatactgctagatgctgtgagagacagggactccccggcccagcacacacgcttgagcaggaatggagacatgggcatgggtaggcaggctggtggtcagcagataccctttctgtccctcctctgtgacaatcacccccaagtaatttttgggattcagaataaggcagctgctctcccatcctggttactatgagtcgctcttggcagaaaggaccacagatggagagcttggcactcgctccaactttgccgaaaagaggacaaccaccaaagtagtaggtaaaaacacaattttagcagcagtgaaataaaaagaggaagtgaggatggggccaggccgcaactataattaaactgtctgtttaggagaagctgaatccagaagaaacacaagctgtaaagtgagagaggacagggagcagggcctttggagagc

SEQ ID NO: 336534 - DNA, 1000 bp, Homo Sapiens
ataaacacccaagtaaaaatggtttattaaaaaaaagatattgaatgaaatcatttaacaaaaaatataggcaggtggttctagccttggtttaatcagccttggtgattaaaataccttttggggctcaggtttttttttaaattgatataaaatatacataacaaaattgaccatttaaaccatttttaagtgtcaatttagtggcattaagtcacattgcggtacaactatcactactgtttatctgcagaactttttcaacatcctaaacataaaccctgtgcccattaaaccgtcacttcccatgctcccctcccctcagtccctggtaatcactgttctgctttctgtctctgtaaatttgttcactctcagtacctcatgtaggtggaatcataaactatttatctgttgatgtctggcttatttcacttagcataaagttttcaaggttcgtccgtgttgtaacatgtatgagtacttcattcctctttcaggctgaaggatacttcgttaggtacatatcacattttgcttagccattcattcattcattgatgaacatttgggttgcttctgccttttgggtcttgtgaataagctgctatgaatattggtgtacaaatatgggttcaagtccctgctttcatttcttgtgggtcaattcctataagtggaattgcaggatcatgtgttaattctatgtctgaagttttgaggaaagctgccatactgtcttctgcagtggtcacaccattttacaatcccccccagcaacgctcgagagttccagtttctcctctacatcttcatggactgagacagagtctcactgtcgctcaggctggagtgcaggggcacaatctcggctcactgcaacctctgcctcccgggttcaagtgattctcccatctcagcctcccaagtagctgtgattacaggcactcaccaccacgcccggctaatttttttttttttttgtatttttagtagagac

SEQ ID NO: 336535 - DNA, 1000 bp, Homo Sapiens
tgtggtcttgacaatttattggaataaaaaacatgtatcacttattgacagagctttgtgttcaaggcacattcatacccatttcctcagcagaacctcacatccctacgaattagacaagtcagtcattattctgcagatgaggaaactgaggctccaagaggataagtgacttctccaaggtcataccactggaaacagcaaagtcagagctagaatttcggggctcctgagatatccagaattctttcactgtgcaatgctgcctctccaataaataaatgaacaaaataaataaataaagctttcaagggaaccctgaggaatcctccctcaagcctgcctccagagggagttcagttaccagactggcacctaagagtactttggcagaggggtgggggtcatggctggattccctgggccagaatatctgttttcagaatgctccagagaaaggcagggctgagatgactctggatggcacgcacaggcctgtcccctcacagcttccatgcctgtggactgaactgcctttgtttgaaggcagagtccaaatggcctatggggaggcagggcccataatgcccccttctggggctgtgtctgatactgtcttggcatgacaccatggactcccattggatctgttagcctctggcataagaaacaagccagcttggtagtccacggacagtatctgcattctcccaggaccagcttggctaatacccagcaaacatggagggtcccctaaaggtggagtccttatttcacagatgggagattgaggccctctgacaagtggctagtccaaaatcacacagctgaacaccaacaaggcagggaccccagcccagtgcccagtggcttatcctctgggtctgtagctggacattagcagcaaacacaagcacaggcctccaaccctgaccctctggggctggcatgagctggtgcccaagcccagaggccgcccaaagggctgagttatgaccaa

SEQ ID NO: 336536 - DNA, 1000 bp, Homo Sapiens
tcagcctcccaaagtgctgggattacaggcatgagctaccacgcccggccagaaaaaggtacattcttagacttctgcaaatgagaccagtcatgaccaccttgggggcccttttaccttggtgtttaccagtgtcttttatgtcttcatctatagaactaggttgatttgttttgaaggctctcaataatctaggagccatctagagctgtgcactccaatacagtagccactagccatgtgtggcgatttaaatttacaatcaaaatttaattcctcagtcaagctaaacacattccaagtgattaacagccaatgtgcctagtgtctaatgtactggacagtgagtgcagaggtagaacatttccatcatctcaggaagttctgttgaacagtactgatctgctgtgtacagcctgctgtgtagcaggtgctttagaaatagtcattgcatgaatggtcctctagactgtatgccattactactaagagctgtggtttctactctcctcctcatttccctttctggccagcataccaagaaagttactaggaattcaagttggagtctctaggtccacacagtgaaggatgtaattttaaggccctgggaaaggcaagatgaggcatctgagtgaagaccaactcccagttcctaagactcccccagagctggcttgcctgtcctctagctgcagccagaccgatggtggcacccagagatgacagctgctggagcaggggctgggggaattggggcaggctgtgctggttgagggcacactgactttaaggcttgaagcctcaccactcagagcatgagggagtcacacctcatctttaactgatccagagtcagcttatcaccacaggagaaggtgagtgggtgaagagaacttgaggggaaaacagaaagggagatgtgctgaggctccagttcttccagagagtcagcgagaggtgcctcatgtgaggggaggtcatctatgttggagggtaa

SEQ ID NO: 336537 - DNA, 1000 bp, Homo Sapiens
tgacatacaaaaagacaatatttattttactcaagctttcctataagaagttaaacagaaacaatccctggttgaagactaccaaaaatgttaacattgtttcacatatcccttcagtgcccagatgaagggaaaaacttaactgaacgaaagaataagaattaccatcctgacactgggtttgcttaggtatgttaggaaaaaatccacataggctagacctaaaacagtaaatgagcctactaatttcccacaggggatgggaaatccactgatacagacacctccaagagctcccaagacctagggatcacaaccaccacaggtattcccataacttccttttccctcccttttccctcagctattttactgctaaaagaagaggatgggaacaaaagatcacttccccactcccagactgcatgactgtcagcatcaatgtttgttgggaatttcacagcatcctcttcatggccatctaaataggataacagtaaaaatggctagggggaggcatgggttttgcttcccagaattataaaatacctggaaaggaattaatctcattcctatacaggaaaaccaaatattctttctagagaacagcagaacaaagtagaacatctactacggctgtctcccagcctcaatctgacttcaagaataactttacatctgccattgtcatgaaccccagcttcctcagagaagccagggcaccatgcttctacacggccatggaagcaggttgccacttgtacccaaacctgtagagagtgagggtttcttatctcccctcccctaggagcaggaattgcaaatagcatcattgtattaatatgattggtaaatgtttgaacaacttggaaataaagttctcaagttcctaccagtaatatgagtctgtgtgtgaggagagaaatggggtgggggaaatgcctctcatttcccatacttctttaaatttgggggaagtaagagtagaggggatatatac

SEQ ID NO: 336538 - DNA, 1000 bp, Homo Sapiens
cacattatgaattttttatttgtttatttatttattttattttttgagatggagttttgctgttgttgcccaggctagagcgcaatggtgcaatctcggctcaccacaacctctacctccggagtgcaagtgattctcctgcctcagcctcttgagtagctgggattgagggcatgcgtcactacactcagctaattttttgtatttttagtagagatgaggtttcaccatgttggtcaggctggtcttgaacacctgacctctggtgatctgcccgcctcagcctcccaaagggctgggattacaggcgtgagccactgcgcccggcatgaaattttaatagctagtcttcgttttgaacagtgaacattatagatctatcccccaattcatcctcttttttcaaaatgagtttaaaaaggtctctctctttttcacaagctagaaagtatccttcgtatgatgaagattcaaattgcatcttattatcatgtcctgggacacttctctgaaagaatatgatgtcactttttgtatccttgatgttatcaggaggattcatttccttaaaggaaataattttgttctcacaggagagagttgaaattttctcacacttcacagagatagttacagccatacctctaggctggctatctttatacatacttataataaatatggtccggggtgcattatctctacagtcagaatcagtcatatcttcaaatagaggccgatttccttggtcaatgaagagaacttggtcattcaaatttcttatgactgataatttagattcaagcttgccaaagtaatctgattccaggttttcatcatcttcagctataaagtaaagcgtattgtcaataaatttcattgccacaaagttgatgcaattgtcttctactggttcagcagccatctttattcctgcgacaaatagtttgttgcgagaggaagcgatctggaaggtctgaggttcctttcctcttcccga

SEQ ID NO: 336539 - DNA, 1000 bp, Homo Sapiens
attgattatgtcatatagtacaacttcgcccttctcccaacatagcatcttctttaaaatagctttgtgtagtaacaagaaaagtaagatttttccatggtatgtgtatctgaacctcagtttcttttaaagaacaattcaaagattattggcaacaaaacagtctactatgtaagcagtagttgcgtataaaactagtgtgcctaataactgaatactgaggtttgtgtttatcagacgtagtgtggagcatatatacactcactacagtgcctacacactacatacattcatgcgtttagagagacctgcatctccctgcgtaagtagtcatcttttaaatgtactttctagcatataaagagtttgcttcccaataaattgttcagtccctaaacaataagtaagctatgcttgttgcaaatgatctgtgagtaaaattttcagggaaggtggaagcaaacctggcttatgatcattttgactatcatccaagaatagtaaaaatatgtttcgctgattgcatttggggttttaataataagtaagtgtcttttttttcagaatttactggttgccaagtacatgactcttctatatttgaaatatggtgtgtgctgattctcagtgttgactgtatgtctggattttgatgacccatgaatatgcctgtctccattttccttgagaaggcaaatcatctctcttgagatagcctaagtgataattgtacattttcagtttttaatttccttcccaatcttgatggttaaattcttcatattctacggtcagtaattcagaatttcttttactgattaccttgttattttgttgattttggaactttttaacactagttttgtatgcttgattttcagagtgatctggcaacctgcatggagctccctttccctggaggacctcgcattcctttgtgccagggccacagaggcctggttccagaccgtccaggctcccctggctgtcatatcctggt

SEQ ID NO: 336540 - DNA, 1000 bp, Homo Sapiens
cggtggctggacatcttctggcacttttgtttttcttgtgacttattaatttttcataatgatattcatttgcaacgcaatttggtcaccaggtatgctatgctcagaaagagccacacaatcagtaaattggggctcagagctaataaagggatggaacagaggaggctggggtctagccttaagtctcggatgggcaccaggccgctcaagtttttctgggtgactacctcccgtgttccaatgctgcgcatgcactccagggcctgggtgaagacctgcggggccatgccatgctcgtgttgcaggatcaggcactgctccagtgtcaccgacatggctgtacggtccttagcgctcttgcagctggtgaaccggaccccattaaggcggcggcagatctcagcagcttgccagagaatgtcgacgttcttattcttccgggcatgcacgttctgacccagaaaccgcagcagctctggcaggcacgtctgactgcgagaccgaggcaggcaatcctcaggcaaaacttccttaaactgctcaaagtaggaatttaaccgcaccaaactctccacgttgatgacttcttgtaaagacgtatcgccaaacctctcggccagtgtctgctgctcattgatgcccacgttgaagaggacgggctgcactcgcagcagcatgccactctggatctcccggggcaaggcgtcaaacagcgggcccggcagagggacccgcacgttaaacccgtcgcgatttcctgtgatgacgggcagcatgtctgcggaggcgctggaagtggcctgagtgactttgaaggtcacgttcctcaagtccatgatcccaaggctcatgtcctccagcattgccagctcctccccgtaggtgctcagcaggctctcgaactgggccagcagcccgatggtgtagagctggcgcaggaagccgtcgtcatgcaggcagttcctcagcttaatgatgaagccgcagatgagggcgg

SEQ ID NO: 336541 - DNA, 1000 bp, Homo Sapiens
ttttccaaataaaacttaatttattgaagacatcacgccgcaacccttacgactgcccaggaggctgcttgcaagaccctgtcccgggctgagacctgcgaggaacctccctcccccaccctgccgccgtgcatccccagagcagggcagcacagaccaggagacagtgagaactaagcaaactggcactttatggctgagatcctgccccaccccaaccaaccccaataatattaaggtgctctccctccccagacccacacagaacagtttaaataaaccccagcccggtcctcgggctattccttcatttccggacggacacccgcccccacccccagcgggggtggggaggtcttagcggagctcctccgctgtggttcaggcccggtggaaggccgcagaaactggtgaaagtgggggcccagacgtacccaaatggacccccacaggcacccctggggctgggaggcggggtccagtaaaacaggacagcaccagagtaaccagggtcctcggtaaccatggcaactgaccttccgtcctgagcctaaaaggcgaggggcaggatgccctaattagggcattgcaaatgattgggcagcggggaatgcagatccccaataaataggcaccccaataaataggcagagagatactgccctgaccctcataacttttcaaccctggggccatagctgggccttggtagcagggaggggctctgagttcacagcttcgtggtgcctccgctatcacttgctgagctgcagggtgtccagaaggaggcgcttgtgagccgggtcctgcaccccagcctcctccaagtcctcctcggtgatgtcactgagaaactccaggtcgtcccagccattatgcaccaggccctcctcatagcgctccaagccgatggcccgcagccaggcactcatgcctgcctcgcccagcccgctggcccgcccgccctgcaggcacggagcctcctctgccaggtcttcct

SEQ ID NO: 336542 - DNA, 1000 bp, Homo Sapiens
tttttttttaaaatgaatcaattttattccaattcttcaaaatttatacgtaatatgttgtttccaaaatgtaagtcaccctttatataatagttttattatttcatctttctttgatagttttttttttcatcttttctttatggttcttcagtagaagccagaatcttgagttgcccagttaggagcctctgacctgctattctgattaagtttcttctcaatattcatggccaacatctggcttctaaaggaaaggcttttggtcttttcaatcacttgctgatagggtgagactgcattgttacccataaccacatgacctaatttagaatcaatcttggcatccagtcttgcatttctaatcaaatttacaatccacctttcagcttcttctggagtcatgttcaatttatctgccaacatgttaatgctgatacactggtggatgcgacagaaagtctcaaatatgaagagacgggcattttcaatgaaatcctcaagacaagccaccaagaagaagtcattcacaagcactgattcacattccctcagctttttctgagccccatcaaagtcaaagttaacatataaacattcaacaaattctgtaattgggtctttatatgtgtaagactcctgttgaataactttaactagatcttttagaacctgccgacgttttcgaacatccttgtttgttatgactgctgtagtcaaatagcgaagaatgtgtggacacattgtctgaattgcattaagatattgtggctgataaaggaagaggtcaataatattatcgcgacctttggggtgattgaagaaaacaaacagagaccagtgaatgagccatgttctctgctgaagagactgaagtggagaactcacagaattattatctatggtctcttttaaccgtgtaaggtcttccatggctgcatcccaattctgcattaagatttcagaggccagctttccccagagtgaacttaaagcattt

SEQ ID NO: 336543 - DNA, 1000 bp, Homo Sapiens
ttttttttttttttttttattgcaacatacgtttttattactcaaggacaacctggacgtcaccaatgcccagcttcacgggggcatgtagtgtgactcacggctgaacacaaaatcactgtgaagcctgtgctacagccctgggctacttttggacacgcaagaggacactcggttacatgaaacctgacttgcttctgaagacatgtgatacatgtcttttccctgaaaatgtttcccttccctgtctgccatgctcccaacttttctgccttccaggggcttctcactgtctgggtaactaggtcttgggcctagctagaccttgggtagtggcccctctgccacaatcagtgcctgggcctgaggctgagcttgtggcctccgaagcctgacctggctcggagctcgtctgtggcgcccagggatggcctggcttgcaggccaccacattaggccagctcgcaggtccccagtaaagcctgaagacactggcccgaggttggaggtgggtgctgctcgactttctggaggatctcagaattctcgcttcttgctaggactgaaccatgagacttacagccatacttcacttttcccagggtttttctttttgaaacagggtcttgctctgtcacccaggctggagtgcagtcatacaatcatgactcactgcagcctcgacctcccaagcataaatgatcctcctacttcagcctccccagcagctgggaccacaggcgtgcgctaccacgccaggctaatagtttaaaaaattttttggcagagacagggtctcatcatgttgccctggctggtcttgacctactgggctccagcgatcctcctgccttggcctcccaaagtgctgggattacaggcgtgagccaccgcacccggccacacttttccaaattgtaagcaggtaggagggccctaggcctcgtcggccccattgtgcagggtggccactgtccaaagagatgggcaaagagctgct

SEQ ID NO: 336544 - DNA, 1000 bp, Homo Sapiens
gactttacaaatatatttttattatataaaaagaaattactatagattactttaaataggatatttctcccagtgaatttaaaatagcatctgtttcacagaaagatttgcaacatgacttttcagatatatacgcactgaataatcattaggtacatggcagaaatacacatttaatacctttttattttacaaaacaggacaagtgcattttccaagtgcttctatagccactgtctcatctgttcctcccaacagcccagggatgaagaacaagcaggtgttattttacttacaaagaaactgaggtcccaaaaattaaatgattgacttaattagcagcagaatcagacatgaaatgcattctcctgattcttcataatccagtcataaataacaacacatattctcggccgggtgcggtggctcaagcctgtaatcccaacactttgataggccaaggcgggcagatcacgaggtcagtagttcgagaccagcctggccaatatggtgaaaccctgtctctactaaaaacacaaaaattagccaggcatagtggcaggtgcctacagtcccatctactcaggaggctgaggcaggagaatcacttgaacctgagaggcagagcttgcagtgagctgagatcgtgccactgcactccagcctgggtgacaaagtgagactctgtctcaaaaaacaaacaaacagacaaacacatattctcagaataaaagctccattaaaaaacactaacattagtgggatgggaagataaaggtaccaggcagtgactgaataattatgtgaattgcaagatttccaatacaggcagtggaaagcctgcagagctcttcgctaggtgtctggcatttgtagaacctgaggcccagagaggtgagtcaagaactgcactgagacacaagttgaaagtcttccaggccaggcacagtggctcccaactgtaattccagcactttgggagtctgaggtgggaggattg

SEQ ID NO: 336545 - DNA, 1000 bp, Homo Sapiens
ttttttttttttttttttttttttcaggacaaataatactactttaatgcaacgttaaaaatcaaaataaatgcagaaaaagtccatgatgaacaaaatattaaataacgacagaatctgaccctgaacttgcccatttctgcctgactgcctgcccctcatctaggccctaccggttcccaccaccgccctggccccacccgctccagtcctaattcaaagaagaaaaagaagctgtccaaggtggggctgctggagcctggggcccgctcggtccctgtgccaccctccaattcacagggccggctggtcctgggcttcctcggctgcaggcatgccagacagaatcctaacggtgcaagggaagccgcaccaaggaacagaacctcactacggggcagaaaagagaaacacaggacccacttggttcaattaagaggggtgcgtgcgtgcatgtgtgtcggtgcgtgcctggacatgggttcacacccatggcaggcctgctgcagcctaagcctgcagaccctccatccaggctaccgcattctacagagcagtgtgttccccgtgggaccaagggtcatccccccatgactgggaacgctctcactggtcctgggcacgaatgccagtggctcattctgtagaaccagcccccatcatccaggctccgagtgaatgcctaggacactcaggtcattgttcaagtaaacaaaaatgcctatgggaagaaaaaggggggaacaatgccaggcaaacagctgtgggcctggccaggtgcggtctgaattcctgagatgtccctaaatgctccctcggagggcctccgccttgggcctgtctcctccctcacttgggaggagagaaagggactgtctgtgtgcagctcacgaatcctcccacccaccccaacccaggggcatgccgccacacagacccgtggttagagggagattttgtgtaacttccaaaacccattcaagagcagcagcttcccaaa

SEQ ID NO: 336546 - DNA, 1000 bp, Homo Sapiens
tgaggcaggtgggcgtctatatccatttcaccaggctggtggttacataatcggcaagcaagagctgtggaggggcttgctggatgccctcagcacccaggaggagggagggagctagcaagctaaggcaggtggccctcctggccccttaaggtccatctgctggaggcccagagtccttggagtacagtctacacctggaggggacccattcctgccagtctgtggcagggatggcgcgccacctctgccaggccaggaccccaagcccgatcagcatcagcatggtgcaggtgcacaggcgtgagctgatcagtgacgaggggcaggcacacaaggtggagacaaagaccaagaggacggttgccagtgagaggcgcggactcaggaacttgaacaacatctgcgggggacggctttggaggtgctccgctgcctccagttgggtgacttgctgtagcatctccagcttggatattcggctcttgaaggtctccgtgatctcccatatttccttggctctctcataggatagataggccattctctcttcgctgcaggccagattgtgtttgaggttgtaaatctcattcagctgtccctgcaggcgaccattcacctgttcttccatcaatgcttgcctacacttctcctcctgaagggactccagcaacagctgcaggtcagtcagagacctctcctttaggctgtgataggactcctggaggctgatgtggaacctcttggcttcttccagctctgcctttaccttctgcaacagcaggttttgttgctgggccacatcctctgtctctaagcacgtcccctgctgtaagctctggaagcgactctccaagatgaagggcctgctggcatgaggcaggttgaccggcccgtcttccccacctggctcggggggctctgaaagcagggccttctcactgggtggctcgcagttggctgggtcgctttctgccatcagcagtaagccctcgggcct

SEQ ID NO: 336547 - DNA, 1000 bp, Homo Sapiens; identical to SEQ ID NO: 157789

SEQ ID NO: 336548 - DNA, 1000 bp, Homo Sapiens
gcacgtggtccttttattctctgcagcaaaaacgattcctacttgctgacgcggaaagctcaggtctggagagccgttatctatagatgcgagcgtgacgatcaacagcaatgcggggttagtggttctagaccgatggcactgacgtggagggctcagggcagaaatttaaggggcactgagacataggactgctcccaagtgtgttccagttactgctgggttaggaggggctctttaaaggtcccaagattcaaatgttcttgtagcagatgaagagctcttggctggacggatggatccagtgggagcctcctccttccccactcagttctttacatccccgaggcgcagctgggcgaaggaagtggccagctgcagcgcctcctgcaggcagccaacgttcttgcctgtggcctgtgcagacacatccttgccaccacctttaccgtccatcaagcctgacacctgctgcacccactcgctggcttttaagccccgattggctgcattctgggggacttgacacaggcacgtgatcttgccagcctcattgtccaccgtgaagagcatggcagaagtctgaggggagtgcatcttgaagagcttcaaggcttcattcagggccttggctgaggcgccgctctccatctccaggatgacaagaggctggttggggttgctgtcgatgaactgcttcgtcttctctaacactcgtttctggacatcggctttgctggctcggtccaagtcatccatgaccttctttagggatttgagagtctcccgcaattcatccttctgccactgggggatgactgcagtggccagggcctctccaaggtcagcgatctccctctgcacatccttgtttggagcagtctgagccttcactttggcttccatgacagagagacatttcttcaagctctctgctttcctgagggccttctgggcctcggcacctgtgacagccacaatcctccggatacccttggca

SEQ ID NO: 336549 - DNA, 1000 bp, Homo Sapiens
ttttttttttttttttttgacattttgtttatttatttaaaacaaacatctgtgcgctatgtacaggcccggctcccagggaggtgggcgggcagggggccaagctgggtgggagagcgatggcagctgggggttggggggggtctggccccttgcctggccagcagggtcagcttctccattcctgccacctgccagctggcccaagctgatggcttcccgcgggacagccacctccctgcaggagagcagggccagaggagcctcttctcaaagcaaaataaatacgggactgacccagctccgcccacagcccgctctcggcatcagccttcatcgtaagagagaaaagctggttccgaggccgggcaggagaaaggccagcagtgcctggtccagccggcgtcgccttgggcggtgagcagtgccaggcaggggcgaggggccgggcagaccccgaggctttaaggcaaagcagggcaagggtgtacgcagcccgggccgggtcagcctttggcacaattaggggcggcaaccgcagtgaccgcagggcatggccgagtacaggggctggaggaccagaagccccttggtcctgaacctccactccaggccctggcaggcactgggggacttctgtccccattgttgagtccctggcccagctctgggtggtcagtggagcgtgtcctccctggcccagctctgggtggtcagcagagcgtgtccgtgttgaaggacagctgggcccgctcctcctcgaagctgatgaggccctcgtcctccgtgtccaggtcctcgggctcgtctgccacaagtgcccggagctccgtgggggcagaccggggccggagcaggctgagcaagcagccgagaggggactgcagtgcggatggcggctccgtctcctgctgctccaggttgtcactctgcttcttggcaaagttcacgaacacattgtccagtgtggtctggctgaccgagtagtcctcgatgccca

SEQ ID NO: 336550 - DNA, 1000 bp, Homo Sapiens
tttttttttttttttttttttttttttttttttttttttttttttttttttttttttttttttttttttttttttttgaattttaaatgcttactttattatttacattgcacttatgcttgaaattatctcttttacatatttacttcttaccttattttactacttatttgtttattcacttattttttagtgatcttgccagttttgtttgtcatcattgtattaacagcctggtttatagaagacataaagtaattattaagttaataaatacattaactgttgcaaaagaaaagccattgctttgatacctataaaatgtaccaatatcttgaaattaaaaatgatggattattctgtgttctcagatgtcagcaattgacagaaccaaggcattccctggtcagggttaggcaaatacttagctgagtcctaggggtttcaaggcagtaaggtatgatggcttccagcttcaatgaaagcagttctcactcagcagcgtttcacagagatgttctgcataagcttttgtttgaagaaagagttccattgcttaaaaacggggttggagtacagtggtaaaaaccactgttctagggaatttggagcaaatggtagccgaaatgagtttacatgctaagttatatttacttttccctttaaaagtcaatgtgctatcttattaatgtttttatactatagcgacataaaattatttctgccttggtttgaagatttgaatgatttatgctttttagaattttagagataaatgaaacacctaggcaagattcagaaaaccgtttacctttggctacataaaaaactgtaagttaaaccttatattggaaaactagaattttggcttcaaagatttgtccttccactgtgttaatcttatatttatattttatttccttctctatagagagagcaggtaaaaacatgtttagtgtttcctcgctttccaagttacattttatcttgagcagattta

SEQ ID NO: 336551 - DNA, 1000 bp, Homo Sapiens; identical to SEQ ID NO: 157790

SEQ ID NO: 336552 - DNA, 1000 bp, Homo Sapiens
cagccttggcaactattcttttattgaacatcagtaacagaaagatgcttgatttaggaggaagctttccctccctccctcccccattgcaccccggaactcagcaaaggtgagccagccacagagcataacactgtggctgggacacatgtccatgtgtgtttcacatacgtgggcatctgtgccacaagggtcatgtggcaccacagttcatcagctgtgtttccccttcctgccctgctgcagcgccacaggttggaggaaaagcctgcctgtgagcagggtcccggcaggccacccacccaacagtggagatcgggcctcagagctgggcagtcatgggagttcagggcctggctcgcctcggcagcctggtcttaaagagggacttgcccgaggcctcgatgtaagtgacagtcatctctttggagctgatctccacataggcaaagccacccagtgagtcttcagtcccatagtggaagcgcagatagccgttggggaccttgcgctggtgccgctttgaggggtccatgaaattcccagccccactcagcacgtagcccacgccattctcatcttgcaggtactgcagattgtgatcgtggccgcacaggtaggcagtgaccccgtatgtggccagcagtggccgtagctgcttgaccaggcagtgggtaggcccgtgctcggctatggaccacacggggtagtggccagccaccagcacgtagtcctccctggccgccgccagctgtttcttgagccaggacagctgtgtgcgggccagcttcacgtctcggggcctctcaggctgctggctgaggaagtcatctgagttgccacatagtgtcactgtgtccagcataaaaatggccacagacacattggtctgtgggatcttgaagtgcaggcggtagaaagggctggggaagttccagcgcttggagatcttagagtatgcaatctgggcagagacattgccaaggtggtcatggtttcc

SEQ ID NO: 336553 - DNA, 1000 bp, Homo Sapiens; identical to SEQ ID NO: 246420

SEQ ID NO: 336554 - DNA, 1000 bp, Homo Sapiens; identical to SEQ ID NO: 157792

SEQ ID NO: 336555 - DNA, 1000 bp, Homo Sapiens
tcaaggttaataaacagctttatttgccttgtacagcatcaattttcttacattctcagttaattggccattaaagtgctggaaattttcttaatcatgataacatttgttaaaaagaaatcagaactaatatcaggaacatggcggcatgaaggaaacagttcccttacaaaacacagaaaatggaagcccctcatgttgagggggtgggttggacaatttgcaaacagattctaatttcctctcaccgtcagcaccaaactggctgggaccaccacccctgggtgaaagaaacaacactaaagaaccctaaaaacacccacacaccctgactaccaccacctctgggccatctgtgggcgtttgctgtttgaacagatccagtctcaggaaagaggaagacctgacctccgtctgcaacccatcaccccacccacccttactaacaaaagcccccaaagtcattacaatgaaaaagtgggtttccattaccccaaaactaacaatgttcagtaaaaatgaggataataaacacaaaagcttgcttagtaaacaggagctctcagcagtcaatgcaaaaaaatatatatatatgaaatcttaaggcaaatactgttgactttgcacatgggctggacgaacttggaactctttacctatctgtatagttccaggagcctacaggcggtcggtttttcagcgcttgccaccgggccaggcaaggtctttgcatgattgctgaggcagtcggtgtgtttccctttggagtttatataggaacacaccacccaaggctgatgttttgttatatatatatatatgtacacacatacaaaggcctgctactctttctttgtggaaactgacagctccacctcgggaagctggatgccaaccttattcccactgtcattgctagaagaggaggacagtcgggacttcttagaggccagggacaccccactcccctgtaacttgcctgtctcatcatcgctcccag

SEQ ID NO: 336556 - DNA, 1000 bp, Homo Sapiens; identical to SEQ ID NO: 157793

SEQ ID NO: 336557 - DNA, 1000 bp, Homo Sapiens
cagcttagaaccttctttattaaggaaggtctttcaggcactttcattaacaggcacatataagcttagcaagagcacctttcaaagtcacagttccaatggtttttgtaaggtcaaccagaggcagagaacacaatcatggtggcttaccgtcaaaatcatgacaagttgtcaacctaatgccttctgtcaaacataaccaccacccactctgcttctgtcctgtgaggaatgacgggaagtagggagtcaagacttgatattaatgtagatcgcatgtgacacttgcgtggccagcagacaaggccccccacccatgcccaggcttggacaaaatggtggctatgttttctgtgccaaacctcctcatctctgccatgtctagcctagaccttgaagtgtctgatcctccccggacatggaggaaccactggcccagcagcagcaccaacactaggctgcaccactgtgcgtgttttccgggggtgcgacacttctcctgagggtgaccccaatgagaccacacccatgaaggtgtggcgcaggtcgtagtgcgcccggtgcaactggtgtcctggaggagctgccagtaacacatgggagtctgggggtgagccagctggagggagtccaggtgcgccaagtggaggggacggaggtgcatctgggtccaccacgggggtggggactgcttcattggcaccttctggttggggctgtgaggtcacgggctgtgtttggaacaccgtgcaggtcactgcaacctctgccccaccaagcttctcactgagtgttgccttacaaaagccatattgcttttctgccagcaggttacacttggctgcctctgtggcctctttagcaacacagtcagtgccagacactgtaaactccacataggtagaaggtgggaggggcacaagctgagcccgggaaatttcctccagctgaaaattggagccgttgttctgagcgttgaaggcggccagggcagctttcg

SEQ ID NO: 336558 - DNA, 1000 bp, Homo Sapiens; identical to SEQ ID NO: 157794

SEQ ID NO: 336559 - DNA, 1000 bp, Homo Sapiens
ggcaggggtaaaaaaccacccagcggtgatggcagcgagcgtgcgtcctctgcgtgggcagactgctcactcgcggatgctggccgagtaggagaactgggggaagtgggtccgctggtccagctccagtaagcccaggctgtcatagcggtcagggggtgtgattgtgatggactgggcggtaaattcatcatcgaagtaccttgtgtcgacctcggacgtgacctgaggtttgaagggtggcaggagcttcttctggaccacgtcctgccagttgatgctgaggaagaacctgtgctccatgacctccttggcatcgctgggccccccaccaagcctctgcttggggtccttcttaagcagcccagcaagcagggacttggcctcggggctgagcgtgcgcgggaagcggatctcttccatgaggatgagctcgaagaggcgctcgtggtcctggttgtagaagggcaggcggccgcacatcatctcgtacatgaccacacccagcccccaccagtccacggcccggccatagtcattgtcctccagcacctcaggcgccaggtactccggggtcccacagaaggttttcatggtggccccgtcactgatgccctctttgcagaggccaaagtcagtgatcttgatgtggccatctttgtccagcatgaggttttccagcttgatgtcgcggtataccacgtcccgcgagtgcaagtactcaagagccgagacaatctctgcaccataaaaccgggcccgctcctctgtgaagacacgctcccgggacaggtggaagaacagctcacccccgttggcatactccatcacaaagcacaggcggtcgtgggtctggaaggcatacttcagcgcagtgaggaacgggtgcctggtgttctggaggacccggctctcggtgactgtgtgagcgacttcatccttggcaatgatgacttcctttcgcaggatcttcatggcgtagtagcggccagtggccttc

SEQ ID NO: 336560 - DNA, 1000 bp, Homo Sapiens; identical to SEQ ID NO: 157795

SEQ ID NO: 336561 - DNA, 873 bp, Homo Sapiens; identical to SEQ ID NO: 157796

SEQ ID NO: 336562 - DNA, 1000 bp, Homo Sapiens
acattgtctaacaccttttattattgctttgtctcctaggagaatggagaccttgaggaggcaggggagtcttccttgttgagaaatctatgcccagcatccagatgtcccgggagggcccatgggctctgggttgctgccctgtacccagagctcctcaagcgctccttggatctggtgacctggaatgggcactggggggcaggaagcatctgagtggctgtgacttggggcaagcctctgcctcattggtcccttggtcaggtgcaggggtgtggaatgatcctagtggggagacagcagaggactgtgtcaaagcccccctgggaatccccgatccagtagcctccttgggtgggttgcagggttgccggaagcttctcttcttcaggtgtcctgatccacccaagtccttgggtctaccaggtgctgccaggattgaagctaagacggtggggcacgcggtctgggtgtgtcgtgtcccacgatgggggacgtctctgggtccaggcctgcttggtcttccttaggatagaggcagggtgggggttgggtggttttggtccctttattgtctggggtgcaggcagccgcatggcacaaatctgcagtctctggggttgggaggaagaatcagagaacaacctgaggggaggtcctggaagtcccaggctcagctcccagggcgccctgggctcctgctccctgaaggggatgcggagggaagaagggccccgctgcgccagctgaggctggtttatctctaggaggtgaaggtccaacggcaggacacctgtgtgtgttcgctggaagtggcggctcaggacggggaacagggcaggacgcccggaggtggggagcaggataactccggagtggggcactcagggagcagcggacgcccccagcagcagcagggtcccggccagcagtggcagcgacgcggcaactgggtgcgcggcgtcggtggtgcaggcggggagcgccaggtcgcaggccg

SEQ ID NO: 336563 - DNA, 1000 bp, Homo Sapiens
gtctaacacttccttttattatttatttatttttaaaatttatttgtttatttttgaggcagaatctcgctctgtcgcccaggctgcagtgcagtggcatgacctcggctcactgcaatctccgccgcccgggttcaagcgattatcctgcttcagcctcctgggtagctgggactacaggcgcatagataaggggtttcaccgtgttagccaggatggtctccatctcctgacctcgtgatccgcccacctcggcctcccaaagtgctgggattacaaacacttccttttattattgctttgtctcccaggagagcagaggccctggggaggcaggggagtcttccttcttgagaaatctatgcccagtgtccagatgtctggggagggacctttggctctcgaccagtgtcctgcacccagggcttcccaggagctcctcggatctcagttgggtgctgaaattggcatgtgggggtatggaacgtctgagaagttgagatttggggcaagcctttgccatgaggcagagggccccctggggggtacaggggtgtggaattaacttagtggggggcagccgaaggctgtgtcaaaatccccctggtgatccccaccccaggagcctccttggccagcagggtggcaggaaaccacccttctccaggcgtcctgaagatcccgagtcctcaagtcccacaggtgattcaaggactgaagcaaagatcagcggggcgcggggtctgggtgcttcttttccccaggaagggagcctgcctggtacccactgggctgtaggtggtggctggatggcctgagccccctcctttcctggggtgcaggcagccacagggcacaacctgcagtccctggggttggggtagggagtccgagagcagccaaggggcaggtttggtgtcatgggctcagtccccagagcgcacggggaggggaaggttccatggcaggacctctgtatagggactccggggatgacgac

SEQ ID NO: 336564 - DNA, 1000 bp, Homo Sapiens
tttttttttttttttttttcaggagtttacaatttagtttttatttggacccaggttgcttggcgctgcctgccacaggaccccgggacagacactggccatcctctgacttgcagaccggccagttgtcagttggagaagcgcagcagctcctcatcaccatcaccagggacaccgcagtactctctgcactccttctctgagtagaacttgttcccgttgccctggcagcccccgtaggggaagaggacgcacttccccttgacagcatcaaatgcccagagctggatgaaggctcggcaggggccccggactatggggagattgcaggccgccacagttcggcaggtctgcagacactccttttctgtgacgaagttgttaccgttgcccatgcagccgccgtactggaaagtctcacaggccatggatgtaccattatagaaatacctgctggtcattcccatgcagggaccggccgagtagcccagctggcaggaatcttctttcttggtgacttcagttaccagttgcccaccccctgatccttcctcttcttggggtagcacagccctccggactctcgggattaagatgggctctggttcctgctccccagggacacattcacctcggtcagccatggtgaagatggagtcctcagggatgcccacaccctgggcaaccactctgaagtcctgcaggagagtttccctcagctgcggcgcccgcccgtagagcttggcagtaatggtgggtccatgatggcggctgaatttcttggtcaggaaaatggcatactcatcatagttggtgtggaccacataggactccatggttatgttccatttggatttgtgatagagaaacttcccatcagtatctgttttctcataagctccagacgtctcctcacagacacctttccgccaacgagtgctggtcatgctgatctccgcctctgtagcgccctctcccagcaccagcgtgctcactgtca

SEQ ID NO: 336565 - DNA, 1000 bp, Homo Sapiens
tggaatggcacccaaagcactttatgaaaggttatttcaggaacagcggaagggttactgatccccgggagcacacagcattgcacagtcgtccagatatgctcttcattgagagaaagacattttgcaaagatgctgctgaagaagagtcctttgggcctgtgacgtggcagcccccatagggtttgtggaatgagtttacccaagcctctgcctccctgtgctccccaggggtgcatgctcctgagaggctcagtgcccgccttggtctccaaacacctgtttaatctgggggttgaacggattctcctttcccaggatttggggccactggagctgcacctttttccagaaatgatccgccaacaacagcaaagccacctcgttggggtggaatccatccacgggctcgatgagctgccagggctgtccgcctctcttctgccactcctgtatgatttcatggaaggcaaaatccatgtagaaaagattgaagtttgtaaatttctcactggctgcaatttttttcagtgtgttggagagttgctctgctctctctgaagtgagagtccgcaacgtcttgttggaagacatccagccgtggcaggggctgacctggaggcagttcaggaaggagtacaactgcgcataggtcatgtctttatttagctggccgagaggatgatatctgttgtgcaaattatcccagagaaaggttccatctggtaagccatacaaaataacatggctgccattgggcaggtgggaatttagatgcttcagagtctgcatgacgttggagtagagtttctcaggagtggtcatggctgggactgggtcactcttcccactgcagacatcatttccaatcatggcatatataacgatggcgggatagtccaacaccttgtttctagacaagctttctataaatttcttcaggtttcgggaagatgcaccatttcttgaaatattctggtagtccctgtgattacagtgg

SEQ ID NO: 336566 - DNA, 959 bp, Homo Sapiens
ttttttttttttttttttttttttttttttgcaggtagcataatacaatatatatttttttaattaggcagacatacagataggaaattcaaagaagaaagactgcagatgtaagatctagtatccagttgctttgaccagatctcttagacagtcatttcattttcaagtgctctcgttgagtcaagacctcagacccacaccaagggtttgatgatgacatatcctctgatttcatagttcagagcctgccagtccaggatattggcagggagaggggtaccctgataggcagacaggatattttctgggggcagcacagagtcccacatgtacaaatccccaatctctcccacaaaggactggctcctatcaaacttgcccccataggaatcctgttcctgccccaggacaatcttgggctgagcttccacaaagtaaccctgtcgcagaccctttttcaccaaaggtgtcccattgatccaaaattcagcaatacctgatgaggactcccagctcacacagatgtgcactggagccgggaacttttcgataactttggatgtaactttgtgtcttccaatgtatagactatactctccaactctttctttataaactagtagctcattatccctgccttgggtattgtaggagaagaggctgtaggcacgagagagatcactataggctcgaaaacacaaggtaaagttctgtagaggcttctccagcggtgtgatcaagtttacatgatcagtaacagattctctaggaaatacaaacaccttcccactgaggtctgtgtgagcaaaggcttccaggaggctggtgaggacagagatccaaagcagcggcttgttcatattcctggcctagggctgttatagcagaagcagtgaccaggatgagggtagcagacaacacagtggctgtccccctagcgtctgatattcatgccc

SEQ ID NO: 336567 - DNA, 473 bp, Homo Sapiens
ggattcattcagcatttattgtagcaaagagtgggtagggacaggagctctaggactggccagtgggtgttctagaggccagctggggttggaagacaatggtctggacacttcactgggtggcaggctgtgttccaagttccacgaaatagctcaagaagttaaccagttccgttccagccttcttgatcaggggtgtcagctgctcctttgacttttcaaagtaagacttggcctcggcctgaagctctgggctcttgaccttctccatcaggtccttgccatagtcagtcacggtctggaagtactgagaaaccaggctctccacacatggctcctttgcctgtctccgaaccaaagctccttcaaggctgcagatggtgaggagtagcacagttgctgcgagcagcttcatgttggtaacagtggggagggcggcctagccagcgtctctgtccttggtgtctgtgcct

SEQ ID NO: 336568 - DNA, 464 bp, Homo Sapiens
tttgaattttctgtaggatttttattggtggcacctggggccacatggagggagtcctcagcacaggcgctggggtgtgggaaatttcagaggcccctcctgggatgtcacccttcaggtcctcatgagtcaatcttgagtttctccttcactttctgaaatgtctctgaaaaccactcccgcatcttggcagaaagttcactctgtttgatgcggctgatgagttcccgagccttgtcctccagtgtgtttccaaactccttcagcttatccaaggcactggagacgtctggggtcccctgggctggggctgggccttccaagacgatcgacagaaccaccaccaggaccgggagcgacaggaagagcctcatggcgaggccggaggggcactctgaatccttgctggagggcttggttgggaggtcctgtcctgcccgcaggacctttatcaggctggggag

SEQ ID NO: 336569 - DNA, 613 bp, Homo Sapiens
caggtgagactttatttattggagaagtatgaacttttttttttctttttgttttacccccaagagatctcgctgtgttgcccaggctggtctcgaactcctgggctcaagccatcatcctacctcagcctcctgagtagctgggactacaggcacccgccacaaccacacctggcttttatgaacattttaaccctggtccttgtccccacagacaagcctggggcacaggctgtgggtcttcttcaagaggctgtctttggattcgaggaaccaggccttggtgagcggacccaggtccctcaggtggtcgtcatagtaggtctgcatgaagccccggaaggtgctcgggctccagaaccattgccacccgtctctggtcctgttcaccactgtctccagcagctccttcatcctgcccctcaccaggctccagcgactcatctttagctttggtggggggctcagggttccttcctgggcctctggctggcatgccccaatgcaggccaggaccagcacgcagaggcacagggcaggcagggcctggagcctgtttctgaggagggacatttctgggggttccgtgcctctgtccctctgtgctcaactc

SEQ ID NO: 336570 - DNA, 1000 bp, Homo Sapiens
cacttgaagagacactatttattttgttacagtcaagcaggatgatctgttgataggtgagtggtaagtgtcgagcatgaaatctacacacatttgctgtggtggactgaaggatacaagccacaggccaccccccataggcagagccctccacagccacactacaagagggcgaaggagcagctgccacccaacaacaccagggccaaccattagcaccagattgattttctatgaataatacaactagatacagagttatggatgttgactcactagaatctttgggtccccactaaccagacgtttcagaggcaaacaggggaactgacaggacagctggctctatgtgctttgctacaaggatactcgagcacgacgtattgctgtgtagaagagaaagtcctaaaaagacatcaaaaggctgagtacagacaccaattggattattcacattttacacacatatcatcaaaatgaccacaatactgtatttgagggcaaagaataacaggtaaaagctctgccaaacaaaatactctgaaattccttgggtcgtctccccgagggagaaagatgggggtaagtgcacagccagcttcaccttttcagactgaccagcattcacgcaagtgactaccagctggagaggaggaggaagcttcgctggcagaacagggatttttcaagttagcaagagcttaatttaacaggaatacacacttttggaaagacatttatccttttggcattggtaggctgccaaaaaggcggtttattgcctgcatcattgagcttgccagtttggacttggctctatagagaatgcattaccgtcaacacggcccctctggctcaggaagtgtggattctagtcttttaagacatctgtgtgtgtgcatctgtgcacgcgcacgcgtctgctttggtaaggctgtggtcactgctgctgacaaaatgaaatctccattccactggaaaacttcttttatgggaataa

SEQ ID NO: 336571 - DNA, 1000 bp, Homo Sapiens
ttttttttttttttttctcattttataatacgctttatttgattaaagaatttgccttctttgtatacactggaatgttatattccctatgtattttacagggttacaaaatgtctctcattttaaatattaccccaaaagtaatctcagaaaaaaaaggttttttgaaattaaacttgacttttaaaaaatcatacggacaaacaactttcaaacaaaactggattagtaggatttcttgcctgcttaactaacatgacagacttcttgtcccaagcccttctcagaaaaacctcatgtggaaaccaagctagagataagaattcttccctgatgcagttaggggaaagggaaaggctagaaacttctttggcaagcaattccacacacagccatttatgtgtgagtgctctgcttcaagcacagtacactctttgcagggacggccagatgttcagagtgggagtggtacttttcaaccagctaaaagtgcagaagtcatctagtcgtctgcctcttcccactgccagtgcctgcagccttgcagcaacttttaaccacccctatggactggaatattgagttaaaagccaaggctgagctggctgacgctgtagtctccattgaaaaggaaatggatgagatggaaccgagaaaccaccagtacatgatgacactcaaaagacttagggggaaagagaaggaaggatttcagagatggggacagactggtggaaaatgttgggctgactggaaggaaatggggtatacgtgagtaatatgtacatatcgaaacaatcagttgcctcctgaaatgcaaaaaatcaaatggtgaaatggagcctccttgatagtttagggccaacaggattggcaaagactccctgaacccacagccttcaaaatcataaccccatttctgttagaaaggaggggactgatgacagagagtgcagtctggaagagggaggtggtgaaactgaggaatgtgaatggatta

SEQ ID NO: 336572 - DNA, 1000 bp, Homo Sapiens
tgcataaaacaagtttaatttccaaccagggtcacagtcatcgcgttatcccacattttgagcaaggatagagaaggtgagttattaaacatatacagtctacattccagaggaggaactgcagttaccactataacaccacagacaaactttggggtggggggagcgggagtcctcaggaagcagaaagctggaatcagggaaagcataaaattaaacctaccagagaggagaggagagggagtgggcagaaatggaatgaaacacccaatcccaaaagagctgttaagtgaatgggaatgtagaaaggaccacccctgccaagggcttagcagccagggatactaccaagatcacttactgccccctgctggacagatctggggcagcaccaaggcaacctcctaacatttccagccccagattggtccctggagcccccaaaaaaacaaggtgaggggtgaggcctgaagtgaggaaaacctatttaggactgacatctaactagagaaagtcagggaatgaggcaggagaagaggcaaagtcctcatgaaccacaaagatagagtggaaaatcctaagtaggaaaaaatacatggaaaagggcaaatgagcaacagcagtgaatgagttgagattgaaaaggaaagagttcaaggaaggagaggcaatggggcaagacaaaataaatctgaggaaacagagcaaataaaaagtatggagggaagcatctgtggggccagggaaatgaatacatttttaaatgaaatagaacctccaacaccccccccacaaccaccacacacaaacacacccacacccatatacacacacactcacacacacacacaggcctagagagcaagatacctgcacacacctgctgcatcctgggtaacacatcactaagtaactggcactgagggagatacccctggaacctctctttcacagttcaatcttggatggggttactaatattgatccatctgctatcaac

SEQ ID NO: 336573 - DNA, 1000 bp, Homo Sapiens
ttttttttttttttttagcttgaggggttttccactcccccctataattttcacaagccatcccgtaacacacaatctaatttttataagtgcttgctttgcaaattcagcttcaagataaatctccctccccctgcgccacaaccccatatagaaatcttgaattgtctctggggcaagataaggagaggaaaatgccccagaccaaggtaagagctacagttatcagtctttaataacttacaggcaaatgctaaaaaatagttaataacaataatacagaggacacacacagcttataaaaagggtcatggatctacaaatgtggggaggggttcttggcactttcacagacacaaaaataaaaactatgtgactggtattcctagaaaagcagcctggggagactccccagttgggggacagaggaaggggagatagttatttcatcccaaacacattctccaagtcacttccatccccccgcccccaaacacatccaattaaaaatttttagccagagaagaaaaataagaaacagggtcgaggtagagtcacagtttacatttacgtctccacagtcctgcagcgcccacttctccagagaggatgagagagatatgcaaagacatcccatctcccatccccaccccagtgtggcaccaaaacgggacaccccatgctcctctctccttcattgaggtggacaggtcctgcaccccagtctgactgagaggtcacaggctggtcccaccctgctgtccaagtgtgcagacccctactaggtgggaggaaagggagggggggcttgggtcaccgtctcttcttgccaccccgagctgccttcttcctcttgaggatcatctcatagaggcgctcaaggccctgctgcaggcccagaccgtccacagcgctgcagccttgcacatgagtgagagtggcggctgctagctctcggactgccagcctcttctccacctcagcagcgctcagtgccccg

SEQ ID NO: 336574 - DNA, 1000 bp, Homo Sapiens
gtttattcctactcatgcatgatgtgtttcagaacttacttgctgacatttcagagaacttcttacattacctgtttaacatactgaggtgcaactggaacatattacaatattactcattatttgccactgtgggctaagtttactatactggtcttagatataaaaggtcacatttgaaattactaagttagaactcataaggaaggggggggaaggccttaaatataaaagacaaacggcagtttgattaagcaataattttcagtttactagatgaaacagacttgcaacatagtctgcatgaatgcaaaataagccatctacagcaagtgataaggaaactgggcaaaaaaggaaaaaagcatacataggaaaatgaaagattctctcgaaataaaaaaatcccaaacctattattacaaagggacttttacccaagaactgctgtgtttcccccattcccattctgctggaagtcaacaaggagcatcttggcaactttgtgttcatgtcaaatgtcagatcagagccatcctaacgcaaagccaacaaaaaaaaaaaaaaaaaaaggaaaaagaaagggaaacaaacaaaagagaaaacccccaagccccgtccccgccaaactgtagaacagtaactccagagttcaaattcaaaagaagagaaagtggcaattgaaagaggtgatggtggcgataatcctatgaatgggtttttgatttctctccttccaggggatgggtggagaatgctcattaagatttgtagttagaggttaaccatgtgagcccctcatagagtccgtcccctgaggtggcacaggagggctgcacataccagttcctgtcccgaatccgggtcaggcccagtttctcctggatctcgtggggtttcatggcatcgggcaggtcctgcttgttggcgaagatgaggattatggcgtccctcatctcccggtcattgataatgcggtgcagctcctggcgagcctcat

SEQ ID NO: 336575 - DNA, 1000 bp, Homo Sapiens
tttttttagaaaactgcctttattctattagtagttggaaaaattaactggtacagaaaaaaagtttagtcagctggagagaagagagactgagtgccacccatgagaactggtggctcctctgggagggaacctggatacagtgaggagaaaagagcactgtgaattagagccagatgcttaagtccaggtgagacaggttatgccatcttccaaagtgtctaattgcctcaggcgtgaaaccaattcctatttacttagcccagctccatggggtactgagatacatggggccgaaaaggggtaatatggccatcttttatcagaaaaagtgacaaaacgggaatttaaaaaatgaattttccatctgactttatttccaaatacactttcttttttaaaaaaccaatacactttctttgaggatgacagtattaggaaatccaattatacaaaaaatactacatctagtctggggtagatatatttatttttggtaacatacattaagtggcactaattacacagtaactataaggtaactaacatgaaaccacagaactgtaactctgccacagctgcatgaacttgggcttttctggttgagcccattttcaaaaaactgcccaccccagagctatgccaacaaaatctgttacggagtaaagccctgaagtggtgactcaccagagtaccttgcagctgacagataataggcaggacatgttagttataaagtagttacagcctaattcacaaaagttaccaactgtttctctttctagaaagaagcaagaagttaagaaattccttgaattagcgcctggtgtgtcaggtgggagtgcagaggagggctgttagagcagtgtcaaaaggaccctggtgggccagacgggttggacatcgttaataatcatagttggcttctaaatactggtagcaagatgacttctgatttgtaatcttaggtaaattatagataaatgaaaaaggccagtaa

SEQ ID NO: 336576 - DNA, 1000 bp, Homo Sapiens
ggagacaggaggttttattgatgctgatgggggtaggaaaggtccccagaagcatgggggctgagtcagtcagcaaatgcgtaaggcctaggcacagaggagcaggttagggtacattcaccttctcaggattctgtggctccctcattggagaagggagagagcatcttgggggcgcaattccaagagcagcgagggcagaggttagagatggctgagagcccctaacctgaggcggcaccacaataggcagcaacaactgtgtggaaagctggatgaactggtcagtagcggaaaatgggagggggcactgggttggcctcttggggaggggtccaaccttggcttggatgagctcatgagaatacccagtgttcccaagcagaggggggcagagcccaaagcccctttctctgcaggcctccttaaggagaaaaaggcactcagagaaaaaggcattcagggaaccccctggaaaggggtgccagaattagtccttaaggcacagctgaggcggacaaggcaccaaggcacaactggtggggggagggcaggggcagcctccaagccaagtgccagggtcacaagaggatgcaggaccgcccacgcttgatcggcgtggggttgagcacagcccggacagcctcggcgaacacttccttgacaccatcctgttgcagggctgagcattcgaggtagcgcacagcgtggatctgcttggccagtgcctggccctgctgcggtgtgatgggcgcctggccctgctccttgaggcgccgtagggtgtcaggctgggctctcaggtccttcttggtgcccaccagcaggatgggcacatcagggcagtggtggcacacctctggatgccacttgtgccgcacgttctcataggacggcggactggcaatggagaaacagatgacgaaaacgttggtctgagggtaggagagtgtacggaggcggtcatactcctcctggcccgcagtgtcccacaggttca

SEQ ID NO: 336577 - DNA, 1000 bp, Homo Sapiens
cggggaatcaacacgaggtctttatgaatcgccacccagccctgccaggcatctgagcaagggtacccgccacccagcagccactgatcagccttccacaaagctgcagaagagggctttccccagcatccttcctcagctgcctccacaaggggcctgggccagggctgaggggcaggcaggatgtggagcgggcataccctgtgtgcacggccccatcccacctctctgcacagggtgaagtgcaggcaccctgcacttgctggacagggctggagagaagcaagggggctggggagagtggccggtccagcgggtagccgccgggggcacgcatctccagcagcggcacctcagtgtggcttgggggtcgtgtctaggccctgggggtgggaagctgagggtgaggctggggccccagggccccgggagaagcctttgttcctgcccaggcggctgctgggcggggcctttgggcttcggggcccaggactgggagaggtggtagatgctggcccaaggccctggcggacagaggtctttcccaagagctccttaaacacagagtccatgttctgtgccacagccttatccacctccacgtgttgctctggggaggctgggaccaagcagcgtcgtctgtgtccagagggtcccatggcctcaggtgaggtgcatggctctggccggtggaccagctccgatgccaggaggccctcgggactgctcccagactcccctgcagtctgcagccctgcgcccaccacctgcttctccgtcccggcgggcagcgtgatatacttgtgggggatgaggccccgcatgccgttgtgctccccccgccaccagtcgctcgaggccctctcgtgcagccgcagtacgtccccccgccggaagctcagctcctgggctgtgcggcccgtgtaggcaaagcaggccacagcctccacgaccccctccaggtcatcctcctgtgcgggcatctcggcttccagctccg

SEQ ID NO: 336578 - DNA, 1000 bp, Homo Sapiens; identical to SEQ ID NO: 157803

SEQ ID NO: 336579 - DNA, 1000 bp, Homo Sapiens
tttttttttttttcctttgctgctttaatttttaaattttcttacaaaaatttaggtgtttaccaatagtcttattttggcttatttttaatgctttttctcagtgtttttcttctgtttctgagtcacgaacagcaggcactgaaagcagtcccccagccactgccgaaggtcagtcccggaggtgctgcccaggctccaggcagatgcggcagccccggccccagccagcatgggctggagaaaggctctctactgcacaggggcctcacgtgactgcagggctctggggaggtggggcacctgtagcctgacccccaccttgctgcttccaaagcttccttgcccagggctgggccttgtggggcaccccccacaccgtggtctgcctgcctgcagggtgcccagggagaccctccgcctttagaagtccaagttctttcccagccccctccctgcctagctgcctgcccctggcgccagacctggcccgcaccactggggcactgtgttcccaggggcaccctcctatcccaccagccccaaagcccagccaggcacccttccctgccacctccctgggccctgccccagcagcccagtcggcctcctcgggccttctgtcactcgctcacacacagcaccatgtcagtaaacagctaactcaggcctagggagttaggtaggatggggggagtggggtgggggggcaggagggtgtccccaaagtcaggcttggctggggcgaggcgctgccaacccctgccgccagggggctccaagctccacggcacgatctgctcagggtggcccttcttccacgatccaagccctaagaacaagaggctgggcctgggcccaggcatgcaagctagacccaggaatcaacgggctgaggcttagcgtcccctacggcgtccaccagcctgaccgcgggcctgctgggcccggggggaggggccttcctgctggggtcgagtttcaagggttccttctcaga

SEQ ID NO: 336580 - DNA, 1000 bp, Homo Sapiens
tttaggtatatttctttttactcttaaaaaaaaaaaaagttcacaatgataacctgcaaactgcagaaagcgccacgggtttcaagctcctcaccttcggaacatcaccctatccttccccttcccttaaaatcctagatgaaaattcccgagaaagcagaagaggcccccagatgggcggattcccaatcccggacccctgcggcaggtcgaggcattgaagaaataaattaaaggagaggtggctcctggctggccttgtccagctctgtctcgcagacccagcggtagggcctctggcagacgtcgtcgttccagcggccgtcgtcggtgaagtgggcacagtcctcgcctcctccgagcccgtggccgtaccagtcgtccggctgctccggcctccagttcttgaagcccgtctcgtagtccgtcccgtccacccacttccagggcccgttttggtcgtggaggcccatccaggtgttcacagggcctatgtggtgctggacaaatttctgctcctcccaggacgtgaccaccaccaggtgcgcgtcctccagccggcagtagttgtcggcgtcagcccaggccttcccggagcgagagaaccagtagcagctgcgctcgtgctccacccagttgaccgggcagcaggtcctttctgagccattgccctggagcgccgccatctgacagctcaggctccgcaggtcagacacgaactgcttcacgtggagcagcaggctggagtgatcttcactcaggtccttctgctgtttctccagctgggactctagcgacttcatctttcttcccacattgcctccctgggtgctcaagcccttgacctgggcctccgtgctcgctgtgaagttgctgaacgtctctctcaggccccgcagctcctcctgcagctgggagttttgggatccgatcacacagacaaccacaagcagcaggaggctgaggcccagggagagcaggaggaggcgaggtccggagc

SEQ ID NO: 336581 - DNA, 997 bp, Homo Sapiens
ttttttttttttttttttgagtattaactacctttaattaatcatattttatagaagctcaaaacacccaaatatttatcctttatatgaataaacaaaagccctatgaattacaatatgcagaacactatataaaagaattcccataaaaattacattggaatatttttcatcagtggagcaactgctgtagcttcctctgaatgggacagcatctgcctgaatgcacgttcttctttgtgataatctaaacttagtgtaagtacaaatcacagaagaaattaaagttttcatctttaatgaaatgactttggaaataacgtacattcccatgacaccaatactacagttttcggagtcacagtaagatacacagaattacatccgtaattaatatgaatgccaacatgtcaagcagtaatttgttacatggcaaacaaaatcaagaaagcaaccatcaaacaaaagagacccatagcttcagacaaggcaaatcccaggatagcatatgagaacagctgctgcttcagcgaagggtttctggcataaccaatgataaggctgccaaagactgttccaataccagcaccagaaccagccactcctactgttgcagcacctgcaccaataaatttggcagcagtatcaatgtctctgctgattgcactggtctgaaactccctttggattagctgagacacaccattctgggccccattaaataccgtagagccctctccagtcctactagcctctggtcgagataacactgatgcagaaattggtctgtatgcaactctggatccagctcggatcagagagggggtgcaggcgagcttggcgcaggcgaacatcttacactcttcgggactgcgcggctggagatattgggtgacaggcgacgtgggctcctctcccgcttcctctcttcccaggaggcggcggcggcacgggctgcggcagaggtcgaaggagtgggactcaatgcgcaagcgcg

SEQ ID NO: 336582 - DNA, 1000 bp, Homo Sapiens; identical to SEQ ID NO: 157810

SEQ ID NO: 336583 - DNA, 1000 bp, Homo Sapiens
ctcagttactttttatttttattttgtgggcttttaacataaaaatacagatgctcccgtcagagtaaggcatcgcaaccttcagttcttccgcagcaccgggagtcgagggggaggcatggagcgcgggaaaaggaatcgagcgagggaaagggatggagcgtgcggcgcccccaccacctcggagccagcggagggcggagggcggcgcagaagccgctggttggggtggcgagggaggggagacccgggagccgagggtaggttccctgccggtgttggggtgccacggcgcgcggggctagagcgcagtgtcaggcgcgaggtcctgcagcgccccctcgcgggaatagaactcgtcgatcacggcctgcggaatgcgcttcagcatctccttggggaagatgcgcagcagcttccagcccaggtccagcgactcgaacaccgagcggttctcgtaggggccctgattgatgaagttcttctcaaacttctgcaggaattccaggtagagcaggtcctcagaggtgagcgcctcctccccaactactgccttcatggcctgcacgtccttcccgatggcatagcaggcgtacagctggttggagacatctccatggtcctttcttgtcatgccttccccaatggctgacttcatcagccgcgacagggaagggagcacgttgatgggggggtagatctgtctgttgtgaagctgtctgtccacgtagatctgtccctctgtgatgaagcccgtcaagtctgggatagggtgggtgatatcgtcgttgggcatggtgaggatggggatctgtgtgatggatcctccccgaccctccacgcggcccgcccgctcgtagatggtggccaggtctgtgtacatatatccaggaaaccctcggcgcccaggcacctcctctctagcagcagagacctcccgcaaggcctctgcataggaactcatgtccgtcagtatgaccagcacatgcttctcacactg

SEQ ID NO: 336584 - DNA, 1000 bp, Homo Sapiens
ttttttttttttttttttttttttttttttttttcacatccaagaactttattggacacagctccgcgcagggccacgggcccggcggtgagggcggctccatccaggaagtctcagcaacaggaacccacaaggcgacactctagctaaggttatagatagctgggagacaagggccgctccgcagacgcaggaacaggccagatctttataaataaacatccagtaaagagaaatgacaattctaaatcatccgcatacacagagcactctagggggtggggcgccgggggcctggaggggcgatgagtgggcccagatgtccacggcacggggcgggcgggggcaaggccggggaaacagacgatgggcactaggacactgcgcatgtacaagaccaactactgggggcggcggccccgtgcgtatgtgtcaggctgttcgttctggaatgaggaggggtggtctttacataatattctgtggctggtgggctcggagagggtctactttgtggagaggatgagggcgacgatgagaccgtagaggccgagcacctcggcgaagatgagaatcaggatcatgcccacgaatagtcggggctgctgggcggtgccccgcacgccagcgtcccccacgatgccgatggcaaagccggctgccaggccgctcaggcccacgctcaggccggcgcccagctggaggaagctcttgtagaggctgatgtcgtcattcagggagttggcgatgaggactgccaccaccaggccgtagatggcgatgatgccagccatgaccactgggatgatggacttcatgatctgctccggccgcatgacagacatggccgcaatgccggtaccgctcttggctgtgccataggcagcgcccagggcgctgaagaccatggcggccgaggcgcccatgacggcgaaaaacgaagcatactcggggccgctcttggactcggacatgtctgcgggtggggagggggcaagct

SEQ ID NO: 336585 - DNA, 1000 bp, Homo Sapiens; identical to SEQ ID NO: 335735

SEQ ID NO: 336586 - DNA, 1000 bp, Homo Sapiens
tcacattaaatccgcataactcttttaataaataaagcatattcatggcttagattttaaatcacatttacagatgagggaaaacttctaggcctaaacaggtaacagtaaagcgactactgctggaaggagtggtgtgccacatgcgccttaagcctcaagagtggggactgcagggccaaacaccaaatacatcacctttaggccagacggagagtggagacccaggaagcccatgcaaccaccatctgccccctcccctagtgctgcagaaccggctggacactgtcacactttcagaagaactggaggtgggtcctgatcatattacatgaagctttccaccattgtgaacaattaggcaaggcatgagtgacagaggggcatcgctgataaatacagagcaatactggggcagtgaagaggaagctacagagacattcgtgtttcttcaaatatcagaagcttccacatcacagcaggagagctgacgacgagctccacctcctgaaggcttagtccaaaaacttcctgttggcatttgcaccaaacaaggctccccggacttctggcatcatctgctgggctatgagatccagccggctttccagggtgttggaaacctttattttacgatctccattatagatctcaactccaccagctatgtcttcaggcaggtaggactcctggtcaatttggacatcaacatcgtttttggtggcaattttgtacataggaattgccttctgcactgcagcctttaccagagggaaatcttgtttcctgcaacgaacaatcattcggggctccagcaactggtacaaaccctggagaaccagtccatccagcagcacttggtacctggttgtatcttttaccaccttgctgagtctctgttttgcttcatttagtaggtctgtgataaggtcatctcttgctctgaggactttgagtctcgcttgattcatcaaattggacatctgaattttcttctgct

SEQ ID NO: 336587 - DNA, 1000 bp, Homo Sapiens
ttttcttttcactaattttatttatattaggtagttttcactcagaatatcaattcatttttcaggtttagatatatgtatatgtagctgttcgtatgcattaatcacttagaaactttatttggtataacttcacatttttggtatatagaaattttattttcttaatgcagcacagtagacatacaatcaatattattcctagaatgtgcaatatataaattattcacattaaaaaattaacagaaagcctcatatgcagtaaatatttaaaaatgtatatctaactttgattctgtttctgactatacactactagctttataaatctgaatgaatatgacatttacacatttgaatgaagtacacggatgggtccattccagacgcttattacaccgtatgaataatctgctcttcactttggtcattaaggttccatgtgctgaggcatatagtggatccgaaagacacttccaggaagtacatttattacattggcatcttaagaatttctgttccttttattctcctttatagcgagggggccttttctctttaaaagcaagaagaccttcaagtctgtcttttgttggaatggtctgagcataacaagcttcttctatggctaaccctgttactaaatcgacctccatcccttgattaattgctaattttgccactctcattgcaacaggtccctgaggtaaaaactctctcgccaggtccaaggccttcctgtaggccgcgtctccctcctggttctgttccagaacgtggctgattaagcccactgctttggcttctttgccatcgaggactcgcgcagagaatatgagctccttggccagggacattccaatggcgcgtggcaatcgctgtgtcccccctccaccaggaataatcgccaattttgtttcaaccaggcccatttttgcagaggaagctgctactcgtatatcacaggctaaagccagttcaagaccaccacctaaagcga

SEQ ID NO: 336588 - DNA, 1000 bp, Homo Sapiens
tttttttcgttgatatacaaagttttatgtgacctgagcccctctggaggcaccagagtccacactctgtactcagaaggtgagggattggctcacgggggcaacatggcccgaaaggtgggagatcgtccatcccctgcgggaaaggaggcatccctaatgcattgcacaggcttgaagggggcacacccccacagttggggaggaggaagcaatgatagctaagaaggagaggggcaccccaaagaatactacagtatagggttagaaccttgaaattgcacctaatagtctagacctgtggacctttagaatcttagaaacttagaacatttgagtcttagaactacagtgcctagaactataagattttagaaatgtggattcttggactcttaaccatggtcctagagaggcagaatgcagcaaagaacctaaaggtgtccaacattagaaattattagaactttggtgtctagttagtcacaactgagtgtgagagtcttataacttagatgcttaggatccggaatcttggaccaatggaatctagagtgccttgaaacagaacagaccgttagaatcttatttaatcatctagaatcttggagcatctgatctagaatcttagacacagagaatctaagatcttagagtaagtcttagaatatcacatcttagaacaccggaccttagaaactccatctttagactcttggaacttttgaattgcagattctagagctttcgacccttaggatctaggatcttatacaagagaatctattatcataaagcctcagaaactataattgatcatcattagaatcttagaacttgagaagataacattttgaagccttatgatctagagccttacagccagagaatctagactctcagagccttagaacatcacattttagaatcctaggccttagaacctccatgtctagaactatagaatctttagaatctataatcttacattttaaggact

SEQ ID NO: 336589 - DNA, 912 bp, Homo Sapiens
cagaggagagatcggcttctttattacagccagggcccctctggccggagcgggggcaggggcggggccgtgggaggtgggtgcggagcgccggaggtgtggagggcggggctgggctccatgggaggtcacaggcccccctaggctggccccggtcccgggttgttgagaacaccatcgatccagtctcggaagagcgccactcgggtgaagaagtcagggcctcggccacagggccccagggaaaaggaggccacgccgtgggccaggccctcgcagacgaggggggtgcccccgtccccattgcagatgccaccgcggcgggtgagcacaccggtgcacacgttgttggggcgacactggtcctcgggggtcacagtcacgttgacaaacctgggaaaacgggagagacgccccccactgcgctggctcccccagccggccacctggcatctggtgccggcttccaccgtggcgttctgcagaggcagtggcagtatcgtcacgctgctggtgaggttggcctcacggtccagctgaagcagcatcaggtcgttcaggttctgctgggggtcgtagccattctcgctcatgctgctgatggaaaacgtctggcgggactgcctctcccgccgcctcaggtcataggcacccagcaccacggtgctaaccccggggttctggctttggaagcagctggccgcggtcatcacgaagcgggcatggatcagggcacccccgcagaagtgcctgccttgattctgaatggaggccaggaacgggaactggcggggcctcgccttccggccgccaacgatgtccaaaagggggctggagccggccctcgaggacgccagcagaccagccagcagggccaggactgtcagccgggtcatggcggggcaggtctgt

SEQ ID NO: 336590 - DNA, 1000 bp, Homo Sapiens; identical to SEQ ID NO: 157811

SEQ ID NO: 336591 - DNA, 1000 bp, Homo Sapiens; identical to SEQ ID NO: 157813

SEQ ID NO: 336592 - DNA, 1000 bp, Homo Sapiens
ttttttttttttttttttatgtactttgaaaatatatttaaaaacattaaaaattctatatttaaaacatatattatatgttaattagtacacttaaatagaacttgtatttacaataggttctgatgcggttaagttttaatgccaatttttttcaataacataattatataaatatactaaaatacaataaatattgttttttgttttacatggtgaataatatctttaccatagagagaacaaggccacagacatttacttacattttcaatgggaatcgccataaaaaagcaacaggcctgctgccatgcatgaaacacttctgccacaaagagaccacagcaagactttaaaaaacaaaacaaaacagaacaagaacgaacacaacagagagagattttaacaaaataaatcttaggtcaacataaaccatcaagcatgtgactgtgatgtatcttattgggtaaaagagccactgaccacacaattgctggatgtgtctcctatgaaaccacttaacagatctggcccttgcaatcctttaagtttgtgatggggggttgtttgttttaaatttgtccctcaaaaggaagctgcataaagttgacatatagcagatattccaagcattccttacatattaaaaataattacaaagataatattttcaaacaacacaaaacaaatctacactacgtaaagtcttccttctttcaaagaggtattcagatggtactgtgaaagactagctctaaatgaaagactgaacaaattgaaattctttgctgatggtatcttcattcctgggttatggtgaacatcctcttttgcttatccctcaccctactaagatgcagcaattgcttggggctttctgatacttaaggatgctggtccaagtggtgatcactaacattttcaggtgtgaaatgggctgaatgggcttagagctctagttttcactggggatccatttttccaagaaccactatttcag

SEQ ID NO: 336593 - DNA, 1000 bp, Homo Sapiens
gttgtcgcagctgttttaattcaatcccacgcccctgtccagcaggaaaccccttatagaaaacccaaatcctcatcttggagtttctccttcagccagggcagcacttgaaagaggttgatgtgaaagtctcgggcgtgagcaggtacctgcttttgccgcttctggtttttgcagacatccactactccccagctgattacaccaacttgaatgaaacgacttctcttgtgaactatcaaggggccgccagaatcacctctgcaagtattggggtcagcatagggactcactcctccagtacaaaggaaccgaggggtgaccacctctgagatgtccttgactttgtcatagcctggggcatattgagcatctctctcacagctgcctttcttatccccattcttgatgtagacctccttccgagtcagctttttctcctcctcagacacaaacagagctttgatatcctgtgcagggagcagctcttccttttgttgctggcaagtggtagttggaggaagcctcaaagctcgagttgttccctcggtgcaggggagacaaatgggcctgatagtctggccatatttcagcttattcttgagcttgatcagggcaacgtcatagtcataaaattcaggaattcctgcttcttttttcccattaatgttgtagttggggtgaaataggactacttctatctccaggtcccgcttctcccctcctacgctgaccttgattgagtgttccttgtcatccacagtgaaacaatgtgctgctgtcagcacaaagtactcagacaccacagcccccatacagctctcgtgtccctttgaagggcgaatgactgagatcttggcctgccatggttgcttgtggtaatcggtacccttcctgtgttcccaaaccatgccacagagactcagagactggctttcatcgatcatttggtagaaaacatcttccaggttttccatatccttgactttgaacacatgtt

SEQ ID NO: 336594 - DNA, 1000 bp, Homo Sapiens
tttttttttttttttttttttctcattgctcttctttttaatagctgaaaagaattacaatttcaaaacagctcaaacaattcaataatgtttagaaagctgcatgacctcttttctaatacactgagggtagtcatgtttcttctaatagtcttgtatcttcaggcttgagcttttgtaggagagtagatattaaattatcagagaaaaatatcatagttctcaatctaggaaaccaggctagagtttggagaatctctactttttttttattatattttttaaaagctaccaactaatacaagctcactctgctcagccttatggcccagaggcactaggtggatccagtgttgactaggatggagagggctgaaatatccatctctcctcccctcctccccattggtctatgtcttttactggtagaaaagtgggtcacgaaacagaagaactctgagagcaggactctgggtattggatatttattgatcaggtctcatatgactgacctacttataagaataaacttaaacaggatggtctccttaagtgtcttgtagcaatatttttcaaactgtggatccaaacccagtagtgggtcataaaaatccatttgaaaagtctcaactagcatgttttataaatgaaatagaatgaaaaggaatggaacagaaaatactaggatggatcacacatttaatttcgacagtaagatgtgatgtgttttgctgggtcattatataaattgtgtttgttactaagggtcatgttcaaaagaacttggaagcccctttccatagcgctttatctgtccctggctggttgctgagtcctttatgacagttcatgtctcatcctctttgctagcctaccaacttcttcaagtggcattaacatctgaattacttttcctgtgctgcagtgatttccataatacttttcacagggtgggtgcttagtgaacctgttcaagatttactttgtacttattttgctc

SEQ ID NO: 336595 - DNA, 1000 bp, Homo Sapiens
tgcaagaaaaatgaccacagtctggccaattccagatttcaaactaaattcaaactcatacttaattgagcaaattatgcttatttgaaaataaatgaattaaattcacctcagagaaattatttgtatagacataaatcatgtagcaaataaagtacaaaataaatatcaatgacaaacatattggaatcaacttccctagctgaatttggagtgtgaggaaagatgatactgcaatatacgtattttacatgtcttaggtctctcttatgctatcgaggtaaagccagccatctgagacacgttttctgtttcttttttcttttttttaaatttaaatgaactgtagccatttgatggcagaagtttatctgtgactcagagaaaccacaaaatgttttatcacatcagggtctgtgcttcgtgttcttctcaactttctctcgtcttccaaaacgatggacattaatccaattgtacatctaacaaccgagaagaaaacacccgctggatcttgggcagtatcctgtgtgtggctacaaaacttccaccccagatgttcgtccacaggagatgaagactaggggtgaggaggcttggagagacagtggagaggggcgcactgggagctggaatgtggctgctcctcagggagagctgtgtcaggactgacagttgggcagtcttgcctcccggctagttgtgagcactgtggcggtacggaggcagcaggctgctgacaatctggtggagccacggttaaccttttttccttgctgagccggtgcccttggatgaattcactcatggaaggggggcccttcagaagaaatgattctgtggaggtgggatcagggggaactcttaataaattctgtaggtaggaagcccctgaagtcctgggacggctctgatcacaaagggaaggtgaaaattgtcttttcctctgagtgccactgctgacccgaatgttgggtgtctgtgggccctgactatgcag

SEQ ID NO: 336596 - DNA, 1000 bp, Homo Sapiens; identical to SEQ ID NO: 239940

SEQ ID NO: 336597 - DNA, 1000 bp, Homo Sapiens
cattcattcgttttattgtgacatttattacaggaacttccgggtcaattttcctttcgcacagacaccaatgtgcccaccccttgccacgcccccttcctcccacggctgggtggcctggctggtaggcgctcataattacctctggaaacgagtccgtgcatggctgagacttcccagccaatgacctggcccggccatttttctttatgcgttgtttttttttcctgctaggttttgcctgcacagcttgtaggatcttgttcattggatgctgccactgaaaaactgatcaaaagccatatgctgctcatgtttcctaatactctcacacctttaaagttggggatagggaggggaaggtctcacaaaaggcagttggtctgctggttcctggccaaggcgagcaatggaggatccagaaaaacttggccccaaagggtctgaattctcggaggagctagtggcagccacaggcccggaccaccatgtttctgtatttcttcaggatgacgttggagctgtcatcgaagtagaggacggagatggcattgagctgcgtgggcgcacagcagggcttgggcaccgtttccgggttgatgaagtggaccagcgtctgcacgatggcgtggttggtggcgttcatgtaggagttcagagggaaggcacactccccctcacagtagtaggcggcgtagccttcaggcgcgatgatccagtcctgccagcccaggtctcggaagctgacatacagctcgtgcttcttacaggcctgcctctggtcgctgctgctgttctctgccacgttggccatccgcagggcttcctggttcttgggcgtcttggagcggttctggctgcgctgtttgctccccgtggaccggatgctgcggaagtggacctccgtggccttgaagaaagccaccatgaagggctgcttgttctggggcccgtgccgcccaatcaggcccgccaacttggggttgatgctctgcccatc

SEQ ID NO: 336598 - DNA, 1000 bp, Homo Sapiens
ttttttttttttttttttagagaaaaaggacatgaacgtttattgagtgcctgctggttctggccttgtgcagttttcatctataatagcccatgaatcctcacgccaaccctggaggtaggtatcatccccatttgtgtcggatgaggtataggaggctcagaaaggttaggtagtttgtccaaggacacagaaccaggaactggcaagctgggaccgagtgcttaagtctcagactcaatccttgctctctctcctatactgcctccaggaggacggggggagcaccagcagaagctgcagtccacacgcttcctgcccctgcaacccagcaggcaccaagagaagccggccccttcacacagaccctccccatctacccttggaggatgcatcagtggaagagattaagacataaatacaaaaataaatagcagggccaagtccccagcagcaaggatgtgccatctccacgctgcaggaaggtcactgtgccattcacagctgctgtgggaggaagccctgggggacctggaacaatggttgccaaaggctggagtgagtgggctcagtgggccccttctgggtctcacagattcaagaacaaaatgtctggagcaggcagcagccgtgggcacaggcgccgtcctcctccacctgctcattttaccggtgtttgtgatccaagagggattcaaaatcaggggaacatacaagtttgtgcttcacgtgtcccaggactgtcatctcccctgtcctactgtctccaaggcccacggacaccagctcctgcaggaaggagcaggcagttcccatggtcacgtccagagtcaccttgcccaagaggagttgcacccttccagacttgcggatgagtagcttgccaacctgaccctctgtcaggtcagccagggtacaagcattctctgccaatttggcttctcggtctttctcctgcttgatgagcaccacctgtccgtcctcgccctgcacctctgtc

SEQ ID NO: 336599 - DNA, 1000 bp, Homo Sapiens; identical to SEQ ID NO: 157816

SEQ ID NO: 336600 - DNA, 1000 bp, Homo Sapiens
cacatgaaaaaaaccagaagttttttttcatgaagcacaaatggaaatttcttggttacaattgaaacacgattcctggaggaaatatctctgcagccttagcccttgaaagaagctcataatccctaaaatacacaccatgcacttttccaatgaataatgtttcctcgtgtttagatcatttctgaatctgagtcgaagaagtttgcaaggggctcttggttaagatctggagaggattccctggggaaaggcagccggtgccccacagcccatcaggaacaggtgcggctgacagcccccggcacccctggtgccttcatttatagacaacgtctgcaccgaacagcaggaagttctggtgaggctgaagcactacgttgtagagctggactctggccggcgtcgggagagggaagcctttctgtagtttctcgttaaccctgggcagcacaagaatgggtacaatgtagttcatgatatcctgcagcaattcaaccgggaaggggccaatatttgagtgcttcagttccaggagcagcctatccagcttgagctctccaacaagcctgttggactcggcgctgacctccatggaaccagttgtgtgcatgccaatcaggaagagggaagccagggaggagttggggaggacggcaaaggcctggacatccacggcagggtagaaggtaaggccggtgggctgcacagacaggtgtggcggggtggaggctgagacatggatctgtatcttcatgttgggaaacttcttggccacctcaggtaggaaggttccaaagaacttggttgtcagtcgaaatttggactcctttggaatcatgtcatctctaagggtcatcttcaagaccccagcctcttggtatacaagcccggctgtgttgaagaagtagtctgagaggcccaggtataccatgcggtcatgggcagcgggaaactccatcactggtggagcaaagggaggtggattgtggtggttctc

SEQ ID NO: 336601 - DNA, 1000 bp, Homo Sapiens
ttttttttttttttttaaaaatgtaagtgaaaactgtttaatcattttagagcagtcaaaatacaatataagattggtatcttgttatctgaaagcaatcattttaccatatgcattttgatcttttaccattcattttaagttgatggttaatttaaaaactgagttttaatcaaagttgttttcaaacattgtcataatgtcactttgaagggtcatatcaatggtacccaccattgcttctctcctcctcctctcttgttctttctgccttgctaaatcacggtctttgagaagccagagtttggatttatcttgagcttctgatgactgctgatgttctttctgctcttctccagagcacttgttttgtattttatttgaaaaagattctacagtcaatccattcccaagatccctctgattttcttgagatgcttttagttcctttgtattttgttccaaatgcttccgtatgagttcctgtgtccgagcttttacttccttttctatggctgcttttctaaattggttgaagagctcatctgaggatttcattacacctgatggtttcactggtttgcctaaacttttccatgaatctgcattcttaatctttatatccttctgtacaggagcttgacattcagattctaacatcgttgtgtcactatcaccagatggatgcatcacagttatgccatttgagagctgttcagaatcacctgagggaggcagaatttgtaaaggtgaaatgtttttcacagtctgtaaatgttctaattcttgataattaaatgctaattggtggtgatttggtggcattacatgtgaaggtgtggtctgatgaacaagggtagtattggcagaggttgtgtcttgcacacaatatcctatctgtgtgacgcctgttcttccttcaggcagtatgcattcattcttcattttctttacattctctttagaaggagaatcatttggttttacttctgtaaactta

SEQ ID NO: 336602 - DNA, 1000 bp, Homo Sapiens; identical to SEQ ID NO: 157817

SEQ ID NO: 336603 - DNA, 1000 bp, Homo Sapiens
gaggattataatagctatctcatggattgctgaaaggaataaaggaaataatatatttcaaacttattagcacatggtaaatgcttgataaatggtagctttattattaattcaattcctaagacctaacctcctttctacttttcttttttgtttgactagtaatcctggtgacaatacttaagtgaaaggttattgaaatttcccttctgttgttgctacctaaccagttgcttttttcccaattactagacaatatacatataattaatgttcttattaaaaaataataacacaaactaaagttgcaaataaaaagtaaatacattatttaaaattcatgtctactagctgtttttcctgagacacattctgtccattttcaaatgagcaaggcactttgcagcttgccaccaacctggaggtaacttcatagccttttaagcaatatttgtctcttcaatatcttcattgataggagttatatctttacccagagtttccatttcttcttctttcttctttcttttacgacgtttccgaagagggtgacagcatgtgcagacaccgatgaccaaaataataaaaactaccataactgctatcaaacaaatcaccagaatctgtcctctgtctcctcttaggtaaaacaagtcaactctctcacaccttgctccaatgtagccttcatcacagacacaggagggcgtctgctcggccaccacgaagcggcatctccctttgatgcagtaatgcttgtattgcttggggcacctagagaagtggcctttccgctttgattgtgtggtggtagctgcacagttttcctcagggtctccacagaggaggccattagtttcaggacttctggtggaattcccatctgccaccacacagtgaaggatcactagacccagggcaagggccaggagcagtggcagggagctggcgccgctgcaccgggcggcccggtccatcaaccccgctctgccgggccggg

SEQ ID NO: 336604 - DNA, 1000 bp, Homo Sapiens; identical to SEQ ID NO: 157818

SEQ ID NO: 336605 - DNA, 1000 bp, Homo Sapiens
ttttttttttttttttttttttttttttttgcacactggcatttctcataaaactttatttggaaaaagttatattcaatgacccaatggtatcaaagtggaagaggaaagtgacaactagagattgataactatatcctctgcaatcctcagaagaaagaaaggggccctttgggttgtttcaggtaaagtacatcaatgggactacaggaaagagaatttcacacacggtctttctgcatcagtaattttaatagagactcttagtggttatcaacaactggtcagttgttttttgtttttttttttccacactgctctctggattcgaacctagtgaattctgggctcagtcctcctcctccatctctttcttgatccagtccacgtagttgagcactttggtgtagaagccatagcccctgctgcacccgatgccccaggacacgatgcccgtggccacccagcgatcagtgttcgggtcccttactgcaaaaacgcccccactatccccctggcaggcgtcctgctttagagatgggtgtccagcacagaacatgttttgagagaacacatccatcctattctttccccggagccagttctcacaggcctgtggattagctacgggcagacggacaaacctgaggtcatgagcaatcttctcctccatgaccccgaagccactgacatagcccatcaagcccaggtcgtagaaggtatcgttgtcagggaggcagatggggaggaggttgggacccagggtgacactattttccagctccagcagggcgatgtccccctcaaaattgtaggactcatcctgacggtagtccgggtggacgctgaccctgcggatggggtgatttcctagcttcatgagctcttccacatttgtgtggcccaggaacacatccaaagaggcgttgctttgcgcttcgtgttccttgggatacagggtgtgggcagctgtgaggatccagcggtcgcccagcagggc

SEQ ID NO: 336606 - DNA, 1000 bp, Homo Sapiens
ttttttttttttttttttgaaagcaaactcaggctttaatgatcagtttcctgttccttggtattttctttcaagcaaaggccatgtttttgtaatactccctttcaatggactgttctttcggccccagcaaacattcctgagtggtaggtttgaggaggtgttccaatttattgtttccggtgtccaataaccttggaggagtatctgtcttcatgccctccaaggccatgttatttcagaaagttacagcatttgaaatcattctctaataaaagcaagtgccactaattctaagtaaagtgagctttacaaataagaccagctatgaatgtttaaaaaaagaagaaaacaaaaaaacgaacttcaacaacaggagtccataagtgcaaactgtatgcagctgaacttcaggaattttagcatccatttaaaaagatatcttcggcaaattcatctaaattagctaaaaatgcttgacacgatgaacatgttgtgtctctaggccagtattcaatccaggtcaaggaatctaaagggtagatgtacctgaaactgaaattgtattttatctggagggcttctttacccataattaagtactgtcttccttttaccagctcagcgttagtacaggttacctttttaatgaaggtaatctcagagtctttctcagcaacagcttccccagttttgtagatatccagaagggttgccttgtacttgacaaaaacattttctacagtgatggatgtgatgctaactttataagcatatgcaatctctggtttacatgctgtttgttttcttgtctctgcagagattgtcagatccaattcttcctgcatttgcccacaatcagcttctacacacttgcacgcggctccttcacagactttctgaattttgatattggaagtgctataaaacatggtacactgtttatctggtctgtggtattcgtacactgtgaaagtggcaggactgagaaacccaactt

SEQ ID NO: 336607 - DNA, 1000 bp, Homo Sapiens; identical to SEQ ID NO: 157820

SEQ ID NO: 336608 - DNA, 1000 bp, Homo Sapiens
ttttttttttttttttttttttttttttttagtttaattttgtttttttttagaagagattggcattttccgtgggataaagcagttctggcgtatttcactgttgacttctcattagggaacaaaaaatggaaacatcacaggagtttaaggaagaaaaattaaaaaaaaaattatagacctaagagagaagagacttcagaggttggtaggattttcatgaagcatgttgctatttacttggcagctaagattatcttcaggggtaggatctgaaggtactagtgttttcttcttccactggagctcagagaagccaacagctctatttttcattggggaactctagggctggcaatccttcagaaattttttgtttactgatttcacaggcaattccctcaaatttgaatgggcaggcacacaaacactttccatccattagaatcactgtacctccattttggcatgtgtggcattttcttacactaaattcattgatatagtcttcaatggctctttccaagttttgtttctttaggtgtgcatttttcattttcactggaaccagattatatataggagacagtttttgactaatgagaacaggagcatcatttatggaagaggcccagttgacaaagtcagtcacatcaatcacggttcctcggagaagcttttctttcagttcaaatgcatattttctggttccacctcttatgagtgaaacaacatcatctatgaggttttcactggtgatgtttacagctctaccctctcccctctttacacaatcatctttattaaattcagctccaacagagatttcagagaaagccagagatacatccagatgatacccaaggcatctctttatgtcttttagttcaacacctttccgcttcatggaagctttatccaaaacatatattagttcatagagtcctcctagagacccagagctactgtagtgagttccataggtttccaaaaaggcaaa

SEQ ID NO: 336609 - DNA, 791 bp, Homo Sapiens
ggggaaaaataattttattcctcaaatgatcagcacattcagaagcaggacagaggagctctgatgacatctctgggggactcaaagcggccctcattttctggtattttcccaggtgattctcttccaacctgtgagtcctgctctctttcctcccatctgaagtttgagacatcctctgccacaaggaaagccaccaataccagcccaaagagccaccagagaggaaccaaaccacatgcatcaagttataggaaggatgcaagaagggaaattaggaaggaaagggaggagtttagttggcattctggggcatgctaacatgagggcgatggtctctctccaagtcgctggacatatcccttttctttccaggtgctccaaccccaattgcagtttgggggaacgtgtgaaacttgttgaagtcctgcgtgtatgtgcccagcatgcaagtactcagattaccgcaccgcttagatctggggctgtccaggctggagccctctctctcttgctcctgctccagctcactggccttcatctgcacatagtcctgcaccagtgcagccagcaggaggcgcgcttcgtcctcactgagcgtggccgggtctgctgggctgctctccagggcagacctgaatggtgctgcatggaggctgcctgcctgcaacaggaccaagatgctgagagccaggaagggggagaacttttggaagcccatgacacctctctggcgggaggtggcttggatcagaggcggtggcagcggcggcggcggcgtccagccagag

SEQ ID NO: 336610 - DNA, 1000 bp, Homo Sapiens
gaatgaaaagatgaataatatatttctttagaaaaatatgcaaatatacatctttttgcttttaacgtactctgtattaatttatacatatacacaagcataagcatttcacataatttgggcagaactatgtgcaattctataataagctattttgttttcttcaacccctactatattagcataataacatctaaaatattttagcaatatattatcacatttgtaccacagctgccagaaatactctgttttccatgtttgtaaacaaaaatagaacaatactacataacactgtgattggaaaaataccttcttttcgatcccccccttacattcagtaaaggagacttaaactactttagtatcccaaattcattttctctgtagaaatataattaattttctctgggtgcgctaaatatgtaaccataacaaatcaatttattatctttccacaactaaatcacttctgaaaggcagtggcaaaatatgacatagatgagactggagatttggagggtttcaatgtacctcctcatttagcatacaaattaaataatggtaactctgattactgttgcaaattcacaaattaatttcaggtgccagtaacgatactggtttattcaggattttcaaaaatcttatactgggaagtaaagagagatatgataatataatactggattttaatgagaaacgttaaacatgaattgatttatggttaaatttggagcagttaattttttcccctcctgttttggtaataacaagaaacaagcggtcaaccacaagttgatttctaattagccctcctggatcttcctggaaaagcctgagctctttttaagctttgaagctgggtggaaagcagttaatggacttatgtggagtcttttaattaccaatattcaacaaatttatcttttactgctagatagcacccaagggcaagaggtaatctgctttataaaccttggagtaatttgctttataa

SEQ ID NO: 336611 - DNA, 1000 bp, Homo Sapiens
gggtaaattgtaatttttttattggaaaacaaatatacaacttggaatggattttgaggcaaattgtgccataagcagattttaagtggctaaacaaagtttaaaaagcaagtaacaataaaagaaaatgtttctggtacaggaccagcagtacaaaaaaatagtgtacgagtacctggataatacacccgttttgcaatagtgcaacttttaagtacatattgttgactgtccatagtccacgcagagttacaactccacacttcaacaacaacatgctgacagttcctaaagaaaactactttaaaaaaggcataacccagatgttccctcatttgaccaactccatctaagtttagatgtgcagaagggcttagatatatccagagtaagccacatgcaacatgttacttgatcaattttctaaaataaggttttaggacaatgacagtaagataagggaagaaaacatggaggaatgaagtcctaattactatacatgcatatttttttgacagtagggagaaaccttttacagataagttacaaacaaagaaaaggcaaataaacaattttgtacaagaaatttaacacattctgtacaaggtcttcactttgctgtcatcatttgtacaaactcttcatagtttacttgaccatcaccatcaatatctgcttccctgatcatttcatcaacttcttcatctgttaacttctctccaaggtttgtcatcacatggcgaagttctgcagcactaatatagccattgccatccttatcaaacacacggaatgcttctctaatttcttcttcactgtctgtgtctttcatttttcttgccatcattgtcagaaattcagggaagtcaattgtgccattaccatcagcatctacttcattaatcatgtcctgtaactctgcttctgtgggattctgcccaagagatctcattacagttcccaattcctttgttgttatagttccatcaccatctttgtc

SEQ ID NO: 336612 - DNA, 1000 bp, Homo Sapiens
ttttttttttttttttttttttttttttttttttttttttttttttttttttttttttttttttagggacatatggcttcatggcctttaaggatacttcaatttcttaccattgcaagtggatttttttttgcacatatgtacaactatcatctataagcatctccttgtaaacagtttgaacacatcaatgataaaaagtaaaatgttgtaaaagttatgggaacatgtcttttagcactacctagtattagctaagcagtagttcaaaggaattactgccttgtgaagaaatccaaaggatgtaggatggctagattttcaaagcaaaaacaatttgctactattcacttcaaatatgtgccactggttgctgaaaatgtatgcttttaagtgttacgttgtgttaacttgcaagatttaactcatcggtattaggtatccattacatgccatagaagacactattattttcataaagcagtcacatgcattgaagttagaattaccaactggtatatatgtatgttttttgcacctcaaaaacagaatcactatagtacatatcatgcttccacacctttcttgctgaaggacaaagtacataaaatgccggtgtttggcttccagatctgaaggaagctgtttagtactctggcaggatcacatcttgctgtggaacttcaaaacccacagcagagcttccttgcccttctctgggagctgctgcctcctccacagtcttcagcttctcctctgctaggccctcctctagttccaggtcagccacctttatcccatcctccactgccttgggcaccattttgggggcctcttcagcatttatatctgcacctttaactttctctaaggcttgcaccttcatcagctcagcctgtgcccccttaactgcggcttgggccccatcgccttgaattttctctccttctggaatagctttcatgtcctcgttgccatcttggattggagaagggtctcg

SEQ ID NO: 336613 - DNA, 1000 bp, Homo Sapiens
ttttttaaaaagtgtatgtgtttttaatgtcacaaggattaaccaaattagactatacaaaaatctgtaaggaaatgtaacaccaagtgacattaacactttagtcttatattcttttaagaagacaacccaacaaaatatggcagttactgagttagttaaaaggatatttataaggccaggtgcagtggctcacgcctgtaatcccagcactttgggaggccgaggtgggcagatcacctgaggtcagaagttcgagaccagcctgaccaacatggagaaaccctgtctttactaaagaatataaaaattagctgggcgtggtggtgcatgcctgtaatcccagctacttgggaggctgaggcaggagaatcccttgaaccaggaaggtggaggttgcggtgagccgagatggcgccattgcactctagcctgggcaacaagagcgaaactctgtctcaaaaaaataaaaacaatgtttataataactcatctagaccatatttggggggaaaaaggacatttatgctattgggttgcatgcctcaattcttcacatcccattttgtttttgcttgcttaaaacatacttctaaaaagtgaaactcaaatgtaaaaagttccaattctgagtttggtatacagcaataaaaattttataaataccttccaatttcacatgtatgaatcttttctttgattaaatacttgtgctggagtaaaaattaagatactaactcaacaagaaaagttacaatgtgcagagttaacattagacaattcagtttctttcattttatttttcagatgacttcatttctcaggacagaatgacacaaacacaagaagcagtctctagggctggctgagaccacatttatctgttctcctaaaagcactagctcagctcccaaaagaagaattacaaatctgagaagttagaggaaaggtacagaataggaattctgattaacaagaaaaatcaattaatgacattggt

SEQ ID NO: 336614 - DNA, 1000 bp, Homo Sapiens; identical to SEQ ID NO: 157821

SEQ ID NO: 336615 - DNA, 1000 bp, Homo Sapiens; identical to SEQ ID NO: 157822

SEQ ID NO: 336616 - DNA, 1000 bp, Homo Sapiens
ttttttttttttgttcttacgtacagattatttattgtaaaaatgtaagcaattacaaattgatctgttgtgaaatcagtgctgaattaacattaatgtaactccagtgaaaaaaatgaatttgatcaattattatcaggaataaacattaagccatgacggtgctcaagttatcttctgatgacactgctgtattaaatgtacttttcctatgagaaccttagaaaaataaaaatttctgagtagatcatctttatcttttctttttatatatttatagccatattttaatataataggccatgaggtgatatgtaaacatacataatttcaacaaattttgtcaaataaaatcatatttctagctagaaacttgccttctaatcattttaaatgaataatccaatcatccgtcaaaacaaattttttttttaaatgactgttaaatcctaaccttcattttcccctggggaaatagcattaaaattgttacacaatctgctatagaaagtgggattctctattttgaagccactagcttgcatttgcacatctagcacaggagaatcttcatccagtgatgagcgggttacacggatgaacgctaagcttcgctgcacaggtgcagggccccggcctcacagatttgccttctcccttgccgccaagtgagatccggactgcacaaaggtgtgaatcgcattcttaggcttctcagcattgtacttgtccagaagagcctggatgtggctcccgtagtcagggtggacctcagtgaagttcttgaccgctttcttctggatgaaaatttgtgcatccttcaggtggccggcaatgttctcacacagacgtttcctctgttcctcattcagcacgttcacatagaatgcccgcacctgagtaacgttatcatcattggcagtgttgaatctccgcacttctccagaatattggatgctgtgctccagggcagaaggctgttgttccggagcaccaaagc

SEQ ID NO: 336617 - DNA, 1000 bp, Homo Sapiens; identical to SEQ ID NO: 157823

SEQ ID NO: 336618 - DNA, 1000 bp, Homo Sapiens; identical to SEQ ID NO: 157826

SEQ ID NO: 336619 - DNA, 1000 bp, Homo Sapiens
aggtcaaggtgagtttattgtccaaatagcataacctaattgcattcaaaaccattttcaaatccatctttaaactagtcagaaaacaggttattatttttttaaatcacttaacactgaacagataagacctcttaaaaggcagctgactatatcatgtcaccatcatagccaatacaacatttttgccatacttcctaaaaaccttttcgcatacactgatcatgctacttatcagcactttctaacatcctgaccaaacagacacccacacctcttatagagtacactgtgagagaataacatggacttgatatggcatcacacttgttttaaagcaaaaaaaaaaagaaaaagaaaagaaaaaaaaagtccaagacaagaaactatataactgagagagaggagagagagagagatctgaggtacatgatataagggtgatgaacataatggaaaaaatccaatggcccgatgatttgctggggatgtaagagttggccagcagttaagaactaaaccaattaaaaataaaaatagaaactttgtttttcaaggacaggcacctgtcaaaagacattggatactgtaatggctacagtcagtaaggcactttatttccccaaagtaggctgcaggcgaagggatgcaggctgcagctacagcatgcacgtacacatttgctgatggcttctcaaaacctgagccgagaatagggtctgatagcccagccaagtttaaaagcagacacacacgaatgtagtatcgttgtgcctgaaatgaccattctgggttgtttagaatccagaatcatcaaaagccatgtggtatgaggaagtaataaatatcctcttgaatcttcttaccctattttgcacaaatggatggctgcatgaacagctcttgtaaattgctctgagtccacaccaatagaaacctgcactcattctatagctacagagggtttgttggcttaaggggactttatcatctcagcatt

SEQ ID NO: 336620 - DNA, 1000 bp, Homo Sapiens
gttgccactatcctcctcacatttaatcctcacaaccccctgtgaggtaggtatcattgccccccttacagatgaggaaactgaggctcacacatgcccaggggcacacagtcgacaggacgggtctacagttccaacgcttgggttctcaccccgaccacaccccacccagggtggccagaattcccttatagtagcaaaaagacagctgccgcggacatgaacacacatagcaccagcacacataaaagcagcagctcagtgagcatctcccatccctgggtttccggttcaagagcatttgggggccaggcgccgtggctcatgcctgtaatcccagcactttgggagaccgaagtgggcggatcacttgaggtcatgagttcgagactagcctggccaacatggtgaaatcccgtctctaccgaaaatacaaaaattagctgggcgtggttgggtgcttgtaatcccagctacccaggaggctgaggcaggagtatccgggaggcggaggttacagtgagttgagagttgagatcatgccactgcactccagccggggagacaagagcaaaactgtctccaaaaaaaaaaaaaaaaaagcatctgggggacacttctggccaagtggttctttcttacatttgcagagtaaacagaagtggatggcagcagggtgtgttgtggtcagcccgttcccagggagaggccatggtcacatggccccaggcaggctccccaggcgtgggctgctggctcccaggctccctttccatgcaggagcagagtctccgtggccagcaggaaagcccaggggtctgcctccctcccacgggcccccacagcagagctgcagttgggatcagccaggacacggcccccgactgctctgctcttctgcctcttggtcacctcagatgttacagaggacttgaagttttttctggctagcctatctgggaaaattctttttgcataaagtgtgtcaggatggcattga

SEQ ID NO: 336621 - DNA, 1000 bp, Homo Sapiens
ttttttttttttttttttgaggtttcaacttaacatttattgcacaactcacttcaggccactgctgacatcccaaaacacagcctagtaacacacaacttcaccttcaaggactgcagagatagaccaactatatataaataatctcgtggaaacgtaatttgggtgagaaaaatatgacgctagagactttgcgatgaatattttgcctaagttcagaagcttgaaaatacagttggcctacaatctcaaatttcacccaataaccgtggcccttagtcaccacaccttccatcatctttttacctctgcctgttcttgccctttacagttgcagctctctcaactcccttgcctctagttgactcctcttcccatttcctacaactttgtggcgggagcattttagcaaagccatttcaaaggcgttcaaagtccaactgatccaatgcatttactcagaaatttataccaacagggatgctttcaatattttaaattacttgagcatttatattagcataaaaattttaaaaccaaatgcttaacaatagggtagttggataatttaacatacgtccacataaaattaaaccattaaaatttgcttttcaagaaatatttaataacaaggtaagtaacatatgcttatctaacatggaattttatgtcactgctgctaaagcaaaacatcctgttcactggataaaagacctgctttatgtgtatacacttcagtgcaatttttaaaaatactataatttcagaacttccaaatttcaacagatgccagtgttctctccttttttcatatgggaaaatttctttcaaaattatttgaagcttggacaaaaattccacagctgtaatcctcaggatcactttgcagtcttcaagattcagatacagaggaagcttcaattcaacctttcagagaagacattccagctcgcatgatctcatcaaccaagagaatgttggtggcaatcacagtgcagga

SEQ ID NO: 336622 - DNA, 1000 bp, Homo Sapiens; identical to SEQ ID NO: 157827

SEQ ID NO: 336623 - DNA, 1000 bp, Homo Sapiens; identical to SEQ ID NO: 157828

SEQ ID NO: 336624 - DNA, 1000 bp, Homo Sapiens
tttttttttttttttttttttttttttttttttttttttttttttttttttttttttttttttttctagtcaaagcttttatttcacttttactcacaggatggtgggcaagtgtccaccagggcacataagaaactccagagtctcttaagcagataggctgcttgtagtgagacccaggcacaccaatcacttgatttatcgcatctacacatgacctgagaggggacaagaaatctctaagatttctgtgctcggtcctctaccattcttgcaatcacacttatattgcttctccttactggtgtgatggagctctctgaggagaccaaaaactccagatgttgaccacatggctgagttcgaagatgcagaggtggctgtggcccacagcctcaggaggtgacaatgttctgcacacagaaaacacctcatggaagtacggatatgcacatcaggagggcagaaatccacagtgctttttattgaaaaagacagtttctatcttttttaattagaggaaggggacaatgagttttctgctgccccatggggaggttttggctgaactcgaggtctggggaggggcgggcctttctgctggtgaacttgtgtgcccgacggagcaggaggcctcttctgaggctggtgctgaacacggtgtccaggaggcgggggacgatgactaggtgcctgggaacgatgaccaggtggtggaggaggatgttgggaagttgctggattctgaggggttgaagctggaatttgttggggcttccggcccctttcttcagtagctactctgtgggctcttgtctccagctcctcatcatttctccgactcctctgttttttccttttggtgatatagaaaacgagcagtgccacaaagaccatcaagaggctgcctcctccacatatgccaatgatgagatagatgtccagacctttctctggacagctgacaggctcgacactggattccttgctgactttgttc

SEQ ID NO: 336625 - DNA, 1000 bp, Homo Sapiens; identical to SEQ ID NO: 157830

SEQ ID NO: 336626 - DNA, 1000 bp, Homo Sapiens
tttacccatgaccatgaagtttatggtttgactatctgtaggaagggtacaaaaatacatcatgcaacaaggtcattcatttggaaatgtaatgctttctgaaaaacttgagcattcacttttcttcacttgcctgttctaataagagaggtttggtgtggtgatttttcaatagaaaggatgttaccaatatataaataacataaaaggatcacatgagaattaaagtgaagtaacttaacatacaattttcattctaatcttatacaataatttttcttgactattgatagatcacaataaaggtatgctgatgatataagttattttaagactttggggaaaaaggcttccgtctctggcattgaccttattgtggaggaccctccaaaatcttcagctctgcaccagcaggtatgctgagtcatgtatgatgacataaaccacaaggagtcaaggagctaaaacaaccacagcgactggctcagatctcagatgtgcaagatgaatcctcaggatttttcacacactgaagaaacttgtcaggtctgtagatattcttgcaggaaaattgaatattccttttgcttataatcgattccagctcttttatggtgggatcctggcataagtctctggaatcttctcttccaccatgtatcacccaggcctctagtgtctgaaccttctctggttgcaaattatggacttccacactcccaaaagtgctgtttttgtcaaagattttactgcgggatccattgagcatcacatggaccacatcacaggcagcttctgcaaacctgcgggaaaccgttttccagaatactgaaacagggttgttgctgcagtcctttctccagtctgggcaagattgatagtttattttggaagtgttgaattcaccacaccatgtgaggtcatcagcaaggtagcctagcagcgtgtcctccagggtgaacatgtcccgctggacctgtgtgaactgatgggccagatc

SEQ ID NO: 336627 - DNA, 1000 bp, Homo Sapiens
tttttttttttttttttttttctagacaaagtcaatattgttcttttataaagcaaagattatgaaaggtgtcaggtctttaaaacctatacaagcacaaagtacaaaggagaaaggtgtagctgggaaaaactcatgaaagagacagtatctgccgaagtccttgaggcaaaggatattgaatacctccaaaagaaaggcttcagtaaaagccaaggaagcttcacactcgtcaagactggccctggcagacagggaaggatggccttgaacactgcgatggaggaaaatgctccctggacgatttttttcctcactccagccagcatatttcagctgcttttgctataccatatctttccagaaatatgaaggcttgtgaaagataagcaagcctatgatggccactgtgaaaaggaccagggagaatagaaccatgaggaagacataggtggagtgggagagaggtgtggacaatggttgctcagctgggatcatgttggtcaggttcagcatgtagcccaaagtccagccggcgtcgctgccctggatcttgccaatgaaatggatgtgctcccaggaatcagctgtgaaatgatagccttgcagaaggagggagagaatgtaggtaccagaaaagcagtattcactcaggtacttctcctttactccagcgtaagatgtttttatctcctcccaaggctgagcacagaactttttcatcatctcagtcaccttttcctgagagactttctctgatgtcaagtttaaaaacttcatcacaaagtaaaaagctgaaaatgccccaaaatccccctggagtggtggcaagaaaatcccattgaaggcacactgggagtaagggcagtaactggtgttgaagagctccaggatgctttgatggcattgttgatagtttccaataccctggatttcaaactgctggaatggaagagtcatctcaaatctcttggtgcagggggtcttgtaaaggtcactt

SEQ ID NO: 336628 - DNA, 1000 bp, Homo Sapiens; identical to SEQ ID NO: 157832

SEQ ID NO: 336629 - DNA, 1000 bp, Homo Sapiens
tttttttttttttttttttttttttttttttcagttaattgataattatatcaaatgtttattttaaaaaataataaaacattcacataatgttgtcacaattttgggtgggaaaaaagcatgtgtatctctatatctctgtgtactagaaaacaacaaagggatataaaattaaataataaccagtatttaaaagttaacttgaaaatcctcgttgataattcagcagcatgcttctggtcagcctatacagtctctgtcctggtgaggagcatgatcaccaacaggcaagatcttctggccttgaagtttcgcttgagttaaaagagctcatctcaggtaagtaacaggccaagaatggtgggcaccgtgaccactagccaacttgcaatccattctactccaaaggaccgggccagggtacagggtggactgaggcagaccgtgccattcttgctgctcacagaattgctgacttggcaagtataacacctggagtaattatgtggcataagggtggtttcaagcacactgttctggagctcctttgggaagggccttttgtccccataccaggtgtagtttacagactcgccaggtatcacacatgacagtttcaaataacagttgtcatccatgtcttctatcttctcaattttgatgacaggcttgggtacagggtcaagcacttgcagcttgatcttccattcttgctcattcccagtctttttcaacaccctcatgatgtaggtgctgttgtcctctttctggaccttagagatgtacagtgcgccactctgaggatcaagtctgaccctgcctttaaatttggattcaaagtacttagattttctggaatcccattctacaatcttctggtcgaaagtataaaaccaggttagttgtttgtagttctcaggcaggctctcagagatgttcagagtcacgttgctgccggagaccacggtcatatgtaccaagtgaccttgaatgctggtca

SEQ ID NO: 336630 - DNA, 1000 bp, Homo Sapiens; identical to SEQ ID NO: 157833

SEQ ID NO: 336631 - DNA, 1000 bp, Homo Sapiens
ttttttttttttttttttttttttttttgtgtttattctacttttatttcacatatataaaaacagcttataattgtactgaacacaaaatacaaacaaatacattttattgcacataaaaatattttaaatgaagtattgaagtattgcacgtaatagaattgatttaggaaagtcacaaacctattataagactagtattattctaggtctgaagattacagaatatttcctaatagagatttgccacatcacatattgcacattttccaacactattctatgtcttgcaaatattcctcatagtctttgcttatgtcttttctctgtaagacactgtataaaagattataaaggcaaagaaatatgtaccatcgaaaaggacctgtctacagctgaggaagtaaaaaaataaatacacgatcatcccattctttttggggaaaaataacaaagtaaattggcaaatttctctaaaaagagagaaatattacaaatcttagtttcataagcatttgtccatttataaatgctccctgagtttaagggattcaattagactaaaaacctatgttaccagccataattcctttgtttacattcagtatctagtaccaacatctaactccttccagtagtgcaaatgcatgaagggctctcactgttggtagtcattcagcaataaatagtaagtccacgcctagttatttcattatttctggattcaaaataatataaagtgcatccaaaggttgcatagtcattcttctcattcttgggcatggttattggtcaacctgtgatgcttctagctcatggcaataaaagcccacagtgcagattttcctggaatttcttcctttttttccatagttctgtttggaagaaaattcccaagacactataaaattttttttcacaaagtctctatggaagacttcggaccacagagcagcatccactgacacagatttccttgagttccattctataatagtca

SEQ ID NO: 336632 - DNA, 1000 bp, Homo Sapiens; identical to SEQ ID NO: 157834

SEQ ID NO: 336633 - DNA, 1000 bp, Homo Sapiens
ttttttttttttttttctgtatgcatgtgtttaattttaagtgtcaacactgaaaaattttaacagataaaaacacattacacaacgtctacaaccttcacaacagtgagaacctcctgcccggccaggcagggcaggcctctgtaccgtgagcctcaggcagtggccccaaggggcctcgccatggggcctctgacatcagtcttagcttaagagggaagctgagccccagcgcctagtctcttcagttctgcagcaaagacatgagaggaaaagtccaggatgggacaagcgcccttagtctgtcccgagtactggccacaggtgccagggcaacatgctgcattgcagccctgggccagcccctgtccccaccctgggtcacaaggtggagcagagaggcagccagcagcaggaccagtggctccgactccaccccactgggtgtcctggactttggtgccagactatagctgccactccctcctggtggcacacgggatcagggagggagggtggagggagtagagtggtggacgaagggaggatggatggtcttcgtgtacaaagctgctgtggccacaggagctgctgggccgtccagaaccatgcgccttcatatgccggactctgatgccctgagggcccgggtctgattgtggccagtgccagacgtggtggaggtgaattctgagtacttgctccccccagcaactaggcaggcccacttccggtattcttcccgaaccttcttgttgagcaggcagtgcagcaggtagaggaaggcgccctgcaggcagttgaggatggtaaacacataggtcagcaccaagctccgatcgtcgaagatgaacaggccaaagacccaggtgcagcccaacaggaagagctgcgcgatggccgtgatggtcagcgccctcgccttctttaatttcttcatgtctggattgatttcagaaaacttctgagtgagcttccagacggtagtcacgaaaatgac

SEQ ID NO: 336634 - DNA, 1000 bp, Homo Sapiens
ctcattctgtagtgtttatttttccatttttaaaaaagaaagagggggaaacaaagaaggaaaatacaaagaaagaaggtagacaacgctcttgcatagcccgaagcccagagagaaagagttggctggcttgtgagaagacatgaggagttgggaaaaggaatgccagagttccctgaaccaatacaaatctctatgcaactcaaggctgccttatagagccagctccaggactctgccaccagctttcagctctgctgaaacctaatccattcccaggcctggatacaagttggtagcctgttggtttgcagagacatcttttaataatcttgggtttggccatccagaaggcctctttctgctcagggtttctgcagtgtctttttggtgacttgttagcagccagtggctggaatgttatcatgggctcatgtccttcaccagaagggcaatctgctcccgcagctgccgctccccttcctgcactttgctctggcttcgacacctcagcaactcagtcttgtggtcctgatgatgcatagggcagtagctctgtggttcacacagttccatatattctggaaagaagtctctgtagccgcctttaaggatatatagctctgggtagtacaatgcaggatactggttcagagacctgtcctcttcacgcagacagcggcacattcgggggcccctctctgaggagaattcacagtggaacacgatgattattctcttctgggtgtccaaagggacgatgggcttcttcagaaagaagttaaacagttcttcctgactatataagtttaaggctccctggatgtgtcctcccagatactcatatggatagcgacaatcaatgacataaaacttctcaatcagaccctggaacttccccgacagtaaggcagccactgtttctgggttgacatacttcagatcttggtgtttccctgacacggttggcagcgcacataccttggaaaaatcaccaatc

SEQ ID NO: 336635 - DNA, 1000 bp, Homo Sapiens
tttttttttttttttttccaaaattagcattttattcagaacgctggggtcagaggtgtatcatttatattctggtacacaatacagaggcaaagctgttgtcagaagtctctccagtttaaaagcttttttttttccatttttttttttaaaaaacacacacttagtagtgccaccagtgtcaggccacccctttctttcctttccttttttttttttttggtacaaattatgtaaaacatttgtgctaagaacttttctccctccccaaaccaaaaagaaaataaaaaataaaaaaattaaaaaaattaaaaattgagtattctaactacagctcaacaattgaatcaaatgtcactgttttgtaaatactttatccataacgaaagatataaacatgcaaaaaacctgaatccatagtccaaataatacatacacatgttctgaagtttctgcacttctccatagactatgccaataaaacattatgtacacatactatttttacagtgaagtggaaaaatacagaaataaaaaagtgtacatggattaagaccaaaatgtgtctaacattctagtttatgaaaaaattcaattttgctacaaattggtgatatgaaaactccctttatttgcaaccagctgagtaagttttaagattttagtgaaaaaaaaaaaacaaactaaagtctaaaactagaagtaatgtacattttccaatctcatggtctcatcccccaagataataaaatcgctccatgagtttttttgtttgtttaattttgtattttaataaaagcaaatgcaatgtaacaaaagcgtgttgaagcatatcatggtttaacttactgctcccaccacaaaatattttgtcttttacttatcgtttcagaaatcagtaccattaaagccttaaacagaaaactaattccaatctgaaaaaggtacaaaaaggcacataaaatcccagtgcttctgtactgtaaaattcaagtgtaac

SEQ ID NO: 336636 - DNA, 1000 bp, Homo Sapiens
cttctttttttttttttttttttaaaaacagtgcttctgttctaggaaattcaagtgaagacagagtgcctcttgctgtccttcagtgccagccagcgcggtgctgggcagcggccgggtgcagggcgctgtgggggtgggtgctcatgctagacagctcaacgtggggattggggggcctcctaacagcactaaggacacagccgcagggagtcgggaagaccggccgcctctgctcagtcctgctcctccggcgtccgagcacggctctcacttcggtccgaagatgcgaggtcagtcaatcctcttcaccacctccatacatgtccgccagcttcttgaatctgggcccccagtcgttgaggtaatcgtagtcttggtccccggaactggatgagttcagggagctgacggagcctgcggtggagccgctcccctcgtagtcgaagaccagcagggagtcataggggggtgccgtggggtcgttgtcagcagcgcggagtccctcattgatgaagtcaccgatgtcgcctgggtgcggcaccatgggcctgatcgggtactggggctcagcgcccaccggccgctcatccacgcgacgcacgccaggggctttgcttggcacgtgccccatggcttccggctgctgcagctggctgaggtcgtagtcctggtcctcctcgccaccgccttcctcgtcatacttgaggatgttgtcgcggacgtcgtcctcggggtcaatgagcagctgcttcgtgtggcgctccttctctcgccgcttcatccacatgacaaacagcaggaccatggtcagcaggatgaggatgcagatgaggatggccacgatggcaccggtgcccagaccagccgctgccactgcgccaatggtggtgcagtccccgttgtcatcacatgggcacaccttgactttgatgatggacgtgttggacaggggagggtttccagagtctgtgacgatgatggggacgtcatacatccc

SEQ ID NO: 336637 - DNA, 1000 bp, Homo Sapiens; identical to SEQ ID NO: 157836

SEQ ID NO: 336638 - DNA, 1000 bp, Homo Sapiens
aatctttgtctgtggtggtcaggtaaatatcaaatatccaaggacttctagacactccacatacttaattcacactccacaagatttataacctcctaacatatacttttttattttattatctttttttggttcaacattaaaatgtggttgagtttatagatgactggtgctaaacttgcctctaaaacaaatagccacattggttgtatctaaggggagtgaccctagaatattacagaatgctcagttccagtgatttatttataatccactgtcaagtttctttgtcactttcaccaacagagtagagttcgcccagtctcttaaagcggggaccccagtcactgaggtagtcaaaattctggtctgagtctgatgtggtggactccaaggagctgagggagccagccactgaccctcggccttcatagccatatatctgaatggagtcatatggcggggccgtgggatcattatctgcctcatgcagccttacatttataaattcatcgacatcaacaccatttggaactggagcaagcccttgccttggcataaactgcaaatctggtttaatatccttacggggtaaaaatccattaattccatctggattttgtaaagttgcaatgtcaaaagcctctgtgtcctcctcccctcctccttcatcatcgtagcgaatgatgttttctcgaacgtcttcatcatctttgataattaatggttcatttttatgccgccgtagagttacaaacagcaccacgatgactaacagcaaaatgatgcatgctaatatggcaattaaggcgcccatactgagtccaattggaaggacataagcttcgacattgcaagactggacgacaccgtcattgctgcagccacagaccctgattgtcaaggtgctagtgctgctcagtggaggatttccactatcactgattatgattggtaaaagatagacttcttgcttctggcggttgaatccattatgctt

SEQ ID NO: 336639 - DNA, 1000 bp, Homo Sapiens
ttttttttaaaaaaaaatctttttttatttcaaagattgcttcttatattgaagctcatattaaagcaacagtacaatgttcataaaatataagtgtgatgccgtaacattttcttacatgtcagaatactgatatttatacgtatactaaaataagaactttaaaattgtacaaatagatacattaaaaatgacatagaaatagggcgtctctcactgaaacaagacagttatatctggcacgtattagtttaagatgaaagtagaagcaaaaagatttacaagaatcagcagtaacaagattgatgctcaagagacataattgtacattgtattgtacatacattgtatgggtttaagctggctgaatattatatatttcaagtttaaaaatgcactacatatagagtgtccagagtttaaggcgaaattacagctcagaactgttgtcctttctaattttgtggaagcttctttgacaacttaaaaaagaagaaagacttggatgttcataacacataaacaatttcccttcattgtcagttcagcgttagacttctccttcacttaaatattttgtatgccaagtgttttttttttctagcgaagttgataaacaacttcaatatttgcctttttgtgagaaaaggtatttcacagtatttaccactttgatgtcctcgcagttttattaaatgtatcctctctgtaaaactttgcctgttttaaatgagcctttccttgatttaaaaaaatacctgtttacacatcttctagattcttgagaacgccagacacagttcttaaggccaaatttgtatcgttattgttaagaatcgtcatcaaaagtgtctttggaaccatacaaatctgctagtttcttaaaacgaggtccccagttctgtagataatcatagtccaagtctgaatctgtggtggccgactctagggagctcagggacccggccactgagcccctgccttcataaccgtagatttg

SEQ ID NO: 336640 - DNA, 1000 bp, Homo Sapiens
ttttttttttttccaaataactggtaataatttttattaagttttccctaatgcattttcaattctacatttcaagagtattgaacttttctcactttgggactctaatcagaaaaaccagaattaaatttttattttaaaatacatttaataaaaataacccatagttttacatattttacatgtgtagaatatttacaaactcacttctacagcatttacttaatgtttactatttttccattatttgcctttttggctatttccctcagtagtaaaatgttgtccagtgttctctttaaaaaattagtttcttgggcaatcctccttgttctaaggcctctgttcttttcctttttattgccaaagctggatttgattgctcctttaaggtttccactggacagtttggtcttggcagctgacatccaggtgttggccctggccgattactgaaatacttcattttcagtgcctgtgtggccgtaattcgagcacatggattaaataagaataagccttgtatgagatctagtaagtcgtctcctgctgcactgaagatgtgatgcaaaggtattccagggaaactcttaaatgtcacataatctggaagactacacatgtccggccactgttcctcagttggtgtgcccaaagtttcaaatattcttgttagctgatcaaggtctgaatctcctggcaaaaaaggaacccttagaagtaactctgctaatatacagccaacagcccacatgtccacacctacaccatacatcctagctccaaatagtaactcgggggcccgataccacctggttacaacctgatgtgtataagctctattggggctcccaaaagatttggccaggccaaaatctgccagttttagaactccattttcatctagcaacaagttgtttggtttcagatccctatgtaggatccaatgttgatgtaaatattctaatccttgaagagtcatcaacatgtaggctttgat

SEQ ID NO: 336641 - DNA, 1000 bp, Homo Sapiens
ttttttttttttttttttgatcatgcacaagtcttaatttaatgggtaaaaacattaaattattacaacattttttccaataaagcataataaatagaatccatttcttttaaaacgctgtacaagagactggaaaacaagcttccaacagaatatgaataactcataactcattctaccttcttattgatttgggacgctccccccaccccccatgcctgaagcaacgtgcacacttcaggtctctgagcacagccggccaaggccaccagcttctaggctccctggaggtcatgacttcactcttaaatgctctgcccttgggtctcgtctgaggccccagcagcctgaggcgcagaagaaactgaaccgtttaggtggctgtggcctgcaggagcccttctctgtccaacacaccaaaaggagtgagaaaaacaaatgagaaacgtcccccaaacactcacacccccaaaaccaacacctataagccacaaactgtgctcctcccctactgcagcagtgggcaggagaaacaagaagagaaagtgtttcttcccctctcttctgatacataaccccacggggttctcttgctggagagggtgaccccagatcacagcggggccaccatgtggccctgcaggatgtccacgaggtcctgagcccctctctgcagtgccagctccaagggtgtgagacccctggcgtccctgcgatggagatcagattcagctgccagaaagctgaccacagcagtgtgaccctcttgaactgccagatggattggaagtgccccggtgccatcaggcacgttgacatcagccccgtgctccactaggaccttcagggtgtccaggaatccagtgcgggctgcgtcatggactggactggtaccggaggtgtcctggacattggggctggcaccttgcttcagcagctccagggcgatggcggtgctgccaaacatcatgacctgcagcgccgtcttgccgaagcggtt

SEQ ID NO: 336642 - DNA, 1000 bp, Homo Sapiens; identical to SEQ ID NO: 157837

SEQ ID NO: 336643 - DNA, 1000 bp, Homo Sapiens
ttttttttttttttttttggctgttaaaacgttcacccccacaaaaggggagtggacagatttattgaaatcaaactgggaaaggagcagctggacggctggactctgggcccagccccaggcccctctgcccaggatggggccctgccagagagggaggagaggcatggggcctgcagctgcccacaaggaagcgcccttggttacttccacggtggggggcctcttggaaacctccaatctggaaagaaaaccaagggccaaagtcacatggacagggccagagaaagggactggggaggtggaaagcaggcagaagcaggctcaggagcccgcagtgagttaaactgtgcttctcaaggcggcctggggggtgggggtgggggctgccagccttgcagggggcctaggctggaccttcttctggagcccttcccagaatggctttggggtccccccaccaaagacctgacgtggatggcagaggggagaggcactctccggccgggaacctccagggcccatccctggctgctgctgtggttagtccactgagggcacggtgtggtagcaccggacagctccccacccgccccacctggtcccctgagcccagggccaaatggggaggaaagaggattctgagaaagaggcaataagcaggcagtgaggctgacctcagccccgggcccggccgaggtgaccgggcctgttgcaggaccaggggaagcattactaaaggatctggggctctgcactctggctccatgcacagcgggtgcccagagagtcctctgccctggggtggtgctgccaatctaggttgggggcacagctaggtccagtgactcagctttgatgtccaagacctcgaactcccgcctgcctggcgtggttcttcctggtcacatgaaccagatcgtgttccaagtggaggatgtggctctgcacgcggtcatcaatggggaaggaggtcaggtacctcttgaccatggcaaag

SEQ ID NO: 336644 - DNA, 1000 bp, Homo Sapiens
ttagtatttggaaaagatgttttttaatgagtagacatattaatcaggtctcttttgacacagaaatgttctatatttcattttcatattcttgtcaaattataaaaataatatcataaatatggacatcgctacaagctattatgtacagtcactgaaaaatcagaaaaaacatgtgagttagaaatgtttatcaaatacaagtctacagaaaactgaataaaatttttattttaaaacatcacaagtaattacaaagacaaatattccaactatacaaactgtttttcacatatacatatatacatacatatatttaaggttggttgatctttcatctttttatctgagtaaaaagaagaacactttcctcattccggagatttttgatgttataatagttacctgaaggaacatagaacgaatccccagtacttaatatataaggtgtttcatgtaaagtacacaaaaggtcaccaaagttaacataaaaaaccaatatatcctggccaacatgctgctttcccttttcttcttgtggtcctaatatcaatttcccagtagaaaaaaagggtgtatccaatgtcttgtataccttcaactcaccatgcttaacaaaaaattgatatgtatcttgtggccttacaagatccatgagaataatctctcttgtttctgggtcctttaccctcgttggctgcaaaggatctccaagaggtatacctagatttaccattaagttagtctttctttcatcgttatcaagacagatccttttcttattagattttttgttgacttttccaatattttcttttgccttccttttagacgatattgtgtctggagatagtactccactaatcacgaatcctcctgatggccttccttgataatctattcgctctcctcgccagtactccaaaggtttcaaacgtgttctcttggtcctgcgaacatttggtgtgttggagggcaatactagtttgtgatggattct

SEQ ID NO: 336645 - DNA, 1000 bp, Homo Sapiens
ttttttttttttttttttggtgattcagaactactaaacatttattgaatgtgtaaggtattaaaaacatttacaattttgttaataaaatgatgttttatattaatgtatgtattatgctttggaatatgctaagtcatgtagataactttacatttctttcaataactttattctttacaaaatatacaaataaataaaacaattcaacttttaaaagtattaccatatgcaagaagaaggtattgctatcaccattctaaattaccacaatgcattcatttcctgttcccttatctttcaactctagtggcaaagtaaagactgaattgaaattaagctgcactacaacatcattaccagggatagacacataaacaaagtcatttccaaataaggaatgctggatctccagagaagtgacaaagaggagtctactgagttttgcactcaggcacatccttgcctgaggaggcgtgccaaggacctggctgagaatccacactctctgctcctgcattttgcacctctggacaaaggcctaaacttgagttatcaaaatagcgaactggatgaggtgatggtaaagactttgatcggctatcaaaaaaacaagattttggtgattcctttggcacaggatcttgtaaattccgttccttgcattgagagggtgtaatttgtttctttttagaagctgttccagtcactttaggagactttggagaattctcacaagttacttgtttgtgagcctctcttttaagggttctttccttccaagttttgacctcattggaaagatgctgattattgcttaacaattcattcttttgttttattagctgttcattttgctgctttaacttagaaatttctttttctagccttatatgttcacttttcaaaataagagcttttgtgttttgtacaatgccgctgccacctccacaagttaagggtttatttgaaggctgaggatcagtatgttctgatatca

SEQ ID NO: 336646 - DNA, 1000 bp, Homo Sapiens
cactttaccaattaatcttttattttttattgcatacatcaatatttaacagaagaaaaataaagaacccctaatgttaaactgaattacatgttatcttctgattcttttcaatgtagacctaaattttcacatgtatcagtaaacacaatttatgttcttattaacatttttgaatctcacttttttgcatacaatttgacatatatcaatattattgaatggctatataacattctgtgatagcactagcaatacaccaaaatttacttaaccatttccaatcgttgggcttttttcccccttaaagttatctgagtggaactgctagaaaactttgtacaaatagcttttctttcttttaaatattttcctgggcatatgccactcaaagtgagtatgtcaaaagatcagttataaagccctttttatagtcttctacacagttctcttaaaaggctactaatacacaatgctgctgctataaggacacatgcaattaaaacagttttgctaatacaatagcatgaactaagtcaaagttgcatttttaatattaggaaatttgaataccattcaaattgattttttatatcatttatacacgatcgctttataaatttgcctaagagtacaaacccctatggatatgcatatagttttacaaaaactgagtgcatccatgtgtaatgcaaatagcttcttttaaattccatcttgttttgtctttttcctatttactacacatttaaaactttttctcttagttgatctaccttgccaattgccatgaagttcctttataccactattggtgtgagacttgtagtatttttctttttatacttaacattttaattcatttggaatatcacatgtaaagtggatctaatctttccacactgacatctagctagtctttccaccagcagttattaatatttctttctttccattggcttattaatttcagttaaactttctacttggcaccacagaa

SEQ ID NO: 336647 - DNA, 1000 bp, Homo Sapiens
attcttatgagaaaaaagtaagctatcaatattttttatttctaaaagccaatttaataaattaataaacgcatgccagaaaaaataccaaattacaactgaaaaccaataataatttaacagaaaatgctgtgttgtacactttttattggtatggataacctttattaaagtaacaaatctgaaaacacattttgcttttgctggaaagaaagtactatgttagagaagaactaagagaaaccagaaatcatttgtaaaatgtaggcatgtgatatggtttatggtaatgtaacagccagaggtgctgttttatccatttgtgtgtgcgtgtttgtacaagcatcagaaaccaatgacatagaccccaaaagcaaagtcacaacaggcttactctgtgaaacatgctggattacaagcacagactacccaggacgcagaggcggtgcaggcgcaggtttgttgtttcttctgtatggggtttccttgccagatagggggctaatcatgcaatagcttgagtttctctgaacgtgataaacacccaggattactagaaccagaaagcgtgtgttcactgttttacaagacagctgagcggtgctacaaaaacaacagaaagttccttcactttaatctggttatatgcccaaacctctaatcaagaaataatgcagctacaggagcaaattaaattactataaaacattccttcatctgtaaaacatttcttttcccctcaaattaaaaatttaaaataaaatgtcttcgtttttgataagcagctccaccaccagtctctgataccgtatatcattcaatgcagccatggcgtctagttctggagatctcataagggtgggtccaaagacgattccaaggttctctgcattcataagattctccttttcgtggagggtcactctctttagatgtgccatgaggtaccggagggtttcgcagtgagcaggtggcagtagtttcagtgcttcatgaaggg

SEQ ID NO: 336648 - DNA, 1000 bp, Homo Sapiens; identical to SEQ ID NO: 157839

SEQ ID NO: 336649 - DNA, 1000 bp, Homo Sapiens
atattaaggagagttttattgtaaagataggcaggatctacaattttatatttttccaagtgtataaaaactctcagagtagagatttatgtctgttgtaccagcagacagattatttataaattgggaaagggaaagtttactttttgccaaactgaggcagagggggtggcaccttaatatcttggcctctctccaacttcttttcacaatccaccaggtaattgactccatcgatgactatctgaacaagctcaacctctgatcgaccaattctatctatgttggaaatgtcgtacacatctgcgaccgcggcagtgtccacaccacctgtgccacgcttctggagtcttaggttttccaggatcttagaaaagcgtgggtccttgctgagctttgggatcctaacgtggacaccagctcgtagtcctgttccaaggttcgaaggacaggtcaaaatgtatcctaggcgctcattccacatgaactcccagcctcgttcttggattaaccgttctacttcttttagtccacgacagaatcgctcaaatactcgtttcatattgcctcctttttccattgagattaccctggtgtgatcctcctcatttatccagatgagaaatgtcttatcataattatgccagattcccctggcatctggccagtcacgggccatcccagcacatgttaataaaggggacactggcttatcaaacagaaagtggtcatcgatgagccgctgctggtcctgctccgtcatctcggacagcttgtagtagcggccagccaggtcccccttgaggccctccagggcagtgatggccacgttctctacctcccttcgctcggcccgggtgcaggctggaggcaggctcagcccacggatgctgcggccagtgcgcacccgagaagacagcacgtaatgctcgtcgaactgcccttgggtgatctttgatgcatccagatccgttgtgtgcttcatcaccctggggtcata

SEQ ID NO: 336650 - DNA, 717 bp, Homo Sapiens
attataaaaacttcctctttaatcaaggcttttaacatgaacagatttcttgaataaaatggaaagtttccagtacactgaaacataaatccgcaagtcaccacacatacaacacccggcagaaaaaacaaaaacagcaagtttacatgatccctgtaacagccatggtctcaaactcagatgcttcctccatctgccaagtgtgttctggatacagagcacatcgtggcttctggggtcacactcagcttaggctgtgggtccacagagcactcatctggctgggctatggtggtggtggctctactcaagaagcaaagcagttaccagcacattcaaacagtgtattgaacatcttttaaatatcaaagtgagaaacaagaaggcaacataataatgttatcagaaagatgttaggaagtaaggacagctgtgtaaagcttgaggctgaaaagtagcttgccagcttcatttctttggtttcttgggtagtgggcgccggaacagcaagatgtgaggttctggttcatggatcatataatggacccatccctgactctgctgaacgccaagattcctccattcagattcagacatcagatgggttttagggaccagcttggctatgtccttgggcagcatgacatgtcgatactcaaactcctcgtcgtcgtatttgtccgaatagtaaatttgtttgtgcgacatgatcgctct

SEQ ID NO: 336651 - DNA, 641 bp, Homo Sapiens
ttttttttttttgaagtttgattaagttttaatgagcaggagtaaggattgaagtgagaaaagatcatgctgttagctggctttggaatcccaagttcacgtagagacagggattccttggcaacatgaagtctggttatctctttaaatagctgacattaaatttggtcagggagatatctctccacacttgcaccatcttcacagcctcaggcttgattctatggtcaaaggtgtaagaggattggccattgaccattacctggtacttatctggcagcactgagatgctcagttcaaattcttggccatcctgaaagggcatattcttggattccacctgctgcttccaggccccatactcacggctgttcatgaccacacgacgaccaaagcacacttggaaatggaagacaatgtctgattcctccttcatctcagtgtggaaatccacctgcagatatggttcattcaagaaacaggcaagtggtcgccctttgattgtcacagtagaaccagtagacaaagaggcagcctctgtgtatggcacgggtagcagggacattgttgtctccttctgggtggctcttctgaattgtgtccagacttctgtgtgaatctctgagctgcagaatttaaat

SEQ ID NO: 336652 - DNA, 1000 bp, Homo Sapiens
cgatgatggcatccaatacagcaaacttcccctcctgaagaccaacactcttccttaataagataatatgaatttcgttcagagagtaatgtgcctagctcaatattttccttcccacactagtgtgcggctagggggagccacgtgacagacttccagtcaatggatacaagctgagcgtctctggggaagctttgctttcctgatagacattgtacctagttgcttgcctctcccttcctcttcccacttagaaagcagacatgatacctgacagttcaggaaccatcttgcaactctgaggcaataagccagaggacaaaaggtaaaaacggtgaaaaagaaatagcaacgggatggggatcccaatgatgttatggagacagtcctggagtaccccctctcagggttcttatccagcccttcagtgtttgctgggttttctgttatttgcagccgaatgcacacctaagtgatacagcactatccagtgacaatgagattgaaaaggatgaggggcacttagtgaaaaggaagggacaaagactaaagagaaagggcaagtgggataatcttacttacacagatcgtatggtggacctaatacatagcttaattccttcccgcagaaaagaccgaaatcctgactaaaagagtaaatgtgtcgttaagttcaaatacaaagatgcccagtgcccaaattggctatataaaatttaatgctgtcctcctgtgctgtgattgctagtatgaagtgcatgcttatacattacaactggatgttttgcatcctacagagaagataatggaacagatttagaatcaatttagtatttctcttgcaatccatttggagggattccaactgacaacgcatatgcctcatcctctccacagccgtatctgataagacctgagaggaaaaataagtagtaacattgggtagcctgtttggactcttgcatatgctacttgaaaatgaaagcacgcttatggcagg

SEQ ID NO: 336653 - DNA, 539 bp, Homo Sapiens; identical to SEQ ID NO: 157841

SEQ ID NO: 336654 - DNA, 1000 bp, Homo Sapiens
ttttttttttttttttttgccatttaccaaagactttttttttctttttcttttaaagctgttgtttcctcaagggaaaactttatctgtgtgtgggtaaaatgttgctctcttaacgaatcgaaagcagaacatgaggagaggttttcagtccctgtgacaaagaacaaagaacaagctcgtgggccttgggcggccactgtcaccctccccgcccctgacatttcccttgtcctctcctcccatcccagtggagccaagagctgagtgcatgtcatccccactctggagcccagagtgtggctttgatcacgcggaggcagctggcctggcctgcaggaaacaccacactctcccctgttgagagcctgggagggcgacgcggcaagtgaggggatgagtgtgcttttagggcggcgtggcagctgccattcccgctggcttggaggacagtgaagaaaacgatggagggaggggttcagagagtttgtttgaccagctgatgtccgcttttcctcaccaagccaagaagtctccccactatctctggtcttggagataaggcctggttttcggaagagctggtctgagcatttgagtctgtgggaggccagaaggttcattcagaggactcttcaggccactcccacgccccttgcactcaccctccttggccccttcactccagcaggtgggaacagtttctggactttcactttcagtttttggtttaggggacaatagcctctgtttcccagtgttgtctgtctggtgttagcttatcagccctgtctttttttggcattggttgaggtagctgggattggggtgaagctatcttctggagcaggggcttgcactctgaggggagagctgcttttccctgagcagcttttggcggggggatgtcctgagtcattgcatctgctccctatccccaccccagggaccctgggagaggtccctctagtccaggcagaagagtcgcctatggggagaa

SEQ ID NO: 336655 - DNA, 1000 bp, Homo Sapiens
actttccaataatcttttcatttttaatatcaattgatgttttaaaaaatacagaggtgtttgacacagaatagcaccattgtgtaggacacacacagttcctgcgcccggcacctgaagggaggtcttctggcctgggctgggggcagtcactcagggggcatttgactcacaccagttagtttcctgcctctgccttgacccgaaggtcttacaggaagacaataaataaatagaacaccgagattttattttgcagtctgcccagttcaggtctcttagaaagagaggggagaaaagtccgaactgtgagagggtgggatgaatggacatcaggtcaggtcagccattcagtgcagagtcctagagtgactgagattggaaagtacttgggtcctttgggtttgcaacggattgtgttgtttctgggttcaggtttttacaagaagcagaccggccctatgtccacaccgaattcctgctcgggccctcctatgtccatgggtgcaatgtcaatgatggggaggcgtgaggtcttctgtgaccggtactcgataacagtcttgccccacttaccggtatgtttcgtgcagccatccttcagggcagtgtacgtgaacctgctattgccctctgcccggatctccacgtcattggagccctggatgagcagggccttcttgaggttgccagctgcttcgtccagataggcaatgctgttcttgcagtggtaggtgatgttctgggagccttccgtggacagcaggcgtaggaaggtcatctggacgttggcagtgttgggagccagattgtcatctccatagctgaaatggaagccaccattgatggtttctccaaaccagatgtgtttcttctccttgctcttgctgctccaccagttcttcttgggaacgtttgctggattggggtagacgcaagtctcgccagtctccatgttgcagaaaaccttcatggcgtccaaggtgcagccttggttggg

SEQ ID NO: 336656 - DNA, 1000 bp, Homo Sapiens; identical to SEQ ID NO: 157843

SEQ ID NO: 336657 - DNA, 1000 bp, Homo Sapiens
cagatttcatttattttatttgctatgtacaaaactgacaccatgcttattactcaggaggtaaagataacaataattcagattatattgattatgctttgtctgtattggcacagtttatataatacttaaggaaacagaatcacctggaaggaactgcctcatgtcaacatagctaagagtgttctggaaaactggtaattaaagaaaatggctaaaacaaattcccccaaacagaatacaatgtactgcatagccaattcaggcttgctttaggtctgctaactgctcaagagaagagtgtgctagatttttatgaggtttaaaaaaacatattaaaatagtttaataggctacctgtgaaagagcaattggataaccatttaacaaagtctttaacatcctcagaatacaaggaaaccaacactgtgcagcttcagtttgccacattgcacacatctggatggcatttggaataaacagggacttctgagaaactgggatgtgggatttacctttttgttcctggagtcaaaagcaaaactcacacatccttacgcacccacccctctacttctggcccaggaaaaaaggctgtcattctcatttcctttgataggcttggccacatttgttgcatcctctgctttactttgaaccaggccacatcctctgtctctggctggagggggagccggcaaggaggagatggtttgtctaggaccatatgccattaatgaccaccacccccaacccagctgctggccttcaagcctctctaagccatgtggggcccagtcttgctcattctagagagagctaaagctcactctgggctacttgggtggcaccctcatttcaattctcttgcctgcctaagacacaagtgggcctccttgaagagtgaggacttgctctgtgcagacttgagccatccatgaatattcggttagagaatttaagtgtggaaacactgggttctggtttaaaccaaataatg

SEQ ID NO: 336658 - DNA, 1000 bp, Homo Sapiens
ttttttttttttttttttgagtattaaacatgcatcttagtttttatttgtacacaatggtccaaattttcacttacatataactttccaactgtgtaagtgttttgaagcaattatgtttttcatttggattttttggtgtgtcattttcttctataaaatctctttcttttctttgttttttgtttttttgtttttacatgggatacaataaatatcctgaaaaggaggagtggacatactgcccggcatacagtcctgcagcctgttctgagggcatctggaggaacacccggtctccgggcctgagcagcagcactgcactcccagatgcctggtccaggaagccctttttgtactcgtcgtacgtgtacatcacgggctcgttgttcttgaatagagcaacccacacgttgccccccttgcagtgaacgtggtatgcaaagtagtagacaccagggacctcacaggtgaagatgcctgtctgcgggttgtagttctgtctgccgttatacagcagtttgttaaacttcactggggcccccaccggtgggaaaggtgcggttagctcggcggtaaatgcaggcatctcataggctggccctccattcttgcctttcttagccccgtaggcatgggggggtttcacgccatcaattcccagccccatatctggcagatactctccctggggtggtggtgtagggggcatcacagctgggggtcctggaggtcctggagggcctgggggtcctggaaggccaggctggccttgaggaccaagggcaccaggcttccctggggggccatgaagtcctgccactccgggtttccctataccagggaacccagggggccctgggaggcccggctcccctttggggcctggaatcccaggtggtccaatggggccactagggcccccaatccctgggatacctggggggccctgtaaaccctgatcccctgggattcctggctctcccttaggtccgagaag

SEQ ID NO: 336659 - DNA, 1000 bp, Homo Sapiens
ctagttaactccaggatagagtaactccaatatcctggtttgtacccaacttgggagcttttatttacagaaaggcctgggtggatcggggagaaaggggtggggagttatgcgagaaagagaagggagatgatgtttaaatactgagctgggaggcagggaaggaagtagtggggctggcttaagggtatagccgcctcaggggagtcacccagcagcagtcacctggtaggtccagagagtgagatgggatcaggaactggcatagacctcagtcattggtcctcaagctgaggggtggaactgtagctgggcagggcccgggcctcccgaggtgcccatgtcccactgacccaaggacaagatggccagtggagaaaggtgcagattaagatgtttgttttggtaacagccgaatgatgctcgctggaaggaaagccgccctattccttcagcgcttcgactccatcgacaccacttgccctgtgtgttggcctcactttttcacccatcagtgctctacctccccttcccccatgttttagaattccttttccttaggactcctgagtcccagacagaaggtcctgggggagatggtttcctggactggggatgggtgcatgtccacccagaggggacctggtccttcccgccaggatgcctgccaggctctgtctgggcctgatgctcaaggccccttgatggatccaggctctgtaaggcgggcagaggcataggccgaagctccaaggcaggcggcaggttcacagaagcccggcagccccacggggcctggcaggccaggtcgacctgcctctcctggagcccctggggaccctcgatctccatccttgccgttgattgcctggccaggccggccagggagtcctgggatccctgggggcccaggcatcccggggtgcccccgtcccacttctcctggatcacccttctctccacgttttcccttgggccccgtgttgccgatctgacccac

SEQ ID NO: 336660 - DNA, 1000 bp, Homo Sapiens
cccggaaaagatgtttttatgttcacttacatggaaaaaaaatccaattatacaacatgtagatatatgtttctcagaaaattcatctctatgaacctgtttgtttcagtcgcagttataattcaacaattgccaaatggaagtcataaaattgtggggtgggggttgggggaggagagccgccaaggggaaggtagtaattatgtgctatttcttttctagtttcagattatttggagtttcaacttttccagcaagtcagagttacataaacagacaccatactaaaatatgattgtgtaaaaatataaaaattcctaaagcatgatggcaataatattttagggaaaaaaacattagagtctgatagcatcagaaaatacaaataggatcatttgagcagtcctgtttctgtgtacgaacagcagttgcaaatgatggatgtacgtgaaagaaaaaagcatttgatctgtatataacttagaaagggtaacatttctaaacactgactttataagaaaacatgaaggacatcttacactcaacaacaatggtttaaaaggaggatataactgtctgaaggatgcagtggcagaatctggcctttgttttcaacttgctcttaacctatgttgggatgcgttcacactgctggggtttcctgcagaatctagcaccaatatatggatcagattttgtctttgatctgagtcctctatgtcttcagttttgagtgtattgaggtatgttttctttggttgctgttgtaaagaatatgtagtaaaaaaaaaaaaactgtaatatttacaacaattaaacattttagatttcagtgtcaactcttcacataagaaaaaattgaaaactctttaagaatcatcagaaggccattacttcctagcgtctgtcatgaaactgttttcgatacataggacaattagccgattagcacagctgtatgctttctggtccagaatcttccccgtgctcagcggggagg

SEQ ID NO: 336661 - DNA, 1000 bp, Homo Sapiens
tttttttttttttttttttaaggagggaaataccctttattttttaatttttatttttcggagactgagtctcattatgttgcttagactggtctcaaactcctgggctcaggcgatcctcccacctcagccccttgaatagctaggattacaggtatatgcccctgtacccaaatgccctttttgttcctgggactaaacgggaaaaggagggcaacagggagctctggctgcagcaccagaggaacccactggaagggaaagggcagatagttttgtttctttattatttaaaaaatattaacagcaattaaaaacaacaacaacaaaaaaaaaaaacattcacaacctgtcacagagtcctataagctttggccatttattcccaacggagtctttcatccaaaggcaggtggggaatttcagccaaaaggccccttcatggttttcatgggtgggtactgctgctccatcggcatggccccaaagcagtcagagggattacagtggccagccttgcctggctggcccatgggacccgggggcccagggatgccagggatgccttgctggcccattggtcctgttgcacccatcttgccatagcctggaggaccttgaggacctggggggccgggaagaccattttctcctgcaatgccaataccaatgtcccctttttcacctttggtaccaggcaatcctcttactcctggcaagccctgccgtccttctctgccaatctgaccagggagcccaggtgaccctggagcacctggcctgcccggagcaccatccttccctggaggccctggtcgtcccggagctgccgccatctccatggggaactgcatcctggaggtgtagtaagccattctctcatcaaacattttaatgatctcttgtctgatgaacctcttgatttcatcataattcaccatgtctcccatggagccaggcacaccaggcaagccagggctccccgaaggccccggagctc

SEQ ID NO: 336662 - DNA, 1000 bp, Homo Sapiens
ggtcagaacctttattgctgagataggtgacaagctcattatgcataatgaacatgtaggaatcaaggcctcaaagcattatgcccatgtgggattttgaataaaactaatgccattgcacttaacatgagtatattcaattaaatcgtaaagagtttgatgaggtaagatagagaacaaacaaaatgggggaaaacacaccctaaatgttatttaaaaataaatagttgtaaaatacacccaatacaacctgaatttaaagacattaatgtgctgaaaaacatttatctccaaaatgtactttgcataacacaatacaataaaaagttgtaaaatagccagcatctttacttacacccagaagcttagtatggtcacacaatacacacacttctgataaacttaaatcttatttaccccctcatttagtgaagcctcccactttattagtattcacttttgacaaattcatgaagcaagtagctaactcctccagttgtaccacatcactcactattggatctgaacacgcaattttttttccatttagattttcttagacttagctttggtcttataagcttgtcttatctttcagacaaatttttgctgtgctgggtctacttgtccgaataagttttctctgtgttcacttggttcttcattcaatttaaccaaattgatcagttactctagcattattttgttgagtaaaacgtttggattatagctccaagtatgccacacaataaaaatgatgacactcatctgtcctattgcctgagacttttagtagttgaataaatttaagataattaatgctatcttaaccagccaactaataaatgaacacaattcaatggactaagtcactttgaattacataggcatacaagatacaaattcaattatcttctgcatctcctcctcttcaaagcctgcatataatctttgtgagcagagatggtacaaaagggggatggtacaaaaatgtgtcaac

SEQ ID NO: 336663 - DNA, 1000 bp, Homo Sapiens
ttttttttttttttttttttagaatcacaaaatcaaaatatttattttgttctttttcatatgacactgttaaaacattcctactacagcaatactgctctccaggagcttacaatctaaaacagtcaacattaattgtagacccagtaattaaggcattatatcaaatgcagactttgtatcttttttttttttgagacggagttttgctcttgtcgcccaggctggagtgcaatggcgccatcttggctcactgcaacctccgcctcctgggttcaagcgattctcctgcctcagcctcccgagtagctgggattacaggcatgcaccaccacgcccagctaatttttgtatttttagtagagatggggtttcaccacattggccaggctggtctcaaactcctgacctcaggtgatctgcacccccgcttggcctcccaaagtgtgtgagccactgtgcccagcccagagtttctatcttttgatgtttcttttgaaggagcagctggagagggcaggatcaaaattaaatcacatgaaagtgtactcccctccgcctgctccttataaggaaccccttatgactagaacccaagaccagtacccacagcctgaaagggaatttcagacaaccctaccatagaagtagtgaagaaaccttaatttctaatctcctagtggatacagtgaggatcccatttgtgggcaatggggatgctgggagttcctccctcacagactagagatagcacccaagattctgtaactctgggaagggtaccagccttatagaaattccagtggggcaactgcctcttgaaacatgcttaaagtctcttaacaggtttataaatgccaatttctggttggtattatatccacagcatagcactgtctactgcatcaggagggctatggagacttaatatactagacatgcgattaaaaaaactgaaagaaaagggaaaggacaacagagtaagggggccaaagaaatg

SEQ ID NO: 336664 - DNA, 1000 bp, Homo Sapiens; identical to SEQ ID NO: 157846

SEQ ID NO: 336665 - DNA, 1000 bp, Homo Sapiens
tttttttttttttttccaatagtaatgattcacttttattatgatcaatacgaaaagatctacctagtttaatagacccagaagcttaaaagaaagattgggatctgcaaaacatccaggcaaaccaaaataagaattcaagaaagaaaagaaatgaaaaatgagaattttgaaacaaggccatcagctttctcaactagtacaggtgttccaggacgtagctggcaacatacttgattgccaggaaggtctcctcgcaggtagcccggatctgggattctggaaggagaaagccatatctgcctgtatctcgaagttcaaaggtgaaggaatatctgattccttggtcataagcccagtcgtcagagcccccagcagcaggatagattgttgtagctcccgggccatatgtgtacttggtgccgtgcagtgaggcaagttctttcacagtagctttagccagggcattcaactcagcattgttctcaccgagtttgtaagcatatgagtaagggtagatcatcatttgggagtacgagtggattgtcagatatgccttgatggaagagagtttgttgcggatgaaatcagccagggccttggtctccttttcagactctgcggcaggtccacagtaagtttcatcacaggggtttcgagaggctccaatttcacaccaaccagcatcaaaatttctgttggggtctgtgccaatgcagctagatccagtatgggtggagcgagtctttctccaaaatcggctcttggtccaggtgtagatgtagccatcaatattgagcacaggcaggacataaaagtctaacttgtcgagaagctctgtcacttggatctcacgtccataggtacgaacagcctctcttacaaaccactggcagaatgcaggagaaatccactctctggcatggaaaccacagtccatgaaaatggcaggcttattttgtccagctttgccaaccttcaggaggtaaatagcgcgtcc

SEQ ID NO: 336666 - DNA, 1000 bp, Homo Sapiens
ttttttttcactggggatttttttttaacctttattcattcagaatgcaattctgggccactctacaaccaagagaaaaccctaaacttttaagtagtgttaacggactacataatataatagtattgctcctatatgtacaagcaagaagtcaatttttattcttttcataaaacctctttgtaaacatgtaccttttcttcccatcaaaaatgcattaacaagatcatgcttatagttagtcagcacaagaaaaaaacgacaatttatactgaactatttaagtcttgcagtagagtgctcacaactccgagctgtatctgttaaccttttcaatagcattcattatgtgacattgtcaccaattacagtaaaagaacttcactaatttttgaaagctagaattactcaaaaaattctgcattgtaaataataccaggaatattgcatttaagcctaggatggcaaaattacttaaatcttttctatacttttttgtgtaatataggtaggaaaatgaatactatataagagaatgaaatatatcaagttcttatatttttacctaagaggctatttattttaaggaaagttgattaatatttaaatgattaaaaaataaatcaatgttaagtattaactgcacaaaatctaaaaaaaagaccacattacatcatactacattatatagatagatttaaagcagctaactagaagcctttttaaaaatttaaagtttctgacatcattttccaccattccatcaattcttccttctcctcttctttcctttcagaaaatgactccagttcaaaatcaaccccagcagcagggctgtaaggaactgccactttctttgttattgccagatagcctggagctgaggctgtaagtttatagtttccaggtataagcaatctccagtaatcaccatcctttgcggatgtaacatcgtggtctattccttccacggagatggtggcattcgcaattgggttac

SEQ ID NO: 336667 - DNA, 1000 bp, Homo Sapiens
tttttttttttttttacctcttaatagtattttatttaaaagttcacaattagagcacttgtaataacagaaaatatttaaaagtaacaaaggctgcccttggggagagacttttttcttatatgtagaaggaatggtgtccttgcccttacagtgggtggaattaatagtgcagtgtgggaccccatagttcaacagaatccatcgtcttaagggaatgaaccttacttccaagttattccaaaactgggggagagtgtgaatgacaaaaatctgattatttcactcgggccaagttaaaatccaatgataaaaacaacaacacatctacataaacactgtctaccatctgctgatatagtccagaaaacaaaactgcaaaccagtattccttaaagaaatccatagtctaaagcaggagaatcgcttgaacttgggagacgcaaattgcagtgagccgagattgtgccactgcactccagcctggagagtgtgactccatctcaaaaagaaaaaaagaaaaagaaaaagaaaagaaaagtccatactctaaatgcctctgtcacatttctcaacttcaatataatgggaagggataacaatattcctggattagccaaatgggtgagaatgaggatccaaaaagaagcaatacacaaacatcatgatggaaggttcataaattaaatctatatttcattttatcaagtttttagagtattctgccctgttaaagtgtcctgagtttgcagatagtgttttaaaaatagagtatcttaaagtatagaaagagttcagaaaatagaacagcaacttttcctaccttgatcaccattaatcagcaccataaaaagtaaaaagctacacataagcacataggcaagcctagtccaccaaaaatacagtattagtaaatggatgaaatctcatgaagagtaacttaggaaggactgtaaggttttgaagaagtgactgacaatttaattgcaaaagacacaga

SEQ ID NO: 336668 - DNA, 1000 bp, Homo Sapiens
ccagacgggaacggttacccacggtgacaaaagcaggtctccaaagcacagcattttggttagtgcattccagatgtgttagctacaactggggacaccaacttgaataacacatttttcttttaacaaaacaaaagtttaccctgcttggatgatgctaaatgcccttaagcactaggccttcggttgccactgagaaagcacaccatttccattccactgtgtgtgaagccacaaccctactaattccttcattaactcaacaagatttgcatcccttaataaatccaagccgatgcggagacatcaggggagactttatcagatgtcccccaagggagggcaagtctggaagtagtggggttatgcttcacaggggagagatactgttctaggaaaaaaaaacacccacattttctggaaggaaaactgagtttttttaagagcagtgtttcatcccgagctaaggtcaggattaatgcctatttttcatttggtttgcatcagaagagctcgttttccttcccagcagctccagtggaattactttttggaattagaactgagaccaaacaaagtgatgatgtcagtcattgcttctttcaggtgccttccaaagcgatgagaatccgtctcagggcaagagaacttggaagaaatgtggaaattgatgaggttctctcccacaaggatgtacgacacaccatagccgtcatcagcaaccggtccaaagccccctccgctggacacgtactctgggttattctccaagtcaaacagctccacttgctgctgaggggtctggcttgttgataatctccaaggctcagataaaacttccttaaggaaaggggactccacagcgagatatttagacaccacgtaaaggcagaagaggtgacgatcgatcccagagccggtcatggcgaggcgatacatatgctgatgcttctcagacgccaacttgaacaacttcagcctctgttccaccgtctgggcc

SEQ ID NO: 336669 - DNA, 1000 bp, Homo Sapiens
ttttttttttttttttgtatgttttctttacaattacaatttattgaatgactaatgtacacattattaagtgaaattttacaagcaactagaacttatcacaaaactgctaaagaaacatccaaagcctgaattgtacaccaaatctctaggattaaatcttgattcccataatttaaaaaaacttgtgcaaattgcaatcactgagtgattatggaaaggcaaagtatatacagtaatgtgagagaaactcaaaccaagtaagggtaaaaatgaaatgattaacaccaccagaggaggaagctactatcaaaataaaaccatacttcctaataaaggtaaagccatcataaccccagaaaatgcttcatactttagataattaaaaacacattataaccaaaagcagatagtaacattgagtatgctgatttcaaaaagaagatgggtctagataccaggacagctctttttagtgccttccttaaaaagggcaaaactttttagagccatgtaattgtttatagccatggcctggcttcaggcatctcataagtgaggcttcagaaagtccttgaagagtatatggcagtgaaactgggctcccatctttaccataaagatgttcttcttgagaataagtgcatataggaagtgatcgcttatgacatcatttcattgatcttgaggccatataaagagacttgctgatattagagcagtttctttctaatcaatattccgctgaattccaagcaatgaggcacacaccagtttgtcttctgatcagctggctgggttgtatggatcaacagaatatacttctcgtgcttctaaatgaaaagcttctttctggcttgtatctgtataataattgcgtgctctgtgttttgatatcacgtataaggtaatgacaatcaagaaggtaagaagtatcaaacctgcagcaataccacaaaggacaggagcaagtgaacgggatctgcaaaccgccagggga

SEQ ID NO: 336670 - DNA, 1000 bp, Homo Sapiens
gaatggtctttcttttacctccatgactttccaaagcagcacttggcagggtttgttctattacatggtagtcaattacatatgtttcatgtctcccaataggagctcctagaaggtataaatgatactctcttcatctaggtagttcccacaggagccaccacagcctgggatgttggggtgtgcccaggcagtgcttgaaatgggaagatatggtgtcttgggatgccttgggatgattccaaaacagcattacagttcttctttggcattgaaaatggagtttctgctagcttgacaagtgtctgatggagctgggtcccattgccaccttccccttacagaataaacagcagggcacaaagaggtagaatgacttgtttatagaaccagaggcaggctgtgaattgctgtccctgagtattcagcctggggcttaatatatatatatatatgttctcattctccattatcttcctcttttttttcaagagacctggaattactccaacagctgcatacaggtcaagagttaaagtcccccagggaagatcaatttctataaaacagaagacaggaacttggagcttctgatcccttggagggcttatatcttggagctctggagggcataaagtctctagaagcttcctgagagaggatgggagaggcattttgcttggaaaacacttatggccttgcaagatgagggagttcagggtgaggctcaggggtgaggagtcggggaacggctgcttggggtcagctgtggacataggaaggaagagtataggggcctggggtacaaactaccagggcccacctcatgcagcccagtttcccaagaagggaaggaggccagggcccagagcagatgctctgcttaggaataaggaaggatcctttggctcacactttgcctgtcccatgtccttgggaacccacccgtagtggaaaggggtgggtatttcaggagcagcagcagcagcattttgtctgc

SEQ ID NO: 336671 - DNA, 1000 bp, Homo Sapiens
ttttttttcagtaacacccccatttattaaaacaccagcaaattaaaagtgaaataaatcacaatgaattataatacaatttacacattgagcacagaaaaattaataaatctaataatatttataaaaaaagcaaaatcagtctttttccagagactaaaaaccgtttttcagtctgatcaactgctgctacaccaactttagagccaaatttaatttcaagtaaaaaaaaaaaatttacaaccacagatttcgcataaatggaaactggtctttccttgatttccctttgaagtcactaatgagtatctaaaactgttgtactgcaggtttttaatcaacttcctgagggctgtgactgggaggaaggagccataacgatctgtgaaagagcaggctctgtactctggtccgccatctgggtgaggactgaagtggctacagcttctgccttggaggttgaactgactccattggatgtgctgaccgaactatgctgtatagcttctgtatgtggactactcggcactgaaatgtcttctgaactatcatctttatcagcagtatgatagccagatttcttctgcatggcggttacagggcaatctttatgagccagaagaagctgtttcagctgtgccacttcatttctcagcagggtgacttcactctgcagctgaccatttaatgaactcaagtcttcagctttcttctctaaagactgaacccagactttccttttttgtcggcatcttgaagctgctgctctatttcgctctaaaaactttctccttttttcatcaggatcttcgttagctgctcttctccgacgaccacttgtactttgggtctgtggagttgtgtgagctggagaagccggagtttctgtagtggatgtggctggctgttgtaatgactgcggtcgagattcctctgactgagtcctaaccaatccgctaccatgacctttgacagtatcaccattggtaactggaggatg

SEQ ID NO: 336672 - DNA, 1000 bp, Homo Sapiens
ttttttttttttttttttttttttttttttttttttttttttttttttttttgaatgtgaatgtatctgtttatttagagctttcagtgtgtaaaatttcaaataaaattatctatccaattgctacagtttaaaaaattaaatcatttttccattctcttttaggaaaaactgtagcacaaattaacagagtagagagtagtgaaacattgaaaacatactttagaaaactctcagattagtaagaatagtatgtaattgtgggtaacaaaagccaacaagaatgaaatacagacatttatgttcgcatgcatcataaagacaacaaaaacaatgttttactagagattaatataaacatgtaaataggaaaaattctcctttttaccccaaaattttcttctatattcggcagtcaaaatttttacttttcaaaattatatgacagctgtcaatacaaagatctcactttttaacatatactttcattctatgatacagtttaggtattaatgatgcattttaaaatggaacaatttaatgccaaaacctgagttgcttcaatataactagagaagacttaaagctagcactgtatcatatcgaattgcagcatacatactgtattgccccgtgctagtctgatatatgctagttggtactgccatggtagcaatactaggtggtgttccttcttcctctgatctctcttcttcaatcttgggaacaccaggcacatcagaggacagttcattcagtattttcctataagagggtcttcgtgaaaggatttctctacgtttatgagaatcaattacaccttctgattctgcagattcatctgtctctgcaattgctgctacctgagctaaagcagggattgaattttggccagtctgagtctgcacatgagcagacttgctctctgtcaaagaagctgttatacttccatcatgctgggattcaactgtttccatggtcatttgtccgccgcaaaggg

SEQ ID NO: 336673 - DNA, 691 bp, Homo Sapiens
gttgctgaatgatattttattagcttgataatttgggcctgcccttagcattaataagcttcagcactagtcacaagactttcattcactggtggggaaactttcttgttttaaaaaatgcaattcaagaaagggcatctatttcttgggggctgcggtgacagcaggcttctcttcacgggtgatgggaatggtgcgctcagggccagagacctgtttccttggtccattcacagtgaggaccccatcagatgacagggatgaagtaatggtgagagggtctacatcagctgggatccggtatttcctgtggaactccctggagatgaaaccatgttcatcctggcgctcttcatgttttccatgcacctcaatcacatctcccaacaccttaactttgagttcctctggggagaagtgcttcacatccaggttgacagagaacctgtccttctccaggcgcatctctgagagtccagtgtcaaaccagctgggtgcccgcaggaaggagggtggccgaaggtagaagggactcagggaagtagacgtcgggaaaagatcagactccaacaggtgctctccgaagaactggtcaaagaggcggctgggggagtggaaaggaaagaaggggcggcggatccaggggtggtggatggcgatgtccatggtggctaggtgagtgtgaggggtc

SEQ ID NO: 336674 - DNA, 1000 bp, Homo Sapiens
caatttcaaggttattttacaaaatacctacatttacacaataggctcccggcagcatttccagacaaatgttcttttaatttatcctgacatgctataaatgaataaattacactatttaaaaattatcatcagtaagttttcctttctcatgggtcagagaaaaagaaatgagcgtgcaaagaagattgagaggaagcgcacgcacacagataacttaaagaagcaggaggggctggggagggtcaacaatcactgaacctcacacagtgtgatgctctccaagggtgaaagtcaactgcttatagccatttcaaaagtattttaaagaaaaatgttttgtagggaaaccctttaatgctttcatttttattcaaaatcagtccagctgctagtcagcgggcagcagctacaataccaagttctggcagttgcagtactagatattgtgcctgcaagtcataaaaaaaaaaaaaaaaaaagaaaaaaatgaaagaatgcctttccccttcagacaaaagaattacttttttcatttttcttaaaaaaagaggaaaagttataacacgaaacctaaattgacttgcaaaggaataccatgtaacaaatggcttgaagtagtctatcaaaaaattggggagatttttatttaatagtgagtcagcaaggcattttttgttgtttaaaaaaaatctcatttccttacagaaacagtttttagtttttaatgaacttgtaaacaaaaaagctcccatttcaaaataaaaacaaaatcccagatcatatagatgtttacagtgattacatttatctaagcaacatacatacatgttcagttgtaagatgttaactaaatttctgtgacaaatatgctttttttttaataccaagaacattatagagttaatgcagagtcctaaggataatctagtagtcactaagtttttcttaagtcttcactttagatgctgttatttctagcacaattaagcaggcagag

SEQ ID NO: 336675 - DNA, 1000 bp, Homo Sapiens
tttttttttttttttgataaataaaaccaaacgtttatttacaccaaagaattccaacactggatctttcacatatgaaggacaaagtattatatatatacacacagcaaggggtggcggggctgtaacaagagagtttatagttttcccacaattacaggtctaccatttcagcttcaatggagatagtggctctgctcctacctctcaagatacatttacaagactgaggagcaggtcttctcactggatggcatgtgagggaaggggacggtcggaggaaaagaaggtagaaagcttaaaatggaagtcagtgtggccacatctcccattagctctagcatgaaacctgtacagacaatgtttgtttcttttgtaaaaagcagtaagttatgcccagtaactaaatgaattcaaaatggccaagacaaagaaaactaagaaagattttgccttccctctcctaccagctatggagcacagcatgttgggagatgaacagggaaaagaccaaggtaaggagcctgggagggaaggtatcaacattttaaactgaactaaaaataaaagtataaatgagttggatttagggttagatcagtaagacatgattcttactgaacagaagtttttagtatctgtctgcattttgggtagattttcaacatcttgatgtaactaagacacacttccacaagagccactaggataaccccactgaagcgcttatggagtaaagtgatgtaagcgaccagcaagcagtccactgctcctatagattgggtcctcccttccttctttccttccttcctttcttcctgcctcccctgagaagctacatttttgtaatctctggagaagagcacgagataccaaccccctaaagtgtgggacggtggaggaacaatggtgggaatgggaagaagtctccacctaaatgcagcagccgggattgaggctggtttatctttgttcttttgtgatgaggaactaaatttgg

SEQ ID NO: 336676 - DNA, 1000 bp, Homo Sapiens
gaattccgttgctgtcgtttttttttttttttagaaaaaatatactttattttcaactagaaaggtgcaaacatgtaacttttggtcacactctcaacaaataaactgtccgaaaaacagtcatatcaaagtagaaacaaatgcttccaggtgaaaaaactgatcagctatatagagtcactcagtttttaataaaggccatttgttcattaaaagtgagcgtgagctaccacatttcctacctagaaatcagcctgccaaggacactgatgcctcccctttgcaaacaatctgttttgacggactgtcattctatctgagagaatttccatataagtatccatttcatgctttgaacgatcagacaagctttacattctacctatggtgttcagaaattgaggctaacattgaaatatcaaagcattaaaaacaaaaataaaaaggcacaaacaactttaaattaacttagataactgtacatatatatatatatatacacacacacacacacacacaatatttacaatataaattttaaaaaatctggcttgttacaggaaattcacttgccacaagctgtccagtctaatcgacaggattccgattcctgaacagtgtcattcgaatcagaatgtcagagctgagtctgctgttctgacttaaggaacaacttgactcagtctcttgatggctggagaatgcacatcctagctgtcactggggctacaggcaggtcagtgagcacgctaaaattttccttctcaattacacttcaaatagcaggcatattactcgtataagagctatctgatgatactaacctttctgctggtaccctcccactgctcctaaagccacaccttaatatacattctggtgctgtgtactaatgtagttccactgtcaagtcttaacattcttcaaaccagtgtctggggaagatagactatttgtttgacatggcacaatgttttgaattgggtgggaatcttttccc

SEQ ID NO: 336677 - DNA, 1000 bp, Homo Sapiens
tttttttttttttttaagtgtaaaccattgcttttaatgttcttttcaatgatatgcaaaaaaatcacacttgatttaagaacattcgtttaaatttaaattcttcacaaaacatcaaaaatgaattaccattatattataaacatgatcaaaataaatcttagacatgaaaaaagaacataatctcccaaagtagcacaaatctcacctccttcagaggcaaacatagagcaaaattaacaaaaagatattaacagaattgacctgtaattataacatgacatacagaaaactttttaacagagatgatccctaagaaaattacagttatgaaagataatgaggtgccttaaaatttccgcttgaaaattttgcaaaggctcattgttggtccatttaattactcaggaagatttgatcttcacaggaagcagcttctaatagcagctctggaatactagctgtgacttccacttggagggtgtgctgccttcaaagcttgatctagatcttccagtaggtcttcctcatcctctaagcccacagaaagtcgaatcagtgtgtcactaattccaaggacatctctgtcattcttaagaactgatgcatgagtcatgattgccggaagctcagcaaggctttcgaatcctcccaagctctcggccagagtaaatagctttaggttcttgaggaaaatctcagcatgctgaagagtgcccttaatataaaaggtgaccatccctgtacaacctgtacactgacgcttcaccaactcatgctgtggatgagagggcagcccaggataaataaccttttctacccaaggattagattccaggaactgggcaactgccattccgtttttgaaatgcttttccattcggacatgtagagtcttcagacctcgattgcagaggtaacaatcaataggagatggaactgctccaagagagttttgcaagaaacgaagtctattatgaaggctttcacaattaacaga

SEQ ID NO: 336678 - DNA, 1000 bp, Homo Sapiens
ttttttttttttttttttgtcgtggtttcatagtggactttattgggaaaagttagttagtgtaaaaaacattcaaattaattcataaaatttaaataaggtgatagtaaattataccttgtagttaatagtaatcaatcaatcaatcactacagtaatcacaaataaggtaaagtctaaattactgccttagcaaacactatgttgtcaggtttttctgctgcaagcccaaggcgggaaacactgcagttattagaagtgagcccaatgatgaatttgcatttgaagctgggagaaagaggaaaaaaagtgtgttctgattatggcatcgagacactgtagcctaaaaaagcaactttattaatgtcctgcagcagcgtacattagtaattataacaatgcattaaaattttcatttcatgtcatagagaatcagttttcttcatgatacattatgttttactgagtgagtttgtccctccagagacctttctgggaacatgccttctccagggactgcttcctaagatgcccaggttgcttaccacaggtcatctttggtcatttaaaagcagtcaagctgtctggactgcaccctctcaactgaagttgagccaaattcccttctctcaaaccctaacgccgccatcactaagagaatgggcatctcggcttggtcagagcattactaacaagctaatgtgggattctctttggttatgaatttttatttttatttaagcatacaaaaaatacagctagaagtaggctcctgcattctaaaagcatttttaatcaacttaaactatgttcttggaaaattcaccacctggactggttcagtctgcccatttccctgtggaatctagtatcagtgttgtatttagcaaattcatttgagtgacgaacagtgactgatattcaggagccccgaggggtgggggcggccggcctgggcagacttagatgctgtccatagctttgaactcgctgagggcct

SEQ ID NO: 336679 - DNA, 1000 bp, Homo Sapiens; identical to SEQ ID NO: 157848

SEQ ID NO: 336680 - DNA, 1000 bp, Homo Sapiens
ttttttttttttttttggatggagaatgtgcagttatttattatgcgtattcagtttgtaaacgtatcctctgtattcagtaaacaggctgcctctccagggagggctgccattcattccaacagttctggcttcttgctgtaggaccaaggggttgccctggaggaggggtgggggccccggcctcggcatggctactctaggaagagccactgctactcaaggagtcactcagccccttctgtgccagaagtccaagtagggagtcggaccctcaacagcctcttctttctcctgagccaggaagacagacatgaatgcatgatgggacagggcctgggtctttaatgggttgagctggggagggcctgtggtgagctcagttgtaggctatgacctggttgatccaggtgctgaacttgctaactcgagtatacacagcaggtgcgcgcacattgcagtttttggtgccccaggagacaataccaataagcacccatgtgtttcccttctggcagacaagagggcctccggagtcaccctggcacgaggaggcacctgcgccacctgcacagatcatggagtcagtgatacttgagccccagtactgccggcactgattcacagtgaccaggggcaaagccacctgctgcagatgtgctggtgtcacattgcccacgccactgaggcgaccccagccggtggtgacacacgtgaggccttcagtcagagcctcgtttgaggatgccaggcaaactggcgagatgcgtgttgtgtactgggctggcgaggcgagcttcagcagcgtcacgtcattgttcatggtggtagagttccagctagggtgtgtaatggcccgagagacggacagaacctgcaagggctctgcgtttgatgatcggtcatactcgcccaggacaacaaaatggcggccagggctgacattgcagtgggcagcagtgaccacccaggactggctgatgagagaaccaccgcagaa

SEQ ID NO: 336681 - DNA, 1000 bp, Homo Sapiens; identical to SEQ ID NO: 157850

SEQ ID NO: 336682 - DNA, 924 bp, Homo Sapiens
taagtactgaatgacgtttaatgaacaaatgaggaattggttatttatactctgtggacgtttattaaggctctggcaacactgtggagctggcctgtgtccccgagaagaagagtcagtcacaggggggtctccatctgatccagcagtttgaagcttctcattgttgtccttatccagggcaggaaacttgagaccctggtgaagacttctggaggaacccctgacgactttccataggagacgatgccgtgggccacattgttacacagcagggggcctccggaatcccccttgaaggcagccttccgttcccgccggtcccccacacaaatctgccttcgggggtcgtaggaaccgaagatgcggaggcactgcctatccctctgcactctcagctgcacctctcggagtgtatctgttcccctcctcatgctgaccctgccccagccggccacagtgcacagcgtcccgggtctcagtccctcctgggctctaggcagagccactgggttcacgtttcgattccgtctgactcttctgctcagctgcaataacatgatgtcattctggatggtccgctgattatattgagggtggcggatggctctgcgcgcagtgatgtgttgctgggtgttttcccgtctctggatattgtgggcgcccagggtgacatttatattgcttccccagcaatgagctgctgtcagcacaaagtcttctcgcaccaggaaccctccacatctgctctgacctgctggactctggatctgaagatacgccatgtaggggcgggagtggggcctgctctcccggcctccgatgatctcccctgcctcagccccagtgggtaggagaaaggccagcagaagcaggagtggctgcatctttcctgaaaggctgcccagtcagttgctgctgtgc

SEQ ID NO: 336683 - DNA, 1000 bp, Homo Sapiens
tttttttttttttttttttggctgcaaccgtggtttatttcaaatgtgcaaagctaaatatgcaactacaaatctaactcaggaaggcctgccagtggccctgagaggtggccgtgctagggtggtccacagccagttctgattggctaggagacgttcagacccctcagaccaatccatgagtctgaagagactggggctcgggggctcattagagactcttccttatctagaaaccagaatatcttgctaaagaagaaagcagaaatcacatgggtctgggggcagggagggggtaatagaaactgttccgctggctggggctctctctcttggggtgcagtgggggagggggcagactctgtcaagcctcatatactctgcagggtggggctggtggcaaaggcaggctgggggtgctggactcaaagcctgctgtcctggaaggaagcgtcttccacctcttacggggcatggggggatcctaggagagcccaagaggatcgcagtgcagacaggcccaagctggattaaccgcagctggaatcggtggtcacccaattagcctcgcagctgagggacctctgccaccagggctagaggtcaggctgcgggcagagccctaacctgaggtgggggctgagagggtctctgcggcttagcctggccgggcattgggggctcgctctctggacctagcgggcctgatgtgaccgagacattctttcaaggggacccgaggtgacctggggcctctggcagctgctggacagcggataagggcagtttccatgggggattcttcaggggagtctaagtgattagatgcactgagcagtcggggtggaggcgcagccgtcactgtcacgggggaggccccggggtatcactgccacaagtcaccagccgcagccccgttgtcattctcgtggaacttgtgcaggtggtcagcgaacttcttggcgcagaaggtggcacagtccctctccatgctctcgct

SEQ ID NO: 336684 - DNA, 1000 bp, Homo Sapiens; identical to SEQ ID NO: 157581

SEQ ID NO: 336685 - DNA, 1000 bp, Homo Sapiens
ttttgcaggacttttcagaacctttaatatgttagtacaacttgtaatcaggttacttagcctcaattatcctccattttctgtggctctgggcagttggcctctttgattttctgagctgtcctttcttctgaagactcatggaatgacagcctcagctgttctttataatgccagacccagagaaggtagagggatttcagtgatgagaggggccccatgttgggctgaacccttctccaggcactgactttgtggctttctctcacctcatgcttctttgaggaaagaagtgagggagaagcaatggcttatgaaggagcacattgattcattggctgaggggagaagggagttcttgtggggggaggcagcagtcactggagtcttcagaggtgggatggtggcattctggacaatttcttttcttccaggattctcccaaagagcttggctgcctccagggcacatccccagtggatggtgagcccgtagcctccatggccatagttgtggatgacctctgtgtttgaaggtccagtgcgaagctgttctctttctagccgaatctgggggcgtactggccggaagccagttcgttcaccaataattcttgcattcttcagtgtgggctccagtctgcagcagccttcccaaatggtgttgtggtcctggatattgtttagttcactccagtttcccaactggaagatgcctccaagagtaactgtctgggtccctgggatgatgtacggggaattgtagatgcctctctctgggtcatgggtgagaatgaagtgcttcatccaaggggcgtccaccttcatgatctgcccccggcctggctgcagcagggggtctcgttgtagcgccccagcccataccccagtgcagttgacaatcacgtctgcgccttctcttgccacctcctcaaaagactccactttccgctggaagaacttcactcccctctcagttaacctttcagtcagccactgta

SEQ ID NO: 336686 - DNA, 1000 bp, Homo Sapiens
atttttagagaccaggtctcactctgtcacccatactggaggatagtggcacaatgacagctcactacagctttgaactcctgggctcaattgatcctcttgtctcagcttcctgagtagctgggactataggtgcacaccaccacacttggctttttggtttttggtttttttttttttttctgagacgaagtgttgctctgccacccaggctggagtgcagtggtgtgatctctgctcactgtaacctccacctcttgggctcaagcaattctcctgcctcagcctcccaagtagctgggactacaggcctgtgcaccaggcccaggtaatttttgtatttttacaaaactgtagagatggggtttcaccatgttggccagggtggtctcgaactcctgacctcaggtgatctggccacctcggcctcccaaagtgctgggattacaggcgtgagccaccaggctaattttaaaaataatgttttttgagatgggatctcactatgttgcccaggctggtctcaaactcctggcctcaagtgatcctcctgcttcagcctcccctataactgggattacagttacaagtcatcacacctggctgatttattctttcctgattttaaaattatttccattttgagaaaaaccaagtagatattaaaacaaccttttttctgtcacaaaacttcacttaaacaactaattttggcatacagttttcaactggacaatattagaaacaacatggatttccgaatgcaaattgaaatgttggatacattcatctcgttgctatttctgattaaagtagacctttaacaaaatgatcattatgaaaccttcatttctatacaaaatttcttattttttatatccataattactattagactcttccttctcctcttatttacattcttacccaggatatggagaatggaatagaccttaatttcttatcctattttttagctgaagaccaaaaaagttaaaag

SEQ ID NO: 336687 - DNA, 1000 bp, Homo Sapiens
ttttttttaaatgctttcagaaaaggaggaggcttaatcaatattggggggggggttattattagatatcacaaattgtcaggtctatctttatttgaaggtagaggtagcctcaagcactttagttgggtttgttaaacaagcaagcaaagcggaaactacagctaagcatcttctgaatgagatcatcatcactatagaagaacctatgtcaaagatcttcaactcaagaaggaacagtgaggattagttcctttattgtcagcgtcagaactgtggcttggccagcctcttctcttaggtaaggcatgagcaccctaggcttcttctgtgtatctcttgctgcttaaatgtgtctccattaggggtgtatatccttttcgaagtcttctatattgaagaaaagccaacagcacaaaaagaccaaccaaagccaccagtgttcccatgactactaagagagttgtgggccaacctggagtttcttcaactgaaactggcagatcgatggcatagctgtagccaagttggtctgaggttaaaaagagttcttcattagtcactggagggaagaaaggaaccatgttgtacatccgattgtgaccaataggggccagctcctgaggccaggcatctgcaggaggattaaatcttttcatccactcatcaaagatggcatcagtaaaggaatgaagaaccacaaaaatgggatcattggcggctgaatgtggcaaagcgtttgtcccgttcaggaaggaatgaaccaaattatgaaggctcatcacttgagaatccagagtcccatctgctttatcaaacccttccaaagcattcctgaaactgaaggtagagttctggaagaagggaggattgtcaaacttctggagagacaggcaatctcgtatgtcttttaaggttggcaatttcatgctgtttcttcccatttgatttcttctcagcaaaccttcataggttccattgcacaaggtgaccaggtggt

SEQ ID NO: 336688 - DNA, 1000 bp, Homo Sapiens; identical to SEQ ID NO: 157853

SEQ ID NO: 336689 - DNA, 542 bp, Homo Sapiens
cttgttacgagatatatatttaggatcaagaaagatgttaaggacaaagtataggagaaacaaccatttcctgtagctctcaaagcaaattatgagctcatttttctctattctgcaagctcagctgcagaagcatgtgaagctaacaccaccgatgatggcgttcccagcatgacattctcttggacagcagaacgttaatcgacacgcgtgcagcagtatgtgaaactcacaccaccaatgaggcagttcccaacacgaagttctgttcgccggcagaatactaatctgcaagagcagaccatgccccttgttgagcctgaaacctgaagagcagagcttttatcccatgcaaaggaaatagatatgtcctggtcttctggcccacgctgctcctggcctggagcctcatcacctcttgcctggagtgggcctgcccggacctggagggctaccaagagaatagcagcgaggagggcgataatcctcatggctggggtgacagatcctcaagctaggcagggcgagcagagagggcagac

SEQ ID NO: 336690 - DNA, 1000 bp, Homo Sapiens; identical to SEQ ID NO: 157854

SEQ ID NO: 336691 - DNA, 1000 bp, Homo Sapiens
ttttttttttttttttgtagagagagacaaggtttcactctgttgcccaggctggagggcagtggtgcaatcacaactcactgcagcctcagcctcctgcgttcaagtcatcctcccacctcagcctcctgagtagctggaactacaagcacccacctccatgcccgccaattgcccagctaattttttatttatttgtagagatggagtcgcgctacgtggcccatgctgatctcgaactcctgagatccaatgatcctcccacctcggcctccccttctgcatatagtaggtgctcaataaagaccaaccagatgcaggagtggatgacttcattgctcgggactttgttgcttgggtgaccctgaccttcaggccccggcaccctaggccaggacgctgtcgatccaggccgcatagctcgccacgcgggtgtagatcccgggcttcttgcggttgccgcaaacgcgcgagcccgaggtgaccacgccctcgagcacgcccccgcacaccagcgggcccccggagtcacccttgcagctgtcccggcgattgctctccgcgcacatcaagcgctcggtgatggcgccgtcgtggtgcgtgcgccggttgcaggtggcgcggtccagcactggcaagagcacgtgctgcaggctgtccgggcggcggcccgcgtggttgactatgccccagccggccacgtcgcagagagttcccggtgccacgtcgcggtccacgcgctgccagggcagggggcgcacagcagggcccagtgtggccttctccgacagctgtagcagcaggaggtcgtggtcgatggtgtcgggctggctgtccgggtggggcactgcgcggagcacgtcgtacaggcgcttggagggctccggctgcgacagggagtgcgcgcccaggagaacctgcaccttcccgtcggccgcgtcctccaggcagtgcgccgcgctcagcacccactgctccgccaccaggacgccgccgcaca

SEQ ID NO: 336692 - DNA, 1000 bp, Homo Sapiens
ttttttttttttttttttttaatttcaaacgtttattaaaacacataaatattaatagaaagtctggaattgtgataatgttcccaattcatttttataatccagaatatcgcctccttccttccaaaagaaaggcaaaatctaacaaaatagaaaaaagtatttaggcaaataaagtagcaacctagttaattttttctctccaatagtattttagggctttcttattttacatgagacgatgctggagtagaaggacacagaacacttttttacacacatttaacttttttactttatcaaagtagaaattaccattttgtttttggcatttttaagcactccaaaatgtttaccaatgtacccctccttttcagacaggatttgggataaatggactttggcacatatctaactctagtaacaatattttacatatgtacacttattccatatatattccttagttatttgatagcattttccacagtggagtcataaattctgttcattatgttcatttacaatgaactaccagttaatcttagaaaattttagtttcacaacttctgttaaattatattaacaatgtttcttttttggaggtaactgttgaattctgtactcaaaattacacatttgtttaaataaatatccacacaaattctcagttacatcaagtagctggtttatatttagattatctcaagtaggggggaataaccatgtgtaggaattcatagaaaaataaacaatcagctgaagaggtctaagaaaatgctgacttttaaaatttcacttattttccttgaagttttctacccttcccatcgatgataaaccaagatcatgtaatggaaaatttcaaaccagggctaaattctaaagtaaagcttcaattcaagcccttcccccaagagaattaatttttctgatttctctttctctcacatctaaggagaacattttaggcagttaaatttcagaacttcaaggtttc

SEQ ID NO: 336693 - DNA, 1000 bp, Homo Sapiens
ttttttttttttttttttaggcccacactctgggtctacatacttttattcttgacagaaatggtttacagtgacgtagccatagttttgacagggagagtcatctggtttcccaagatctagcacaatgggaacccctatgatctcatggcagggactggctaggaccaaggcaactgtcagtaacaaaagggacaatggatggaatagaacaaatcaaacaaagcatgggctcgatgttaggaatctgagggtatttagaaaggggaaaggcaaccttacattcctcgagtccctgaaggcaccactgcagtacaggatagtacagtaattcatgttgatggtgaagtgtgcctcagccttccagagaaaatttacgtatattcactattttaaaataggcagagaacccgttttctattaccaggcaagcacttcaaaaaaaaggttaagatcaacgttttagtgcttgaagacaggggaacttcagttacatgtaaaatccccttggataaaacaagttagcttccaaaaaaactactaagcgtcactatgtttaaaaagcttaaacattctgcgaatcagtactgtataaattaaccactaccacccacaaaagacagtggctacttaactttggtacaaagaatcagggtcagcttgcctgtgatactttaataaatgaaatgtgttgttttctgatatgcccctttcaaatcatgatccaaagaggtgcagtgaaaaacaacagacaaaaaccaacaacaaacaagacttcccacttatactcttctcgatgatggaatttgtggagaattctctccctctctgcgcttgagattccttgatggtaaaatgagggagtctggactagatgatcttcaaggtcccgtccagcttggatgttctgggataaagttacctgacccaactaacaggtacccagtgagtgtccttgctcagcttctctaagaccactttgagctggctgtaggcaccc

SEQ ID NO: 336694 - DNA, 1000 bp, Homo Sapiens
ttttttttttttttttttgagaatatctgccctttaatttgcatttaaaatcagtttctttaaatactttagttacaagttctgaatagtgaagacagagtagtagatgctgcaggcactcagtattggctcccaccccttcccccctcccccacccccaggcctcacttcttggcttaagatacaaaagggcactctctactggccctggtgtcaaacgtcagcagcctcaggcctggatgcagttggatacaaagccatgaatcccagtggctccaaggaattccaatgattgtgcccagatccacgggcaacacaccttagaaatgacctcatccgtttcaccactaggtactaacaccctcagggtggtttcctaccccagtccacgtcctccagatctgtgtcctgcagaggaagagacaaggccccgctataacgcaggaaggaacaaaaactgcctcctcagcccaggtgcttacagcaacttaactgaaaagctcaaggcaatgtgagtcagtctagaggagacctcccttccctagtctctaccaggctctggcccttcctcgggaccacgcttggtcccactgccatgatgtgctagaatctgctctaagaacaaggtgctagaatgaggcccagcaaccagcaaaggggttggaaagggttgctacagccccagctgtgtgagattgtgccaagacgagtcttcttggtgtcagcctatgatggagagcgtgagggcaggcctgggctctccttctatgatgattacaatgcatgacctcaggggacctctgccctctcctcccactcacacacccagatcccctggcctgtgcttcctggaagaggtagaagaggcatcttgaagtcaatgacaacggagaatgaaggtgccattgaagaagcaaagcagcacctctttgcctgtgttcaatccctccacacaagtggaatcaagggagaatgtgcacagccaggacagaggctgctc

SEQ ID NO: 336695 - DNA, 1000 bp, Homo Sapiens
ttttttttttaggaggaaagcataaattacccataggtccacaaattccacatttctctgcatctcttctacctcccagtatggtaagtaggtaaatcagttatgggggtaacgggctgacctccaaggaaaaatcgctgggtgggtgggagctgatggtggtccacttctgcttttgctcacaaatgggttgtgcaaggccaaaggcatacaaagaaaaaaaaatactcaatgtttcttgctgattttgcacccaggctgtagtggcgattcagtccttttcaagaaagcagggagaggagaaagggagagagggaagaaggagtgggggagtggcaagaccaagggttctggggacagtctcaactccagccaatggctctctctccagagtctttgtccagctggagtgaaggtgtccagtccatggtagtggtggggacaatgattatataaggctgaggtccttgatttagctgttagggttaggggtacaggctctgctccattcctttttctcctctaactgcttgtcctccagagaaaacccatctggagctggtttcctcccagcccagaaggggtgcaggtggactgcctgggtcctgggctttgcaggaaggctgtgggcctgacccgcccttccccagattcacatcatctgaggcgaagccaggacatctgaggagtgatgctgataccaggctccaaagctgttgccatagccactggtgggcagggtccctgccttgggtagatcccagagggaggggaggggtggggagcagggagacacagagaaggtcctcccagggaagtccccttcctgccccccagaattctgcttcaggagcttcttatacttggagcgtttgttctgaaaccagatctttacctgggtctgggtgaggccgagctgcgctgccagctgggccctctcgggcagcgccaggtactgcgtgtgctggaaacgctggtttaggtgctgcagctgcaggct

SEQ ID NO: 336696 - DNA, 1000 bp, Homo Sapiens
tttttttttttttttctgaaaaaatgaaggcacatttattaaatgactgggagaaattccatagtatgtagaatgggaataataatacataacattgtattttatgttccattttttaaaatgagtccaaggaagttaaaatattcttttaattaagacactcaaagaaatgaaataagaaaaattgatgcaaggactccttcaagttaagatttgtgatacaaatattttcatcttttaacagggcaagctgatgtgttcacatctcagtttcaagctgcctctttcactaggaacatcagtatttttttttaaaagcacatttacaatgctttcccatcacccttgctgtgtttttgtagcacctatagccataactggcacctgggggcctgcgttgctggcagtttcccttacatttctttggagtcttttcaactgctgtggttttacttagaagtcagtgctttgcatatttgatttcctgagactgtttgaatagtctttctcagaaaactgtgccagtctggctgtgaacagctcttctccgaggggagctgacagtagcctgctcgtgttggtatgcttggacttgggttcccagccatgccctgctatcttctctccctaatccctcttatcctgtccctgccctagtgacatcactgcccacatcttgccatccctttaaagaagagaacaacatttgaaccagtccagttagaaaaagattaaaatcctgctcagggaatctatgcaaagcctccataaaaacaattcctatttgttgtttcagcagctgatgcagaaatgattttaaacaataaaacccgaccggataattcaaacttctgtaaggtaataatctgttgtgaagacagaagtccctacttaagatgataggtatgaaatttgggaacaaaggtaaccttaagtttcttgatttgagtgtgtattttaaagatcatcatcatcttgacagtgcagttttgagataatg

SEQ ID NO: 336697 - DNA, 1000 bp, Homo Sapiens
tttttttttttttttttttttttttttttttttagtgaacgttaatatttttatttcttttgtaatgaagagtacaaatggttgggagcaggacatcacaggaggaggaaagatagcgccatctctgcagaagaactcctgagccacacacagaaggaaagttgatccccagggcagcctttcccaccaaaaaaatcaggcccaatccaggagagtttgccagtagctccccagggttccagggtgtctgccagccttcctaggaatcgtgggcaggcttctaggtgccagtgactcaaactcctttttccacttcccagttcaacctggtcactctcatccccacaagttcccaatctgaatcccattctctgaccattctctgcttccttgtttttaatctcatttgagagtgatcctcacgggttcccctggcccctgcactcattttccttactgggtatgctaacgtttgtcttctaattcaggaaatccttccaaccctgttttcagctctgcctccaaacccttccatttccccatttcacctcccagtctcctcactcctggagcaaagagctctgcacttggattgctaagcatgcatggctcatgtggagcaggggagtgggaagatgtccctcagggcagaaagcctgcttttggtggggaacctacgtatcattcaaacaggcttagctgtagagaaccttcactgcacctctcctccagttctgcctctcccctccactatgctgaacttgcagttcattctgcagtaaaaagcagtagccaggctgcagctggtgctccagaagcccggctgtaagcatgcgcactgtatatgtggtgtgcaaggaagccatcatcagtcatataaagcagttgctatgaaacatgtgaaaagtgagaaacatggtttaattgtggattttattagaagtgtgatactagtcagaaaggcccaggaagttggcattgcagttaccagctcagggag

SEQ ID NO: 336698 - DNA, 1000 bp, Homo Sapiens; identical to SEQ ID NO: 157856

SEQ ID NO: 336699 - DNA, 1000 bp, Homo Sapiens
tcctttgcatatcagtgactgagaaaaattttaagatcaatgtgtatgtgtctctgtgtgtctgtaaggctcatgaaaaatcaggtacattggaaacatgaaattagtcactgctaattaaactctgggtcagtttgtggctgactgctgtttaggagtaagaatgctgtacagtgctatgcttggtgactctggtggaagatgtggttatggtagaattagaatgaccagattcctctaaaccaaaatctggcagagggccagggactccagctccagacaccgtggtgttcctagccgtcatagaattttcagtgggaatctggtaactggattgcagagtggaagcaggtgctagaactctttctgtcactgtcacattctgtcctactgctatattaggcatggccagagtaggctgcacacctgagctgggggcaaggaagctctctctttccctcaccatgacgtaaggtacatcttgaagatgctgagtgccttccagaggattcgatccacccccatgaggctgtattactctttcagtgaccacaactgtaccttcattagcataaggctgatctaccaaggtagaagctggagcatacaccctctctgtcacaataaggctctgtggctggctaggacccaggatcacagtggttggtggcatagtggaccctgtgacataggaagtttctgttgctatcacatttctagaagccattgggtcaggaagaggtgtagctaccttttgcgcctgcctagaagacacagatctttcagtgactatttcctgagttactttctctgcattggcttcttgcaaagattttggaactgggaagctactgccagaggagtaggtattctctgaattaaccatagtttgctcacagagtgaatgtgaagctgtgttcatacttgtttctgtggcaggtttttgtctctgctcaatttccttatttatatctattttttgacccaggcaaacttcagc

SEQ ID NO: 336700 - DNA, 1000 bp, Homo Sapiens
ttttttttttttttttttatggaataagggttatctttatttggattgcaaagtataaatatgaaccaggtttggaaatacaagttgtaacagttcagaaatggcaccagaaacttccagaaaggaccatgacagcataccttcatcgttttggtgaggtgggtgggattatacaaagccttccccacctccaaccttctcggtagcaattggcaggtaatcagttaccaagaacagtcagctccaatgttccctgttccttctcagccttttgctttgctaataccttctccagactgtcctctgctgcactgacccctgcatggagtagcaccagaagaatggcaggagttagagaaatgtcttgacacaagggaaagtgagttcccacgctgtggcctggggccatgggggtgagggaccaggaaagctacaggcatggaagcccaacctcttctgagacttggcagggagaggacacggggagacactgatatctgttacactttgacatcagcaccttgggctttcaaaacacaaatggtagacaaaatcgcctaggcaagactgaagtccaactcatagagtggctctgaccaagttaacccctacatcctgaccatacagagctcccgcagtggcactctgaccacggaagatctgcagaaatgtagacagacaataaattactacagatgggtcacagaaccatcctagctttgtggcaaaggtgggtggcactaagccagattgtggggatgaggagtggagggccaggaaattgccaaagtaacagtctaggcacttgaaatattattgttagattgttaaaaactaaataaattaacatacatagaataaaataaatatataatttaagaggcatttacaaacaacaacaacaaaaatagttgttatttttccatctgggtagaagtcccaaaattcagttctcaggcttgtggtatttcacagttaactcatcaaatccagcactgga

SEQ ID NO: 336701 - DNA, 1000 bp, Homo Sapiens
ttttttttttttttttttttttttcaatagccaaaatagttatttattaataatttaaggttttacattcttataataaattccagctctaaactttacaccacgaacataatggagaatttaactctcccttcttcacaatcaaatgcatttctcttatcaaatgggtacccatgctcacacacacacacttccagttttatacaaatttttttaaaggaaagaaaccaacccaaagtattgcatttgaggtgacactccctgaagaattttatacagaggtaatatactgtttagcacagctgaaggtttttttattctttctttttttaaagtgagcccatgatttggtgtctttcccagattatcccctttgcgacaacacaagcaaaaatatttacaaaggtaaggcatagtcaaactacataaagagaaaaaatcatgaggaaaatacatgaaaaagactaaagacttcgccataacaaggtcttagtgataatagtgtccgtaaagatgtcatcagaattggtaaagtcaagcatgctgcaaatataccctttggattagaaaagagcacaattttctttttttgttttgttctgttttaagaagtggcatactgctctttctccctttggataatttcttttaagcccatcaaaggaaaaaacaaacacaattcaaacaaacactgtcaagtgattcaagatcaaatatttacaataatcaaatggagtatcagatttttttttccaaactgataccacaaatacagagctgaaatctctctttggctcctctatatgcaaaattgaattagtcttcattgaagacaattatatagtcagttccagatgcaaaaggaaacagccttacaaggccctaaagaacacatgctcctaccctatcatttggttctaccctatgcgcctggaagtcctcgaatcccagtccctgcatgggtaggctgtacacatgggtacagagcaaacctactgcc

SEQ ID NO: 336702 - DNA, 1000 bp, Homo Sapiens; identical to SEQ ID NO: 157857

SEQ ID NO: 336703 - DNA, 1000 bp, Homo Sapiens
tttttttttttttttttttttttttaatgttttatacaattttatttttaaaaatctgttaatgtacaggcattggcacattttaaaaacaaactacataaacagatctttcctataacctaggaaagtggaatgtcagaagtcaacaaaatgtgataaacttaaagtgctaaaacagaaggcacttcacaaaatctgttcactgaaacagttatatatcctcgtttacatccttcactttacaagtggcagtgaacgtctgtttggatagaaggacatacagaaatacaggcagtttagtggcagtaaaaatataagacaagtaatgagtccttggccaacttgtttttgatgacctgtagtgtcctttaactttcctccttaagaagaaaaaacggaaggattcacaattagaagaaaagttgaaatccagaatatagttacttttgggagtggggacgtttgtgaatattaaatcacttatcccctaaagcaatcagagccctttgtttttatggttgaagttttgtgaagtaaagaaagtattagggaagaacacttcagaatcagtgaactaaaaaaggtgttacattcattattttaaatatttaggttattaagaagtctaaaatgttacacagttagaggtagataacagtcccaagtttccatggaatctaataatttagtatctggacatcaaacagatcacaaactccttcgttatcatctaaattaaagttgtagtcatctgccggggtaggagaaagccttaagagaggaaacacgtcagaagacattaactcatcaatgatatctccactaatagatcctgctgaagatatatctgtagctgatgtctgctgcagagcctggcttctttcagagacatgttgctcaggcagattttgagttgccatgctggatttctgtggagtcactggagtcaaggactgggaggaaggctgtgtgaggtcatcaggtgggggaacaggaaaaa

SEQ ID NO: 336704 - DNA, 1000 bp, Homo Sapiens; identical to SEQ ID NO: 157858

SEQ ID NO: 336705 - DNA, 1000 bp, Homo Sapiens; identical to SEQ ID NO: 157861

SEQ ID NO: 336706 - DNA, 1000 bp, Homo Sapiens
aaggtttctgtaaacttttattttacacttatgggccactgccaactcagggccttggcttctggctcatttctacaaagttacttgttgaaaagatgtagtaaaggtagaaattggaaatattcctgctagtaaaccacagttacttaccagtccataaataaaatgcacgttgacgccttcagaaatctatgactttctgaatttataaaatgcatttttttcatatgaaagaaacaaagcatcttgaaaaaaagacaattgtctaaacaaaatggtgtgaacctatggcttatattataggcatatatcactgcatatgatgcgccagtggaataatagatttgactgctaacacacaaaagggcagtacttcttagccttgcaattcaagcaactggaacctgatgttattttacctgtcctaaaatatggcccaacaaattatcttacctaatttattatcagcaatctgtctggcgaagtctgaaagaaatatcagacaacctggcaatttcatcaccacattgaattgaggataagaacaatataatacttcaaagtgtaatgacttttgctccagcacaggaaacaatatgaccccaaatactgctttatcaaaccaaccaaccaaacaaaaccctatattgctagtccacagctcatctgctttcacgctgcctcttatatcccatttgtaatggtaacatgattacaagatttatgaatgcagaaggttgctacaggttaaaatggactgaggcaggttgtcatgatgaacaatcacctagattttagctcagactatgcactttggcacaactgcggggcacaattattagattagattaaatccatacataccatcacacacatgcatatatcacacacacaaatatattccacagagacagtctagaaaaatgggctaaaagaaatttacaattgtttatatatatacacacacacactagtaaaagattttctgctgtactcacag

SEQ ID NO: 336707 - DNA, 994 bp, Homo Sapiens
tttttttttttgccggtctcagtctttaatcgtggcagggcctcacgcacgcgcgcacgtacacacactcaggcttcagatcttgttgaaagctgcgatatcgacactctgcacgtgctcctcaaacttggtgatctcctcctccagcaagtctgtccccaccttgtcgtcctccaccacacactgaatctgtagcttccggataccgtagcccacgggcaccagcttggaagccccccagaccagcccgtccagctggatagagcgcacacaggcctccagctgggccatgtccgtctcatcatcccaaggcttgacatccagcaggatggaggacttggccaccagtgcaggcttcttggccttcttctccgcgtactgccgtagccgctcctcccgcagctgtgccgcctccttgtcctcctcctcattgtcactgccaaacaggtcaatgtcatcatcctcgtcatcctctgctggtgtggctggcttcttggctgggggctccacttggcgcatgggagatacgtgctgggtctgtggggccgtggcccggtggccaggcgagctcttctccagcacgttcagccgggcctccagcttggagatggcctgctgcagctcctgtaccacgccacgcagactctggttctccacttccagactggcaatccggacgacgagctcaccgtggtctccgctggtgccgctggaggccccggggcctgagcttccagccagggatttctggatgttctctctggctctcgcaatgtcacggaggatcacgctggcgccgttctcctggcgggaggcacctgccacaggcccgttcatctgctcgtagaatctcctttctgcgtcgtcatatttgaacttgtcgaaccagatcttctcatgtgctaggaagtttgtagccatttttctgacgccagccaaggacgcggcgaccaaggaggaggaatcggcggacgcgggaagactgatgaaaggg

SEQ ID NO: 336708 - DNA, 1000 bp, Homo Sapiens; identical to SEQ ID NO: 157862

SEQ ID NO: 336709 - DNA, 1000 bp, Homo Sapiens
aaaaaaaaaaaccagtgtctcaaccttttagaagcctgttcatttacatactcctataggaaatggtgtaatatcgtatctattcttaatacctcccctccggacctgacatggtgacatgatgccctgcgcgatcatcttacagttctgaatgagaaggcataaatattgcataggagagcaaaaccctcccagccctagccagcgctggctgcatctgccactattcttccttgtccatagcccgctgacacagtgcgctaacggaggtgagttcttagaggagaatgcacaggagctgacgaaccactggtgtcactatgacaatttggcattttcatctggagtccatttaatttgggaggggtgagagaagccaagggccagggctgggggtggggcggggtggggtgagggaggcaggaacaagtttaggcccccaacctgaagttgttgcttagaattcaggctgaaagaaagaaaacaaaaatctgacatctgccaaaacccaataacaagtcccttcttaggatgagcagttaggtggatctctggtgttccaagaccctgatgttttctgtgacaagtgatgggaggagactgtgctataatgtcaaaagcatcgccaggaggaacagtaggattgccaaaaggcggctgggtatccttggtgtttgtgccgcgttctcgccgcgggatggctcggctgactcatgtacggtgtcatctgctggttctaatgaattttctactttgtcgttaacatcgaaaacacgatcatgaacacctatagttttcatacagctatttgttggtctcacaaagactttgagctttagacaggaccttcttccattatctgggattgcagaggagatgtagaaatattctcggcctggcctgaattcaaatcctagagaaaagggagtgaagagctggaatttttcagagaacttcagcggtccatttggagagtgaggccggttacattcccatctct

SEQ ID NO: 336710 - DNA, 1000 bp, Homo Sapiens; identical to SEQ ID NO: 157863

SEQ ID NO: 336711 - DNA, 1000 bp, Homo Sapiens; identical to SEQ ID NO: 157864

SEQ ID NO: 336712 - DNA, 1000 bp, Homo Sapiens
ttttttttttttttttttaaaagacaattcactgtacacattttatttacagttttgtacactgtcttaatatgaatgggactgcttttctacttgagccatttttaaccaaagcaaaataacctaagtaatacaaagtgttaaaatacagcataaagatacaaaaacagacatactaattctagttaggaatgtaattatgatgttacattttttataatccacaattatgtttaggaaatcacacaaacatagatcactgatttgaatgaaatgcataaatttgtagcaaagctttgtagttacaaaaaacaaaaaaaattaccaaagaatgcacaaaattaatgtttattccacctttgtgtcatattcctggatccttcaccaatgttacatgaggaaaaaaacaaaagcaaaacaaatgaaaaactgaaatcagaatcactaatattatcaagtagggaaacaaataaattaaaatctagcagccatcagcaagagtacagcaaagacaatgctgtaaaaagaaacaaagaaaattgctagaaaactgtatgcatcataatctttcaaaccagcaaaatatgcttctgcataaaatggaacaacagaattttttttcctgtaaagtatagaaatgccaagttgttttctgactattgtggataggtaaaatctgtatgtaattaatggtaattctactgaactattacagagtgggccaggaacacatttatggattctggggatgtgtactgtaattctttgattgggatagtggaaactctagccaaaaaaaaaaaaaaaaatgaacacagaagtacaagacaaaggcgaatgagacttctcttatatctgagtaacattaagatggaaatcaaatttaaatgcagtccactctgctttttgaagaggctttggttcagctcccaaatctcgattgcttgacgcagtctcctatgagaatactcagaaggtgtcttcttaaacaacaaaccta

SEQ ID NO: 336713 - DNA, 1000 bp, Homo Sapiens; identical to SEQ ID NO: 157866

SEQ ID NO: 336714 - DNA, 1000 bp, Homo Sapiens
ggggaacactgcagttatttttattcaagagtcaagtgacactggaaaacaatactttttcaagataatcatttagatttatttttaaaaaaagaggagagttctcttattgattttataagagtaaaggcaacagtcagccattcttttggctaattcatatgatcctcaagtaaaacttaagcccaggttactttggtaggatttaaagtagtaagacatatgtgaataaaatgatattaggtctgtataattctgaataataaaataaagattaagatggtaatattggtccctcaagtactggtatttaaactttaaaaatcaatcaagagagaagattaagtggtgtttctttggtactgaaaatgtaaagctaagaccaaattgttctacttcacagatttaagatacaaagaatgatatttaaaggtattaaaataactatttcattatcttcagtttgtaaagaatatcttatgaagtacacttagaaggaatccctgagtatattaagtactctattagtatctttcttcataaacaaagaggaacaatttaaaggctttgcaagacatataaacacagtgcttagtaaaagcattatctgtttataaggctctctccatcgtgcttgtaaattaggccaccaaatgcttcagaggagaaacaatagattcacaaaattaaactctaacatttgaatacattaaccactctcaagtaaattaaaaaaccattctctgatggtgtttctatgttgttttagccactctatattgtttttcactgtttccagcacttgttccctaggtttttctcctgctccagcttgtggatattttgcaaaaaagctctccatctgccacagttgcagttcagtgttgaatggctctgctattgtgacaattcggccaaggtttctgttattgagtgtatatctgttgactagatagtcccagttgagttgtatccaattccaggccatgttcttcccata

SEQ ID NO: 336715 - DNA, 1000 bp, Homo Sapiens
tagggacccaaagcaaccttttaattccaagcagagtccccctcccccagcatggtcacacacacagtggaaagggatgtcagggtctgggcaggagcaatacccagacctgggcaaaaatatagatatcattatatccacgtggactggaaagaagtcaagctgggggtgtaaggtagggcaggggcaggtgaggaaagcagctgggggggccccaataaattacattcttgagagagcatagtgtgtgagggggtgcgtgggtgtaggtgtgagagctggtagccaggacactccaaaatgtgccaggcctggcctcttgaccccatccaagggaggcggaaggcccagcttctgcccggtgcctggcttagtgctggaattcccatttcgtggcctggaggcaggtggagggccaggatcgggtaggcggcatctccaccctaagcccaggcttctggggaagccgcagggctggagcaaaaggcttggaagctcggggtttgcgagcggaggtcagggcaagctgaagtggaggggtgacctccctcgcggaggctgagctggggcctgttcccactagagtcagaggagcaggaagctgcagtgcaggaaagctgtcaggagtgagtatgggagggctgggtgggcgacacaagagcctggagctctttctgcctggccgcttcccacccctgcatcttccctccagctgttcaagacagccaaccggcctaaccaccaatgcccctcattcctctcacctctggggtgaggggcagggagagggcggcaaacatgaactctgtgtgccagagcccagactggctttgccctgtacagggagggccagggacgagagcaggaggcccccagcctcgtgagggggaagaaagtccatagctcactgccggggactgcagaggttttggccccccactctacctgaggaaaggagcccaccctatttccaccccacctcctgcccctcccaacccgc

SEQ ID NO: 336716 - DNA, 1000 bp, Homo Sapiens; identical to SEQ ID NO: 157868

SEQ ID NO: 336717 - DNA, 1000 bp, Homo Sapiens; identical to SEQ ID NO: 157869

SEQ ID NO: 336718 - DNA, 1000 bp, Homo Sapiens
tggatgagaatggcttctaaaagtggatcttggggatccttgtgaatttgccctcggataaggagtgaagatcatttacggcacatgtggattatggtttacacaaagatgtccagttatttttccttctgactacccccaccaccacttcctgagatgagatgtctaggtataggaggatgtggctgttggggttagacttgattcagtgcaaaaacaagaaacagtgccccttaaacaagggctgtaacttaaatcagtttttcttggcaccttacaataagagcacatgcacaggaattgggaggattttgcatcctggatctactgcttaatttatttcatctctttaaggctcagtttcttttttttttttcccctgtagagacagtgtcttgctatgtttccataggcttatctctaattctgggctcaagtgatcttcccatctcagcctcccaaagtgctggctgggattacaggcatgagccactgcacccagttctaaagttttttttttttttttttttttttttttaaagagatgggggtcttactatgttggctaagctggtctcaaactccttgcctcaggtaatccttctgcctcagcctcccaaagtgctgagattacaggcatgagccaccatgcccgacttccctttgtgtaaaatgagataatatgtatgtcacagaattgttttaaggatgataaaggactaagtgagataatgtaggtgaagtttagtatgatgcctggctcatagttaagtgctgaattatgatagtaatcaatatctactcctaacctctttcttcacagattttaagcttctgtctttctagggggttaagagtcataaaccaaaattacactttcctctgctaggtttcctccctttcctcttcttgacagtctgatgggaaacaaaggcacacataagagcctagttccaagtagtcaagagcctgagaggaagggatatggagagtaatcctt

SEQ ID NO: 336719 - DNA, 1000 bp, Homo Sapiens
gagcctggcctgggaggacgatttattattacactgggggtttccttggcagctggggtcatcagggtactttcaagaagggctcgtgcaggacatcaaacagcctccgggctttctgagggcccaggcctgggcataaggccagatcttctcttgatgcggcgatgagctgttccagagatccaaatgtggtcaggagggtctgactgtccgttttgttgactgacttcacggtggtcagacattcagtcacccgggagacgaagtcctgctctagcttctccatcaggaggtccgctggtttctgctcataggccttgtaggtctccaggtaccgcccagcttcctcggggctccaggcgaggatcaatgtgcagtcggccaggatacacatcttagccagctccttgagggcctgctggggatctttcacatccacctggacaagcaggacccgcaaggcgaagttcttccccaggctctgcagccgcccatggatgtagtctgggtgcaggttgtggtagcggaggctgaggaacagggcacaggtgctctggcccagcacatagtcgggaattacgtcgccaaattcccagggcacattgcgcacgaacttcagtacgggattgcccctctgccgagggctcacaatgatgctgttggattttgccccgggtttcagggcctggttgggcgtctctcctgccaggggctctgaccctgtggggcacgtggccccagccccttccagaggctgtgagatggcatattcggcgtaggtctgaggggccgcctgggccgaggtgtccacagtgggaaggctctgtgtagatcggaataagggcttggccactccaggagggacctcatcctcgtcgaggggtatcacaaatttcttccttgctggcggccctgagggctggggcaccccctctttgtccttcccagggtccatctggagcctgtggtccgggcctcacggtttcagcgccgcgaggcc

SEQ ID NO: 336720 - DNA, 1000 bp, Homo Sapiens
tttttttttttttttgggagaagtgggggcctttattaaggtctggcagatgtggtggaggtggaagtacaaacccaggcctgggcctaggaaagggcagaagaaaggcaaagggtcccttggagcaggaacccatccctctctgcttatacccagcacccctcatcccaggttcctttcttcaacctccgcctgcctctgggaacacagagcaccaagaactgacaaaccggtaccctccagggccacagcgtggggcagagtccaggcttctgtctccccgcagtgggagatctggggagctcagtgaacctcctcaccctcctgccagtatgaagttgggaagcgccttctctgtcccccagaacagaacaaactcttgttctctgtggttggggaaaaggtgtggggggcttggacctaggaagaagctgagctgaattcctccagggcccaggtgaaacccccaggggagtttctgagactctagacttgccatttctccacttttccttcccaatgactccggtgagcagctcagagtctgggctagggcaactggtaggacagtggggatctgccccagagacatctgtgggtttcagatgaaggtttccccaacaccagattcatttatatgtacacagggcagcacccacctgcggcagggggaacagccgctgggggctagtaagagtagccacccttggggccaaatggctgggcggggccagccagctctgggaggtaggcggggctctcatccaagtgggacaaagggactgtgtcctcctcactgacaggccggtcaaactcagccttgagagctggacgctgattgtccgggaaggccaaagagaagagggcctcgggctcacacacaaacttgtacacgtaacgctcaccagccaccttctgcatgatgcctttctcataatagtatcggagcgagcggctcagcttgtcgtaattcatggctggccggttcttctggatgccc

SEQ ID NO: 336721 - DNA, 1000 bp, Homo Sapiens; identical to SEQ ID NO: 157870

SEQ ID NO: 336722 - DNA, 1000 bp, Homo Sapiens
cacggggagacagaattcgtttattgggatcactgggtggaggtggaggaagaactgagtggctgctgtcctggtctggggatggatcaggcaccaaggttaggggagggagcccatcaccatgttagtaaaataataaaacagtggttggacagagggaagacccactgcctgggatgaggctgctctgaggcaagaggtgtacgtatcctacctggcccaacacacgcacttccccactggctccttggcccgtgtcagcgaagggagcgcgggacggtgggggaggcggagcggtagcagcggtacccctccagtgccgctggcaggagcagcaggccgctcagggggtctttgcggcagcggcccatggcctccttgtagctcagccgttccttggagatggggtctgtcaaatccttctcgtagctggactcgtcctgcaggagctgggccagctcttcactgatcatcccggagaggagggcctgctggatggggatgcggcctgtcctcttggggtcgatgagccccccggtcaggtgctgcacctgcaggtgtgggagcacgctctcccggggcatccagcccttctggacggcctcgcccaccgagagcctcttcttggtgacggggtcctcgatgccggtgaaggccttctgggcgttaagcagcctctgtgtggaggtgttctcgatcaggcccctctccatcgccttgtgcacagagtagcgctcacggctgagcaggtccacgatgccccctgtggccgcctgggcctccagtagcttctgcccagtgatggggtccagcatgttcttggccacggccgtcttgatgctgcacttgttgtctgtggttgtgtcatagatcccggcgatagggaagctgtcatcaccgagcccgagagagaagctgggagagaagaaactggtgctctggggggccggggaggcgagcggggacttggagatgatagagccgatggagagtgaggagc

SEQ ID NO: 336723 - DNA, 1000 bp, Homo Sapiens
agggagggagagagggagagagagaaagagagaaagagagagagatagagacagagacacagagagagacagacagagaaagttctcagttggttccagtctccagctcccttcaggagtgaaaaggagctcaaggggaaggctcctcattccagttcttagagaaaatcaagctctaaagcctggtgaagggatactaggtctccatggtttgtgatcctccagaaaggcatgttgtgctgtttggctgcaatttcttcatctcgtccatctccaatcactacatatgtgactttctttccaaaccttgacacaattctctcaaagcagctctccttaccaattttggtagcactatagatgttctcaataggaaatatttctcctagtccatataggagaaccttggccagggctggaaccagctgggtggtagtgatcagaacattcacacaattctttctggactggatgagaagtaaggactttaatgcagttcctaaccaggaatctgttaaaacttcaatttctgctcttaatctctgcagtgcttccttcctctggggactgaggagaccacccacgttgcttttatgcttatcatagatttctctcactttccggtagcggaaagctagtttcctcatccagtccacacctccctgaacacccacagatgaaccatggctgccactacctcctgagccactgaaaccatctgttgagaaactgtagttgctcaagtcttggccattgtcatcagaagccacatcttccacatgtacctggtcacactcctctaagtcattgaaaaatagatgagtatcagccacttcaaaaatcatttcttccattgttaaacctgagccaatcactactgttgggtcctttccatatttctgggcataggatccagtaagaagtgagtggaagatgatgatggtttcatccaagtcccacagaaatacccgttctaattcactgtcttgggaagaagtgg

SEQ ID NO: 336724 - DNA, 1000 bp, Homo Sapiens
ttttttttttttttttggattctaacactttattaagaggtcacaagccacaggactttaaagtgcatgaaatttattggcaatgaagccgcatgtataccaggctcccctagtccccaccaccttgccccatccatcatgacgtggtggggaggggttgagacccatctttaaaagtgggggacagcagggacaaaggatgggaaactggaggaacaggagtattcatgaactgaagctgggacaggagactgaccacagtgattctgctcactgaaggaagggtggggtcagtctagtctctcaaaggctggtgaaaagtttttttttcacctattcctcacagcgagcccctggcatttcaaatagacctaactcctcctcttcatctttctctggttttctcctctatgagtaatttggaacccacagtccagcttgagggtatccctgatatgcacaatgaatacaaaccacggcggatgcagatttcaggatcatgctggggcctggcccatttgggtgggaggagctttctgtcaggagttgctgggtgcggggtacatgtgtgccctccagtgtggtgagtgagagcatgtgagtgtgtgtgcatgtcccataccaaaccgtaagaggcagctgggtcaggaggaaccccacttcttccttcatgggacaacaagtggagtgggaagaagcggggctctgagtcccagaaagaagggagaagcctgctccctactgtaacactcccaggccaatctatacccgcccacaccctttctactcaacatactgctccttgttcccagccagcccggcacacccaccatggacacagggcagctcttgctggccccattcacatgaaattcttctgtgtgaaactcactcgtctgcctctcccaggagatgagacaggactggaggagaatctcccaccctctcttcttccccctccctcaggagtgggatttaggcagggaccctagagacctta

SEQ ID NO: 336725 - DNA, 1000 bp, Homo Sapiens
gagatggagtcttgctctgttgcccaggctggagcacagtggcgcgatctcggctcactacaaggtccgcctcctgggttcacgccagtctcctgcctcagcctcccgagtagctgggactacaggtgcctgccaccacgcccggctaattttttttgcatttttagtagagacgggtttcaccgtgttagccaggatggtctcgatctcctgacctcgtgatccacccgcctcagcctcccaaagtgctgggattacaggcgtgagccaccgcgcctggcctgctcttttaaataaacatttgccttgcaactttctattttgtttaaaatgctaccattttttcgtaagataagagatatgtttcaacctaatttccaaattactttgtgaattccatgaagattttctatacttgatacttaggaggttaaaaaatgcttttaaagtctcattaagtcttaagtaaatggaaattatagaataattttcctagatttcaatgtcaattctattttcttctgttatttctaagcagactgacatgattgattcttaaaagaaaacctgatttgagcaatctattgagcaaaacatttgtaaataaatagtgcccaattaaatcagacttattttaaaaaatatatgtcctgtactgcattgttttcattaagttataaccacaagaaatagtaacccaaatgttcaaacttctttagctgacaggccttgtttgtgtgaaacatatttattacacatacatcacactctatgcatgatctactttgctcttgagggcaggtctctgtcttattccactctgtacactcagcacctattggagtggccacagcgcataatgggtgcttccatatcagaactgacatttcagaacaactactagatgtgtttacacccagtggatgggcatccagaagtccatgccttctttcgttgtttttaagatgggtagagaagtctttcatggtcattacctcct

SEQ ID NO: 336726 - DNA, 1000 bp, Homo Sapiens; identical to SEQ ID NO: 157871

SEQ ID NO: 336727 - DNA, 1000 bp, Homo Sapiens
acaaactaaaaattagacatttattggttttcatttataaataatgaaatgttcagcacaaataatttagattcaaatatttaagcaaggaaaaactccgaagtttttaacttatttcctcaaaattatattttataaggaatttcatgatgtattgaaatatgactcctctttctgccattcatttctatgttcttaagggttcttgataagacagagtgctttgtcttggaatacatcttggatattttaactgccctctgtcacattgcattctaagtatagatccagtaatatataattcagctggataagtatctcctctacaaataaactcaatatattcaccatgcaaaatgtgtggtctgttgtcaaaatcccatttcagaagtaaattattcttttccatttcagtaaaagataatgtgcatggctctaaacacaatggtggtgtagtccacattccatctaaacaataggcctccctagatccttctaggaaatggtgatcaaaacatctgtattctactgaagagccattttcataggtgtctactgttgaactaataatgactccatgtttaataagaggaggagatgtgcacattcctttagattcttttctagtacataaaggatatttcacttctcctctgttgcactgcacagataattcagacaatggggttaatggagataagtcatatccctgtttacatacaaaatctattaaatctccatgtaagactttcccttcatatttccacttcatttctatgttatttctgttcatgtaatccacattaacagtacatggttccaagcaaacaggtggggatgaccattttccttgttcgcaacgagatatttttgatcccctcagtaagtaatattcattgcatctatattccactgaggatcctgttgcatagcttgccaatatcccgtctgcaacagccccattcattacaacaggaggatgcttacaattctcattatt

SEQ ID NO: 336728 - DNA, 1000 bp, Homo Sapiens
ttttttttttttttttttcacctgaaatgcagaaatatttattttggtttccttcattgtttttggaaattttgttttggtttataaaacatagaaatagccaacacttaaagcaaacattcaaaaccccaaggtgacaaattattgactttttgtgcaattaagaatacatatatgaagttaggctaccaagtagtgttattacaatgacaattctttagtgcaagccctgttgtgcttgtatataatacatgtactctcacagaccccaaaacagctgctttaaatgtacaaatgacagctcaattcagtcaaatgtggcaaagactcacaataaagtgaactgctgttaatttcccaaattaactttaaaaaatccctggagaagtgaatcccaggaaatgaactttccagatttctacatcctagaattttggcttgtcaaacacatttcatagaaatcaggtagcattataagaacatttgcttattactgtccatttcaataagtactcaagtatatactcccttaatagctttaaagaaatgcttgcctgagagtttattttttggggaaaaaggcaagttaatcccaacatgatcttttgatatgaaaaccacattaaaaatctgttggcctttacacagagtgagtggttcagtgaagataaagtagacagttattcaggcgtcacagctgagcatggctgatccaggtaactctttcttgaaatgcttgtcttcactatagaatctaaggcagatttttaaataacccctgaaaaaggatggagtcggggaatcaggcctggagaaccgagtccaagagcattctgccatgaaagagaatccacgcgttctgatgagcacccatttgccagaggctccttatctgcatggttctgagttggatctgccctcccgcttactggaaaccttatgctccaacagaaaccacaggggactggagaagaacatgagtttcgtaacccttacgaat

SEQ ID NO: 336729 - DNA, 1000 bp, Homo Sapiens; identical to SEQ ID NO: 157873

SEQ ID NO: 336730 - DNA, 1000 bp, Homo Sapiens; identical to SEQ ID NO: 246424

SEQ ID NO: 336731 - DNA, 1000 bp, Homo Sapiens
cctgggcaacagagtgagactctgtctcaaataaaaataaaaataaaaataaataaaataaataaaaaaagagaagaacaatgaaggaagaaattaaacaggatataaaaaatcagaagacagataagatggaaaaccataacttatgtgcagaaaggtgggtgcaaatcgatcagtcctgcataagaaaacaccatttgattggtttgaacatgcatctggccaggcgtggtggctcatgcctataatctcagcactttgggaggccaaggtgggtggatcacctgaggtcaggagttcgagaccagcctggccaacacagtgaaaccccatctctactaaaaatacaaaaattagctgggtgcagtggtatgtgcctgtaattccagctacttgggaggctgaggcacaagaatcacttgaacccaagaggttcaatgagccgagattgctccactgcactccagcctgggtgacagagccagactctgtctcaaaaaaaaaaaaaagtagattcaagcttcttagtgagcttttctctcttgtgtccttcaagtagctttgtcggactccacagtcctggctcctctctgccttcacctccaggtgtttacttgcagacacttggtgttcgtgcaaaggtcaatcctggctgacacatctgttggctccagctcggttcagccacatctgccgaggcttccttgttcagtgccgtatggctgtgccaattttcaaccagtatggccaagagagccacgaggaccagtcctgccacggccatgcggatcaagttctgcgtcgtgtaatcttggtggatggagtctgtgaccacaagctccaaggcattactggggaaggaccacaggtaggggctcctgttgtaccaaccgtagcacctgtagatccctgagacattgaggtccacaggacccaaagagaagttggccgggtgttccccactttggtgctgtggcagagaaagttctccctccttggc

SEQ ID NO: 336732 - DNA, 1000 bp, Homo Sapiens
tttttttttttttttttttttaaggttacacgattatttattgagagcctcctctccccgcccttgcaatctctaggtcactttctccgcttgtagattttgcgcgcaagccccagaaagacggctgggggcaggggtgctgcgtactgttcaatgagagccataatgtggctgtaactgtcttcctcatattgcaagaacactgctggcagatccagctcctcatatagcgccttcacccgggccactttctcagcctccttctgcccgtaattttccttcaggatctggtactgttctggagtggcccgttgcagacactgaaccaccagccagctgcatttgttgtcctggatgtcagtgccaattttgccggtcacactggggtccccaaagaggtcaaggtaatcatcctgaatctgaaagaactcccccatctccagcaggatcttcttggcattggcgtgctccttctcgccatcaattcctgccatgtacatggctgcagctataggaaggtagaaggagtagaaagctgtcttgtacttgacaatagatttgtacctcttttcagtgaatctgacaagatccacattgccctggggggctgtgaggaggtccagggtctgcccaatctcagtctgataggaactctgcaggaagagctcgatcaggttcaggtaatagggctgctcccggcaatagagcttcagcaggcggtagatacatgcttccaggaggttagcatcattgatggcatccaaacccacgcccggcttctgataccagcagatctgtccccggcgggtaagggatgaatccatgatgtcatctgccaccaggaagaaagcttgcagcagttccacacaccagcccacagtccaggcccgctggagactatcagcatcctgtttccttggctccaccagctcccggaatgctactaccaccgtcaaaccccggttatacttgcctccaatggcattgtactccaggacct

SEQ ID NO: 336733 - DNA, 1000 bp, Homo Sapiens
ttttttttttttttttttttttttttttttcgggagacaagaaaacacaaactaatcaattttattcatactactcatgaaaagcaattacatttttacataaaatcattaacacatacaatagaaataataagagtaatacatctgattagaaatacaatataggaaatagattttaaaatagcatattttagtgatgaaatttatattttctacttatttatagcagcatctgtaagattcttctatctgttcatagttaactagcagcaaaatattttaaattacagaaattcagtagatgtttccctccaatgtttcattcatacagaatgtatcacgttaaccaaacaaaaccacttatatttcctgaagagaaaaggtgggaaaagatttcatcagttaccagctcccccaaaaaaagaagaaacgagggagaaaggatggaagctagaaaaattttgcatgcaattactaaaaaatatattctcaaccactttgaccaattataggtggattttgtgaaatctacatatgtgtgtgttagtgaaagttatgttaactttattttctgactttatactgcagttgaaaaatatgtggaagtttccaggaggcctgtcagagcctgaagaagatattggtgtgtatcttttatatttttaattggcttaaaaatgttgaggaaattaatgtgtttactttcttgctttatagctaagaataaaaatttaaattttccaatttgttccgactgagtctgaacatttcagaaattacctcagagctgatataattagcagcataatttctaatattacagtttattccattagtagaaataatatcattaggaacataccacctattcttctgtttatgactgcttctggattaatctgtctgaaaaggagaagctttggatatacatcagtaaagtttagcattaaaggttattttggatacgactaatattgttgttggaattaaactatgagaa

SEQ ID NO: 336734 - DNA, 1000 bp, Homo Sapiens
tctaattgttagaaactcatgtatttaattttatctttcaaagaacatttttaaaaggcttactctgcttatatgtatattttgcacaaagctttccattcataaacaaaaggtgaataggaatcagaattgaaaactacataatttcttttctccttttgagtcaaatcatcacagtatagattagtcattgtgtatgaagtgcattgccaagacatagtcacatttgtgtacaaatgtaaaggctatatctcaacagaaataaaaaacaaaaacatgccaaagaccattagctaataatactaataatcgaagagtagaaagcatgtgctaactgatctagactcttgtgacagctgtatatctacccagctgcgtgaccttaggtgtatcaaaatctcaatttcctagactacaaatgagtaagagggatggaggccccttacagttttaatattctagaattctaaaggtgtgtaactagagcaaattttattttctaaaatttgcataataaatttaaaaataggagaaaaacaaataattaaagtacatatttctagaagtcttttttaggtgacttatactaccaggaatggatttaccactaaatgttggttttgcctaattcagcattgctatgtaatttgatggaagtataactccatagacaaagagcatttggtcctaacatagcttgtattttatatgtatatacactatttctatttaaatttctgtatagtcatgttttacccttttaaaatgaagattagttttagtgtgtattttcttttgtctataaacattcagtgaattcacactgaaaactgattatgaacagatagtctgctaggcactaaggaaacacatatgaaaaactaagtcctcctctgccctcaatatgctcacaagactacagttactgaagcctgacctcaaaacctagctagcaaagtccttgaatcaggtgatagttcagaataccattcatgctctc

SEQ ID NO: 336735 - DNA, 1000 bp, Homo Sapiens; identical to SEQ ID NO: 157876

SEQ ID NO: 336736 - DNA, 1000 bp, Homo Sapiens; identical to SEQ ID NO: 157879

SEQ ID NO: 336737 - DNA, 1000 bp, Homo Sapiens
ttttttttttttttttttaatattgaaaataaaagcatttaatatctcttaaagggcatccacatctgctttatccctagcggaagagtgagggggcttcacacgtgcactcacactgtggagagagttggatttcccagacccctgagggcacctgtcagggtcatccccattggtgctgcttgaggctactggggactgtggcactggacgtggctggagcaggtggtgtcacctgagtacattctttgctagcagacagtggatgaggccccttcctcttcctcaccaagcctggggctgtgccagcctgtcttaggccagggccttgcagaaggcgctccaggcgtggaagcagcgggtaaaggcgtgctgctcattgcccttgcggaccaggcgcagccggcgcggccgctcatgttccttggaccgcatgtgctggatatatacctggcaggccttcaggctcagcttgatctccacctggctagtctgggtccccacccacatgtagacctcttggccattgtctagcaacatgatgtcatcatctgccaggtcatcttggcaaaagtcggagcatttctcagtcactgcaaagtagcccttctcgttggagcaccggaagagacgtgtgtgtttcatgtactcggcatcgtcatcatagggcttctgtgccccaatgcccacccagaagaagttctcaggctcctcaccttcgttgataacctgcttgctgtaggaggtgtcaaacatggtgttcaggatgtcttctgccaacttggcttcgtcagggtctgatgcccggcccacccaggcatacacgatgccctggttgtcctcactctcaaagggaaccttgaggatgaagcagaactcggagttgaggaggctggagtcggtgttgatctggatgcaccgggtgcagagggcgctgccgttggtgcggatctggtagaggctgggctgttgggcgccctggaccgccttcctcttgccc

SEQ ID NO: 336738 - DNA, 1000 bp, Homo Sapiens
taaatacatagaccctaacttgcataaatagcatcaaacagagccagcttagcgatccaaggcccacttgatctttagaccctgaagagtaggcgccctttcctaccctgtctccctattcccatcatgctcagaccccaggcaagtttcaaagcagttgaaaatgggcttttcttctagtgatggctcattaactaatatcctgagtcccaactggagaaataccttgcataaattacataccacctttttactcaaggagcttaaagtgcttaatatgcgccagctaatgctcttccacatcctttcagattagtgtgagatagtggaatccccattaaatgaaaaggaaacgtgactgacttcctgtgttttgggtcccaactgtgttggtgaattggtttggttggtatagagacggggtcttcccttgaccttattgacctttttcctccatcagccctcgttttgatatggagaaaactctcctcaggactgcattttcattcttctcagctttctttcacaactaactgtgcaaaacagaataataccaagaaattgagttaagtgtctggactatatattaatacccaaaatagaatgtgacattttcagtgtaaggccatcatggcctggagacaacctaactctggctaagttttcagtgcatcttactagaggagccaaaagtatgggctcagagttgagtgccaccctcagtgctacaaatcaaaacatgccacgaatgagaatggacatagaaccacttccataggtaaaggtctaaaatttgctttagttccaaaaaagatatttgtccttttcttgcctcccagaatccagaaaatgtcccctcatcgctgtccatctgctcctggctgggccctcaaatgtagaagggtcagagctgggaagccactgaaatggcattgctgagccccgtccccctccgtgcccacatggtgcgtctcaaattctttctcatgccttctcccgg

SEQ ID NO: 336739 - DNA, 1000 bp, Homo Sapiens; identical to SEQ ID NO: 157880

SEQ ID NO: 336740 - DNA, 1000 bp, Homo Sapiens
tttttttttaaaacaatcaatttttaggtttattttttacttttaataagccagtactataagagcaccatttcagcacaacacaatcatttgtgaagtaaggggttttagttgagatctgtgaaaatagtttatatgggaaagaggtatgatggctcagagtgctgtcaagaacagctttctttctaaaatgaacctgtaactttccaacaaccttcaaatgcacagaagtcttagttatcattctctagcattagaagtggagctgggagaggctcaggaataccagtggtagccctggggccagccagggaagcgagagggtggcctttactatttgaatacagtttataactgtgaaggcaatattgctgtaagagaggaattggagcattgtaaatctactctgtgcatcttccatttaggagatcttttacttataggaaaatcagaaaaatagccacaagcaaagccagaaagctaaagactttaagaaaactttcaaagggagatggagactcttgtacaactcgagctttgatgaccttgaatgttcggtcccactgggtcatgatggcatttctggctccttcccattttcctgggccagtcaagcggaactggtatggtgagcatgggccaaagaagacggtcagagccagatgtggatccgttaggagcatagagaacaggttgggttttgcattgatataggtcaggagttcatctatgtatgtgatataatctgattgtaaagccttgcagtagcacaagccaaaccaactgggcttgttttctttccttgcattaatttcctctatcatgacacttggtggtggtaacttatttacacctttcaggactcgaacagcccaccgagcttgtgtttctcctgtaggtatcatggagcccaagggtttgatgaggccaataatggccagggttggcttttgcagatgtgcagggaagatatacttgtacagtgaggcctggccatctt

SEQ ID NO: 336741 - DNA, 1000 bp, Homo Sapiens; identical to SEQ ID NO: 157882

SEQ ID NO: 336742 - DNA, 1000 bp, Homo Sapiens
aaaatttacatctagataaacaatcttcagatttttgaaactttaataagattttaaaaacatcatgactttgaactgaaaaacatacacgtttagcacacaaatattgtaatatgaatgaactccaactccatttgaaaacatgtgaatcaaagtacagttttagaagttagtaattacactttaagcaagttaggcccttgctgaatacagccttgtaaaaagagactagtgcatattttaatggtacactgtggaaaagtaccatttggttgagttttcgctttattaaagaaccttcttgaaagttgggtagataaaggctaacttcctatgacgtgaaatttccaatggtaacagttacattttgtaacagaacactttctatagatttcttttcctagcttaaaattttaaaagcaatcatttgtaaggattgcatcaacatcaatttagcagaggaagatcaaactttattgaaactgcttgcatacaaaatatattgcactataaccaaacaaatgtcaacataaaatccaatctgttgtcgctaatatgtacagagaatattgcccaagagcagttacattacaaggtcattctaccttggttaattatctacagtattttaaaaccaaacagcttacagatgatgtgtgcaaggtaccaatttctgttttcaaatactatacattcccagaataaataactagaaatcaacattaatgtttggcaatactttttaaaagactttttaatatttgtgaaatcatgtgcagtttgttgccattttatatgcttgtttgtatgcaaggaaaagtaactgtaaaatgaaaattcaaagaaacaaactcacaaaatacatcagaggcagaacttcagtttttacggctctgtacagattcagtggtacccctactaggagttactttttaagaaaaatataacatcttagagtgaaggtccttcacatatttttcctcaataaatttcacttaaa

SEQ ID NO: 336743 - DNA, 1000 bp, Homo Sapiens
tgagattttcataaaaattttattttgcatttttaaataattcaatgcattggcagtatagttaatgcctctatgagagaaaccaacgcaccagctcagccaatatcatttttacagagacatcttgttggaaaacaacaaaaccacattaaaatgtttgtacacagagttactgtactgagaacaaagcaccaacaaaacgcttgtgcgccacacatttgaaatgcaaagccacacaggcagatatagttttatacacataaagcacatgaaaccagcttttaaaaaccagataacatttcattaattgattgattttagaacagtttaccctggtctgtacaggaaattggaacttactgaaattctgacaagacgagcatgcttgttaagaacagtgacagttggtggatctgcaatgagcatgaatgttggaaatctgcacccaagaaaaggtggttcagaagactaattggattctcataaagccaagggggcactttctgaatgatcatcacaatttaatggccacctggggtgcccttggggaaagggtcttcctttggggacaggacgtcaggaagttttcttcataggagccaggcaggctgttcctgatggttctgctcctctacttacttgggagggagcataggccaggcacgggccccagggttttagactgcagcttggagcaagtcaacttcaacactgagggctcaactcagctcatgttctccagctgaggtggcctccatcttccctctcatgcatcttgacctactacaatttcctcttggaaactcaattggattttaacagagcctttttcatcacaaagtccggtggaatccgtttaattgaaccatgatattatgaccaaagcttccaagaggaaaggaattttcatttcaaatcactgccttcatatagtaatgtaaccagggcctcctggaactgtaaaataatgtttttcaagaagggaaagctaaaatcccat

SEQ ID NO: 336744 - DNA, 1000 bp, Homo Sapiens
ttttttttttttttttttagaaaatgttattcttttattatttcaaggaggtaatacatagcccaatatggcaaagcaaaagggaattagaggcagcaaatggccaggtttttctaagcgcctcatgctgcatctctgagctcctgtctgcccgcagcccacagctgcttacatgaaggccaggtcagtagacagatggcccaacttgatactccactgactgagaaagggctcaatgtgcagcacagcagaggcactgccaggacccagcacgctgggcggcaccccacgctgccaccaccagctacagaggctagtgccttagtagcagccagtgtgtctagcacttgattttattcctgtgagcctagagtgggcaggacgtgaataaatcctgagtcataagttaaggtgaaagacttagtagtgttaatactcttggtgagaaaagacaacacagtcttggaggagagtgggcttggagtctggtggaagaaagatagaaacccccagaagggcctcggcctgcaggcactgccttgaggccatcagagggggttttcacggtacatgatagggaggagtgaggcaggtgggcactggagggctgtttcctctggcacagttgaactagagggtcactttccactcataattggtttcctaggtctaagtcaccacacctggggctgaagcaagtcttgcctgtgcaccaagcgtggccttggaccctggagagatgcaaggctcagttctccagtgttgaagtggaaggactcccaactgaaggagatctttctctccccacctccagctcttttcccttacaaatgaccagggtgcaagtcgagaggcagaggcacctcctggtgcaactccaccacagtcttacagagaactcatcttggtgggacccaaagcccagccttggcatgaagcagacttattccacccatcggagggcacccagtctggtgactgaatggtggcgtgcaagtgg

SEQ ID NO: 336745 - DNA, 1000 bp, Homo Sapiens
ttttttttttttttttttaaactcatatctgtttattctccccaaatcaggggacacaaaggcttttttttttttttctgatgagtgggtaatcctaaaataagcaggaaatgcctgtggctcagcctaactcaaggtgagacgaagctggagctgggagctcgaaagtgtcccccagctccctcctcactttgcctgtaactccacctctgcagaaggtaaagtagaattggtagctgtgtcactggtttgggttgagtcctcggtcagggccctctccagactggcgggaagggcgtggatcagcctctcccggaagtcctggcccatgaagacatagagcatggggttgaggcagctgttgaagaaggccagggcacttgtcacatccactgcaataccaatttctttgtacatgccttgcaataactcacggattctgactgtggctataagggccaccacctgatatggggaccagcagagaaaaaaggctgctgcgacaaaggagaggacccgtaagggacgactggacttaatcaagccttgcttgtggatcttggtggcaataagcccataactgacagcaacgatggacatgggtgcgctgaagccaatgatgaaccggatgatgcctctcaccgtcaacatggcaacggccacatttatcctctctttagggtcgttggtccagggcgaaaagttaaaagtgcaggctactgtccccgttttaccaggtactgtagtcacacgaatgataactggcaatgtgaggagcagagccatcacccagggcccaatgatcaccttcttggccaggctcacggtgcggtggttctgggtccagactggatgcaggacgcaaacacagcggtccagagcaatgagggcgatcaggaagacacttccgaacaagttgatgtccactatggtaaagacgaatttgcacaggaaccagccgaaaggccaatgtcctcccatggccttcctgaccatgaag

SEQ ID NO: 336746 - DNA, 1000 bp, Homo Sapiens
aatatttacagaaactgcatttaataaaattcaacattcattcatgatttaaacaataaaagaaaactcttaacaaataagaatagaagaaaccttcaacagtctgactttaaaaagagaaagccccagaaagcctatggcaaacattttacttaatggtaagataaagtttttttctaaaaaaacactatctcatctaagccttacaaatatccccactttgtctcttctcttgtactcttttcccacttccacttagtctcaggatataggctgaggtccagacatgaaaaaataacacccacagtggcctcattatctacttcttaccctcaaatcagggggcacagaagtattttccctgaggaaatacttgagccactcatcctggaatgactcaatgtgaccaaggttaaatgaagttaggactgggattagggtatctggtattaagatgtatgttggttttagcccatggtttctgcttcagaactcccatagcccttgctacagtcctttgttataatgttgggtgtattaagcctcaggaaacagaatctctctcctttcctttcatctaccccaaagcaggactctaatcttcccttgcctttctaattgtgggtcttaagaccctccccagagaggatcccatcctatacactggaggaaagaatgctgacatcatgaagcttccataaaaacccaagaggactggatttggagagcttcatgagacgtgaacacacggaggttcccagagggtgatgcactcagggagggcgtggaaccccgtaccttgccctatgtgcctcttcatctgtatcctttgtagtatcttttataataaaccttgcttttataataaaccagcaagccgaaataaatgtttctctgagttccatgagccactctacccccaaagagggggtagtgggaaccctgattgaagctggttggtccgaagtctcagaagcctggatttgtgacttgtgtctca

SEQ ID NO: 336747 - DNA, 1000 bp, Homo Sapiens
ttttttttttttttttgtaggccaaagggtacttctttttctttattaattactcagaagtctaggccacagcaatcctactgttctcctctcattttcctaaactattttgatacctatttctcagactttatgggctattagacatttctcacatttccatagataataactcatccgttttgcaacctgattctcaatattaagagattaaaactaatgtatatgactctcagttgacacatactgaagtacagaaaaattccatcatttccttctgcaaaatgaaaaagacttcgttttctcaacagctgcatcatttttttatgcatagaaaaaaatgtgcaattactccaagtacaatcaagtcatttaacatggctttaccatcattgtagttacaggatattttaaaagagaaaaaaaaatctcaaagcacaggtcctgctgtgcagcaaagcaatcaaattccttcataataacagcctgatgggattcagcaatctgaggaataatgaataaccactctaatcagtaaacaggaaaatgctacaacagtcactgagtaaaaattggactatcatctgttgattctcttgatcgacatttcaaacaataaatggaaatgtaagtatctcttaaaaagaaaaataacttggtttagtgtgcttaattttaccaggcagtgaggaaattatatatcaccttgactgtcctgcagtgttgcccagtcaataaaatgcacaaataatctttttcataatacatggccaactttatcctatcacttgaatatgtcaggataaactgattgtgcagttggttgataacattgtattttggaatggattatttgaatttgttttgctactttattatttgatattcttctccagtgttcatcttatgaagttatttgcatctgaatatgaagagtctgtttcaaaatagtcttcaagtttccaacgcagtgtctcaaatgtaggtcgttccttaggct

SEQ ID NO: 336748 - DNA, 1000 bp, Homo Sapiens
ttttttttttttttttttcagcctttaatgccttttattcataaaaactgtgaaagctagactgaaccattggaaacatttaactcagactctggattcagagtcgggaacccttagttctatctgaatccaagacagccacaccttagtatactgcccaaactaatgagtttaataaatacaaatactcgtttctttttgattagtgtgattagaactgaacaacggcacttaaggaatctggaagatagcctggatagatttctgattcatcccaagacctcaaagacaacacctgggtaccaaatttctttatttgaaggaatggtacaaatcaaagaacttaagtggatgttttggtacaacttatagaaaaggtaaaggaaaccccaacatgcatgcactgccttggtgaccagggaagtcaccccacggctatggggaaattagcccgaggcttagctttcattatcactgtctcccagggtgtgcttgtcaaagagatattccgccaagccagattcgggcgctcccatcttgcgcaagttggtcacgtggtcacccaattctttgatggctttcacctgctcattcaggtaatgtgtctcaatgaagtcacacaaatgggggtcatttttgtcagtggccagtttgtgcagttccagtagtgactgattcacatttttttccaaatgtaatgcacactccattgcattcagcccgctctcccagtcatcacagtctggtttcttgatatcctgaaggaagattcggccacctcgttggttctgcagcttcatcagtttctcagcatgttccctctcctcatgagattggtgaagaaagtatttggcaaagttcttcaaagccacatcatcgcggtcaaagtagtaagacatggacaggtaaacgtaggaggcgtagagctccaggttgatctggcggttgatggcggcctctgagtcctggtggtagttctggcgcacctgcgaggtggacg

SEQ ID NO: 336749 - DNA, 1000 bp, Homo Sapiens; identical to SEQ ID NO: 157883

SEQ ID NO: 336750 - DNA, 1000 bp, Homo Sapiens
tgaaaatgttaacagcattatctgtttgcacccctcatgggtggttaacaacagcaataaaaccacaagcaaaccagcctgcaccatcgcccgggggcagggcctcaagggcacccgttctcagggcccagtgccctccagggtgaggcatcgcaacacatccacaggcactatcagagtcacgccgaggtcacacccatagtgatgcatttgtgacacccatccgctggcggtcaaaccgagtgtcccccagccatgtgcacaccactgctgatggtcacacacatacccttcgccctcctccttaggggaccctgcccttccctgacctgccctgcacaccttgggcaacacatccagctcccttgggccctgtgcctcccagcgggtgaggctcctagcaggtgacattcagtgtggcaaggtctctgggagcaggtcccagcaggtaaagtccccaacagccgagatcctcagtaggtgcagcctccagaaagcaaggtccccagtaggcaccatccccagccccagctggcaaggtccccagcaggggaggctcctggcagtgaagcccggcaagtgaaatcccaggtaagtcacatgcctggccaccaaagactccagcaggtgaggccccaggcaggtgagaccccaggcagccgaggccccaggcagccgaggccccaggtaggtaaatcccccgactagtgagaccctaggtaggtgaggccctgggaaagtgaggtcccggcagcccaggccccatgccggcctctcaggtgaaccaagccgctatgctgcgcaccgtctggtacctagattcctgctgcagcttccagcaggccttgcagaaagccagtgcccagctgaaggagcgaggccgcagcgtctcccgccagtgaaagtagctcaggtagcgggcgtggtccttgtccagctcctgcaggtaccgggccaggtccttggggctctggaagtcgtccacgtggatgaaggcgtc

SEQ ID NO: 336751 - DNA, 1000 bp, Homo Sapiens
ttggtttttgttaaaacatgaaaaaaaattttattgttttagacaaagaggccacttttggaaaataatacttttttttttttagttgaatcaggtgaagacagagttaaaatcacataggatttgcatttttaaaaaaggaaagcactaggattgttggcactggagtaactatttacactgaacagaggtttggccttttacataacatcgatacaatgcattttccaaagtctgagaaataacaaggttctgtctcgaatgcttcacagaggaggttcggatttggggacaagtgtcattaatgagggccatggaagttcgtcagcttcagagtcacatgcaatctgatcctgggcggttccgctgctggggagcagctggctacggaattgaaagctaatggggaggggtggggcagcctctgggacaaggcctctctccgcagacccgggccttacaggttttcaccaggttggtactggggctctgtcgcggtaaagtagtcttccaggaagctctgcaagtactcaaaagtggggcgttcttcagggtcctttttccagcagtggatcatgagctcatgcagagagatggggcagtcctgcgggcagggcatcctgtagcctcgctccacctgctccagcacctcccggttgttcatgcctgggtatggcactcttcctttggtgaccagctctgtgagtaagattccaaaagaccacacgtcagacttgattgtgaacctcccgtacagggctgcctcgggggccgtccacttgatggggaactttgcaccttgtcttgctgtgtactcattgtcttctatcaatcgggccaatccgaagtcagcaatcttgcatatgagtccattccccactagaatgtttgctgatcgcagatctctatggatataattcatgcgctcgatgtaagccattcctgcagccacctgtgctgccatgtccacaagatttggtaatttcagagctcttccttc

SEQ ID NO: 336752 - DNA, 1000 bp, Homo Sapiens
ttttttttttttttttggtggtacaattctttttgtatcatacttgaatatcaccattaatcaggggagaaaacaactaaacaatttttcctaataacatagactgatacaaaaataactgtgatcagtcaatttatctgaagatcaaccacacatagcaattctgcctcatttgtttttctgatgccaacacaaatatttagactttaggctagcaagatatgtatgaaagttggctcaataaaaacttcacatggaaaacaaattttaaaacaaaaatgaacatttcttttacttaaattcttgtacttctaaggtacaaatgatgaccaataattttatctttcttcctttgaatatactgtaaattctatgaaaaattcatttataaaaacaaagcaaagaatagcataaattttattttctttcacaatgttatattttaatagaagaaaaaaactacctttctgataactgtaacctaagtaaaacaaatattttacatataatttgaggcaaagtaatgagtttcttgaatcaactggagaaattagtcacattacctatgtcatgcataaatgatggtaagaagaaaaaaaaagcatctgatcatgtatgagaactgtctctgttcaaattatgagaaataaaatgaaaattgctaaagggagaaaatgaataaaatatgatttaaaaaaaaaccatatgggaattgcatagatgagaaaaaaattttcattctagggatctaaaagtaatgtttttagctttaaaaacatacacacacatatataattgagacatgtctatcatcttggctaaaattttaatatatgtctccccaaaagcattttaaatatgaaagccaagattcttaagctcttgatgatataccagaagggtatactttattatttttttaaaactacaagcaacttgtcaactctctaggccgtaagaggatggtgcaaaacctttcttgctgtctatttgttacctg

SEQ ID NO: 336753 - DNA, 1000 bp, Homo Sapiens
aacatgcggaggtggagtcgcatacaaaataggtaataggttataaactgaagcatgagtttctgtcaaagtgaggatttaggtgcatgtgaatttcatgcaaatggcctgtaggtgcttccaagttcacgtagcctgaacaatgtaatgacacttgaggaaaataaattattcatgtgaatagcatcaagggtctaacgggtggaactaaatgtgcccacaacactggtagtgtgcttttccaggggatctgggtaacaactaacatcagtcgctacagtgtcgtatttcctgcagcacctaatataatgctgtgtattcaatagatggttaataagtgcaaattaaaccagtaagtgtctcgtcaatgtagctttggaaagctgcagaagggatagtgaaaacatgggtgggtcctgggatttttttttaaccatatccttaaatactttttcattatacagttatttctgtagtgcatgccatggaaatgtgaaatttgtagaattacaagcatctaggagaaaatagaccagtatattaaattgaataaaatgtatgctgctggaaagatgatcctggagtatttatcaatggcgtgggtgtcgattctcatgctcacatagctgcttctctgacttttcctctgtggggagctcctctctgaggccagggtcagctgcaccatcatcctgtcgggcttctctccattctctggcatgtagttgtccaggtcattcacctccccatcactgtagttgccgtccagcatcgcagtgcggggcggaggtaatccgctggtgcagggaagcttctcccgcagcttctgttccttcctctcctgcacagtggtcaggtagttgacggccgcatactccagcaccgagaggaacacgaacacaaagctgacccagaggtagatgtccacggccttgatgtaggagacgcgcggcatggaggcattcacgcccgtgatgatggtggacatggtcagcaccgt

SEQ ID NO: 336754 - DNA, 1000 bp, Homo Sapiens
gaattcactcgatattttggactcctcagatgaacggaacattgcacacacacttggaacagagagagagagagagaggaaagtggactcccacagggccacacgcaccagatcaaataacttggatacagtgcaagaatttcccaaaatgattgaatcatcattaccaaaaacttgccataacaacaccaagaaacaaaaaatgtttaagccacactgtttgacttgggatctttcctgctttttttttttttttttaaatgtttgccacacagagagaaagagggctagtgggtgggaaaggacagactcacagacgtgagcaggacaggaagggacttcagagtggagctgagaagagggtagggagagacaggctcaggagaggggagggtggggatgtggaaagccatttcttagagttcaggcatgttcttggtcagcctcaggttcctcttctttaccctcgtcctgccgggcactttccttaggtttggtttcatctacagcttctatgttctcttcagcttggctgctctccccagtctccgttggaggctgggctgttgccttggcagcagcatcctctgcggcaggggtggtggcagcagcagcagtgacagcagcaggcacatcggcttgtttaggctcctccttggctggggcatcttcagccttggaggacggcgagttatcagtggaagctttagtggcactttctgtctcagctgagccggccttctcctctgaggatgcaggagcctggggggctgcctgctctgtggcagcatcaccctcccccttcttctcctcggaaggagtttctcctgctttgccgggctcatcaggcttggagccagtggctggggctgcttcggcagtagtggtgccttctcccttcttctccaccccatcggcaacaggggcttcatccttcttattagcttcagcctcagcagcttggacatcatccttcttctctcctttgagctttttcctt

SEQ ID NO: 336755 - DNA, 1000 bp, Homo Sapiens; identical to SEQ ID NO: 157885

SEQ ID NO: 336756 - DNA, 1000 bp, Homo Sapiens
tcaggattccttcaactttaattgtgggggtaaaatcaggcagccactgaagataaaatacggtccctgggagtaatcacaatgctgttttcttttgtaaagtggacataagagtagtttttttttttttattagcgcaagtggtcaaaagttgtcaaaattgtcctcattcctcgattgtctcttttttaccagtctcttgcccttcaaacagaggatacctggcctccacatcagcccatgtgatgttgccattggctaggtcttggactatgctgggcagctcagagatctctgctcttatctgccgcattgagtcacggtccctcagagttgcagtgtggggggtcttgttcactgtgtcaaagtcaatggtgacaccaaaagccacgccaatctcatcagtcctggcatagcgccttccgattgacccagaggaatcgtctactttgtgagatactccatgcctggtcagggcttccgataattccttgacaaatggcatgaactcctggttttggctcagtgggaggacggaacatttgaatggagcaactacagcagggaaactgaagaatgttctctgttcatctccttctcgtacatggaatgtatgttcaaataccgtatacatgatcctacccaggccgaaggaaggttcaattacattcggaacaacttcttccacatatagtgttttctggaatctcttcacattgatcatgtcttttgttaactgaaatgttttcccttcagtttcaattgtgaattcccctttctcattcagcagcatctccatttctgtaatgtagcactcatcacaaatggcaagatactccatcaccagttttgcatccttcttatatgccttaccaattgctcccttactgggttcaaactgaacaacattgactgttttgggttctttcagaggtttctcagctacaagtgggactttggtggctcgtgcatgacaggagaggtcataacaggaacgatc

SEQ ID NO: 336757 - DNA, 1000 bp, Homo Sapiens
tcattgtttaaaactctttactgatgtacatgttttaataaaacaaataaccaaaaaaaatacacaaatccatagttatttaaaaacttaggatttttaaaaaaacatgtctataaaaatacaacgtttaaggcagtttggaaatgcatttgtacatttctacaacgtccataaattctcttgaaaataagaatgttaacttcaattctataaaatacactgtacattttaagactgttctaaatatagcacacttcacaatggactgtgggttttgattcctgatgacaaatggattctatacatttcaggggggaaaggtgtaatatggatgtgagtttaaaacttttaatttctttttaaaaataaattatttctgaagcatacaatttataaaaattctatatacaaagtacagcaactggtaacaaaccccagttttaatacattttatatacgatgtaccagggtttagcaaccctgataggagcagaggcaatatacattctccgcatatttaaacataaaatttcttgatgtaaagaacaaaaatgacaaaaaaacaaacatcataaagagactttcatacatggcagtgcagagcttttttaaataaaaagttgcattgttcaacaccatggcaaccccttagatcagcatttttggacccttaatcctaagaaatgtgctaagagatcagagtggtagcaatgaaattaaggtcaagggctcaaacttatccaaaaccaatttaggggttccctctaaggcaatcgccacccaccctcacccccacgtcactgagaattctgggcgcagatacaaacagtgaaagaatgaatcggtaagtgggacttttctgtttacataggattataatatcctcactggccacaatctgtaaaagtcgatactggcacttttttttgccccctcaaaggaaatatgctaatagacagcccctttgcaaatataattcctccttcccaacccttcaaat

SEQ ID NO: 336758 - DNA, 1000 bp, Homo Sapiens
ttttttttttttttttttttttttcaggactttggtggttttattttacaaaagctttgaaggttcaagccagggggtgcctggggcccagagacttgggttgtccagaattctggctacaagaggagaaggacaccacccctcctctggaggccatgctctgtgccctcatgagctgagcggagccaccacagtagtgctggtggtggggggcatggggcctgtggggaaggagcccgtgggtgagcccagtaggggtccagggaaaggcatgaggtggctaacaggccctgacagcaccacagggcccaggccttggtagagatgggcagtacctggggggcccagtgtcaggcctgaagccacctccccacaattcccgctaccgctgcccccagccaccaccataaagccaccagctggtccttcggctgctcctgtgcctcccagactggagccccgtttctttttcccttttccagatgccttgcggtttcgagtctgaataccatccttccgcatggtcagtggccggttcacctggtgtagcttgtagtagaggccgcaggcattgcacacgggatccccactggcatttctccgccacagtgtcgtggtggtcgtctggcagttggtgcactgagtacctgcccgtttactgacaatcaggcgcttcttgggccggatgaggggcctgttctgcccattcatcttgtgatagaggccgcaggcgttgcataggtagtggcctgtcctgtccctccgccacagtggagtggctgttgctccgcagttcacacactccctggcctcacagggaggcagggggagagttccacgaagcttgggagaggaataggctgctgaattgagggggctcccggtgggagaaaagaaggtactggaaaagtcagggcccccataagcactattggggacagggagtgatgaaggcagtgcaggtcccagggtcaggaggtctgggctcagccgctctgtc

SEQ ID NO: 336759 - DNA, 1000 bp, Homo Sapiens; identical to SEQ ID NO: 157886

SEQ ID NO: 336760 - DNA, 1000 bp, Homo Sapiens
taaagaagcttgaaaattttatttaattgtatctttgatacattgaaagctgagtatttttaagacaaaggtttcaggaagaaagttctctttccaatttcaccactgtggctaccagttcttctattctcctattattataatgcagatatgtcagatcggaataatttacatttacaaattatatcatagaaaaataattttatcgctaaatgtaaacaggttggggtacttcatccaaaataagaagaaaataacagaatctagcactttcatattttaaagctgatattttagcaatattttgataaaactttattccatttgtaatttttggctacacaacactaaaagaaaatttatttattggcatgcaaagcaatgtggcctcagaatacacctcttaaatttacaggacttaacatttcaaacatcccacgtggctagcaggtgatgttgtgaagatgatcttgaatagtgatatagttatttcctgtcagtgattttggtctgaatcaaccagtttataaagtccctggcggcaagattatcaagaatggtgttcatctcatcagagaaagaaccatcagcatgtctgcggccaagttcttcaacaatggcgacctcttctgggaaatctcgccttcctcggcctttcaccagccaagcaatgaattccttggcagcttggccttccaaataagaacttacatcactggtaaaggtcccttcagcatgtctctcaaattcatcgtgacgtttggcaatgttattcctgttcctcttggtattcatcaaccactgcacaaaatcttgggcacgcctggagtccagatacttgctgtagtcactggtgaatgtgccctgtgaatggcgcttgtcctcgttcatctgatcaggatcactgagtgggtctgcctgggaagctgagaatgatctggatttctcctctgtgtcttgaagggaacgttgccagctgccttgtaccagcattacaaat

SEQ ID NO: 336761 - DNA, 1000 bp, Homo Sapiens
atatcaatattaatttaatagcagctctgtgttgtgattttaaagaacaagataaaatatgtcattcagcagtcatttaaaaaataaaagactacagatacaaggaaataaaaaacacttttaggagatgaaaacacaaagtagtaggatacccaacatgtacacatcccatcttcaaatttaaaatcatattgtcagttgtccaaagcagcttgaatttaaagtttgtgctataaaattgtgcaaatatgttaaggattgagacccaccaatgcactactgtaatatttcgcttcctaaatttcttccacctacagataatagacaacaagtctgagaaactaaggctaaccaaacttagatataaatcctaccaataaaatttttcagttttaagttttacagtttgatttaaaaacaaaacagaaacaaatttcaaaataaatcacatcttctcttaaaacttggcaaacccttccctaactgtccaagtatgagcatacactgccactggctttagatactccaattaaatgcactactctttcactggtctgaatgaagtatggtgaaacaagtaccaatttttagaaacatattgtcttctcagattgaagtggagggtccagaaatgcaacacccagcattctttaaagaaaataatagctagaatctttctgatacagattccaatatagattccattattcaaagtcctccacaaattactgggaaaatgtaagaggtaacttcacaaaaatcacatattgagtggaataattataactgatatataaataaggatttactaaaaaaaggcttcaaggggtgatattttaaatcaaggttttaaatacaaaaggtgtcttgtgttgcttaatcatacagtttcgtacattttgtatagatattcctcactctacagtcacagatttggcaagattccgtgggaaatcaacatcatagcctctcagcacagcaaggtggaaagccagcaact

SEQ ID NO: 336762 - DNA, 1000 bp, Homo Sapiens
tttttttttttttttttttttttttttgtggagacaggccagggaggccacctggagcctggcacagtggcctcatttattatgctgctctgctgctcacaggggaagcccgtcccccaaagtcctcttcctcatcctggtgagtatcttgtccctggattgcttgtcagccttgtctgcctggagcaatcagtagccagcaggttccccgcctttcctggagtccgaggcagctgcccagccaccagccgtgcggacgatggcttgcaccacagcgatgaaggtggacgcgatctgggtgtgatggtgccgggtctccagggctgcagtcactgcctggtcaatgtttctctccactgtcgtgacgttgggcagaagcttgttgtgcagccggggctcctccacggccctcttcacgtcatagccgaaccagaggttgtagatgatggccagtgcagtgtctgtggtgatctgcgtgcccccagcagctcccaccaccatccggacctggccgtcctggcccaccatgatcgtcaggcacatggacaagagcggctgcttccctggctggatgaaattggcaggtgaggggggtgccccaaactcattggtgaatgctgggagagctgaagtcgtccattcattattgaacaggatcccactgaccggggagcagaccttggagccaaagtagaggttgatggtgctggtggcggacacagcactgccgtcctctgcgacgacagacaggtgagcagtgcccccgtcatccggcgtgtagaactcgggcttgtagtaggagatcgggtgagtggtgtggtcagagatctgggaccggagctgggcagcgaagaactcagaggtcatgttgcggaccacctcagtcacatccacaaacttggggtccccaagcagggtcctcttggcgtaggcaaaccggaaagcctctacgatgcggtggtacgtcaggcccttctgctcgggggtctccacgctctcc

SEQ ID NO: 336763 - DNA, 1000 bp, Homo Sapiens; identical to SEQ ID NO: 157887

SEQ ID NO: 336764 - DNA, 1000 bp, Homo Sapiens
ttttttttttttttttgtggcacacttagctttattgaaatttaacaaatgctttttaaaataaccccttgtacagcacatgtaaaatttaattattatatttttacaggttgtcttttatctgagtaagcaaaaatacgtctttttttttcttacttaaaacatgtagccagaattcaaaccacgtagctctggtaccaaaaaggcaacgggttatgaaaatcacagtacaattttaaaattctttaagttagttaaggatatttaaaacaatgttcacttatattgactgacagtagaaatcatgggtcagttgacattaggactagtagttacacctacaatgagagcagaaatggaaagttcaagctgacctgagctacactgttcaggacacaccatctccataaatactgtagctgagtagctgcaatgactagtcacagttgggcgattaaagtcacgtgtaaatatagccaaagcaaaaatatatatataatgcactaacttggatataaaataaagtgggcatttattaagagggtacactatcaaattaattacacaatacacaatttaagtttcaaaattttatcttggaaagaaaaatattaaaatgcacacctatatggacagtaaagtagaaatttttctgtcattggtgtttattttgtcattgttatttactggataagtagaaataatttacgacccacaaaaggctttctcaagtgaaacactaattacagacattgtaaagaacatagcttaggaggcttgttttaaaaacgaggcagcattttcctgaaaaagtttggtcctcgactcactataggctagtcactatggtcagatggttaagcatttttgaagtttgtgtgtgtgtgtgtgtgtgtgtgtgtgtgtgtgtgtgtgtgtgtatagctaacttttcagtaccagaattagtcaaagccaaaccaaaccaaaaggaccaaaaggcaaacagcccttaagaact

SEQ ID NO: 336765 - DNA, 1000 bp, Homo Sapiens
ttttttttttttttttttttttttgtttgtaaaattttaaaaatttaaatttattaggatttattaacacaattacacagaataaagttcaggatttcattaatgatggtcaccaatatgtgcttctttgtggctttttaacccataattctcatgattcaaatttattcatattatagttgaatttcatacacagcttcacaatgtggatattacaggtccaccagtaaaattaatgaaaacatatctttcatgaaaggcacataaagaatctaaactaacacatttaaggaactttgataactttgaatttctttacattacaaagaagaaaatcctccaaatgaaacagatatgaatatagtttatggttacacacacacacacacacacacacacacacacaaatatacttcaacccagtgacaacacgtaacttggaaactacttaccagcaacgtgtactgaaagactaaccttttccaagatgagtaaaaaaaggagggtggggtggggagtgctgtttactttgctgaaacaaggtcagagatgacacatcatgaataatcaaaagaaaattattctatcaaagctcagtatctagctgatacataacacttatttgagcacacatataatcactgacttattaaacactattactcattttctaagtgtaatcgtccatttcattctcagaaataatagtataattgaaaaagaaatgatataatctcaagcaagtggagaaatttgaattatctaagggaaaaaagtaattttaacatagtgtgataattacatttgaaattagttatatgtataaatttaaatcttgcattatatcagcaatagagtattcaaagatccttcttgttatcttcccaacaaggagctatcatgtatgctaggtacaagagactcctcaagggaaataaaagcctcaccaatcaatgtctcaaaattcattatgtccacaggttttttttttacccacaaa

SEQ ID NO: 336766 - DNA, 1000 bp, Homo Sapiens
tttttttttttttttttttttattttttaagttcgtattcattttatttgacaaaaagccagctttggcaacacatacccataataaaagtcattttaaaatcgtggcccaaacactaagaaaaaaaagaaaggaaaagcttgaacaacaacaacaaaaaaattaagaacaacctataaaaaggttctgggtagcagccattagggtaatgtagtgtctgttggcatcttttttggcatctgcaattgaaagagagggtaagaaaaagaagcaaagaagggaggaaagacaatggcacgtggcatttcaaaagaaaggactcctgtgtgtctttgatcctgccttctgcatatttctctgagcaatcaagctatggctgaaggtaaacatctaaaagaaatgacacttaacttttagatgggcatccactgtcccagtccaaagtgagacaagacagtatattctattaaaaaagaaactatgtgtgtatccaaagcaacacatttaaaaccgtaagtattaatacatataatccttcagcaaaaactacaaacttaaattaagctgatgatggcttaaatcgaacgatgtgtcctgactgtatcatttgagagaaaaacttgaccaagaatggaactaggataaaggccattgtaacctgggaaaaacatcaggagggaggtatgaattagcgggggaagaaaaaagggaaatcagctttgttttgctccatagaaaagaaaaagagagagagacagaaagaaacaagtcttatctttgtgagtgcatgactgagaatttaaaatacactgagtcacaaggttttgcctaaaaaaaagatagagaggaaatgtgctgggactgtacttcagcatcctctgtttttcctctgaatagtttaaataaaatcataatatttactacaaactctgtggacacgctcacacagagtccaggacggcaataaattagtattatgcaaattgttttccacagaaat

SEQ ID NO: 336767 - DNA, 1000 bp, Homo Sapiens; identical to SEQ ID NO: 157890

SEQ ID NO: 336768 - DNA, 1000 bp, Homo Sapiens
taccagggtgctacactttattgcaggtgtcttaggagagaaaaaaaggtagaaaaaggagaaagcatgaataagaagagggccaggaccctagtggtgccagagccatagtcacagggccaaacgccctataccacccaggcctggacaaaggtagtggctctgggggaggaatcctagggcctggggcctcagactcaagtctgctgggcctgcaaagggctggggaggggcaggttgtccttgctcattaagggagaggctgtgaggactgtggggagggaaggccatgggaggagatggggcagttctttgcccctgtgtccctgatgctgcctcccaaaggcacagtcccatgctccccactgccctcaaaggagaaagcttagtgggaatggcacccggaatatagaagagaacacctgaatgagatggggtcgggcagggggctgctgagtgtgttcactgccttccacttccctttctccagcctcctcagttccagattttgaggaagctgtcccaggaacctgtggccacagccatcccgtcagctgtgactcccaggcagctcaccctgttatcgtggccagagaggatgcccacacgctcagacttcatggagtcccagacattgcagttgaagtcgtcgtagccagcgaatagtaggcggccactgagggagaaggccacggacgtgatgccgcagatgatgctctcgtgggagaagcagatcagctcctggtctgcccgcaggtcaaacaagcggcaggaagcgtcatccgagcccgtgcagatggcctctccattggggaagaaacagatggcgttgatgtccgactcgtggccagtgaaagtctgacggcaggtcccctctcgcacatcccagagcttggcactggcatcacaggcccccgaaatgaagagattgaagtcaggagacacagccaggctcatgcagtcacccgtgtgtcccacaaatacagtcttctgctgccca

SEQ ID NO: 336769 - DNA, 1000 bp, Homo Sapiens; identical to SEQ ID NO: 157892

SEQ ID NO: 336770 - DNA, 1000 bp, Homo Sapiens
ttttttttagtaaaatccattgtagttgcatctggattgaagagctttaatcaaaaagtgtattgcaccacagatgaatttgctacagcagttttcaagaatacaatccctatttacaacatggaaggagagctcaagatccatcgctcgtataaagggctatagataccgtcgctaacacagaaagttttatacaagtcaaagtgcattaaatcacttagaatatttattccactcttcctcttaaagctgaaggaaattcaacatgcaggaggaaagcctagtcagtgaagcctccctaaagtgagtacagacctaggaacgggccccacagctacacctgaaactgccgaggagtggggcctggggtgcgtgtgggaccagttcaatggctggagaagccacggaggcagcggacgggcttctgtggaaatgtagctgcctttggctggctgtgagctacccagtcttagagattctttcctggaacagttgaaaaaggaaatcctactttgaaaaaaggctacctcttacccatcaaacttgcagaacagaagagactcctgtttcgtgttcccaccaggtaaatggaaattcgtgttctaaacaagggataactgtctgcaaggaggagccagaggaggaggttagtcactggagaagcggcctctggaaggcagagagcctgagctgggactaaggagatgctgccctgacttggttcttcatggaaatttcgttaggttaacgttgcaaatgcgtgtttttctgtgacacattttatatacctattttggccctaagcatgattgagaaatacaactttccatcactggataatggataataaatttagaggctccagttattaatttagttttttatttaaccagtgaaactttcatcaaacaataaacggtttccttttagattcaatattgtggcttttccagaaccagcatgttccctttcctcagtaaacgaggaatccataaaacaa

SEQ ID NO: 336771 - DNA, 1000 bp, Homo Sapiens
ttttttttttttttttgttatatagtaaataaactttatttatctgtttctcagagatgacactgccaacaatcacagatttgcatacaatacagttatgtattggctattcacaatttacagtagtgttttttcctctgaaaaatataagtacaaaagctaagtaaacaatgaggtactgccatttgggattttttacatgtcttagcttaaagaactggtctttagcaaatattcaacagatcaacctgaataaaatagtcaattaaatgctctaatttatcagaaaaaatccactaagtttcacctcaaaatgtattgcacaagtctttttaaaaaatcaccctaaaaataaataggaaaggtaagccgttctttaaaaagaatggatgaaaggaatattatgtaagcccataaagcaggttaagttatcaaaatatcttttaaacaacataaaactcttcccaagagaaaactgaagaaaaaactatcaccatttctccactgataaaatctattttaaaggcagtctgcaacttatctgtgggccagatttttcttggtcttttggctacatgaggggccctgaatgacaacttcattctcaaagagtagcaagtgtggacagttttccaagcagcagtcacccaatgtcactcttcttcaagatgaagatcggagccatgacacatgttaactaagcacagactgatggtttactcagaagataccactgcgaggtgaagtaaacatcagccgagcatcttctctttccaaaattttctgagtctgatcatcagggaacttcagtacggtggttataacttttgccatggtcttagtctcacgacccatcatatactcaaaaagcacttttcgcaaatactcaaattcggtaggttctccaaagagtgagacatccgtatggtacaaattgccacctttgtaaggtgtccccacagttgttgcatatacattcttttcatatttcttcaaacgg

SEQ ID NO: 336772 - DNA, 1000 bp, Homo Sapiens
tttaggtttccagccttttattcatacaaggactcaaaagaacacacgtcacccgctgacactgagcggtggggggaccttgtggaggaaggacacagcaggcttggccactgccctgaccagtgaccactcagggctgccccttccagagatgagcgtagggtggggtctgagcgccacccctaggccgtctgtgtgcagcgggagtgctgctgtcctggcgcccggcatcactgtgccagagtccccagcccaccctggcactggcagggttattatggggtggacttgcctgtgttgggggctcctgatcccaaaacatctaaagtcaggttccagagaacaagccatggggacctgaccagcaaccggggacctccgtccactgtgcgggacggtgatgaaaagcaaagcagcactaagcggcctcctcagggtcagtcggttcaggacagctgcccccagaccctccaagtcctcctccccctgcaggaccccttcccaacaccacaccacccctccccagggccacctggcagctggggcacaggagggaaggagggcccgtccaggcctggggcagggccctgatggcctcagtgagtgacaggaggtcaccagggtccaaggtgggccctgcgggcctccgaagccatctgggaggagcgaacagctctccatgaacaaggacaggaagtgtcagtaaatggatgcatgtttggaaaagcccttaactatccaggtccccgtgccctgcagtgcagctggctgggtcgggaagggacctaggcattcccgtgtgcagtgcggggtctcaccagccaccagcatccctgtgagcaggtgacagccgagggtcactctgagccctgacctgtgtcaccgtgaacagggaggccctggttcctgatctgggtgaggatgggagcaggcgggtcctggctgctcctcagccctcggggtcctccaacagccctggaccccagcaaggcctgccctg

SEQ ID NO: 336773 - DNA, 1000 bp, Homo Sapiens; identical to SEQ ID NO: 157893

SEQ ID NO: 336774 - DNA, 1000 bp, Homo Sapiens
tttttttttttttttttttgctgcagaaaggcttttactgggcagacggggtgagtctcaagccagtggaccagtgaggggtgagggcacgtcctccgaaggagcaggggtggcatccctgcccaggggccttagcctgaatgcactaagggctggcccctcagacaggctcaggggaggtccgcccacaagggctttgggcccctccctcatgaagacgccacccctgccatggggtccgtggcccttgctgtcacatctgccttggttgatctcagggaggttgatctctctcagggagaactgtggggtggggatgtagccttgggagggcccttcaggaagtaggagtggggggttggggagtgtggtagacccagaaacttctggggacgtcagtcatagttactaatatttggaggcagtgggagatgctggccccaaggttgaggtatcagttagagcagaacaattggacctagagctggtttttcctttgggtttaggtataagtgaactattatcattggagtggagaactggagagaaagggttgtcactgtccagcactacacagctgcaggcacacagatggtacacattcccagaaagacacataggtagacacgtggctgtacacccatgcacacacacacaatcacgcatacctgtaggcatgtgtgtaaacacccacattgcacccacacccacatgcctggcagtacacagaactgtatgcatccatttgtgccaggctggggccttgagtgataggaaaggggtctgtgatgggtagatagtgtggttggagacacggatttcttcctgaacaaagtccctcccctacatggtggacatgggatgagacggccttcagttacttcctcttgacccccagggctgcctgccgcctcatgtaggacaggatgtccatcttgacgttgctgaccgtggtccggtggtgccagcgcatgatgggtataccatctggccccaccag

SEQ ID NO: 336775 - DNA, 1000 bp, Homo Sapiens
atatttttaaatattttattttcctgttctttgtgaaaacatcaataaatatcgaaacctctctgctctaacacagagggaaacactgcataattaacattaaacaaggcagtatcttacaagaaagacataaaatgccaagggatatttagaacattttagttcttaaagcttcaacatgagaaatgttgaccacacactgtgaaatcatttcaataaataacaactgacattcatctttacagttacaaaatagacacacatacatttccctgccgtcacattgatcttactggccattttcttggattcctcagcctctatcacagtggctgacatgtgatatgtcatcacgaagaaatattaacaaatgactagagaatatctgcaaaccttctatcttcaaattaaatatgaatcaggattgaactaacttgggtttgacctaaaataaacaataaatataatgggagagtgtgcaagtagattcaatcataaccttattttacacataaaatattaacatagaatcttctaaaacaaacaaataaataaataaataaataaatagaagacttctcctaagtatgctcaaacacattaggcgcaagccaggtggcctctgcagctgtgtctctctttcctcttctgttcctgtaaggcagggcctccttcaggaacagccaccaataagcttcctccttccttctggtcagttggatttgccatttttcagcatcttttcgatgattttcttaaccatgggcgatgcggggttgagacaagctttctgcccattcttgagtgtggctatgacttcggtttgggcgcagtggggtccgggggacttcaccttcacactttggatgttcttgaggtgaattccctgcagggtctgcaagcactggcagcgcagttcagtggccaggggcgctcctgctgcgcgccggctggcggccaccaggagcaggagcagcagcgccacccgcaggagccgggg

SEQ ID NO: 336776 - DNA, 1000 bp, Homo Sapiens
tttttttttttttttcataaaacttttattatcatgtcatttgtacaaatgtaacagtaatgataaattctcttttccaagggaaagagaaacgctgcagaatggacattaaacaaggcattatgccctacaagcaagacataaaatgtctaagggaaacttcagcataaaaatgttgaacacataatgtgagataatttgaataaataacaactgacattctttttttaaaaaaaaagtataaaaaatagatgtgtacatacattcccttaccctaacagtgatccactaattgcttgcatttcaatccccccaccctccagttccccaccctgtcatttatcaaggtggctgacacattatggtctcccactaaatattagtttaatgacacatttaaaacccatcatattccaattaaataatcaggactgagctatgtttgatgaaacacactcacatctttaaataacagcatgtaaaatattaaaatacaagctttcaaaaataaatacataaataagtagaaccctcgtaagaaatagtcaaacacattaagtcctttccagctgtccctagaaagctgctgttctctttttcattttcagctctggtaagggcagggaccaccctgcaggaagtgtcaatgatacgctgataagcttcttacttctctcctgtcagttggtgctccccttgttcagtatcttttcgatgattttctgaaccatgggggatgcggggttgagacaagctttcttcccattcttgagtgtggctatgacttcggtttgggcgcagtggggtccgggggaccttacattcacactttggatgttcttgaggtgaattccctgcagtgtctgcaagcactggcagcgcagttcagtgaccacggacgctcctgctgcgcgccggctggcggccaccaggagcaggagcagcagcgccacccgcaggagccggggattgctgggggcggcggagagcgtggcgtggg

SEQ ID NO: 336777 - DNA, 1000 bp, Homo Sapiens; identical to SEQ ID NO: 157895

SEQ ID NO: 336778 - DNA, 1000 bp, Homo Sapiens; identical to SEQ ID NO: 157896

SEQ ID NO: 336779 - DNA, 1000 bp, Homo Sapiens; identical to SEQ ID NO: 157897

SEQ ID NO: 336780 - DNA, 1000 bp, Homo Sapiens
aatttattattattttttatttattgagacagagtctcactgtcacccaggctggagtgcagtggcgtggtgtcagctcacagcaacctccacctcccaggttcaagtgaatctcgtgcctcagcctacggaacagctgggacaacaggctcccgccaccatgcctggctacttttttttttttgtgccaggatttcattctgtcacccaggctggaatgcagtggcaccatcatagttcactgcagccttgaactgggcttagcctcccaagtagctgggactgcaggcgctcaccatcatgcccagccaaaactgaagacttactgggctatgtggtggataagtcacagctgaagagagacttagggaagtggaagggagaactgtagaagttacccagtgggcagcacaggcccttggtcagtgtgagggaggccgagccaggaggaggaggacaataagaaggcctaacaggcatctgaagattccagaaggaagggccagaggaggagatggcttaacttttccagaattgctaactacggggccctgggagtcagggagcaagcaggatgtcgaagggtcactgagagcctgaagttctggagggcagagccatgtattggacagagcctcactctaggatggcgaaggggcagtgagagccttaagttctggggggcagagccatgtattggaccaagcctcactccttgagggagaagtgcattttgtcgttgatcatcttgcgctcggggttgagtcgcttgaggatctgggccaacacgttcactgtctgctcgctgctcagccctgtcttcttggtctggaactttttcagcaggtccttagtggtcatgggcttccgtgtcaggtagcggcgcacggcatcctcagtcacctgcacgtcgccgctgttgggtgttgtcttgcctgatggtggctggggtgtcgacttcccagacaggctctggggtcccgtgtccagccgcaaccgc

SEQ ID NO: 336781 - DNA, 1000 bp, Homo Sapiens
ctgcatcagtaattttaataaagaaaagcatgctctgagagaaagctcgactccttggtctgcagtcctttaaacaaagcagtgcagttcttagccaagggtaagtactgcaactgtcgagagcatcttgtcttccacacagttgggtgactctccgttttgacacaaagataagccttgcccttgtttccttttgggaggatatatccactgagatgagaggccaaactcccgtttttcacgagattttttgactttgagcttcattttcttcttgtcaggatcatgtacaacagcatgcctagtgagactttgtttcattgcaaatgttttgccacagccagcatgttcacacacaaaagggcggctttcctcatggaaggagaggatatggctttggagattaaacacagttgtataggttcttccacagccttctcttggacagcgacatacatccctttctggggcatgagttttcatgtgttgcttaaggtaatctttgcgtttaaatgttttccggcatacttcacatagtatttcctctttatgggtttctctcacatgtttcagaagttccgtccatgtttttgccacaaaggaacatcctttttgacatacatagccctcgtgggccttggcatgtcgtttcagcttgctgggtgatgcaaagtgtttcccacatccttcctgggtacacttgaatagaggttcattggtattctggcactgatggattttcagctgctgatgtttcttaaaggtcttcttacagtcttcaaaactgcatatatattgtttttgttgattttcatgtttgcgttcaaaatgtttcttcaagtttgattttgtgttgaatttttgatcacagccattggctgcacaaacaaacggcttttctcctgtgtgagtcagaatgtggcggctcagatggtagtccctgatgaaggccttgccacacccttcatagtcacaaacaaatggtctctcccccgtgtgc

SEQ ID NO: 336782 - DNA, 1000 bp, Homo Sapiens; identical to SEQ ID NO: 157898

SEQ ID NO: 336783 - DNA, 1000 bp, Homo Sapiens; identical to SEQ ID NO: 157899

SEQ ID NO: 336784 - DNA, 1000 bp, Homo Sapiens
cttattttaatgattaccattacagaaaggaggttggttaatccccaaagattccttatctgtgaaatgaggaaggttacaataagaatgtgaatagagtactaacaccaaggaagtgaaaatactaacctcaaactcccatgtaagcatttgggggatacgtgtagtgataagtacaaaatacacagtttaataagagccacccaaatagcaatctttatattcattccttatctcctttgcacatgaaactccttgttggttttaatcacctctacaattaatagctgaagaccctattgactactctttactatgatccaattaatagaagaaaaaagcagcttaaggacaaattatgacttaaaatggttatttatgaaggcatattaaggcatatcatgcaaagtaaaattagccaaagaaagtcaactggtggagagcttgttgaagcaaatttaaaaaaaaaaaaaaaggttaacaaaagtctaatgtttttagaaaaaattgctatcaatctgtttccaaatttgaattcatctaatgctaagagtaaaaaacaggcacatacaattgtggttattcttctcacccttaagagtgagtggcctgttgaaactgttaagaaagaaagaaaagttttataatctgaaaatacctggtgggtcttgaaccacgacaacaggaacacagtgctgaatttagcaactataatactgccatcagcctaaccaacgtaggctttagaagaactgaatgatacaatggattgatctacctaggaaagttctcaggtctctccttcagcctagtattgctttgtgctaaactgactgccctctcatctgctacttcatgacaaagcccattaaaggtcctcagactccgggattttggtggatttcttgtgcagaaattgcagtgaaaaggctgttggagaaagaggtcttgattctggaatatgctccattctgtatttttcaatgtatggagcagctac

SEQ ID NO: 336785 - DNA, 1000 bp, Homo Sapiens; identical to SEQ ID NO: 157901

SEQ ID NO: 336786 - DNA, 1000 bp, Homo Sapiens
ttttttttttttttttttttggtaaagactttggcatttatatcttttatttaaatattcatttcactattttgaaagtttcccttccaaatcacagctgtaactaaaatccaaccattccaggaaatagaaatatcaacttgggggcttcctgagaatgtcagattgtggattgcaagagtcaaaaagagattttccagtccaacctacccactggacagatgaggaaactgtggctgaagcgagggtgggtgtctgggagtaggaagggggtgtgggccctggcggatggtgctggagccaccttgcagccaccacctgggcaccccctggccctgccctggtcctccctatcatggctgctgttggtactggctctctgtggccgtgtagaagtcatccagcacactctggatgtattcgaaggtcggccgctcctccggacggtttttccagcagcgcatcatgatgttgtagagctcctctgggcagttctctgggcgaggcatccggtatccacgctccagagctcggatcacttcagggtttgacatccctgggtaagggatccggccgtaggtgacgatctccatcagcaggataccaaaggaccagacgtctgacttgatggtgaaggagccaaagttgatggcttcaggagctgtccacttgatggggaacttggccccttcccgagccgtgtactcgttgtcctcaatgacccgggccaggccaaagtcagcaatcttacacaccagggatgcagagaccaagatgttggcagctcggaggtctcggtggatgtagttcctctgctcgatgaaggccatgccttctgcaatctgggctgagaagtcaatgagttttggcaatggctgcttgctgccctcatcacttttcagaaagtccagcaagcttcctttggccatgaactccgtgatgatgtagatgggctccttggtgaccaccgcatgaagtttgaccagcttgtcatgctgca

SEQ ID NO: 336787 - DNA, 1000 bp, Homo Sapiens; identical to SEQ ID NO: 157902

SEQ ID NO: 336788 - DNA, 1000 bp, Homo Sapiens
agttttccagttttccaagttttaatatggtgcttttaagaagagagccaccggtctcagcttataattacattttcacaaattaatccaaaattttacgtatgaataaaaaggagtaaaacaatacttaaaaattaaattaagaactgatttaatactaaagttctgaataaaggtgtgcattttatgattgattctatctttttgcacaagttggatactccagtttcccatcccaacatgttgttcgcaatgtgtgagaacgtgatgaaagacgatatccccgtttacacacaaattcagctgattcacctgttctcaaataaagcttctgtttggctgtccaccttaatgctatgttataattttccataatttctcgggatattacacacggatgtaagcattttggtggttctgaccattgtccatttctacatgttattcgcttgttaccctcaagttgatacaagttctggcattggtactcaactgatgaagctggagcatatactgacaacgggaatgaagtaatgtccccattgtcaataggtggagggggcccacattttcccgtagaatctttgcattgaggtggttccgtccagtttccatttaaacacatcacttcttcatccccaaacatttcataagggctcctacattgataacgtactctctcaccagatggatatttactcatctgtctcgacactatataagcattttgtactgtgggcggattcacacaggaagtgtcagtggacctgcatttgggaggggtggaccagccccgttctacacatgaaatgttgttctcattgttttgaagtctgtatcctgtgttgcaaataatttgcacagtatcaccttccagatgtgtttgtcctgaagattcagaatgaccattttccacaaaaggaaagaaacacagtctgagacactttggtgttggtgaccatccttcttctgtgcatgttatgcgagtccaaaatgattt

SEQ ID NO: 336789 - DNA, 1000 bp, Homo Sapiens; identical to SEQ ID NO: 157903

SEQ ID NO: 336790 - DNA, 1000 bp, Homo Sapiens
tccaccaaagtttatttctctgaaacaatcaccagttgctgtcctctatggcacactgagagccccaggagggtctttaactcccttcctcagattatattcatcccagaaatatagccttggacaataatttggttacagcatagtcccaggaatgaggtcccccaagttgctaagttttacataggggagactgggaaattcaaagaattggatggagaaaccataggatccaagataatgtcagggggttgaagatgttggagaggcatggtagcatcattgagtttgaatctccttctcacttggagtggaagttgtaggattctgcctctaggaaatgtgccatccttctgaataattggacccaggaagaggagtgtaactagagtggccagctctccgccagctgatcacaccaagagagaagatgatgaggcccaggcccagagtcactgcagacacagaaaccttcagggtctgcatgggggacagcccaggtgtccagtcccgaaggatgggctcaggagccccaatgtgctctaccacacaggtgtaagtgtccccgtaagagggggttaaggctaaatgggagagggtctggtatgtccagtctccattgggctgggcagtcttgtgcgcactgctgtgaggcatgacaagcttcccgttcttcctccacgtgatagtcacttctgctggatagaagccccacacatagcaggccagcatcacaggctccctcgtgttaaaaggagtggttttggctacttgcacagatggtggccgtgtcctgttggtcagtgatccccagaagggctgggtgtgtgtggcacaattctgaagcccattgcgcaagcgctgcatcagggtgtctttttggttgaggtgctgtgagaggacattcgccaagctattcagcaccccaaattcgcaaggggccatcttattctcctctggatcccagcaggtcagcagatccttgttgaaggagatgcag

SEQ ID NO: 336791 - DNA, 1000 bp, Homo Sapiens
tttagtcaaaagaacacaattttaatgactttatcaagccttaggacagagatgagagaaacacctttccaatgatgcatcaagttaacgtctaagcaaaagatcagcagagatcagagattgttgggtacacacgtatcttgtgatgtcttctgagaaccaacttattcctctttctctgagaagaacttgacccctcgccccggggctgagtgcttggcagccacatttgtgttgagatcttgattcctgctctaactacacagggctgggatggacacctgctccaagtttggccagtcatttatttttccagtaatttaaagctgtgactaggagacacagcctctgtgggttgtgagggttgagatgatataaactcaggagctgtcgggtggacatgttcactgagaaggacagtcagtccacagagagagaacaccgctaacatgcaggggggtctagagaacacagaccatgtggatccgagagtgttggaggggcagctctagcttctctgggcttttcggatccgagttctgttcctgggaggcctggctaaaatctacccttgggccctgcactcctccccatggctatattgcaaatatcctatactttgcatgtgatcacacaaagagggtttctgttactggcacacaaaaagtttgcctgagatgattctcctccacttccatcagggtcttctggtcattgatttcaacttattctctcttaagaagcccattgagtccccataatctcttggtttctttcttttccaggaccaactgctcacagttcaaaccctcattttgcctctatttacttgtaccttgattggctgatgccctaacagacccaggttcttcagaaagccttcctagtccacctcagaccttggggatccccctttcccatgacccccgatggcacctgattacgtcactgggttccagttaccagaccacagccaaggtccaggatggctgcatcagag

SEQ ID NO: 336792 - DNA, 1000 bp, Homo Sapiens
tgtatctccattttatttgacaataaaaggtttttaaaaacagtgaaaaggaaacagtgactacctgagcatttgtcttctgaagactgtggagactgcagttggaagacagaaagctttggagatcatgacttataggagtagggctggaccacagaaaagtaaatgatttggggctggaaggagtaaggtctcaggggagtttctggacaatgcccttggcaatggggattaatgatgtacacgtagaagggagaagggcagatgggtgggagatgcatgatctcagaacacagagctccagaatcagttcgggctcctccaaggatcagggaagagagttattcccagaacattgacctcatgaatgtcctttacctcacccagggcccagactactcatcactacttcaggctccagagagagaagcttcagtgaggaccttagcatgactgagggagcagaacagctcttgagacctcattaccagacatctgcgtcctcacatatcctttctgagcccttagctggatgacgattcccaccagaaggaagattagcccaagtaggaaggctgcaatgccactcagcatctttctccaagaatattcagactgagctctccactccacagaaacagggctcagcaggctggagtgatcgacaaggcaggtgtagacatgtccaagttcaggagtcatttctagcatcaccacagtctgaaaggtccagtctccattcctgatagggccagtggacatgaccccagctctctcctcctgcccattcaggaaccacttgatcttgatatcccctggatagaagcctgtcacagagcagtgcagcagattatgctggtgcaggagtggggtcctctctgggtacactgtcacctctggttgcacttttctccccacagtgaagggtgcgcccagcctgtagttgtgtctacagaccccatccacggcctgtctgctcctctccaagagatccagccgg

SEQ ID NO: 336793 - DNA, 1000 bp, Homo Sapiens
aaagtgtattagattatatttatgattttaaattctgatgttcatttaacttcttaatggtaatgataaaacatgctctcagtaaggtatatgttgaattagtgctgtgggaatatgggtcctatcaggcagatttgcagtctgctcaccattgaatagttaagaatagtggtctgagacataaatggatgagggcactaaacttgatttgggggcagctcactgaaatacagtcaattcagaagagtgtcatgtgtaacaggccccattatacaatagttaacatatccccattttcatggttctcttctttcctatgtttaaaccaaaatgaacttctttattaactcctactgtctactaaaaccctcagagaaaagtgatgagagatgatttggtgcatatttttaaaggaaaacaaacagtcatgttgggttttgattatttgtggtgctaagaagaagggaacatggttggaggcccagtgagagaaacagtgctttgaatcaaagagcagaatgatagaaactgacttcagagcaacttcttggcagcagtatccaatttggaagttgaaggtctgtcctggagccagatgctaacgaaacacagcaaatgcttttcctaaggcacaatagtcttttcagtgagctcaggaaccctgtttatgcagatcctcgttgaactttcttgctcctcctgtgcatgaagatgcccactccacagatgatgagccccagcacgaagcccccagctcccgtcaatgtcttactccgggcagaatcagactgtgccttccactccacggtgacaggactatccaggctggtgtgctccacttggcaggtgtagacatctccctgctggggggtcatttccagcatcaccaggatctggaaggtccagtctccattacggatcaggttggtggacacgaccccagctgtttcctcctgtccattcaggaaccatcggacttgaatgctgcctgggtagaaat

SEQ ID NO: 336794 - DNA, 1000 bp, Homo Sapiens; identical to SEQ ID NO: 157904

SEQ ID NO: 336795 - DNA, 1000 bp, Homo Sapiens
ttttttttttttttttgttagaatctttttatttttttctgcagaaaacatttgagatgctcatttgatataacatctaattccaagagagaccagtgctcaaatatagttttttcagctaccatttgatacggccataaatttggatggtccatgttacaatccttccacaattctccacttaaagacatcatttttctatgtttttaatgactattgccatctaacaattctacaattcgcctctttgcctgtaaaaaggccaactctacgtccacctgtgtctcatattgctatcttttatttatctctgcttaagattgcaaaagtttttgattttattattcacctgaacaatgtattgcaattccaatacacccccatctcttgctgttatctacagcttgtgacaaaatgaacaccttgtagaaatatcctactggttgggtttcccaagtctatgacactatgagagaagcattgctgatggattgacgaggagaccaccagatcattaaaggattagatactctgaaggcaggaaactagaaaatcccattgatgaaaggatattttaatctagcataaaatgtttctttgtcgtaacagcagaatttcttgacattttacaacttaatgaaacaaaagaacaatcatctttaaagtcaaacatctatcaaattataaaccaaacacatagcaccgatatcaacctcataaaacgtgcgggcccgcagggtagaaaagaactgtctggggcactggcagcaacgtgccattccaggaactcagaatttcgaagtgaacatttttgtggcagatgcttttcctaaaaaacactgtatcatccaataaatatttgactaaaatccattttgtgcttttgggtgacgttaactgacttctttctgaggcctaataagaaacaagaaagctccttgtgtattttagagcaggattcgtcatcacaagcctcgatactgtcataaaattttaattt

SEQ ID NO: 336796 - DNA, 1000 bp, Homo Sapiens; identical to SEQ ID NO: 157905

SEQ ID NO: 336797 - DNA, 1000 bp, Homo Sapiens
tttttttttttttggtcttcaaatggcttttttaaagtgaaaattaacttagcatattaagacaaagacaatagaaataatatacataattttattacaaaattttttttaaaaaaacgaaatgcaacatcctaaaaaacccaaaatttactattgatactaattcctacaagtttgctgtgctaccatacacacagaaattaaaaaaaccattaaatatttaggaacattcaacatcagaagctgtaaaatctaactgtatgagtagcccatcaaaaagctacaacctgcattttttaaaagtattttctctacagagaatcttatcagctatacaaaaatctgtacagtttttatactgaagctagtattgagctgcacttgaattcacattcttagcaaaataattgcctgagcacacacacacattccacacgcatcattaaaggatagccatttattcttcatcttcatcctcttcctcctcatcttcatcttcttcttcctcctcctcctcctcatcttctggttcgttcttcttctttgagcctgttggcctgccagggcccttctttcctgcttcacttttgcccttggcacgatatgcagcaatatccttttcatatttctcctttagcttagctgctttctgttcatatggttgtttatctttggctgactgctcagaccacatttcacccaatttctttgcagtatccccaatggataggccagggtgttcacttttgatctttgggcgatgttcagagcaaaacaggaagaaggcagatggtggccttttaggagcattggggtcctttttcttccccttcttatcacctttgggaggaacgtaatttttcatctccctgtcatagcgagctttgtcactttttgccatatcttcaaacttcgacttctcctttgcagacatggtcttccatctctccgaacacttcttggagaattccgcgaaattgacggaagagtccgggtgttt

SEQ ID NO: 336798 - DNA, 1000 bp, Homo Sapiens
ttttttttttttttttttttttttttttttttttttttttttttttttttttttttgaaacatttctctaaaactttatttcaaagttattcacctcaccgttaataaggtgtatgattaatgctctgtgccagtatttgcaggcctgcccattgccggcaatggactttgagaaaacccatttcctggcacccaaaagttaaattactcttttcaaaacataccgatctccccaacacttgcaaaagtattacatgcaccattttgccaccattctttaaatcagaacttacattattaatctacatcagtgaatgttaaatgaagtcattttaacaaattatgactgtacaaatcaaaatactactagttaatattagacaagagtatcttacaaacactactattacatattaccttgcaatctgaaacattatatttcatatttgtgtatatttattttagataactgaaacttcacagaatttaacagcaaataaagtttaaaaaatttagttctgtacattagttccaactatccctattttacaatctataaggctcatgtcatagttcagcaccaaaaagatctacacaaaactgtttaaccaatcttcttatctatcctgtgtgatagttttgtttgttgttgttttttaaggtaaaagtcctacttcagaccttgaagtggaatacttctagtcagactaggtaaaaacttgggtcataccttattttcattgaacagataccaaaaaaaaaaaaaaaaaaggaaaaggaaaagagctgtgttacaccatgaatttaggttgtcagcctctatgttgaatttataacactgaagcatcagaaatagcctaataatgccctgcccctattcttcccttccattttaaatttttaaaaaagtaaccagaaaaatgtttcatttattctttaaaataaggtgcaaagaaggactgcaacaacaaactccctcatccacacctccaataacatc

SEQ ID NO: 336799 - DNA, 1000 bp, Homo Sapiens
cagacaatgttgtttattatttcacacaaaagttagaccaaggccacagtgccgttaaacacctccctccccacccacgcatggctcaaaaaccaccccaaccctgctataaaaacaacagaacacaacaaaaatactgcatttgaggctgagccaggaacagagtggctccaacaaaaataagacaaaaacacaagacacaacatcttttcaggtttgtgtaaaaattgccatggcccacggggaaagtggtcatggccgtgtcaacaaggatacttgaaactcagggcttttggaggtttgagacagctgccacattagggtgtcttccaggctctgctgcaggaactgaggatgctgaagggcagggctgaccccttcgccccctctgaagtttaggccattgcctggatgtgcttttcgttggggaagatgccataggctccttcctcctttccagagagagggacacagtgagagggctggaggccctgaaagccttcagtgcccacggtaaggaagccagccaagagaattccctctctagaaagaaggccttccaccggacaaagttcatggccctgggagccagcatgcctgcattcacatggcataaagccctacagcaactgtcgccaccagaaagctgagtgtaaggacccatcggagaagcggagcctgggagcgggtgttgagtgggggcttccctctgggagtctccacgggggcagaatcttgcactttgttgctggcccgctggcgaagccctggtgcccgtgaggggctctggtccttggtgtcatgggtcagcagctcctgcaactcctcaaagagctggatgttgagcaggaacgcagtcttggcctcttctatcaccctctgcctgactgcgggagtcatctccagggagttcatgcgggagcggtagagctgcttgaacttggtggcactggcaatgttggggaaggtgaagaaggccaggccctcgccagagctgggc

SEQ ID NO: 336800 - DNA, 1000 bp, Homo Sapiens
ttttttttttttttttagcttgcaaagcccactttattgagtgctggagcatttacacaggcggaggaggagataagctggggctgagcaaaccgcacccaagggttagagggattctgggtgagagggatgagctcccaaggcctctgaggcttccacccacacccaccctcactcccagggtccaagagaggcccagaagttgtacagcagcatccagcaaggccccctcgcacagcttggacttacaggccactcacctccaacaggggagatagtcacccatgtactgcaaaaacagggactaccggaagcagcctagggcccagaagtgtggaagcctggagtagagctgggtcgggggccaggcttgctgcactgtgccgactgctcccagggtgacggcctgtgcccagtgcggaatatggcccatagagaggatgctgtcagacgaggctctagcatctcttttattggttgcctttcttaaacccagcattttttaaaaagtcacctgaggtggtagtttagtcagggctggagaaaggggtaggccagtggtcagtcgggaggagggtaccggtgtggcatgatgggtgcttcacatgtagtaccaggccaagagtccagcagctagggccacaccagcggccaggatgaactggaggctgggcttcctcagcacagccatagctgttcggaagggacagctgctgccctccagggcacctttgtcttgttcagcagcgtagaaagggcatttacgcatgtctcctttcccatcgtgtacagggaacccatcctccaaggtctctctggccagtgtggagccggcctggtccagttcattgaatatctgcatgttatactcaaaagccttgttggcctcctccacgatcctctctttggtcttcatgttcaggtccagggcgttcatcctggcccggtagagctgcttgaactgctgggcattgtccacattctcaaacaggtagaactg

SEQ ID NO: 336801 - DNA, 1000 bp, Homo Sapiens
agccgtcagaatccaagtgaatccagctcaagctatctacaaggtttttacatgcaaggtcaagtatctcaatccagaggacttttgttttcttaatgaaaagcttagaaaacacatgaatcttagatttttaatgttttttaaatggagtttattcttagcacatggctttctatgtagccacatcacaatttgtacagttccacataagtctaaatgcactcccctctccccaaagaccgtgccccagaaggtgacaacagtatctctgtaacagtgtcttaaataaatgcaagtaagaaaaactaacatgtcacacctaccatcaaggtctacacatcttaagaattaaataatcttgtgaggtccacaatgtctactcatttattcagttaaatacaagcttggatgagctgccttaatgggggaagaggaggtaaggaaggtggggaaagggtctgtcttcttctgctttcaacaaagatgcaagtgtatgtccccagtcagcatgggctgttccacacctggcagccttgtttcgggccagcaggttgttccaccagccagcatcctggacaactgttctctcttgggtggcaaccagcacagactcttaaccggataatgtcttctttttgattattctttttaccaatttgggtttgttttggtgtctattatggtccagatggggaggggtggatgaggaacggagcaggagaagagaagagaaaagcaggtaagggatagaaactggttaagatctctagaagattatatggaggagggaacgggtgtggaggtgctcgggtgggggtggggatggaggtgtgggctctgagtttgtgctttccctggtgggccggcagaggccgaggccgaattggaggatcgcatcttggtgttgggcagtttgtggtctttcttccacttcatcctccggttctgaaaccagatcttgacctggcgctcagacaaacagagcgtgtgggcgatctcg

SEQ ID NO: 336802 - DNA, 1000 bp, Homo Sapiens
tttttttttttttttttttttttttttttttttttgcactgaaatgagactttattctgaaattattaaaaagaacagagatgctccatttggctgcatgcagggggggcggttggggggacagaggggaggacaggggctcagccagggggaccgtgtctctttcccacgcaggacactgtgcatggggctctgggtgcatctgcccatctgtctatgggcctgtgtgtgtgtgagaggccaaacacagagagctccgtgggtctgtgtgtatccaagtgctaaaaggcaggctggctttctggggcccacagctggcgggctagtatcctggaaggtttcacttggtggcttggcctagggaccagcaagggctggggtgggaagggtggctcaaggaagcctctttctccaactccacacccctagaatccttctctcccctccagataaaaagtctcctcccctgggcatgactccccccaccccgcaagctgagacctgcaagaaggggactgcccctttgggggaggggtcgggccttggggctggtgggtgggtaagggggcctgactgaggggcagaccaacccagcctgtgtctctattgttgcctctgggattggggggtgctaaccgcttacttgctttggcctgggggtaccgcagggttcccttttccggaagccccccacagggcagacccggggagaagggcttccccaatctggcccccagccagaatacacacaagggagtggaagctaagagccgggagggggccggtgaagggagggaggaaggggaacctggctcctctcagaactgggaggcgctgctggggtcgcactgcagcagacgcacgatggacgggtcgcttttggccccgcggatgaactcctccaaggacagcttgccgtcgttgtttgtgtccatttggcggaagattttctcagtcctcttttccggggtcgactcgtcctccggcatcttcatcacgg

SEQ ID NO: 336803 - DNA, 1000 bp, Homo Sapiens; identical to SEQ ID NO: 157908

SEQ ID NO: 336804 - DNA, 1000 bp, Homo Sapiens
aaaggataattgaggaaaaaaaaaatcaagatttggggggaattacctacaaagatgtaaggtaagtccgttggttggtgatggcctagccatcttgtctggtttttaaaatgtgcttttctgcctcgtcctgtctcgtcttcctctaccccactcccgggcgtggaattccaacttggtagtgctggagccctggggttgatggggtcatctccaatatgatgtggattcctttccgatgggttggcaggcagatggaacaaggggtggaagacttaaaagcaacctctcaggccagggggaagggaaggagctccaggccggttctgaccaggaagcctgggtaccaccttctctggctcctcttttcagacctccaggttgccccccagagctccacagtctctctcttcctccccatcccctaatcctcgttcgccctttcccatcacaggtgtgttaatttgggcgcttcttggattctaccctgaggaggaggcgcgtggtgagaggagaggtctgtgtaggtggggtggggttcgcagggtccgtggtgctggctgggcgccatagggggcgccccgttgtagtccaggttcccggaagggtgatgggaaaggtggttgaggccatagagggaggggccggcagggggcggcagcggatccgcgtagccgcccccgcccacgtacaccggactgccctgcatggtgggcgtcccgtaggcgcccccgttggcttggaggacgtgcggctcatactcgggcgccggggtcggagggtacttctgcggggcgccgcagcctttgagagggggctggtagttggagggcagcgcgtaggcattctggtgggctttaccgaaggcgggtggggacgggctctcgtagctgggggtcatggagtgtaaggcgttcatgaagccggccgtggactgcatgggctgcggggggctgccggctggagatgggccccccgacgacgaggccaatcccttggc

SEQ ID NO: 336805 - DNA, 1000 bp, Homo Sapiens; identical to SEQ ID NO: 157909

SEQ ID NO: 336806 - DNA, 1000 bp, Homo Sapiens; identical to SEQ ID NO: 157910

SEQ ID NO: 336807 - DNA, 1000 bp, Homo Sapiens; identical to SEQ ID NO: 157911

SEQ ID NO: 336808 - DNA, 1000 bp, Homo Sapiens
tttttttttttttttttaaaagttataaaacaaaatttattatgcaatactttctcataatgaattgcatctctttggtaaaaataaactttataaacattttaataatcagagattagatacaaaaactaagtatttgtaagttgtttttaatatgagcaaagattggcaactgagaagtggttcacttgtgactggtcatctactggcagttataactcaaaccgggacaatttttatgctacatcagaaaagaggataaggaaacagtttgataacaaatttgttgaatcagaaagcattcttacactttcatttaaaaataaataatagttacaatcaattggcaattatacatttttatacactatatgatggcaacataatactttaaaattaagcacttagtttaataagaaatgtacaacgatttaaaaaataagttttgacaatggcactggcagttagatgcaaagaatatgctttaagaaaaaaaatggcaggtataacattaaaatactcgaattcacctttcaataaatatttttactacatcattaacatactgaagtaaacttggtttaaatcaaagcttacacatttcaaactaaaaaaaaaaaaaaatacaaaaaaacacctgtaagatatatgtaaaccagaaagcctcacagtttcttagataaatgctgtgatcttcacaaaagggtgttaagttgttgtagtatttaagacaatggtctttacagctttgtgaagtattcacatctgttgcttaaattgctggcaaaggcctcctggtctaccaagacatatacattccctccttaacacattctctagtttgactttgtgctaaagtatatttaactgaacatctagtatgagccctttacataatgcctcagaaagtagcaaaaagaaaaaaatatatatatactaaactttactatatacaaaggaatccaagttaaaagaagtcatgctggctatgaggacagga

SEQ ID NO: 336809 - DNA, 1000 bp, Homo Sapiens
gaattccggttttttttcaaaagtacttgtgcttttatttaaaaaaaaaatacaatcaggtactgtccagaaatgttttggaaagaaagatctcttgaaaaatccttagttttcatcatcatcatcatcattattatattaataatattaatcatatccttaaaatggaaacagtattgcttttctggtttctgttgtatgaaatgtaaaaaaagggatggcttccaatgacacatttaatctttgctaacaaaaataatgacaattaattatacagcttcatgtaaaatacggctggttctaaaacaaactacccctgtacatcctacccctctcccatcccagagccacctaagagaagtaaaaaactattgcgatgttgtcactgggagatttttgctgaatcaaacaacaaaacagaaacatgttggagactgatgtctttggtgcaaagaaagaaatcacagaggaggtgaggcccatgctgttgccgttggccccagggatccatggtcagctttgattctcaccaaatgcccaggtgtggaccgatggttgggctggttgtattgatgctttggtaaaatcctttcctcgctctgggccgccttattcctctctcacccagtggtccctccaatttatgcccgtttgcgcctgccttcaagatttctgaagttgcttggtctcagcttcatctcagcaaactggattgagtgttcgtggcccttccagtggaaccagttaacgccctgactgtggttattgtccccatatctccccatcaggttgacacggtgacagttcctgtaccagaaagcccctttgtaggacagagcacagttggtgatggctgaatctgtgtccttgtcaaaggtggagaaggatctgccattgtggtaggccatggagtcacctgctgtcccactgtacccctccaccttcagcttgtagcgagtcttggcatctcccacgctgaacttgtcatagacagcaaagg

SEQ ID NO: 336810 - DNA, 1000 bp, Homo Sapiens
ttttttttttttttttttttttttttttttttttttttttttttttttttttttttttttttttttttttttttttttttttttttttatttattgaatgtcattttattccaatgataagatacagattacaaaacttctagtataattacacataattaccttttgttgttttcctacaagaaatgcacaggtattttgaggtcttttgtattgcattattggtaaaacattgcatagtattagtttgtggctctgttacaatgggtaatgacaggaatgcatacagatgtctctgctatgataaaatgtgctcttgttgggttacattaaccttccttcaaaagggatttctcagttgtacttcttacagtcttcaggaaattcattaaatcagtgcctccagttcctttggcttccagttttgaagggtcttcagaggtcttattctcctttggctgctggcttgcaggaatcaggatgtacttagtcacgatttgcagatggtagctcctcagggagaccagagctttcacacaggcgtcataagcttcccgcaggccagcatcaccttttgaaaggacaaactcacggactgagggatttgactctaatgagcacaggaagttcctgtgagctggtggcatatatcttctcatgtcctggaggaactgagcagcatgtcctccaccagcagtctgctggatgcccagcaggacgtcaaagcactgaaagacgctgctttggcctgcactgccccctgcaaactcctttgggtcttcccagaacccttcatacaccagaccgtctgatagctgggggttgcctttccagccagacaaatatatgcgaagaacactgaaaaatgcttttgggttcacatgatcgtggatttggtgaaacacttgaagggctttctccaagcaagaagctatttccaacagcgcctttagcaaagtgtcccgttcttgcatttgcattgccttgaatacagtaggaa

SEQ ID NO: 336811 - DNA, 993 bp, Homo Sapiens
ttttttttttcaccatctaaattatttgtttaataacaaaaaaacagccccacagaactattgtaaaacaatattttcagtcggtgatcattgtaatatacaatacaaagcaatttcctcagaaatctgagaagcaccaaacgtgaccattttttaaaatgtctgcttttcaaaaaatagaaacacacgagtggaatcccaccccctaaagtctctggtgactagtaggtgtgcagagaggagcgccctctcctcgccagtgcctcagcctcagccccaggctggatgcagttaagggcgcagtggccgccgatcggtcttgttctccctcagatccggcgaggcgcgttgggggagacccacagagcacgtaattcctcttgccccctggatggctggggtccgccggtccctgggggaggcgcttcagcgacacaagatgcgatcgtccgcaggaacgcatgccgcctcggccgtcagggcgctgatctcgccgttgagggtgctgagcggagcccggaccggcagccctcggcccccgggggttccaacttcggattccgagttcagctccaactgaaggtccctgatgtagtcgatgacgtgctggagaatctccaccttgctcaccttgcggttctggggcagggtgggcaccagctccttgaggcgtgagtaacagccgttcatgtcgtagagcagcacgtttacctgctgctcgtccagcagggcaggcaggcgcgccccggcgcccccggcgcagcgcgagatggccacgctctgctcagacagacagcgcaccacctcgcccgcaccgctcgctgtcttgccggccttcagcgcgcagctggggcccgcggcggcggtggcggtgctgccactggcgactttcatgattcttggcgactggctgaaacagaatgggcaaagcgaaaaaaatgaggtggaagcccgaagcagatacggaaaatggaacagttaagaacgtggaat

SEQ ID NO: 336812 - DNA, 1000 bp, Homo Sapiens
ttttttttttttttttttttttttttttttttttttttttgacttcagacatgttttattataatcttatacagtctacataaatttgaacttgtatttatttgggttcagttataacatagcataataaaaatcaaagcactggtcctctgaaataaagcaggcaatcaccattcaataaacacacttgatttattttgtataaaagggttaagtttacaactaaacttttataaaaagtttagcatgaataagtacatcattacacttttgaatgcagaaatagacatctctgccactatacaagaaaactctaattaaagagttcacaaggtttcactcaaatagatatatttatatataaatatatacacagcattcagtaggcttgtgtcaaaaaggtaatttctgaccaaaagacttcatttaagtgactgaatactggatccttctggtattcacgctccacctttgaaaaaaggcaaagtctgcttagattgggcaattccttgtgattttaacgttttcgctccccatggtgggaatagtatataaagaaaaccttccaactgcagaaagggcatttaaaagtctttttcataaataacgaatatcacagtccaagtaagagaacaccctgggaagatgatcattcttagttttccttccattttttttttctttttaaaaaggtccattcaacttgtcctccttgtgaaatggttgaaaaataagttcagcacttaaaagattccgtgaatttgttgttgttgttgttgtgcaaagaataaaagaaatcatgaacaccgcttattcagccacacagtgctttgctgtcatttgacattaactcagaagggaattcagaagcctgcaaggacaggatgctgatatccgtgttgagggtggtcagcggcgtcctggacgcctggttctgcccgggtctctggtgatgcaggctgacaatagtgggatgcgagtccagggcgatctgcaggtc

SEQ ID NO: 336813 - DNA, 1000 bp, Homo Sapiens; identical to SEQ ID NO: 157913

SEQ ID NO: 336814 - DNA, 963 bp, Homo Sapiens
gtatagtaaaaatttaatgaaaaaggaaattaatatattggctaaatatgaagaacatatattgttacattaaccacaatgtaaagcgactcatgatattacataaattttaaaaataattaaataaatatttaaacaaaagatgaacagagacatcagaatggtcatctgtaaaggactagtgcctgcacaggtatacacgacacttctttacactgctgaaaacatttgaaaattttgattcaacgcgtcgtggttatagaagtgagtctttgaaatggaagaactcatgaaagtgtgagataatgtattagtcaatcaggatcattgccatgttgaaccagttttcaatccttcctccttaatcttttttgcaagtttgttgaaaacgagagggatctcatgatttctgctctgacaacctcccaggcacaagggctgtatttcctctctattagataaagagtgattctttggaagtatttcctcacagccaggatggagtcctcattcatcaggggagtctcttccaccccaacctcctgtatcacacatgcttccaggtcattcagttgctggtaaagttcagtggaaaatttttctaggaggctctgttcccaagcagcagatgagtcctctgtgctgaagagattgaaggtctgctggatcatctcatggaggacagagatggcttgagccttctggaactggttgccatcaaactcctcctgggggattcggaaatcatgtctgtccttcaggcaggagaaaggagagattcttcccatttgtcccaggagtatcaaggccctcctattaccgaggctgtgggtctgaggcagatcacagcccagagaacagatggatttgtagctgagcaccagcacggccataagtaaagaaaaggacagggccattgggatgttgcaaatattgctaggctacttgagatggataaccttg

SEQ ID NO: 336815 - DNA, 1000 bp, Homo Sapiens
caaagctgaaaataaatggtttatttttaacataagtaaatttacaaatcaaatgaaaaatgaaaaatacaaaagttcatgaatgaaataaaaaagacactctcaaaatattaaaacctatggaaagaaaataagtaattaatgaatgatgtttttgtttccaaatacaatgaagtgattttttattagagtccttgggaatcatctaagttacaatacagaagagaattaaataaatcgtatatgattttgtaattagacactctatatatcacagttctttgttaacctgggcatggaacgtccctatagcatatatttaaaaccattaattttttttaaaaaaatttgagacatggtttgttcttgttctctaaattatgtttccccatttcccttgaatgttctctattggccatcttctggaacattaaaaaaaaatcttgaaacaaattctcttgcaatgatacgtatcacataaacttgatatgctttatattacagcatttgtaaaattaagtaccaaaggcaggcatataaatagaaaaaacatcaaggtatttctaggggtgcccaacagcatttgggataaatatggaatccaaaagtgcaaaaggaatgcagcattggcaagagaatggtcctttggtgactagactattccctgtttgcctaaagtttatgtaagaattgatattcaaagcttatctggaataagttcttttctggtctagtaagtgaagggttaatagagggagtaattgtggtttctaatagggaaaaatattaataaggctaaaaaaaagtagatccaagaatgacctacttttctacttttttcatccaagtgaaacttttttcaatttaaaataatcaataacacttatagagggaaatgatttattatgggtacttaaatataggatataattttacatttgttcatcaacattcatgttaccgggataagggctttcttaaattacgaattattctgttt

SEQ ID NO: 336816 - DNA, 1000 bp, Homo Sapiens; identical to SEQ ID NO: 157914

SEQ ID NO: 336817 - DNA, 1000 bp, Homo Sapiens
tttttttttttttttctgaggataaagtcagtttatgtagtgcttaaagtagaatcccagatattctggaatggaaatagctcatgtgaaacttcagttcatttttgtccttaagggcaaatgatcatcttcagagagtgaagactttttaaaatctgaattcacagataaaatcattttagctttactttataggtactgctgaagttgtagcaggaactactagtccttcactgaggcatgtagccgccttgccgtacagtctgtggtaagtaacttttaggcatgccttcatcagtcgcagcctccatgccaactgtttcaaatctttctacttgtccctcagtacctggaccaaaagcatctgctgcagaaacttcctgaaacattttcatttgcccagatccacaggattgtgaaatatgatctgaaatctgctgtttaagtctaacaaaatcttcctcattgactgatgaaacttgctttgacctttcaaaatgtgaaatatctggactggattcatgctgactgcagttctgtttgaagtactgttgcctgggcaaaataccatcaccgccatctacatgatctactaattgtagatcttctggccgctcctctgaatctaacaagggctgggtagactcggatcttgagaagacttggactgacggaacttggtgtctgtagccactgtgtaccacggtagaatactggacagtgctcgaagtgttttgtgaagattcattttcatcactgctagaaatgcttggcctagaagatgacatgcatgaagaccccccaataccactgctgtgtccttcagtattaattttttcctttttgaacaggtccaatgatttcagatcttctggaaaaggctttttgtcatttgcttctatttccacaacacttacatcagtgaaattgccatctgaatacatttgatcttttgaattaaaattgtgccttggaggagtgtgaggtgaccactgggcaa

SEQ ID NO: 336818 - DNA, 1000 bp, Homo Sapiens
tttttttcctctcatgctctcttcctgccttcctcactcctcaatcatttcctttactctttcattctttcctcttttttttttaaatagctgaatcattgggtcaccttaaaccttgtgaccaaatccacatggtagaagcaggatgctcttgactcatgttgagtgccactgaactcaggaagagtggtcaaagcaatgtttcagaatcttgcagactgtgtagtggggttttgctaattttgtcttctctgtgctgtgagggagactaggaactctagacttcccttttaaatcatctttgtcgctcacggtaagttcagtctgggtttcttacacttcactggttttggtagaagctggacatggtgacatatgcttcttcttgatttgatcccagggaagtaagaatgggctgaccctgagcaactgggttcaatgtcaggattccagattggagagaaaatggagggggcagcgtgctgtttgtagtcccaaggctaagcaggaggtcctggtacacatgaggcccattcttgccactctccctgcagtctagggacctggaagaggagagaataggggcgtcacatgcactgacattcccagccaggcatgtgagggatgaatctcttccaaagctttctggagtgatgactacatcctcagatgggcagttggggctctgcacatcccctccaagcctctgcttctcagattcttctagttgctgaggaaacgtatcttgcagaaaaccttccacttcatctctagcttgaatgtcatccaccctatgaatctggcagtccaggaaactttcaggattgaaactcacatttaaattttttcttggtttcttacaaagatgttccagagtcttcttatgatcggggagactgggccatacgataggcttaatcctttttttccataacacacaggccaagatgaccaacagagcgacagagaaaaaactcaaaatgctgatggttagtaagat

SEQ ID NO: 336819 - DNA, 1000 bp, Homo Sapiens
gattacaaagaagagtttttattagttcagcctcagaatgcaaaaataaataaataaataaacaaacaggaaacaaatgtaatcactttacagagcgcacatacattacttaaaagtagcaccttcatggagccatattttctggtcataattgtgtatcaggttcattcatgctaatgagaaagggattccagattttctttgcatctgtctgcttctcacagggctgttaagaagccacctgccattctgacaatttcatgtccttagccataactacttgtcctctctcttgaatcttaagatctttttgccttccagacacttacggtgtttctgtgtcatcctcctgtgtcttttagagaggtgggggtgaggactgccatggaagctaaagctgaattttaatttcaatcatttttttttttgagacagggtctcattctgtcacctaggctggtatgcagtggcacaatcacggctcaccatagccttgacctcctgggctcaagagatcctcctgcctcatcctcctgaacagctgggaccacaagcatgagccaccacgcctggctaattttaaattttttttgtagagacggggtcttgttatgtttcccaggctggtcaatcatttttttctagcccttttaaaattcaggcatccaaagattaaacttgcttagaagtgtaagtggccctaaattgctttatcaacaccatctccaggaagtcttcacagacatgggaactagcatcttgttctcctggatcttctcaacaggtttgcattgtcaggtttccatgtaagtatctcttgcgttcccatccatcacaagtgtatgatggcactggtatcagaacactgcattcttcctgattgtcataaaactgatgtacttgcagccttgcttgaaaagttgtcagtacaaataaaattaaattcacattttgcataatagggactgatcctgatggatcaggtcataagagtatgaaa

SEQ ID NO: 336820 - DNA, 1000 bp, Homo Sapiens
tgcattttaaaaatattgaaaatagatgttttattttgtttatacaaggtacaatgtcaaaatacaaataatatataatgtatagatataatagacaaggaagtataaatataaacgcatatattcgtaaaatggcactgagttgagttttcttcttcctgaatccttcaatggagaggattcgctgggctcagcatctctcccacctttcccaggtccctgtccatgtgtgcagagcagctggagacagggtggttagaagcccaaacgctggtgtcttccctgtagacgtctcccacgccaggagaagccttgtaattgacagagagctttgggtatgtcacttttctctgtgaactgaaagttaggatgagggacggaagattcggggcagggtttttatttcattaccacatgtattccaggcagctcacactgtaatgaaataaaaatcctgctcagaagcctttggtctctcctgggaagctgggccctgggtccaaggcacgacaggcaggcaggtggtgcccatgggaatgcggagaacctgctccctcgcgcaggaggcgccgacccggcagtccgtgagatcctgctgggacttctgagaggcctggtgagcttgctcctggagcccgcttccttgcacctcttctcagtcgtctttagctaaagcagagaggctccttcactccggacttagctgggctggtttccccgagtttcataggtggtgagagcagttttccaagtcttcatctctgctgctggtcccccaagtcaccggcagagcctccatggcttccatttcaacgctggccagcgggggagtttgccttgacttgaggtagcatgccaggagagacacagcgctcagcccacacagcaggacagtggacgtggagatagccacagtggtgtcgctgtggccctgtggatacacacctggcggctggtgggaggcggatgctgtgagttcccagttcttggctgttgtctg

SEQ ID NO: 336821 - DNA, 1000 bp, Homo Sapiens
gctgctataaaaataacttttttttcaaatggcagtttctgactaatcatgcaactaaatcagtgcaaacattaaaagcaatcattcgcttaaaaaagaagcaaaggatttcatttcaagtataaaaaatataaaaagagtcgtacgagtccagtttcgtctagtgtgggtcaaccctttaaattgcatagttcacgtggcacttggacatctagagggcgagcgagttcggcgctcggccaagggccacttctgggcacacgcagatcggcaagtgctatgtcatgtgcgttcaggcaggtctgcaagtgctatgcgggcgggcgggcaggcgggcaggtgagtgggcaggggccacgtccacggccagccctgatggttgggcccacatgggcaacttctgcaaatcagctgaaagccttccccatctctccaagaccaactaggctgctcccctcccttggcctccgctgaggggacaccccccatcctcagcagttcaagaatgccacctccccgccatttcctcctgcggtctcatccccttgcctaggggtcattcccacccgtccccaaaccagtcctagaggaatgtccccaatgaagggcacagattgcaactttttttctttccatttagaacaattcagattttcacttaaaaggtcatacctggtagaaaagtcctttttcagttatacaactggcaaggatgacctgtcaactgttggagatcagttaaagcatcaaatttagccccctcttctctccctccctccccaccccaaaaacacacacacacataagtcatgtcagaggcccaagccacaaacagtcaaacggtcattgcccctgctcccaggtctctgacgggttgtgtcctttctgggtctctttccctcgacaagggcatggaaggacaggctccccaggccttgaagcacgaaggatcccaggctgggaagaagcagacatcgagccaggcagagcaggcctggta

SEQ ID NO: 336822 - DNA, 1000 bp, Homo Sapiens; identical to SEQ ID NO: 157916

SEQ ID NO: 336823 - DNA, 1000 bp, Homo Sapiens
tccacaggaaaatctgattgctagatgagctcataaaagcttttttcacctttacaaaattaaaaaaaaatgtgccacaaggatgtaataacaactgctgataaacaagaaaaggaatcttaaaattataaatttgctgtagaaaagataaaaaacaattatattttatttagaattttaccttgaataaaatattcccctgtataaaaaataaaaaagcttgctctggttagaattagagtatttttgtcttcaaatctgggaatttgcataatatttccatgatactttttcctttgtaccgcgtggcattcaagcatagcagattagaaggattttttttaaagcagtctgaaaatgggacatctgtagagaaattcatttccttcttctcctccggatgtggaatggaagctttgagggaaggaaaagtaggaaaagagcgggatgggatgggatgggatgggatgggatgggatgggataggaagagaggctggggaatgggcagagaagggggtgctgagtgtgctgtgagatagagcaagatcacaagaaggcctatctgtaagtgctttaagataaggtgcagaagcagactgcaatgtcgctagtgctgcctatgtacatattcacaagaataaaaaattccagctagttcacattatctcgtccgttctgaggcatccactccaccttgctggccttgaccgcaggcaatgcagcacctccactgcccttgttggtccttgaacttgagtgagtagccctgggagatccagcaggctctagaaacacacgtctaccaatgggctggagtcctgagttaaagagaagctccaggtactggagttggacacagcaatcaatgttctattgtcaaggctttttcccttagatttgtctaaaataggtgtcagagagaaaaaaataaaatacaaacaaacaacaaaacaaagccaagaagccccaacaaccaccgcggagagtcagaggcttaa

SEQ ID NO: 336824 - DNA, 1000 bp, Homo Sapiens; identical to SEQ ID NO: 157918

SEQ ID NO: 336825 - DNA, 1000 bp, Homo Sapiens; identical to SEQ ID NO: 157919

SEQ ID NO: 336826 - DNA, 1000 bp, Homo Sapiens
ttttttttttttttttttgttctcaaatattttttaataaatagacgaaaccacgaaaccactagactgatggcagcaaactaaggtcagatgagaggggaaactagagaaggagcagcctgagtcagtgacacaacctcctccccgaccctctaggttaaggcacttccggggaggcaggtccttggggtcctgttacacagggtgaatgggagaggaagggattaggatcccttctccccacctttgcatcaggacacccctgcccttctcaccctaccccatggccctgtccctgatttacccactctcatctcacagcactctaaggggaagttgggtgggaggagttcttgtgggtgggagaggtctgtgcccctgaggaagccgatcctgccaaatcttgatgcgacaccagcagcccactctaccctcttcatcccaaggagccatctctggggaagggatggagggcagccacaggccaggctgggacatgggaacctaggcggtgcctggccctggatgcccatcggggcccagctcgggatgcccgtcagcagccaggatggggtgtgcatccgggccctcccgccgggggctgccccagttgttcctcaggatggtgcccgtcttctcctccttgaactgctgtcggtcttcccgaggaatcttcaccgcatggtactggggcacggtggcctcggggtgcttcgcccgtttgaagaatcccatcttccacaggagcagcaccagcagtgctagcaccagcagcccagccagtacagccaggaggatgacccaccagggcactccttctgccaccacagccatggggtccaagtataccatcactgggatcactgtggaggcatctcggagcatcaagttctttatggaggacttcactgtgatgttggcccggacaatcacttccagggacttcacagctgagtactcctccagaaaggtgctgttccagagacggccccagacatgc

SEQ ID NO: 336827 - DNA, 1000 bp, Homo Sapiens
ttcatccatcatctgtgtagaagcagggtgacatgtctgctatataaaggtgatacagagcagacttcttgctagggatcaggttttccatccaaattcttgttgggaatcttccaatgaaaagtacatatgaaaaaacacttacagttctttagcacacattagcatgtgactccacacttgatcgaggcgataaagatgtgaaatgtcttcggggtcttgccacacccacagtttatatgcaccactgccagcctggtggattcattacatgaggtttcttcaacttatttcatctgtctttttaaacagcaagttccaaagtacggtaagattttcatcctttaaaatttgtattcatggacatgtacttccaagattttaggccagatatcagtgcttgagtgaattatataactatttaatagaaataataaaacatcgatacaaatataaaagacataatcagtataaaaggcttatatttataaaaatactttaggtaacagttttcccctgagggttgaccatgcgtgttgcatccataaatattgctcggctctgtagctcactctccaaagttcagagttcatctttaaaggaagtggtgctggccccggtcgtgtgacctggccgaagtggctgcctcaggctggcacctgggcttgatagaatgaagaagagaacagcatcagtggggcctccgaaaaatctggagaagatttttttcttccaaatatggaagatacaaagaccaaggatgacaggctagtgatcaggtcatgtgactggtgtggcagctcactggtttttctggacccagtcccaactgtcttcattctctttccggttcttctcagcttcgataatttctttgtaccttcggcgaaagaagcccatcttccagagcagcacggccagcagcaggaagatgaggattcccaccaacaaactgatggcgatgatccaccccacgacgtagccacggggctccagattg

SEQ ID NO: 336828 - DNA, 1000 bp, Homo Sapiens
ttttttttttttggacagaatttcacatttattggataaatacatgcaggcactgtgcttggcactggggctccaagttagcagacgtggttcccaccttgagctcagtctttctgtgggggccactgcacaggcgtgatgggtcctgggagagggtgtggagctagggcagggcagagcctgagaagacagcctccaagggtggggatgtccgggcccgtgcccgctttttatttttattttttccttgagacggagtctcgctgtgttgcccaggctggagtgcaatggcgcaatcttggctcactgcaacctccacctcccaggttcaagcaattctcctacctcaacctcctgagtagctgggactacaggtgtgtgccaccacgcctggattttgtatttttagtagagatggggtttcgccaggctggcctctaactcctgacctcaggtgatccaccctccttggcctcccaaagtgctgggattacaggcgtgaaccaccgcgcccagccccggccctctttttctgtatcttcccactggctctgtcattaattcagtgaaattatgtcaagcacctactagatgtcccacgccctgacatatcatgcggcgtcatcccaaggtgaacaagacaagtatagcctttaccctcacagttcactgagagatagctgctaagtacgtcaatcattaaacagggaaaaaacatccaggctgccggatgaagaaacatgacgtgtgctttgagggagtagtgcagggtggtggaagtgtgaaagatgtgaggacccaaccaagtgtgtgacgtgagctgggatctgctggtcaaggaaggaggggtgggcgagatggaaggttcaggcagagggagctgtctgggtgaatgcaggaagacaggaaggagcctggcctgggagaaaggctggtgtcaccagagcttcaacagggaggcatcacggctctagaagaggctggggaaggccacgagggt

SEQ ID NO: 336829 - DNA, 1000 bp, Homo Sapiens; identical to SEQ ID NO: 157920

SEQ ID NO: 336830 - DNA, 1000 bp, Homo Sapiens; identical to SEQ ID NO: 157922

SEQ ID NO: 336831 - DNA, 1000 bp, Homo Sapiens
ttaacattcagcttttaaaactagtattctgataaagtgacattgtattattagttttttatggcagtagtaacttagcacttaattaatccagtcatctgtgacatacataaacttatcctgtaaaaaagaaaacaaaacataaaggcaaagaggagagaatgctggaattagtatccatcttgcaaaaataagcaaaccataaacacacatgcataaaactacacactttaaaaagcaataatcttttaagattaaggttgtatctgttcacctcttgaaagagtgaaacacgaatcatttattcatctagctgttcttgtctattcaaccaccaactgttgaagtgtttggcaaccttagaatatacttgccagattatttttttcctcacatgtccagtgcagggattactgtacccttgtagtgacacaatgctaaactctctcacagcattgttctctctgggaagcgtagggataacaggtacctgtaaagtgtaatcagtgctcttcagaggatctacattctatgctgatctaaataagttatatattacagtaaagtgctacaacgacactagtctcaaacagtagtaagacacatttttctctgaaaaagtcagcagctatgtgagtcacatcatgatgaggatacttgtcagtcttcgttcgagtgtacaaccagcaactggcatgaccgtgagcaatttgtctcctcctgtgacttttaaaattataatctttaggagcaattattaacaattccagtttcccattaagtgtttaaaaatctttttttagaagttgcacctgaaagtttcatgagcatttaatttgctgatatccatttttatttcttcaggcttctcacgtcggtaggtgactgctcttgtgcaaacactttgcagaatcaacttatccttttttgaggctgacactctgtaatctgatgaggacttaattttattactattccattgtagtatcacctgtctaat

SEQ ID NO: 336832 - DNA, 1000 bp, Homo Sapiens
ttttttttttcatttgtaaaatgtttattttcttaggtgtgtttacaggctttataaaccaccctgatatctggttcattttaattaaccaccctgatatctggttcattttaattattcaaaccgaagaatatctgcaaaagtgacaggggaaagatgtatattaatatatataatttcccaaactataaacctttaaggccgtttgagaaagctgtagagctgaggcacgaagtaatccttgtaatgcccgtcaatgaatccttttccactgttgtgcacaaaccagcaggtaacgtccgttccaaacactagatccgttctgtagtctttctgtaagcccctggtgatgatcagcttctgccccttcacttccatgctggcctctggcttctcagggtcctttcctggtctctcattgaagatgtgtatctttggttcctgcatgaactggcctattagtccgtgggctttaggtgagaacttgtttgtagggggtatgtagattcccagaaagtcaacattgacgggatgcttcttccaaacacgatgaagtaaaacagaaaaggacatctctttatccagggtgatagttaccactttttctttcttcactgagatctgcaccctctgattcgtgacttgagccgtgtcggaccaggacaaggagaatgtgctagaaccatggctcagggtgatggtctcagtgctgatttctatttttatgtcttcactttggaaataaaatcccagttttccaaaataggtgcttagttttccattgttgggcttcttggcaccaacaagctgaccgttgactacaattcctgattctgggtcagaaaccaggttgaggatttttccaggttctgagtcaatattgaaacaaatgttcttttggctttttggtagataaatgatgaaatgtgggtcattttcaactctcatcacatgtgggggtggcgtggactctagcacctgagatccttgtgccagcatg

SEQ ID NO: 336833 - DNA, 1000 bp, Homo Sapiens
tttttttttttttctggtctcgaccttggactttattttcccagcccctcccacaggcccctctctgtgcccatgttccagatgccataaaatccgggccatccatcccaacaggagctggtgtgtctactcaaaacaggttggggacaatgtagtcagtgtggacaccatcaatcagcccttctccgttgttgtggacgaaccagcagacaaccttcgtgccgatgctggcatcctttctgtagtctttctgggagcccctggtgacaatcagctgatggttcttcaccaccaatgtggcatctggctttgtggggtcagagcctggccggatgtcagacactttaaagtcaaagggttggaagaattgccccagcagcccatgcgtctgtgctgacatccggtgactgtccaccacgtagaagcctagaaagtcacggtggacaggatgtttcttccacacctggtgtaggacgaccacgaaggtaaccccatctccaaaggagaccaccatgttcttcctgttgatcatcatggacagcccatcctgcgtgactgtgactgtgtccagccagctgaaagtgctcggcacggccctgttccacagggtgatcttctccgttgtcacctccacctggaagtccatctgagcattggcgatgcccagttttccaaagtaagtctttctggtcttggagtcagggctgcctctcttgtcgccagtgatctgcccattaactgtgaggcctgtgactgcatcctgaataaggcgcagcactgtgcctggggcttcatcgatgttgaagcagagggcatcgtctttctccggaatttggatgatgaagtggggatccccgtccacatagtagtaggggttttgaggaggctggtagctggtcaggtaggacatggcggggctcaccggtgtggcttctgcatcttccccaggcttgtcggcaatggccctctcatcctcgttgtcctcaggcttggtcaccac

SEQ ID NO: 336834 - DNA, 1000 bp, Homo Sapiens
tagcagagagattctcttgtaaaatgagatccatgtacaaaactaggcaacagatataaaagatttcatttcatatttttcatccatcaagaaaagaaatcatgtgacaagaaataaaaccaaaatgtggctctttcagaagaataacatgtctgtggtcaactatgacttctaatgagatagttcatatttcatctttatatggatgtatatagttttaatacttcttagctactgtagcatgttggttcagatgaagaaaaaataaactctattgtttggactagataatctagaaaccatcaattatgcatgtctttataatgcgacatcaaaatttacccaggagatgacactgattggccagcagtatcgatttatcctgaacattgcatagaaagttccctttaaaaaattcattatcttcttcacaagctaaagtatgagcctctaatttggctctcttatttaaagaaatagtttaaatgatcaatttagaagcttaaaagtatctttgaaactaaagttgcttttcttaaaatgaatgctgatttaacagttcatagacttggagcattatcactaggagacggaggcactactgccactaacgagaaacagcatcaccagaggataattacatggtacaaaatgcccaggggcctgaaactcactattaatataattttggcagcagcatcatttgaaagttaaccatttattacatagtattaacacaccagcttcaaagaagtgcactccctttaggacactcgggagctacaaatgtattgtgattgcataattcgtattgcacagttttataaaaaacataaatactggctattctagttttaaatacaaaatacatgtcatatacttttaaatctataatctggttcaagtgcaaatcaggtgctttctgttagtccttccaaaaaaggcatttttaatatttttggcacaaatgaaatgtcatcatgccaacaattctaattac

SEQ ID NO: 336835 - DNA, 1000 bp, Homo Sapiens
cgagtgagtacatctcctatccataaaactctgcctgattaaaatattttaaagtgtactttttacctgatactgttaatagcattgatgatcctggattttaaagatggctgctttagtctactttgattttgggaaagccattttaaacaaacaaatatgtggtatcatttaaagttttataaagaattaagagtaactgaatgacagctgaatttctcatgtatttattgactgcctcctaggttcaaagttctgtgctgcatgcagacatatcaaaatttcttatatctttggatcatgaatgtcagggtctttcagctcctggtcagaaaaaatactgtcatgtcagagtgaggaattcttagtatgaggtggtgctggggagtaccagtagcttcagttcaaaaattcattgctctgggtcccaacagctttgttccaagtctacatcttaacagtatgtggaaggattggttcaggcttcctttatattctacatagatcttgatttgggatttttaggaaccaatagcttaagctatgttagaacaatccaaaagctttaaaaattgtcagagcaaaccctatagcaaaccctatctagaccttaaaccttggcgttgataactgagaatttaaagactctggaggcagtgttttgttcctgtgggggagaggccaggtcaacttgcagagtatctcccagagtctggtatcaagtgtcttcactccctgtcacatcacttttttcccaacactttcattatccatattttgctctgctattccaaatgtgtagtctctaagaataacctgaacacaccaggttattctctccctcgacaaattctgagtgcatgatttaatacaaaaacaatttgaataagagatttttatcttgctacattttgaaaagcccttacagatacagttttaaatatgtaattgaaatgtggcattttcttgagtattcaatacatttcttggattttttttt

SEQ ID NO: 336836 - DNA, 1000 bp, Homo Sapiens; identical to SEQ ID NO: 157923

SEQ ID NO: 336837 - DNA, 1000 bp, Homo Sapiens
caccacgcctggctaggctaggtttattatttttttcccccagaaaagagactgaaagttgaatttgccttatccaaaatgcttggaaccacaagtgtttcagatttcaggattagggatacttaacctgtaccaagttccaattcatggagaggggccatgattctgctgtgcttgagcagagagatctccttgccagagcctcacccaagagaaagaggtgggtacctgcatgcccccaggtgcctaccctgggaggtgggcacctgcatgcccccaggtgcctaccctgggaggtgggctcagaagttagagagcaagggcacagagtcaccaaaacctgtcccaacaatccccagacaatatgcttcctgctgagtccattttaaatcacacaacactagccgtggcacaggcccggctgcgaggcccatgatgcttgggagctgttgtggagaactcaacctcatccagaggccagagggctgacaagagcagctgggcaggagggcctgctgtgggcagggtgggaaagccgccacatctctacttcccaagaaaggccactaggtgcaggaaaagggggcgaagggtctcaggactagtgaaagtctgcattgaaggctctgccgatgaccagccgcctcacctcgctggtcccagcccctatctcatacagcttggcatctcgaagaaagcggcccatgggaaagtcattgatgtagccattgccaccaaaacactgaatgccgtccagggctacctgtgtagcacactcagctgagtaaagaatcacacctgcacagtccttagcagtgcaatggccctcatcgcaggccttggcgacattgtagacatactgccgacacgccatgaggcgggtgtacatgtcagccatcttcccctgcatcaactggaagtggccgatcttctggccaaaggcttccctcacgtgcaggtagggaatggtgtggtccaggaccgcttgcatgagcccaag

SEQ ID NO: 336838 - DNA, 1000 bp, Homo Sapiens; identical to SEQ ID NO: 157924

SEQ ID NO: 336839 - DNA, 1000 bp, Homo Sapiens
ttgataatctgtggaatttaaatgttattcatgcttcttattttaaaagtgcttcaaatccttcaataaggttctgaaagcttgtccgattggatggttggaattcccagcattttctcataagctgataaacctcatctggacagttaggtgggcacggcaggcgttttccttcttttaacgtattcacaagtcttgtgactgtcatctggccatgggttgggcctatcattttcaggaacaaagccatgggactagaatctgaatcacagtaagtcagcagctcatgcagagtgactccaaaagaccagacgtcagaggcaatataaaatttagattgcattaaacattctggagcataccaaaacacagggctgtcccggtcatccttgacggtgtaatactccttatcggtttcaattgctttggttaaaccgaagtctccaattttcacttggtgttcactctcaacaaggacatttcttgctgccaagtcccggtgaacgtattgccgagaacccaaatagtccatccccttacaaatctgaacggcatattttagctgctgtttgaggtttattttgttcttattctttggaagatattccttaaggcttcccgaaggcagaaattccatgatgagcttaataccatttcctccgtcttctgtgcagattcctttgtacttcacaatgttctcatgatagaggttccttaagatctcgatttcctttttcagatcagctatgtggttacctccactctcaggcttcagagatttaacagccacctgctcccctgtattgtcttcggggtcatacctgcagagctcaaccttcccaaagtggccctctcccaagtcacggatcctctttaggaagcgcttctcaaaatgtgtggggtccacttcagttggctggtttttttttctggaaacaatatctggattctgctcttcaagcttattaatgtctctcatgatggctcggaagaaaggcct

SEQ ID NO: 336840 - DNA, 1000 bp, Homo Sapiens; identical to SEQ ID NO: 157925

SEQ ID NO: 336841 - DNA, 1000 bp, Homo Sapiens
tttttttttttttttttaaagaaccaattttttttttacttaaatagattcaataaaaagaacaaacacacacaaacacaaacacgtcttaaaataaactctttagagactaagtgcgtgtttcttttccacagtacggtgcagagaggggagggcagggggcgggggtccccttcccaatgtccccgcgggcttgagtaccaggcggcggggccagctccgccgcgatcgccccctcttcccctccctgttaaatacacaaatatattatattcaatatgaatcgagtctgtttccagcagaaaaaaaacatacaaaaaaaagtggaagggggggcttgtaaacgtcgaggtggaaggactgggcgcagggtaggagggccggagtccagtgtggtttgcggcgcccctaggtcccagggtgggtgcccaccgcctgctccctggaccccagtgggaggcgtgtgcccagccgtccaagcgagggggtgtccgtaaaggggcaggggacgttcagaaggcgtgtcccttgaccccaagcagcagctgacagccgttgctgacgtgggtcatgaccttctgtttgagctgggccacctgctcccggaggaggccggcggtactcgacagccccgcgttctcggccttgagcgtcttcaccttgtcctccaggcgcgcgatgcgctccagcttccgcttccggcacttggtggccgccagccggttccgcagccgcttgcgctccactttgatgcgctcttggtcttccatgttgatgggggacaccggcggcgtggcgtcccggctgcgcgcctccggcacggtctgcggttcctccttgaaggtggaggcgccgcggcccaagcccagctgcgccgggtggccaccggcgaagggcggcgcgtgtgggaggtagctgatggtggtcgtcgggtacgagctcccggtcccgacggcagccccggcgcctcccgaggacgcagaggctggggagtagctgc

SEQ ID NO: 336842 - DNA, 1000 bp, Homo Sapiens
ctgtgttatttttattttctttgctttggtctatacaaaaaaaccaataaccaaaaacataaagcgataataataaaacactctgcttggacctcccccagccccccacaccatgtgcgggaaatgggggggtctgaaacaggaaggggaagagaaagcccctcaccacacaccagaggggtcagccaagagcacttctcggggtcagctagggcagctgtgtgggtgggacaggggtgtgaggaagctgtccccggagctccctggggagtgaggggtgggcaaagccaactaagcaccctggagagagaagctggcatcttctggagcaggtgactcactccatatctcctccccatctcccctggacggtccctgaacttttcaagagaagttttggattttgggggtttgggtctcgaacctgggccctggaggccctgggggcttagggcagttggtcggtggagttcagtgagaaaatcagacccagagaaggaaccaaagcccttccgggcccaggcagctggagacagggaggctggaggtttggaggggcgttgctgggggaaaacagaatgggtacttgagtctgaagctttagtggccagggccacaggggcggggagggggtgtcaggccctggacccatgcccaggacagaaaagcaggagcagaacactatcccaagaaagaccctacggaggacctctggaggcgcagggtgcagcaggaagttacaccccggcttccccagctcaggcacttttctgtcttgccccatcgcctgcacggagagcctctcagatgaggaaccgcacctgttaggggagcggggacagacaggggtcaggggctcggtggacctgcatccccagaagctcaagccactccgtgtcacctgcccaccacccccagaaggggccagcaggaataggcctccccatccccaccaaagacacaagaagaaggcaggccagggcacaccgtgcttggggaa

SEQ ID NO: 336843 - DNA, 1000 bp, Homo Sapiens
tcaacaaggtaaccttttatttcctgggataaaaataaagacaataaattatcagaagtattcctccaatatcattaaaatgctttttgaagaaagttacaagaattgtttaaggcgcacagaaaaagtcagatttgcctttcttcaagaacatactctgccctagacacaaagcaccaataccacatcccagaaaagacagaggcttggagacacaggaaacagaacagcccataccaagatctctgactctaatataagtaacacagaaaaacatcaggacaactctttcttccataaatacaacatgtatcttgaaaatatacccaaaatatctctatctgaactacagtacaaaaagccacttaccaggcataaaaataatattttcccctatacacaaatacaatcatatgtaaagcaaatttggaacacatggatggaggagttacataatctcttgggatctgggctatttagagtcatttttgtttgggttatccctctgctgggtataggagactggctacaaatacatccatctcacagcgctcaccatttccacagctcctgcgtcatggaatgtggtactttttaaaaataggcgacccttgggtgtcatggaaagaatagagaaaatggggggatcgagggagggaggaaaggagtgaaaggagaggggtagactgaggttacagtgtgacttcaaatactctgcggtataatgtagatatccatgttcagcaagcctcccattccctactccactgccaccagtctgcctgaatctcctttcacaaatctgtttcccggctggtgtccaggcagagggcataaagggacctccgcaagtccacgttgctcttggccttgacgttacacttctctagggggcagctgccccttcgggcactgtctgcattctccagggtccccccagccttgcagaaggatcccctgctcccgctgaccttccgctggactcctctgtccagccccg

SEQ ID NO: 336844 - DNA, 1000 bp, Homo Sapiens
ctaaaaatcaaatccatgactaagattcacacatttgcatagcaatgtccccagcttcccagacattccccatgaggtagggaggggaagacagtaatgttcccatttaatgggtgggtaaactgaggcacaaagagtgactgtggacccaagttaccctgtaaagttatggcaagatcgagatttagagctggcagtcacagaagccacactgcctctcaagcaaaccctcataaggctgtcctctcgtaagttgctcttcgagagaataatttttaaaaaaaaaattatcatcaaagagtctgaaagcatagatataaaattaaaaacatgttaacagtcctttcagtttcagaactgcacccaaaagatctcagaacagtacatcacagtttatcaaaggcaaaaaacaaatggcaatgttactgagaaacaaaaggggaggtgggcaggtggatagatggcagtggtctcacaatggaagaaaatggctaaatcaagtgggaacgccaccaagtcaccttaccagtgagagcaggtcaaatgcagctccaaggggcagagcaggcaagtgtttgcttgactcagcaaaaaagcctcttagagtgaggctgttggcaaaggaataatgcttgttccttattctaaaccacatatttcatgcccataaaatgggaagaaacccatgctgccatccaatgtgtgcttttacctgtctagggctttaagctggagtttgcctgaggaagccttcaacagcaatcctaaatcaaactcccaggaagcaaggtagagggccagagaaaatgtggggaaaatgaaggagaaaaggctgccatctgcaacacgattcctctgcccctttgagaaaacagtatctgtttaagtggcaccttgcttcagactgtggtcaagccagttgcttgactctgctcagacattcctcctggctctgtggttccctttctccagttcttctgctcaggaaggcacttgcaca

SEQ ID NO: 336845 - DNA, 1000 bp, Homo Sapiens
tttttttgctgtttctgctgtttgtattttttttttttttctccaggcagacccataaagcaagtttttgctgggcatgttatttgcatggtgaaaagaacaaggcatctccttattgagggaaacacacataggggctggggtgggcggggctgggctgatgacccagcttcctttcacggctgcaggcggaggggcagggcccctctgctgatgttctagtgttcttcccggggtgtgggagtgagggtgtccttccccgggtgcgtgggagtcggtgctgcgccaggactgcactcggaagcggcctgtccctctccaggcgtctgcagtggatggcaatggcttcgggccacagatggcaggcagggcaggcgtgtcctccgcgctcagttattgtctctggtgtccgaggaggcacttccgaacaagatgtcactgtcctgggacacgctcagctgcgacttggttttgatgaggaactgcgccctccggaacatcaccctctcttgctcctgcttgagctccaggtaggagcgggagaaggtgtggaagatggaggtgactgggaaggccatgagcaggatgccgctcaggatgctgctcagggccactacctggcccggggtgctcctggggaccatgtcgccatagcccaccgtcgtcatggtgatgacagcccaccagtagcaggcagggatgctggtgaactcggggctgtcggccatctcgttctcgatgacgtagagcaggggcgcgaagagggcgatggccacgcagaggaagagcagcaggagcccgaactcgcgggtgcagcggcgggccgtgagccccagcgtctgcagccccagggagtggcgcgccaggcgcatcacgtacaggatgcgcagcgcccgcagcacgcgcagcaccagccccaccttgtccaggtagctgttgcccgcgccgggcttgcgacggcctgcggcggcgccgtccaccagcagcgtgatgtagtagg

SEQ ID NO: 336846 - DNA, 1000 bp, Homo Sapiens
aaacaagaaaacagaataaaaaagagactcaattagacatacatattttaagcataaatatttatcatctgtttcattgcattgtcatgtcttcttaaaatgattggtttttaaaatggacaaaatttccagaaaaagaaagaaaatgtttccaatttactcagtttgaaacagggacaattaattgtgtaacttcacacagattctgatatattcaatataacttggctactgtctattaacatgattcagtgtttgttcagagctcatctttgtattagatcatatacaaaacagatttccagattttaattagtctaggaaaggaataattctcaaattaatcaacaattatttctccccagtactagcaacttttaaaaatcataagaaatgttcaatgctatactgagtactggtatgctctaaaatttacaatttaaacatgtaatggttatatttttgcagggccatagatagcacaaacttgtgtgattctctcatataaaatacaattgaaagcctcccaagaccttaaacagcagaaaacattaaatcagattttaaaatgacaaaaatttaaggctaaaatatttggtattaataattaatgccagtagccttcctactctaataaagtaaacatgcacaagaactacaactttgaacaaaacatcacaattttatcagatatatatgtatgtatgtatgtatgtgtatgtatgtgtatatatatatgtatatgtgtgtatacatacacacacacacacagacatatatttagttttatcgccctgaaagctattcactcatgtttggcttaatacatatgttagaaatgtcagggagagtatctcccctttaaatatatatatatattttttttccagaatatacaatataaatatgccatatataaatcatgccataaaactaaatgcaaaatttgcacattattgcatgcttgatgtgataatacatgcccgttaataacttcctt

SEQ ID NO: 336847 - DNA, 1000 bp, Homo Sapiens
ttttgcttcttatttctaaagttatatatctaaacctacattaatgatacatctatgtacagtatttagcagttctgttctatggtacttttgtacatgctgggttttattactaattacaaaaagaaaataattacataaggcatatatatgtacagtggtttgtcttcagctcacctgggccctgtaactgccacacccacatgggggcaagcacctcaccctgtagtagatgaaatgaattgggatccataaaactgagggctccactctgtgtctcactgaatgaataaataggcaccagaaaccttgcttgtcatatcccaggtaaaatctttgacacacctttttgagtgatctggtattgtacaacacatgcaggtaagtaactgaaatctccaggagttggatgtgtagtattttgggaggagaccaggcttgggccacaaatgagggcactttgcactttcatcaaatccatgtctaccttgtcaatctgaataactgagagagggcaggtagatattttacaccttgaagatttgttttctggtcatgtaaaaattaaatataaacaaataaagaacaaagcaagagagacagaaaaagaaagagaatgagagacaaggaaagattgtgttggggggagaagagaagggtttgcccagctagggcactaaactttggattcattctccaggtttgccacatcaccatttctttctgtttgctcttcgaggttcttttcttcctcttcagtctccagttctgcatgttggttgagtttgctggatacagaccaactcaggggcagctctgccctgctggctaactcggccagctctttggcactaagggatggggtgctggtctcataggtctcatggaagctgttgtagtcaacttcgtagaacccgtcctccagggtcaggacaggtgtgaaccggtaaccccacaggatctcactggtgatgtaggagcttcgagcttggcatgtcat

SEQ ID NO: 336848 - DNA, 1000 bp, Homo Sapiens
ttttttttttttttattttttttttttttttttttaagtcttcaatactactttattttcaaaggttaggtgaatcttgttaatttattatagaaataagaattcttgctgtctttatgtgttacaatagtcttgggttgggaaaatctgttggtctgatttctacttaagaatgaatgtctaagattttcaaacagcaaaagttcacaataattaagtttctgtgttcttgatattcttctgctattatcagtcttagaccactccagagttcttctttattttcttttccttttggtcaaatagtagaaaaatgtgacttgctgctgagccctgctcttcacacctgcttgcctttactcagctagtatttatttcaagagatgattcctgcctaggtcatcaccagtggggaaggttaatctttcatttttcccacagaaacctgaataagggaaatttcagaaaagaacagccacaaatctgtttgaaacctgatagggtgacttttttggtttttgttttgttttaaggacagtttctcttttttttattgaaatgaaaatcatgcaaatgatcatcttaaactggacataagggaaagggctcattttagcatagataaaataaaaaacagaggaaacataatttttatagactattagatttagaaagaaataatagagttcatctagtccaacctcctactggtgaataaacactgattttgtgtttatagaaaaaactatttgaagttggaaacaggaatttgagtttgaaaatgctttgttgcctaattatcttttgctttatctactgtagatttttttccctactcactcaagttatatctaagtaaagctttatatctataaagacttaaatatatttttgtatttatgaattagagccatcatgatgttttatatgatcaaatgaatcatacataggaggggaatgtctttacttaggttgctagaagtcatttagatgaatcacc

SEQ ID NO: 336849 - DNA, 1000 bp, Homo Sapiens
ttttggacatttaaccagtcatagcccatttattttttgcctcaaaggaatgcagggcactagacccctgaatttggcccggggcaaaatgttacctcttggtatgagctttatttaaatagcaggggtattctttacaggcttgagattttcaaatcttgttcatgcatcaaagagtcatcttgtttatgagtttcttaccttcagctcctcttcttcctcatggccccaccggaccttacaaacatcagcatctgagaacatttcctgtattgtcaggcagctgaatttttcttttgtgctaactgtaatcagcaagcatgactgagacaacaattactctcaagagctttattttgctcttggaatgtcaggggataatcctatgcagttcctttatgggcaagccattttaatagataagaaatgaaatggctgaaagaaatattggccaataataatgaaatgaagagaggccaggtctggatgccacagggatacgggacccacacagagtcagttttccacacggcttcagaaagttgctttgagaacactgtccagagcacagctttcgaactttcatttgtacacaaatcatctggggttcttgttaagatacagaccccaattctgtaagtctggctgggacatgagaatctacacattactaataagctctcggatggtgctgatgtggcgggtctgtgaaccacattttgaatggaaatattttgaatggaaagagatagtggattcaaaaataaataaaataaaatagaggaaacaatggcatcagccccatttgtgtaggtttccacagttgtgaattacagatctgatcaatttccttccatacaattcagtccactgaagaaaggtaaaaatgaaattactatattttgtgaacatagagtctctctacctctttttaggtattaccacatagacataattagatataatatttttcctgcttgaacaaaaagagcatgtttta

SEQ ID NO: 336850 - DNA, 1000 bp, Homo Sapiens; identical to SEQ ID NO: 157926

SEQ ID NO: 336851 - DNA, 1000 bp, Homo Sapiens
tttttttttttttttgagacagggtcttgccctgtcacccaggctggagtacagtggtgcaatcagggctcactacagcctcgacctcccaggctcaaacaatcctcccacctcagcctcccaagtcgctgggactcccaggcacgtgccaccacacctggttaattttttattttttgtagagatggggtctcactatgtcacctaggctggtctcgaattcctgggctcaagcaatcctccaacctcagcctccaaaagtgttgggaatacaggtgtgagccactgcacccagcccccacccctttgccttttgctctctggtcacttcacctgtccaggcctcagtattctcatctgtaaaatgggagtgagaactcctgccctgatgacctaagtagggttttgtgagactcaaaggaatcagtggccagcatagagttttcagaggctaaaaatcactcgacaaatttaagagtgggtaattatcagcaattatggtgagtctgaagtcttctgttccagattctaagggcagtgtctggaaggctgaagtcctacctgctatgagaatgtggctggaggccagttagcttgaacctccagtgcgaccattctgcagactgacaggccgctgcctcctgcctcccagctcgcccctcctgctgcctgcctgtccctccttctttctgtcctgctttctggggaccagctttagggactgctgggtttccactttctccataactgcaaagccatgcaaaacaacacgaagggaggttgggagacacagctggggatgaggaaggggagtggggctgagtaggggtgacttggacatagacaccctggcttttggaaccaagggaaggtgggagacctagcaggacagaggtataaatagagatgcaaacgtacacggaacatgaagtcccctccgaaggtggggtgtggtaccagcagggtctctgaggactgggagcttcttagattttcaaag

SEQ ID NO: 336852 - DNA, 1000 bp, Homo Sapiens
taaaatttgtaactcctttttttttaatttcacaaaagttttcacaaggacaacgttatagaagaaaacccccagcagtggctaggtcatgcagaaccattaattgtcataccttggcccattctattcatccttgttgcactttagagagagaagtaagctatgtgagttttacaatgcttttaaactgtcatatttcctgttgagcactttaactggcacattcttatagttataaatgttctgagggcgtaactttataacctcctttgcaaagaatgcatgaagagctcttcatgatccaatactaggggatacatatatatagttatatatatagttatatatatataattatatagttatatatatataattatatatagtttatataaagagatagttatacataatataaatcaatatatagagggacaaaaataatttgaaaaaattcttccactcatagggcttgataatttacatgtatacaattattccccaccacaatactggtttgaatactacgctgcccctgtctttggtgtgggggagggtggaggttctgactgagcctcaccatttgtcagtaaaagtgcttgtcaattcacacagcaagcaaatatccaaaactatcatgcttgaggggacgggggatccaaaatctaaatccaaaacattcaccataaaaacacctttttagagatggtacagctgtgacatgttttcctcctcccttttacccctattctattcgatggaattctttgaagtaaaacttttcaaatatgtatataccagcctagtccatccataagggaaattggttatggtgaattggccagtttttaagaaataccgcactgcctaaagcatgatttgcatgcacaaagcatctgacaactatatgttgaaaaaagggtatttttctacctctcctctcatgcttactaagtgttaaaaaagaaagaaaacaaaagaagaaaaaaataactatacc

SEQ ID NO: 336853 - DNA, 1000 bp, Homo Sapiens
tttttttttttttttccatactgaattaggaagtttattaggctcctagtttccatgtttagaacatgagcatggatttacatgcattgtctcattttgtggatcttacatgcatgtcgtctcagtcagctgcacctttgattctacttgtcagtaatttaaagttagctcaatgtgagtaaatgacaaacacagaatgatgcataagctgtagccacaaaccccacccaataccatttatcttatattccaaactatatcacaactctctcttgtaaaaaataaatttcagaacaaggcatttaattgacctcacagagaaaaataaagacaattctatcatttcagaattcagcaatgaatgtccaactatggctgaaaggtacaccctgagaattaaatgattttaacgaacccactgaggtttataaagctgtgttaacctaatgtcgggaaaggataagagaaacaggcacaaacacccccgctcattttgctgtgcaattctccaaggaggtggtgttacaaatgtcctcattgtcttcaatgcttgaagcatctgtggagtcaggatcgctcaccacaatgcctacagaagagagactggtaatgaaggtgtgcatccgctgtgcatatatatccctaatgttaaagtaaggtagctcatgacacttctctggtgcatcctcactgcactggtccacatcaatgtccttttgcttctggtagtacttggaaaacttgttgaagatgatggtgatgggaagggccaccaccaagatgccacagatgatgcatgtgctggcgatgagctttcccgccaaggtgaccgggtgggtgtctccatagcccacagttgtcatgctgatggtggcccaccaccagcagatggggatgctggtgaggctggatgtgtggtcatctttctccacggagtagataagcacagagaaaatggaaatgcccacagagaggaagagaagcagaagcccaacttcat

SEQ ID NO: 336854 - DNA, 1000 bp, Homo Sapiens
tcaagtttttcaatgttctttaataaaatgacatcaattgctgaaagcattatgacctttgttatgctacataatactgatacaaaatgtgaatagtacaaagttcattatatataaggctttaatatattacatttgtttctacataaacagactataaatatatgtgccatagcatgtcttatagtcattgttcccagcatttcacactatggtaccaaacaaaaaacacattttcttttttgaaaaaaaggacagaacaagggcaaaaatcagtagaaatagctctatatgttaaaagtctaaataatacaatagatgttataatttgggctataaaataattttgaagtctggctaataatcattcagagagtgaacaaacccaatcaggtttactggagtagaggccaaataactaaaatactgatgggttgcggggtgagagtgggttggggacagggggaagaacaaaagggtaaaatccttcctgaaactttgacaccacacacagcttcacattgaacctcccgcattcagtctcagacatatcacatcaggacagatatgagggtattcattccagaagaaaccagaagctggtttgtgcagtcagaactcttcaacacggcagggagccttgagctgaatgtcctttctttgtggtattctgaataaaggatcagcctgggagacaaggagccagagctgcatcattttcttcctggggcttggcaaggagacagctaacggtctggaaggaactctcattaggagtcagaaacagcacaacgaactctactttagcccaactcgaagaacacgcaaccttctaaaaccagaaaccccgtctgaaccctttacatttcagaacagaccccatgcccacctccaccagagcaaacacaatgcatttgcaggctccagtactctccaaagcaaggtaacgttagtcttcctttctatcaatccgaattccacacttaaggcttggcttggg

SEQ ID NO: 336855 - DNA, 1000 bp, Homo Sapiens
tttttttttttttttttttttttccgtgacgatactcattcctttattgtcaactgcattgattggaacagggctggggcctgcaagctgctggcagcacccagctgcaggtgcatttcagctcaacagaaaggcctccatccgaagccaaggggacagaggggaatgttttatatatatatttatatattacatatgtcccgtatagtcatatgtgtagagtgacaagaatgggccactgcattgttaattgttgtcctaaataaagaccatagcaacacacgagaatttggtcctaatcaaggcccttactttgtcaatcaaatatttgatacaccaaaaggaaaaggagagaaagagagacagagagactgagatccagccactcctggtggccctgttcccagcagatcttacactgagtgtagagtgtcccctgtggaggtaaacacgcacacaaacacgcacacacatacacacatacacaaaaccgcaggcaggagctcctcctccgaccataccttgggcccagccctcggactgggggggctgatttgggtatattgtgctataagactgtgagggaggtgtgacaagacaatgcaaaggcgatgtgtccaagtgatgaatgaggtgatacgtgctgctttgtccacaaacgagaaagaggtcagtgggagaggctgctcaacgcagccctggaggtccccctgcgctcaggccacctggtgaatttctacacacaactcctgtcccagccacagtcgaacctctgatctgaatcctgagtctcaaataatctcttgggctctgatgaaaattgtgatttcctggaaggacaggagcaaatggcaagtgggtggctcaaccctctagtccagtaatgaagcagaaatgacagtgtcgctgagttaaatcagacccaagcttgatcctcagagcagaacttgaatgatgtaagaagggttcatttcctgaaggaaagagaataacccccgcc

SEQ ID NO: 336856 - DNA, 874 bp, Homo Sapiens
ggatgcacatttgattttactgggggtaggggacagggctgggcgttcaggagttctccgctatggtgtcctcgatccacttcacataagacagcactctgacggcgacagaaggcttattgggggtgccacaagggacgtagccccatgatgtgacaccttggagcacaccatcacacatcagcgggccccctgaatcacccacacaggtgtctttgccaccttccaggtgtccgacacacagcatgaagtctgtcaccttctggacgtgggcttttttgcactcatcattaggcaggattttgaggtccacacactggagatcatctggaaatgagaaattctctggttcgatgctgccccagccggaagccaaacaggtgctccccacttcgggttcctcggtgggcaactccacgaccttcacagcatctgtgatggtatcagcaggctctgtcaggcggagcagcatgaggtcgtggctgtagtcctcgtctgcttggcgggtgtggttctccaggaggctcatgttgaagccagggtgtgggaagctctcactgacatgaacaaactgggctgtgttttcgtcgtcaaacaagttgtggcgacccagccagagctggtaattgtcgctgatgcaatgagcagctgtgagcacccactggcggtgcaccaggatgcccccacactggaaagtgctgaaatggtacagagccgcctgccagggctgggaatgctgctcacactcccagcctcccacaatccgggactgaatcgggggcgcagcaccagtcccccccagggacagggcgaggcacagaaccaggaaccacatggtgacagaggtgtccaggggccagcaggtggaggaact

SEQ ID NO: 336857 - DNA, 1000 bp, Homo Sapiens; identical to SEQ ID NO: 158965

SEQ ID NO: 336858 - DNA, 1000 bp, Homo Sapiens; identical to SEQ ID NO: 157928

SEQ ID NO: 336859 - DNA, 1000 bp, Homo Sapiens
tttttttttttttttcatatttgatagcagctttttttattggttacaaaacctaagcccatatacaaaattaggaacacatttagatgcctcttttgaaagaacgttttagtctttttaaactgagtttaaaaaaaaataacaatgcaatttttaaacactgttttgaaaacttaaaagtgcagcaatatacttagtttcctttatctacgaaatggtgcaattccaattcaaaactggtaaggtcacaaattgaatcaaggaaatgcatacaagtgtctgcactacttgatgctaatgttcacttaaatgttagtttgcactttaaaacatgagaggaaataggaatcatcacagtagaggcccaattttaatcataatgtgtgcaaattttaaaaggtaactgtcagttaagtaaggaaagtccagaagaaactaaactggaaggggtacggttcacaatatcaagaagatttggacttttaagggtttcaccgaagtttgtgaccttaattagcttttacgttgttattcctacttttagcgaacaccacacagtttcaaaaatttagactatagtgtccgaacaggatgcagttaccatatgaagctttaactcaaaatttggataaagaaaaaaaggcacaatgaacttcaactcaattttatgtgcacaagagttgaaaaatctgagccaccttaaagagaaattgattctaaaatttataaaacctataaataatcagaggccaaaccactatattaaaacagattctctagcaagtaaaaatcttgcagtttaaacatacgcttgtatccactttagatacaagacaaaactcactctttaaagtggctccaccttggcagatacatatatttgtaatgaatgcacacctgctatgtgttgtttatcagtgaaaacaccccagctgattcacaaagctctgatggcatctgtctcatcttcatcacagtaaatacaccccccaatggataa

SEQ ID NO: 336860 - DNA, 1000 bp, Homo Sapiens; identical to SEQ ID NO: 157930

SEQ ID NO: 336861 - DNA, 1000 bp, Homo Sapiens
tttttttttttttttacacaaagtagattcttttattctggaattgtgactgaaggacagtcatggggattaagaacaatgctttaaaaaaatcttgcttcccttcagttaaatcatttccttaactgtttcctgtcaccgcttttttgttgttttttgtttgttttttaacagtaaatcccagaacaaaggtttaataatcttcttttccatcagctgactgcttttttggatggtaggcattctctggtgcattggtacagaagacttcaccatggaagctcatgcttgatctttcaatatgatcatgatatttttcctcttggcataatatggctgctgtgtcctcatcattcaatgaaaaagtctgtcatttctgaagctaccctttttagccataaattttttttcctccagtaagttaaagttgaaatccatccattggtgcttcctgctgctgaaatataaactgttgttggttttcatccacctgaggtacaatgctggggtcatcttcttctacaccaaagtaatgttcaatcagatcaaatgccttctggtaaatttcctgattttcatggctttgcaaaaactcaattttatccagaccatatgcttcttcaatgagagcacagtatggattaatgcctattccattctgcttagattcttgttctccaagacgtaaaatattttcaagtccatttaaagccacttggactattttggagtccataacagtcaaaagatcacaaagtggtttaatgcagcctaaagctaccaaataccttatttgctctggagtacctcctgatgttgcattagttatagcccaagctgcttcttttctggtacgaaactctgctttctgaagaatctcaatcaaaacaggaaaaatatttgcatctataacagcctgaatctgagctctatttccagcagtgatgttagaaacagtccagcaggcttcttttctaattgactcctttgggctactcaa

SEQ ID NO: 336862 - DNA, 1000 bp, Homo Sapiens
ttttttttttttttttttgcaccaagaccatttatttgcttatgtctttactgatggttctgtcaaactacaactccagagttataaggttgcctctcattacagaagtgtcaattagatttaagacaattttacttttctttaaagatacagcatttaaaaaatactccaaattgagttatgccaaagtttctaacacttgtgcgtgtaacttgttacaaaattcccagaaaacgtaagagccacacacatttttcccctccagaaatagcttgcatttataaacaatatatatcacttgctgacatgcaagacccctaaatttggtacaaaagccaagaaaaaactccatggattttcatcttgcatagacagaatgaggtattaaaaatgcttctgcaggtcctttcaaagaattgttagttcatggtacatctcacagttagttctgagctctgggtttcagaatcatgtcacactaacagcatttactaccaaccttccctattaacttgattcaactccaattacctctttgcttttctgcttttatcaaggaggatgctgccagtctgcatctaacagagcgcttctttcagagctcttagaaccctgctgtaagtacatctcagatactaacggcatctgacaataccactagtgtttaaactggaaggtaggaggttcttgctcccaaagtgcttagcatagtgcccagcaaacactaggttctcccaaaaaacatcttctgaccacactgtcatctgaaattctgcaggtgtgccatgattttaacatgtttcttttctgcaagtgtagtaataaagtgtagtaataatttaaattaaaaaaagcctacattgctctagctgattggcatcagtacatgaatcggctttgcagatgctacataagaaagcagaaaggggttgtcttgacacactttttactccaattcccatttttttctcccaaggaatacaggctataaagctccaaa

SEQ ID NO: 336863 - DNA, 1000 bp, Homo Sapiens; identical to SEQ ID NO: 157931

SEQ ID NO: 336864 - DNA, 1000 bp, Homo Sapiens; identical to SEQ ID NO: 157932

SEQ ID NO: 336865 - DNA, 1000 bp, Homo Sapiens
ttttttttttttttttttggctacattaatttattgaaacacagatcaagagcagaggaggaaggggagaggcaggaaggcagttgccgtgggcaaggttctggtcctggcccttcctgctcctgaggccccttcctatgggtgccagcggacttctttctagggtggcctttcccactgtggggtggcagagcccagaagtgggggatcacacagagaaatgtgaggccaggagtgggaggggtctttcaaagtgcaggagaagtagctgagcacttctccaggcgcctgactgactgggccaagcaaggcagggcaggcaaagatgcctggggcctgggacttgagttggggtgcctaacatttccggcagctgctgccgcaagaccccacacccagggagctgataccacaggagcccacgccgcaggaaccccctccgcaggtggtgttcaattggccgcagggcgcacacaggccggtgctcaccgccacgttcccgttgcacggagcgctgcagacactgccagtcactggccgggagcctgacacgcagaggtccccgcacacgaccccgccccgggagctgctgacacagacattcacagccccaatgccttcacatagcctctgctcctcgccctccagcaggcgcctgtaggtggcgatctcgatgtccaggcccagcttggagttcatcacctcctggtactccctgatcaggcaggccatgtcctgcttggccttctgcagggcgccctccagctcggccagcttgcagcgggcatcactgagggctgcctcaccctgctgctcagactgagccaccgcggcctccagcttggagttctggcacttggcattctccacctcggccgtcagcctttggatcatgcggttcagctcattgatctcctccttggtgcggcgcagggtctccccgtgcctgatcaccgtggccttcatctcctcacacttgctgcggtaccaggactcggcc

SEQ ID NO: 336866 - DNA, 1000 bp, Homo Sapiens; identical to SEQ ID NO: 336168

SEQ ID NO: 336867 - DNA, 1000 bp, Homo Sapiens
tttttttttttttttttttttttttttttttttttttttttttttttttttacgtacaatcctgatcaattaaattttaaaaagaaaacgctgacacgttttcgtaagtcctgtttccctcactcagctttgaacaactgtgaaggcagagagtgggtccgagagacctatgcacccaggaccaggcctggggctgccagatgtgaggccttcaaaattatttattgatgcgtggagtaaagcacaacccagagaactgggcttggctctcagctgtgtgtgtatagcacagtctcaaggctagctcttgacttctaggaaggtctttagggtcagcagggcagataattacagcaaagtctctggggtcactggaggttcacagcagacacctaggacaagcttggaggtggcatcactgctcaggaaatcggctgattggctgtagctgggcctttagaacaggcaggtgactttagctgggtctctggaaacagtcaggtgaataaagctgggtctctagaaacagccagggaactgtagctgggtctctggaaataactgagaaacagtctgtccaaggagctgctcgattgtagaagggaccacctggctaacgaaccttctggatgctggttagaaacctccagtctccagctcttgtctccaggacagctgcctggctggctttctagatgaagaggaatccaacaggaagccttccaaatggctgcttcaggcttttcctagagtgactttctaccctcaggtgcagaggccaggtgggtatggggtcagtgtctggcaacggctgcatacgtgatggactcggccatgggctttgtggactgtggggacacagcccgggctgtcctctgtgtgagggcccagtggtccagctgagcatacgtcacctcctgggaactccctgcagccagggccgaggtgtccgtctctctgtccttctcaggaagtccattgactgtggccttgtctgctg

SEQ ID NO: 336868 - DNA, 714 bp, Homo Sapiens
tttttttttttttttttgcgaatcgtatctttttatttgtatatgtatgtataggcatctgtgcatttctattgctcattctaattatttctccccattgaagttcacaagacgggaggccatttctcctcattcatggtgcatcaaatccggaggcttcagtgcctggcacagtcccagctgaggagccgggctctgtgtccggggagtccgggcctccagagctttctttcaccagcagctccaggaagtcactgtgctcagaccatccagggggcttataatagaggcagcgataaagcccggcatttccttcacttactgagtcaatgtggaatctggcctctgactcagatggaccaagtcgaaacacattataactatctttgtacttggctctatcctccctctccaggcggaatgtttgaaccccaaccgggccccggcacatgaaagtcacatggctccccggggagatcacagtgcctggctcagccgagatggagggtctgggaagggccccctcctgcgtgtggatggtctgggccaggcagagcactaggcccaggagagcagtgaggtgtggagacatggccccggtcccagaactctgcagcagacacaagcagacaggatgtgctggccgggggcctcctgcccgtggggtttccacagcaactgcctcacacaagagggagagctttctgttctgtt

SEQ ID NO: 336869 - DNA, 1000 bp, Homo Sapiens
gggctttatttaactcatacaaaatgtgattaaaaacattaaataggtgatgttttattttgaagagcattaagtcagtttttaaaatgtagttgttttaccttgttcacctcagccattttttattctcctctgttacaagcatgtgctatacacagcaactttctggcttatatcctttaggagtgaacggacttctccttccagtcttgctaattcttgagctttatcttctaagtatctttgattgtcttcatattttctttctaaatctttgagcagttgcagcttgctatttgcttgagctaaaagagtttttgcttcattttgtagcatttcggctttccttctggcatcagctgactcttcagtttttttggcaattaaattttctacttttttatacttttcatcaagttcaccatctaaagtcttcttaacatcttctgcactttgcttcacagtatatactactttttcaatatattctgcctccccggagttttgggcagctttccgcttaagttcttccacattcctctctaactcgctgatgcgctgggacgcgttgaacaaggtttcctcagaagctgctgtttcagactcaatcgaagttaacaggttctgggttccttgaatgtcttcatctgcttgtttaattgccttctctgctgcgacctgggccttttctgcttcttccagagcttcctttaccatatctgcagtgactttaacatctgttgcacttttgcttgctcttttagcttcttctaacaacatctcagctctggcaatgtcagcagcactatgctgaagaataacctctacttgagaaaggctttcaactcgttcacgtatatcttctgtcaagttctgtaactgctgtggggtgctaggcatctccattttcaatacttcattagcaactgcttcaatgctgtccaaatcagcactatcctgggtcaaaaagtttctgatttgcttgattagatttctcagc

SEQ ID NO: 336870 - DNA, 1000 bp, Homo Sapiens
tttttttttgggggttcacactggtttattgggggccctgccgggccaagagctcttcagtgcataggcagacatgcatgtggggcagtgctaggaactggggtaggccttgggcaggggtcactggcaggtgttgtagatctgcacctgcaagttgatggcttgaagcacgctgcgcatcctggcctccaacccgtccaactgggctgccttactctccagtgcccgctcattttcctcataggtgccttccaattcctgtagccgctgcagcttgtcctgagcggcttgcaacaggtcccgagcctcatcccgcagttgttctgcccttgcctgtgcagccagcacaccttgggccttgcgctcagctagggccttcaccgtctggtactgatcacccagaggaccgcgtagcagctgctcagcctcctgggcacgaccctgggcactgcctgccgtttcttctgctgtagaggctgccagactatttcctgcccgtttcaatttcagagcctccaggagagcatccaactgccgagccctttcacctgcagagctcagtgcccgctctgcacctgccatcctctcctgtacctggtacagggtctgctctgtgtcccgtgtgtcagccactgccccccggatggcaccctgggcaataccctgtgcccgctgggcctcctccagtgctgcctgtactgtctctgccttctgtttctcatcctcagcccagctccttgcccgccgtgcatcctgcagtagctgctcggcacgacgcacatctcctacagtacgtgccaggatcgcatccacatctgccaggctccggactcgctctgcaatcgcgcccgccaggtgctggatctgctcagctgaagctgggatggagagctctagcacccgtgtggccaccatttcaatgctatcaggatcagccccctcctggttgaggaagtccttcacactctggataagttcttgaagttcctggttggcctgt

SEQ ID NO: 336871 - DNA, 1000 bp, Homo Sapiens
taaagggttacaaaatattcagattttattataaataaaatactgtttttcttataacataaaaatgccaagtgttgcattttattaaccaccccggagagcaaggctgtagagtaaggcaaacagctaaagtgaaggcacatataaaaggtccacagttggaattccaaggaaaagaattcagggaaaaatagcagtataataatccctgtgtcaaccagcattctgcagcagccatcctgtcaattacattacataaaatacagataactggagctagacaataaaataatggctgtgttgcgggagtgtaattaaggtatcatcttgtaaagaaccttttattttaaaaaataaaattctgcttaaaaaatataccacacaggtggaggagaaaagcaaataacaaaaagaaagttaaaaggaaaccaaaccaaaccaccccattgtggcctgagacttgctggagtgaacttcacccaaactagcttggcagtcaatcttcagtcctcttgctgcaaccttgaccaatgcatatgttaggatgtagccacttaatgaaatgaactagccaggaaacgatgacgtgaaaactttgcaacagcacaccacatctcctgccatagtagaagaggcctgggagaagccagcagagtgaaagctcaggagtatatcgtcaaaacacttgtggtaaactctggtatatcccaagcagatggaaacaggaagtgggatcatcaagaactaagttacaccacctctcccagtctacccaccagtaagtagcactgttcctgatgccctaagtgctcagtcaaaatgtactcccttataaaacttacctatccagctccaacaattgccaaaaagggcatttctccctcattcctggctagtcccactgtggcgtcaaagatcctcttcagcaaactttcctaatcctaccatagcttgtcaacctggcgttcctgctctggaacattgtaaaaccaccgtgctg

SEQ ID NO: 336872 - DNA, 1000 bp, Homo Sapiens; identical to SEQ ID NO: 157935

SEQ ID NO: 336873 - DNA, 1000 bp, Homo Sapiens
gaaaggacagtctgctgtttttattttctggaaaacacaagatgtgaagctagggagagcttgcagaagggcaggagatgatattgcagtctatgcaatggagttgatttcttcttataggaaggatttttacggtttttgctcccttaacaacccttaacaactctgaaacttaaaacagccctgttaagttcaattaagtggttcacagacccactagaccagtatctacacgtttccgcaagagctacttgcttctcaaatgcccaaatgaactctgatactggagcaagatggagatatttccattttactcagcaagtcgaaatcattcaagattaaagtcatctctaacggtgcagcaggactttatggagaagtccagtatcagcagagtctaagaccctaaggtgtttggtggccggtaaacatagatgaagaaactaggcctgcttcatagaacttgaggtggtaactcatcagaatgaagacaccgggctcaattcctgttggcttcgttgtgttttcccttgcttagagcgcttgcagtacttgtatgacagaaatgccaagccacagactccaagaagcacaagagaaaagagaacgtacaaagctgtctgtgcttctgtggtgccgagcattagccccaggaactgcacctcctcctgtctcacggggctgatggtgggtccagcatctggctggtggagacaagcgtgaggccctgtagcggggtcagggaagccattgcatcggaccacagaggcgtagaacttcgctgatgctttggggatccttggcagagaagggtcactgtagttcacaaaatgcagaccaaatctctctgaaaagcctgtggcccactcaaaattgtccatcgcactccaaactgtgtatcctcgaaggtccaccttgtcctgcacagctttgagggcctcattgatgtaagtccgaaggtagtagatccttgcagtgtcattgaggtctgtttcttccc

SEQ ID NO: 336874 - DNA, 1000 bp, Homo Sapiens
tttttttttttttttttttttttttttttcgcactacaatagttaattttatttgttcaagagctcagattgcaagcattaaaccaagcataggctttgattctgtgagcccaaattcacatattgaagaagatcaaagcaaactgtgatccatgtacatggatgaaaactaaaggctcgagttaatcacattgtagtttttaaatttctacagcctagagctcactagtcacaggtcttttaggtccttctggatgtcccacagggtatctgcacttttcttgagctgagcaacctcatcatcctttagcttctggttgataacgctggttaatccccgggcattgaggatacatggaaggctcaggaagacttcattctcaatgccatacatcccctttaccattgttgacacgggatgaatcctggatagatttttcaacatggattcaataagatcagccacacttaatccaatagcccagttggtatatccttttagcttgatgacttcataggcactttcaaccaccatcttatgcacttccttccaattttcactatcattgtcagttcccatttctggattcaattcctggagagaaacacctgccacattcacaccactccacacagccacacttgagtcgccatgttcccccaaaatccatccatggcagctgctgggatgaatgccaagtttttcagccataaggtagcgaaatctagcagaatccagattacatccacttccaatcacgcggtgtttgggtaatccacttagtttccaggtaacatacgtaagaatgtccactgggttggaaaccacaattatgatgcaatcaggactgtacttgacgatctgaggaataatgaatttgaagacattaacatttctctgcaccagattgagccgactctccccttcttgctgacggactcctgcagttaccactacaatcttagaattggcggtcacagaataatctttatctgccac

SEQ ID NO: 336875 - DNA, 1000 bp, Homo Sapiens; identical to SEQ ID NO: 157936

SEQ ID NO: 336876 - DNA, 526 bp, Homo Sapiens
caggggagcagaggcagctgcctttattgggggccatgggctggctgatttcagtcaaaggccacacatttgatcttgaagtcaccgtcagctgccatgtagttgatggcctccaggttgaggcggttggggaacttgaattcgtatccatctggcagcttgacggtcaggttggcctggtcgaaggtgatgcacacctctgcaacacttccaggctggaagggaaagacagcctcccgctgctcggtcccccaggccccgccgtccttgctgttgcacacgatggtgttggcgtcgccgtgggcgttgaagcgagggttgaagtgcaggcacaggttgttgctgtctttgcccaggttcagcacgaagctcttagcgtcaggagccacctcgcctcgcactcgaaggcactctccaggtttgagattcaggttgctggcgaccagaccacaagccatgattgagtccaggaggatgttcccgggcaggcgcaccagctgtcagaaggactccacccgagagagat

SEQ ID NO: 336877 - DNA, 1000 bp, Homo Sapiens
tttttttttttttttttttttgccaacaagcattttcatttctttattttaaggacactgggaaaggagccagtcctctgaagagaacactctggtcaggtggtggaggccagtgggaagccatcaggcctgctttccaggaggggtgaagggttggtgcacggtgcaaggtgagagtgaggttaaaggtcagagaggaggggctgaggaggccacctcccaccaggagcagacagctggtggcttgggactggggtggagctgcgtgggggatgggaggggactgagcatggggcttcatcttcactgcccactcctcccctctccctggctgtgcctgcctcctgggatggtaggattccagcagctggagccccaggtgctgctgcggctgaggaaggcaatccccgtcagctgccttctccgttccagggtggctgtagccagaagcaggaccagacaaggacatggcctctgcattaaagcccagatcccaggcagggttggaaaggctgggcctgggaagtggggatgatgagaggacccagactgccccacaccccagcccccggccccagggccaggaagccgcctatgtctgcacatgggtcagctggatgtcgccccccacttccagtctgttgatggtgggcaggttcctcaggcgatggtagtattcaaacaggtgctgaccatccacggccaccttgaggcagtgagctccacacaagatccacactgagaagctctggccacggacgaagggcatttttcggggcagacttcgctcctcagacccccaggagttgtcgatctgggtgttgcggaccacagcattctcatcaaaacggaggttcaggtggaaggcgatgtggttcccagagcacaggttgatgtggaacctctgagcactgggcaggacagtgcctgacaggaggatggacttggatgggtacagccctcccagaatggtggtgatgaaaggcatcggataggcggg

SEQ ID NO: 336878 - DNA, 1000 bp, Homo Sapiens; identical to SEQ ID NO: 246426

SEQ ID NO: 336879 - DNA, 1000 bp, Homo Sapiens
ttcccacacccagactggtcttttccctttaatgtaaattttgacttggggccagcagctgagtgagtccctgcagtctctcctggctaggccgggctgttctatctcctgcctgctggcacagttcttcctctctgctcactggctggccgcctctttgtttggcacagcgtctcatcagcagctttccgcttctcccctactttcactggagaagactttgtggccagcttctcccccaccttcatagcggaaggctttgcagtctgcatgttgccatctttgctgttggagttactcagcttcccttctgctttcttggtactggctgagggcttgctgggggccttgcgggacacagcagaccctgagggacccttattctcttcactgctaccccctgtagtggagctcccctcatctccagccactacagtgaagtctgccttctccttggacaactggtacagttccttgagttggggaaggttagtggcagatttccagtccttatcatctcggattcgggtgcagcgagggaatcggatggagatcccgtcagctgtatgagcctccgatttggagaattcagcccctgtgatctcccacacggcagctttctttgggtctgggacgatgaagtcaggatagtagatcttgttgaccttcaaccagctgggtattttgctggggtccttgctgatcttcaccatgtctagttcattctgcaggcgggcaagcgtggcatcatcatggcctcctgcacacttggtgactgtgcaccacttctggctgccagggtcgtagcagcccatgaggaagattgacatcatgccgcctttgctcccttgcccatagaaggctccaaggaccaccaggtcagctgtgtcggccatggccccctcgttcaaatagtctttcttcactttcagccagtgccgcttcccaggctcatatgtacccttcacatccttcagcaccagcccctccaatccctcct

SEQ ID NO: 336880 - DNA, 1000 bp, Homo Sapiens; identical to SEQ ID NO: 157937

SEQ ID NO: 336881 - DNA, 1000 bp, Homo Sapiens
gggtggggagtacggaatttattttattgttctgcgtctgggtttggttccttggacgtcacggttcctggatgggggtgggtgggtcccacctccctaagtcatggtcccacgggcctgttgggattgttttccaggttcaaagtgcactgagaaagcttcacagttttaatacttcctagatgctcaactgaggcaaagtgacaaaatggccctcccacccccgcccgccacaaaaataaaatcccaagcccctggcagctgctgctgcagccgtatgaaaaaataatacaaactcttcttaaaaaatagattacacagaaaaaacgcagaggacagaggggcatgaggaggggcagggagccttgggggagaggcccgggaaggggctctgagatgactgcaggggctgagctgctggtggacacctgcccggtccactgtgcctatcctctcactgccggagccggctcctccccatcgccggccagggcaccgcagctccacgctccctcaagggacccccttcaccctgaggcttggtacctgcttctcactaaagtggctttaagaaagaaacaaaaaaaagacccaaagcgagagaaggggctgtttgctcagccactggggacctccgccccatgggatcagccctctctctgctttgggggtttggagagtcctcgatacctgttgctacctagacaccccctggggggaaaacgggccccagactccccatttggttcctgggaacacagacacctggaacttggcctctgccctgatgtgcgccctcccacgcacccaagcgttatatggggcatggttcggaggctgcctcctggcccagcctccagggagctatggaccagacaggtggagcgtgaacagggttgctggggcagcggcgtgtggaaaggggcgtaactcacacaggccctccagctcatgcaaggagaagcaagaggggacagccctgccaagacagaggttacag

SEQ ID NO: 336882 - DNA, 1000 bp, Homo Sapiens
tataaacccattattattatgtttcactaaagttccagcactttagaaaagtttcagttcaaagtcattttggctcattcatttagataatactgaccattttgcactacaatttcaaaaggaacatgagaaatttggatttctttgaaagagtcaaatatgtaattacagaattgaaacactgtgttaattcacaaagtgatgtaaataataaacattaaaaatttcccaagtaatgatgacttaagcgttcaaaatccagttatgtgctttgttattgaaaacagtccaaacaaaaattcttttgttgttttctgttctctttttcaaaatacataaatcctactgaagttagtctattttttcccacttcagaacaccaggcactgatttatccattgggagttttgctttgccttctaatacggtgaaattgtgcagcctgaggcatacgcatgatgtcctgtgtagcgaatgtcacagcgcacaacattgttggtatagtcagattcaggaaccaggtagctggggtttacactgacctttaggatatagtttccaggttttacatctgtaatatcaatccactggcagtctatgtctgcaccataggtatcataacagccaggactcaatccctgtgtgtgtgcagtacatgcaaatcgcctgtggtagccatagtcacaggatgtgtcttcaagacagaaacttgctttgtggccttcagccactctcctctgggtgttggcatcaagcaggtcatagtggctaaactcatccatactgtggtaatgttgatgacaactgtgccattcccaggaatatcttggtcggctgggtaagaaatctgatgtcccttggtttttcactctttggggaaatctgagcagcaccctgtgatcataatctctgacatctgccctgtatgctgtactggccagacagttttcctccgccgcgcatctcaggttgtacatggacatcttctgcacgtacgtgg

SEQ ID NO: 336883 - DNA, 1000 bp, Homo Sapiens; identical to SEQ ID NO: 157938

SEQ ID NO: 336884 - DNA, 1000 bp, Homo Sapiens; identical to SEQ ID NO: 157939

SEQ ID NO: 336885 - DNA, 1000 bp, Homo Sapiens; identical to SEQ ID NO: 157940

SEQ ID NO: 336886 - DNA, 1000 bp, Homo Sapiens
aaatgactgtgtattccctggttacaaagcggggctgtggcggtcaccagcgagcccagcggtcaacagaccaacagggcctcatcatcgctggcctccagcattggggagcaggggggcggggggttcctgcagacccccagtggctctggcgagtgggggcccagggtgctgctggcagtggagacctgggggtgcgggtcctgggctgagcagggctcccgaggtgcatctgcaggagctgggccgtctgccagtggctccctgcagacctttctgtccttgtccacgggcctgcactctgggtctcgcaggcccgagggcaagggtggccctgaaggtcccacctccggtgcacggccgggggcactggggggcctgtctccggccgccctggtgctgcctgtgtccatgagcggtgctggggggtcgggggcagcccctggagcaggctggaggaagccatcgcccagcacggtctgtgaggggcgtgctgcggtcagcagtgggatctggcctcggggcgcccgcggccggtgaaagagccggttccagaggcggccgaggcggcggcgggagggcccccggcgggaggcgtgccgacgcatctgtctccgcatggctgtgcgaagattctgcagcacagaggcctgggacgcactgtagacaggaaagtcctccacgggtggaatgaggccctgggcgatgagctgaccataggatgggggtgcctcccgccgcacaaactcagcctccaggcgcgtcatctgggtctcgaaggccctgtattcctgcgtgcgcagtgagtagagcttgaaggcgcagcccagcgcgatgaccagcagcaggccacacaccaggctgccaatgagcgccgccgtgatgaccttgcggggcacggcggccaggcacccatgctcatcgctgccgtcctggcagtcttcctggccgtcacagcgccacgtctcgaagatgcacaggttggtaccgcagtggaagg

SEQ ID NO: 336887 - DNA, 1000 bp, Homo Sapiens
gattaagaaaagctaaatttatattaaattatcataaagtcctaaaatactgaacatagtggttaaataactccagaaagtccaatctctccagtgagtaacgttaaaaccattacacatgagcatgggagaatcgcttccattagtttaggacagagagattttgctttttacagagtaaatcagtgctcaaatagatacttcctcaaatatgtcctttctacattctgaacagcccaagtgcaataagatccttccccctttccaatcaagaaaatgccacttttctacttgctcttcctccccagacatgagtctaaggacccaaagtgctcactcctttactgcttgttaagtgtaatgtggggaggctcagaactggggctgacgctactgagagcaaggctaagggcctggtatctctctctagcagtcttagaactgactagaaaagaattgatcttgtcctttttcactttggtagctgatttctcaataccagtaaccacaggagaagtttcaactcaggaaacttcccctagaaattctcccctccattcccagcccctgttgttctctcctgccacttctaattcctgggggagaagaggtctgggtctgccatgggctaggagggcctcatcagtggtgctctctaccttcctactccttacccacctctttgtatttttatttattcagccctcccaccacaggactttggagattgctggtgccacaaggcttggtcagaaaaagcaaattaggcaaaaaaacaaacaaaaaaaccccacgaagaacagctagggagacgttttagggcaaaaataagtctcaatttccctgataccaggctgagacacgtgccctttgtgtgaatgagcatgaaccaagtgatggcatcccacatggaaactaagccccttagctgaggggacagctggaagaggaacatcaccaccccgtagccacaggcttgctgtccactaacttagatccc

SEQ ID NO: 336888 - DNA, 1000 bp, Homo Sapiens
ctgttttacaaaattaagtttataaatatttgttccactgtacaaagttctcccagccctgcccaccccatcacagttcacatttctcatgtttttaaaatcccaattatatttattttttaaatcataaaatatatttttttctttgttcatatttaaaactatttacaggggcacagagaagccagagtggcccggccgaggtcaggatgagtccgtgcagggggacggagggggcgggaagagatggaagtagctcctctcggtggcgggcgagggcgggcagctgtcctccgccgacaggtactggctgtggggcgtgggtgggggtggataggggtctgagtccgagttcaaatccaggtagtacttgctggccttccagcggctggcgctgtagtcgctgtcacacacgtcggtgctgcagggcgtcgtcgggggcgccattcctcgaatgatgtagggcctgtacggtctcacagtggccggaatgtttgaagagtagaacatgtccatgttgtacagggaggggtccgtggccggggagggcggcgggttcaggatcggcgggtacagcgtggccttcgtgctggacgagctgctggacgaggcccctgtgacgtggttccggtcgtagaggggcaccccgccccggccccccatcaggctcacggagctcatcatggactttccgcatgcgatgcctgtgaaggggccatgctgggaaccgcccggggctatgaaattgaggggcacgtgcggggtcccgctgacatactcgtgcgggaagggcccgttggcccccgcatagcgctggcacaccacgcgctggcacacaaaatagacaccacccatgacgaagagagagaggatgatgccaatgacgggcccgatggcactgctgtgggccgggctgtcgtctgagggcggcttggtgatttcacacatgagctcgtcggagccgtcgatacagtcggggaaggagtcgcactgctgtttg

SEQ ID NO: 336889 - DNA, 1000 bp, Homo Sapiens
tttttttttttttggtatcaataaagcccagatattcctggtcagtgatgcctttattattcctgtttcctttgtactcagttgcttcactgggtttaaggcatgctttgtgtatttagtttgcaaaaataaaacttttagtacaaattttttttatacaaacttttatggcacaagcagcaaatctgctgttttaagaaaatatataaatatccttttcttctgtacaaatatctccagtattccctaccccattttataattttaactgtacatggtctgcctcatccttctctaatagctccctccccccctccagatctcaaccaaatttatatttacatttttacgttggaggcagtcagaggaggagggcccctcctcaggaggagtctgtacagggagagggtggcggtgggtagaggtgatgagaatagctcctctctgtgtatggagaaggtgggcagctttcatagttctcctctgctgacaagtattggcttcggggtgtgggaggtgggggcacaggttctgaatcatagttcaagtcactggtatagcccttggctgttgccactgaggtcattctccgactaggagcatagtcactgtcacaaacatctgtgctgcagggtgtggtggggggtgcaaagtgccggtagctatatggcctgtagctgtatgacctatgagtggaaggactgtttgaagaatatccaaattccatagtgtaatgtgatcgctctgtggctggggatggtggagggttcaaaattgcagggaagtaagtgcctttggtgcttgaagaactacttgatgatgctcctgtaacatgggctcggtcataggggggtccactgcttccccccatgatactgagggagctgatcattgatttacctcgagacattcctggaagagatcctgacaaagaacttgggtgtggcacataaccaagaggcacagaagctggtccatgaactacatagtcattagtcat

SEQ ID NO: 336890 - DNA, 1000 bp, Homo Sapiens
ggtttaaatactgcactctattttttaaggactctgtgcatggtatttccggtggcagatgtgtaagattttttatgtaaatcgtgttgttttagcagaggactatcagacctgacagcagctggacatcgaggtcctcactggggtggtgactgccacgctgatgctgagtggaagccaagccccttcagtcagagctgggccgatctcagacccaaatgctaccaccaccaagccctgtgtcgcgacggcagcggctgcagtcaccagaaacaatccttcctgcctcgacacccgtgccagccccagccaccctgacggcgggctgtccacggaaatgccacggccaagagcccaggtccttcacgctggcctcttccctgccgggctgggctccccagtgccttcagagttcgttgtgccgagctctggagatcctgccggacaggtcctgcagatgcttcttcaccgtgtagcccagctccttggtccgcccctccagcagggcgtgcttctcgcggctgcggctcacacgctcgccgtcgcccacgctctctgcgtgcctcagcttctcgtgcgcaatctccagctgcttctggtagtggttgtgcttctcgattttggcttcgaagtgcttgagctcctcccggaacgcctccagctccttgtccgtgaggttggcggactgcgccaggtcccacaggtcaatcaccctgggctcctcgaactcagcctcagtgctgtagccctggtggctgaccctgcgcaggcggtccaggccctggttgatgctgcgcagcttctccttcagctccgtgtgcctgctgtgcaggacgctgcccttgatgtcgctcaggtccgaggggctaatgacgttctcgtggatttcttcggtcctgctcagggtctccagcaggacgttgtactcgtgaactttctctttgtgatgcaggaactcccgccagagcttgtccagttcttcgccggagaatttcccaga

SEQ ID NO: 336891 - DNA, 1000 bp, Homo Sapiens
ctgcaggaattcggcacgagcggcacgagtttaggtcccattctttttatttgcatgtggttacaatataaatacacttgccattttcctccccttccaaaactcttccccatacctaggaatcctacccaaccccctagttgttaatgactccctttcctctcctctaggaggggagggaaggagcgtcctccctataatttcatcttcatgcagggtctacctcagtccacgtgaagtgtggaaccccaaagggtctctgaagcttggggatgagcaccacgaatcctttagaggggcccgtgacgtccttgcaggtgaccgtgtggcggctccctcggtgccgtgctccggtgcggcgtgccgtagtgggcagcagttggtatcatgtgccctgtccgtgcctgaggctgagcagccccagggggtgggtgggtctgccgggaggcctcaggtttgctcaggcagtagggagagtcctgtggagggcaccgtacccagccagtgcccacctgctctcagaggtgtctgagccttaatcccttagggctctgcttccccgggccctactcaggcccctgtgaatcccacgtgggcagggcagcctcaagggagaaagtgcccttgtgccccccttcttctgccttttctcagactccgtcagtcatgggtgataaattggttccttgggcccctgttagagggtgtggcaccacagtgctctgtctccgctaggtgccaagccttgccatcttcctggtggggtgtagagagcccgggagggccagggtccccctcttcgggaatggggtatggaggttcgggggtagctgggaggtctccaggacccggtggtccccccagtactggtccattgtagatgtagatgttgccagtgatagtcatagacccgccggtgacatgaatgccattggtaccgtgggccacctggctctgctccccgggttccaactgcggctccctggtcaggtccagagga

SEQ ID NO: 336892 - DNA, 1000 bp, Homo Sapiens; identical to SEQ ID NO: 157942

SEQ ID NO: 336893 - DNA, 1000 bp, Homo Sapiens; identical to SEQ ID NO: 157943

SEQ ID NO: 336894 - DNA, 1000 bp, Homo Sapiens
tttttttttttttttttttttacttaaaagataaaacaactttattatgacatcaccattatatacagccgtgcttttcacatcaagttggcttagttcttggaggaaagtcttagtgactaaaattgtacacagatcacaagacaagagaactagtctaacaaattcaataagaaatcaggacaactgtagactatataaaaactgtcttagaaaattatttacaactttatcatagtgtaaatactctaaatgtaaaataaatctatggattttatacaaaaatactctaaagtacaaatgtaagttaaatgctgaataaaacattttcaccttttccagtggatgctattactaagactataatctaggtgtcaaaacttaaagtgataaccacaaagcaatgttttcttaatcactcataattttacatttgttagtagtcatcacaaggtttagagttccactgaaaaagtctcatttttacaaatgcaactcatacactttccttcatggaccctttctctgtttaacacatgttaaaaaagtaaaacaaaattcttagtcaaaagttgacatgctatgtgaagcatataaattgtaaaattatcagtcttaaatacctagttgattctctttacaaaagaaacagtcatgtaatacatcagaaaatgcaaagcacactgctacaaggtacctactcaatctaaaaataatgttcccacacttgggaaaatgttaagcactaaatctttaaaagtcattgttttataaacaattataaacagaaaaaaactcttcatatttacataataatggtatgaaataactttggaataatataagaaacatcttgccaaggggaatcattttgctatataaaaagtaagcagaggccaggcgcggtggctcatgcctgtaatcccagcactttgggaggccgaggcgggaggatcactgcggtcacgagttcgagaccagcctggccaacatggtgaaa

SEQ ID NO: 336895 - DNA, 1000 bp, Homo Sapiens; identical to SEQ ID NO: 157945

SEQ ID NO: 336896 - DNA, 1000 bp, Homo Sapiens
tgtttgttttttaatcattaagagtttttgtacaaaaggtgatggttttttttcttcattttaaaacaccagggtgtgggggagggatgcaaacaaataacaaaaaagatgcttttgtaacattattttccctgtttagaaagaaaaaaatcactccaatagtattgaaaagtccaaagatgaaatagtttcattttcttttcctaaggcttataaaaggccccctgcctgttgattccatccctcttttgtgtccagtggagccatgttactcttcagtggcccaggggttcactattaaagaaagatcagtccaggtttctgggcacatggcctaaacaggaagatggaagcatcagaggattaaaaacctttccccacagaaatgtgggcaagaagacacttccctgagccagcagaagggacaggtgcagcagcattccacacccagcgcagaggacagcagagccctcgatgtcccacttctgcttccgttccctttctagaagattgaaaaaaaggtcaaaaccacatgcctgtggagaaagtgcgacatgtttagaaatactggtagggaaccaggagtaagaaaagctttaccagcttttactacaaatggatgaaagacatcaggatcccaccaccgcaaggtaaagtgacttcccttttctggaacccctgtggcacaggagtaccaattttcctttccaacgaactggatttctggataggcattttggctgtatgtggacagataagaccacagtccttagcccaatcccagctatacagtcaccccaatttccacaaatgatgtgatggtaccgtataatcctgtaattgggaaatttcacatttttcctgtcctaatctcagaggtgggagaagcaagtctagaacatctccaggctcagactaaacgagagtacttggactgcaaccaagtaatcactgcaaagtagttccaagcagcaagaaataccagattctcatggaggct

SEQ ID NO: 336897 - DNA, 1000 bp, Homo Sapiens
acattttattcacatttatttttcgcttttagtgtgctcacagaaaattagaacaccttaagcaggagtttaatagcaatttttgtaagcaaagttacattccatctctaagtcaaattggtcaaagcttctccagtatttacaaaacatgatagacaagatgctacacaaaaccattgcatctgaagattttttttcctttattctcaaagacgactggaaaagaaagcattatctgctgtaatcaaaaacataccacagtataaacagtaaccattccacttatcacagcttggttgagtttaaaatttgtgttttaaaaggtccaagatgactgcagttttacaaaaatgggcagggtggaaagttgcaaacttcatgtgcttctggatatcaagatttgtttttatacaatagtcacagttaaaaacaccctgctggtaatacataattacactttattaaggtcataaaccagcaataaacaataaagcctatacaacttgtagttctacttaatcactgactggtacagctaacatgagataagtgaaaagttcctatggtttaaatgaactcctaagactatgatcgtttttttttttttaaatctgggtattggtgttttttcttttttcctctttccttcttaactcaagacttgtagtgttgtaaacctgcctcacaaaatacatggtaataacttttctttaaaaaaaaaaaaaaagacagcctttacaccatttctagtggcacactattttggcaatgttatgcaccacttcaatttccccattgtgacccctatcacttcatttgatatccctttttgacccacccatctccttcatatatgggcatgtccatagattgacaaagaaagtttacacttttgaataaagatgcaaagtatgcaaaaacattaatactgatgcgaaaaaataaaaaataaaagagaaacaaggcagaggaagaaggtgtttaagctctcctcgacctg

SEQ ID NO: 336898 - DNA, 1000 bp, Homo Sapiens; identical to SEQ ID NO: 160470

SEQ ID NO: 336899 - DNA, 1000 bp, Homo Sapiens
tttttttttttttttttttttaactaactatggtttaatttctcacacattcttgaataacataaacaaatccaggtatgtatctttatgaaaagaaagattaaatgaagtaaaccaagaattgaccacttttacccctctggcttctgatcccaaatatttcactatggggtctttcacatttccaaagatatttctactctaatgccacattttcttgtcctggattacaaaagtgatttaaggatttttattaataagttgtttcactcaaaaaacaaaacactttctactgtccctgaaaaacagcaataacagggtgatctatatcatttgtaaatttacattctgaatctaaataaacctgttgaaacactagttgaaaaagagaaaaaaaaaaagtcaacaagttattcatgcataacaagaacaaaggttaacaggccttttgaattacaaagtaaagaatctgcctaagacctcattgggggtgagaacagcaggtaaacttggctttgggagattgattggctatggcagtagtgcaaggcctggctacaactctggctcagactccggctttctcttcatctttcaaagcttcttcgtaatgggttgggaaggcacagggggtggtaccatttaccttggccaaaaactccaggactttcatcttgctggtttcagcataggctctcggaccccacaggaattgaaagcgtgggggatcactgctgggcacctgcttgtactccagatatttttcctgcaccagatctttggtgatgagcttccagggttccccaaagactgagtgctcctctccatcatagactcccaacatattcaggaattcccagatctcttcctcagtagctgagttgccatttaagaagatcacacccaggagaggcatcagaagctttctcctgggaaagtcccaggaactgagcagggattcctcatcagtgaggtctaccttgtcgatgaaggtgtaagt

SEQ ID NO: 336900 - DNA, 1000 bp, Homo Sapiens
gaacattaagacattttataaagtatttcacagggttatcgtcttccaccatggacctctggaaagatctgttgggtgagttttagtccccatgacatgcagaacatccatgaagacttaaaacatggcacaagatggggcgctcgggagagcttgtggacaataccaacaggtagttctcgagagctgctccaggggtcagcagaggatctttctttccttctcaggtcacggtcgccacttcccacccccgaacaagaaggtcccctttcacaaacaggaggtgaccctagcagacagcacagcagttggaggttagacacagcaagctcccaacccggacgcgaaggcacacgggagagtaaacacagcacccacgagcaacagggcagggcttttttttttgggcagtgggggggtggttgttttcttttttccaccatcaagggcatttctgttttctaaaaagttatgccggaaagtggggcggccagttaacaccatctgggttttcagctcaagttctactgcggctttatgaagacttccatctgattaaagagaacaccgcatggaccacgtagagcagagtggctatgtaggagaacaccacggcagcaatgttttcatggtagtgcctgtaggtgaagccgtcttgcatcgtgatggtggccagggcctccaggactgaggcgctgaggtaaaagagggcagcggtgcagtggtaggctgcgtccaaggtgacccaggaagtctctccaccgtgggctccaattatgtacaggatgatcaaggtggtggtggccacgaagcagaacacagacacgaacatcacccagccctggaccaggggccagggcaccagggaggaggccaccaggatccacaccaggcccccgaagataaactcaaagatgaagagcaagtcgggcaaggtggtgaagaccgagaagccactgggcagggtgctgccccccgtcgccgctgcgggggccatgac

SEQ ID NO: 336901 - DNA, 1000 bp, Homo Sapiens; identical to SEQ ID NO: 157947

SEQ ID NO: 336902 - DNA, 1000 bp, Homo Sapiens
cagatcctgtgaataagaagttataatattcgagtatatgaggaagtatcccaaatggcctcagagaaatatatatatatttatatctataatactgtatcaaacagatgaaagggggggtgaaactggtagtgtggacacaaatctagctgatcaactgacattctaaacaccacttcctcaaccacagctcaaatgctttgcaactattttttaattagttaaataatttattggactgacatactctgatataattatccaggtcccaaatgttaataacttaattgaatctttcttcccatttatacaaaataacactttaaaaaaacttatttcttacatgctcttcccttcctgcaatcagactccttggtttaatttaacctgaaataagttacaatgggcagtttttatcttctcactcagaaacagaatagtgaaatgagcagcttggattttaacaaggccttcagaatgtagtggatagccttcaggcacatgaaaggtaaaaatgcaatttttaaaataataatactccatgcaaaacagagcagagcaaaaataattgtccaattgaacccatgtaaagccagtgtcttcctgttgcaaatggaaatcaggtcaatttctgcatgtactattcattttttaaatagaaaattgtaacaattactacagtttggggatgagattatttattttatggtttataaagaatgaatataacaactgctcagagcccactcctgccaagagctcatgcctaaatattattatttcaatgctaaatgagaaatattcacaagccctgcttagcgagtgcagcagtgacatcctcagccaaagtggcaagctgaggagattcgagcaggttgatgcttccagacgaggagacattgctgagtcgtcggggtgatgccacgctggatctgcctggggactgtgtaatgatctcagccccatggtccacacgggctttagcatgctctctgaagtt

SEQ ID NO: 336903 - DNA, 1000 bp, Homo Sapiens
ttttttttttttttttttgatgggacatcaggcagctttatttatttactcttaaaactgttacaacagaatcatggactgacacaggtaatggctgagccataagcaaatcgagaagtacagaaatgtcccaccccaaacagctgcggagtacacatcacacagggcctctggtcccggccttctcaggtgctctggagtggaggatcctttgagggaactctgaccactcctgttgtctacctagagagcacgccacttgggccacctacccccaacctttggccaaaggagtgaaaggacctggaacctgtcgtcaacctcagcatcctcatgaccccaggacagacgcagtggaggcagcaggtactctgggcctgtgctgttgcccctgaggtgtctcctgactacgcaaccctgtttccttcccactttcatcccagcaggccctttcttcctgctgacaaaacactggctccctcatgttcttggcacagcagaagtgttctgcacatggtctctacggaggaaagctggtccccctggcccaggcagcacttcctccgtgagcccctgcagtttcctggtgtgtgcttggggagctagggacatggtgtcaaacctccacaaggcactgctacctcagaaagggggaggacctgtcaggcccaggacagcctccctgcacatggagatcaaatctaaacttaggtcaagacccctaccttctccagggatgccaggaccagagaagggcagaggtcaggagggggcatgaggaggccaagtctggggcagcctcctcagaggcaaatctacactgcagccaatccccctccagagaagcccttggaatctcccaggccatttcactacaaacttatgtttgaatcctttattagaaaccatgcaaactttaatacaaaaaatacaagtgcaataagaatctttgtgtcaatacagttcccgggatttctcctcactgcagccatcccaaggc

SEQ ID NO: 336904 - DNA, 1000 bp, Homo Sapiens; identical to SEQ ID NO: 157948

SEQ ID NO: 336905 - DNA, 1000 bp, Homo Sapiens
ttcactgcttacgttaaatcacatttaattgtttctcaccggagaatagagaaatcagtaaagaaattcacagcactcagagtcaagaaagggttaactaaaaaaagatgggaatatattaagcttttgattataaaaatgcaaacgcagtccctctcacactcacccctgcattatcactctcacactcacattctggcaagactcatgcccaccctcaggcgcacgtgcacacacacacacacacacacacatgcacgcatacacacacgcacacatacacacacgagctcccaaacgccattacacgctctcaataggcacacccagacacaccccctcccacccccgggctggcttccctcactaaaatggtaaagctacggcggacacgtgcaggacgcttggagaggccacagtggtgacaggcagccttagacaactgtgttctccaggatggccagccgcttactcacagcttccagtttcctggtcagggcctgcagcagcccctccactttggcttggaatttcaccagggactcgcaggcacacgggtcttcctccacacagatcttcttctgcaacttcttgcctatctggttgatggtcttgaagtcagccgtgtagaagtagtgctctgccacaggctctgaggctatttccctcagctcatcctccacggcattgcccacacccacagcaaacatcttaaagccgaggtctttggccttcttggcagcatcattaatgtagtcctggctccggccatcagtgaagacaatgcccaccttctgggccccgggcctagccccactggacacagtgaaggaattgtcaatgaggtacttgagagcagccccggtcattgtgcccttctccatgtaggacatattccgcacagccgccttgatgtccttcttggtgtggaagcgacccagggggaactcctggcgcacagagcttgagtactgcaccagccccacctgggccagcttgt

SEQ ID NO: 336906 - DNA, 1000 bp, Homo Sapiens
ttttttttttttttttgagtttgaccatttatttgtatagatgtagcacattcctgtacatgcggtgttgtatttctgtggtatggattacaccagagtttatcagttccccttctgatgatgtttaagttgttccttattttttgcttttacaaagcctagtaacattcttatgcaggtctctttgtatgtatgggctgaaatcaactgagtgcagttgctagatttacagggttgtgtgcattttcagttttatgagatgtcaacagacttactctacaaagagtgccatttgcattcttactacaagaacctcacatttccacatccttaccaacacttgttaaaaaatatactcatttttgctaagctgatgggtgaaaaatggtattgttttaacctgcattttcctgattactgatgagattcagcatttttttcataggcatgttggccatttctcatacatacatatcttccatttaaagttaaactaagaatttttgcactgaataccattctctgaagtggtgaattttaatattgtataaaaaatccaacttgttccacaagtacatatgtcctatgattttatgcatacatccatatacatatatcaaggtaaagtccagtacaaaaaaacagcatttcctatggccagtgttctacagaagtaagactgtgcaaactttatcgtatagtcaaatgagattgcacactaaggcaggatgaggcagaagcaagttgtgtccacagtatattacaaaataccttgcatagcttattcattctcacctggtaaattcatcttagaattctgaaggatttttttcctagataaatttatacaagttagtgtatacttcttgtctttgttctgtggcaaaccaggtttctcagtactgattgttttacttcacaacattattgatttaacaatagcctgagctttggggctctgcactgcgttcattgtaatccgtgatacaatgactacaaa

SEQ ID NO: 336907 - DNA, 1000 bp, Homo Sapiens
tttttttttttttttttaatttaaagaaatatctttaatagacaaaattgatgagtcatcaaaaatagacatgataatatgtaaaggtaataacttttattatattaaagacaatgcaaacgaaaaacagaattgagcagtgcaaaatttaaaggactgttttgttctcaaagttgcaagtttcaaagccaaaagaattatatgtatcaaatatataagtaaaaaaaagttagactttcaagcctgtaatcccagcactttgggaggctgaggcaggtggatcactaacattaaaaagacaacattagattttgtcgatttatagcaattttataaatatataactttgtcacttggatcctgaagcaaaataataaagtgaatttgggatttttgtacttggtaaaaagtttaacaccctaaattcacaactagtgctctttagtagtacatttctttcaaagaccagaatgaattaaaaatggcaatgtaatgttcacttgatctgtgttaactatttttagatatgtgtattacaatctattgatcacatcttcaataatactccaacaaaataagcaaaaaacaaaaagtgttaaacagttcaaaattacattcatctcagttatatgaagttgtatgtgtaaataccttgtacaatttgcactctcagtaataagattgatttatattataaatactatcaaaagaaactagacctaaagtttccattgtgaatatggttatctaatataaacatttaaaaattaaatggctcaattagtagataaagaaacactaaacttttcattctatttcctaccaatcatttcacagtcataacttagagacactaaagtttgctcttaataagtatctgcatatgtatttccttggaagaatcatgctgattctgcagaagatcttcatacaatttatccagtaatattcaagcattaatacagataatggcaaattattagcaggaacattggcaata

SEQ ID NO: 336908 - DNA, 1000 bp, Homo Sapiens; identical to SEQ ID NO: 157949

SEQ ID NO: 336909 - DNA, 1000 bp, Homo Sapiens
tttttttttttttttttttttttttttttttttttttttttaaggtgggtgatgctgagtcacatttattaccagactttcctggccccatgctcacaggcactggtcactgagtcaggcatttgccagggctgtctgcttgggcgactgctgcaggaaagcaggctgaggccccagtgcccagtctgagccttagaaccggccctcaggagggctcagccccataccactaggggggctcctgcaaacctggtcccttggcctgaggcagggatttcacctccttttgcaggagccgctgcaaggctgtggatgaagctttctggtcacaaagccccttctcctggggctgctgtgggagtagctcttggcacacacttccacccagagacttcacatcccagctgacgagggcacggtcctgagagctggcagcaaagatggggtggggtggatgctgctcagtcattggagcagacggagtgtcccaggagtgggcggaaaatgtctctttaggagcctgaggttggcccctggtgcccggagcctgaggccccacaacctccccatgtcctcctccgttccccacgactgctggtgagaagtcctgcctggagttttgcagggacccctccctggacccagaagggtccgcgcttcaacactttcagagatcatttagtccatcctctttgacaaacggggaccagggaggtaaggaactgcccagggtcacacaggaaccagaccacacaatatcaccacctccctctgcccagcacacttaaagccgcgtgcaccgcgctcaccaggagcacgtcagcacctccttgagcgtcctgcggagctcctggctgtggaaggcgtagatgagggggtcgatgatggcattgcagatgatgagggcgagaaagaggttgaagttcttgaagatgcagccgcacgtggggtgctcggggcagaggacgatgagtgtgagatgcaggaagaaggggcccca

SEQ ID NO: 336910 - DNA, 1000 bp, Homo Sapiens
cctgtggaatttgtatcatgctctgaaaatagacctacccgtagcttatggacataaagactctatgcagaaacctcctcaactttaatttgtagtcagctatggcaatggaacacatttttcatagggaactttggatggattctctggtgctacagaaaaaaacagtaaatggtccttcaagtgtatcagtgtagaactgagagagaagaggtaaaactgaaaaagaataatgaatttgttttaagattgaagaccttcctgaaataattcagttactttggtactgcctagccctgtaagcattttgcttgaaatttaaccttttaagcaccatatgctaaccatcaccatgtatctgggggcaaaaaagaagccttaactaccattccctcactctgtccccgtcatgacaacaggagctaagtcttgaactgggggttacacagcactcttaagtaggcgtgataagttttgcaaaatgttcagtatctcctcagtgtcttgtccttaggtagagacaggtccagagctacaaatgcacccatgtggaagagatttgattcagcagaacagcaattatgtagtgccctggggcgggaagtgctaataatgtttctcagctcttgaagaaacccctgacagaattttagttccactacaggtatcaaaaagattcccagctctaagtcttggatattaataaggctccactgagagggagaaatcccagaatcaagagagcgctcccttcccagccctgcctccaaaatgaagattgaaggaagtttttattctctcaatacaaaattgttcaggcacagtcctggtggtggtctgtttgtaactttagtgtatctgggactgtaagtaacacctgtctacgctcttcccatgacctataactcccagagatcacctcttatggccgcctctatcttaaagttgagacccgggacttggaaaccaaagccttgctgtagtaaacaaatcagcagtc

SEQ ID NO: 336911 - DNA, 1000 bp, Homo Sapiens; identical to SEQ ID NO: 157950

SEQ ID NO: 336912 - DNA, 1000 bp, Homo Sapiens
ctgagatggagtctcgcgctgtcacccaggctggagtgcagtggctcaatcttgactcactgcacttcagcctgggagacagaacaagacagaccctgtcgccccacacctcccctatacccccggaaaaaaaaaagtgcaaaaaaaaaaaaaaactagggtgagagccatgaaatagctgaaggactgtctgaagaggggcagaagggagtgttttggggtgacacaaacattctattgcttttttgggtggttactcagatttctacaactcgttagaaggaaacactttatcatgttaattatacctcaatattgtaaatgtgcatggaagaaatctcttgttttcaagagtttttcttttgggttcacctaactatgtacctgactgctgcataaagtaatccatggcacttaataatttgactaatcagattacttctgttcttcattgttagctccagtatttttcttacagctaccttggattttgatgcctaagaacattctctgacaggttggaaataaaattaaataaaggattgattttcaaataatgtggtaagtgaactgaataaatgcatttttatgttcgtactaccattatgctataaaaaccttaataaccagctgaatctctttcttgcaaatagggcatgaagccccagccttctttagtcttctggcacagtgaaaacaagtgacaagatggcccgtccttccatgaataatgttcccgtctcgtggtcttttctcacataagctacatggcttcaagagattctggcaatcctccatgttttctgtatctgttctctgttcagaaaggttatctaactgttctcccatgcttgagatggtctcttggctttcagaactgtgagccaaatccaagaattccactgagttgcagggatcaaaaagtttggagttttctttctttatatacgcatctttaggtctaacgacaggagccgaaatggttcttcgacaatcaggg

SEQ ID NO: 336913 - DNA, 1000 bp, Homo Sapiens
tttttttttttttttaaatgtaagatatttattaaataaaaaggttacactatgatttttatacactgttgaaaacaatgacttttatttacttaaagccagcagtagttcccattactctcataatgttatagttaaggcttgatttagttccagaaaataaatagggtaaatttttaatatttccctagctctgtctgctatagggaatttcagagtatgaaggtaagatgaagcagatatataagaacatttttagataatgacaatttttccttaaaatttggtgaaaatttagtttcttctcaaaattctgtacttctatccataaaagtaaatttctattttagtagctctgtaagaactaggccagagaagagtattacccataatagtaaatagcaaatactttggcaagtctgaattagagtacaagtgaagacattcacaaacacactttttacatctcctggatgtggtacgggctgtatgttagaattaaagcatcacaactatctgattgtagggtgctggtgggcaatgcaatcaatcaacacgtctaccccaacagatgtggagacgcatggaaaaaatacatcaaccaaagtggtcagggagaacaaaacacagaaaacaccataaaactgaagacattatctcttcttgtctgaaaaaaggggttccctggagcacagaaagtatttatcaggggagtgcttctattctgttatcacaggagggcttgatgcagattctggccattcatacacatctggcagcagggaatcatattcactccgccatgttctttctttaacatatttggccttgtcttcaggttctgggtatcggaaagccattttattagcatataggtattctgtaactttaatagcaatgttaatagaaacttcctgaatattagcaagcggtgggtaaagtctcccttgggctagctcttcatctgtcaattggcttgtcagggcctttgcagcttcta

SEQ ID NO: 336914 - DNA, 1000 bp, Homo Sapiens; identical to SEQ ID NO: 157951

SEQ ID NO: 336915 - DNA, 1000 bp, Homo Sapiens
ttttttttttttttttttccttttcagtattatatttttattattattatgttattattacactgtctttttgccatcaaaatgaggcctgtgaaatacaaggttcccttctgcacctgactccaggtgtaatttttggagttcggggtaggacaccatcagcaggggagcaaggaggagccaggtgcctacatttgggggataaacaaatatgtttgtgtgtatgaagccagttcattcaggttctgaaggtttattgagaccttcagtccctacccactcccagccctgcagagattgtcctctgctccctcatgtggctaaacctctcaacacccagagggtatggggaagacctcatatgcatgcctaccttggctgtggctgtttcagggtggtgtgcggtagctgtgttcttggcatagagcttcaggggctgggatgggccatcaggggaagctgagtatgatagtgaggtgggctggggttccacggtactcaccacaggggagtaagttggtgggagggatgctgaagatgggacatggtttgagagcagcccagaggagtgctgggctgtggcctagaatacaccatgggccctgttcacactgcactgctcagcttagcacactagggtggcccagacaggggtccacagtgaggaagcaggacaagatggaccacaaaggcctgcagctgggagagtggctcctggctgtcagctgttgggacagggtggaggcaactcattctcatggagcccagccaggtccaggctagaaccatgtgcctctcggaagaggcctggggaactgctggcagtgtaacttcaggtgtaggggagccgggtctggcttaggaatggatgccctgggtgtgtgacagggatgtggcatggctgagagccacaaggcccccttgtaaggagttggtgctcgggaatcagcagaagcatgcatcaggggcagcagagggagcactcatggagaccatgggt

SEQ ID NO: 336916 - DNA, 1000 bp, Homo Sapiens; identical to SEQ ID NO: 157955

SEQ ID NO: 336917 - DNA, 1000 bp, Homo Sapiens; identical to SEQ ID NO: 157956

SEQ ID NO: 336918 - DNA, 1000 bp, Homo Sapiens
ggggccactgtcttccccagcagcatggtgcagggctgagcaggtagctgctataggcagtctttgcagagagccacctggcccttgatgaagtcccggcaggggcagaccctctggtgcctggggtgggcgcctgcacagctgaagagcaggaggtcaccttgaaacacacagtgcttattcttagggtcaaaggagggcaccaggatgtccttggccagctctgagctttggcaggtcaccttgtacttcagcatgtccttgtccttgttgaggtgctggaagaaagaaggctcgcagatgagctggctctcctggcacacctgcttgcaggactgcccgggctcagcaagcttgacctgtagggcgctgaggggtggccacatcacttgcccatggcagaagtcctgtttttcaatgaaagcattgattctctgtagcatcccctcgcacgtaaattcatatggcatgtatggctcaatcttctgatttaaaattgctttcactgcatcctctacttcctcctgattgttgaggtcaacagtccacacatgtggccgcccgatgaaaacttcagcgtaaggatgctgggatgtcagctctctcagagttggcttgccaatgaaaaagtctgtgtttttgctgcttttgggtgggttgaacttgggattcagaaaagcacatccatttgcgatagcttccaggggagctgggccctcgtaagggaacccaagtccaacaaacaacttggtttctcgaagaaggaactgcaggtcccgtccactgaggataccatggtttttcacgtaactgggaatattctttgtgctggagccataaacagttgcatgcacttccatgtatgtgtgaataatgtccaagtagatcttcttattcttccagaagctatccactttgccatacacaagggactggttctgccttttgatttcattaatgtggtggatatcactggagttcaggtgctgctcaaccacaa

SEQ ID NO: 336919 - DNA, 503 bp, Homo Sapiens
tgccatcaatttattaaaataaacatgtatagcaggtttcaacaattgtcttgtagtttgtagtaaaaagacataagaaagagaaggtgtggtttgcagcaatccgtagttggtttctcaccataccctgcagttctgtgagccaaaggtcttgcagaaagttaaaataaatcacaaagactgctgtcatatattaattgcataaacacctcaacattgctcagagtttcatccgtttggttaagaaaacattccttcaattcatctatggcatttgtagtggcattgtcgtctatgaactcttgaagaagttctttgtattcagtcttagacacttgtggattgattgtcttggaaatcacattctccaataaggggcagccagagcctgcgtagcagtgctgggagagggccgccagcatgaggaccatcagcaacttcatggtgaggctgctgctgtcggtgttcagtcgcgggtggcaaggatcaaggaagccgctgtc

SEQ ID NO: 336920 - DNA, 1000 bp, Homo Sapiens
ttttttttttttttttttttggtttctaatttctttttattagtctgatatgaaaaacaaatatccctacaaatgaaagaaatattgaagaaacaaattgaagggcttaccttattttaattaaaaagaagtcggggctaccaggggtttcagacgtgctcgatggacacgtgatttgtaaacagccaagattctgggggacgggggggtgcctcggtggggttgacatttgagttacagggacttaataatggccagcctttcacatcccatgggaaaccgcccccccgggccttggagaatgggggtccaagtgcctatccccctttggatgtaaaattcatcgttagtaaacatcatccgcccagcaacaagcaaagcacatcgcaagattaaaacaaagaatccgccgtgaacagaaggcctccatctctgctctcaggcaggtgtccttcagggaggagcctcaggcagctgttctaaccctgctgccaacgcctgggctgtttctgccgacaatcttctatttctctaaaagagtacgctgaacagctggctctgcgttggcattccggtggctctccatgtccacctccccttgttctgcattttctttgaagcatagcttctttttctggtaagcaatgaagctagagatggctccagccacggcgaccacgacagcccccacaatcccggggatcacgcctggggcgtcggcctcttccccttctttcctgtggctgcctccaccatcactgcctccttttccttctccacctgaaacgccatccgcaaggtcagcatctgaaaagctaccggaggaactagggtggttggggtttggatttggcatcggtttgggtgggttcggtggtcgtgggtcgtcattttctccatcaacaacagcatctcctaagtcaaagtcatccccagcactgggtttcttggggattgcagtgggtttcttgttttcattgtcaggaagggcatcggataa

SEQ ID NO: 336921 - DNA, 1000 bp, Homo Sapiens
ctgattaatggtctatttattgataccattctattttaacaaagaaaatatttcaaattacaaggtatacaagtcaatactgttttgaagtgaaaaattatttgctttgagagtgtatgcatgtatgtatatatatgataaatgattataacgtgtgtgtcagtgacaatatgtagtctttggttgttagttatatactgtctacctgtgagatgcaaggtaagtgggtcacagactctcaaatttatgaaacacttagatttttcagggaagttacatgaaggaactagggagtttcatgattagataagacgttcgggtgggatctccaccggacagcactctaaatcatcagcagtgtgagcagtgattcaatttgggaaagtgagtataggtttaaattctggccacagacaacctctcctacacaattcactgaacctcccctggaaggaggtttccacatcctgcagaggctaactgggcaccaatcatgcttccactaaccgacttggctgcttcctctagcgcttagtacttcaccgttccctttcttcatgggagatggtgtggtaattgataatcacaatacaaactctgaaacaagtaaacggacaataaaactcatatttgcctaaaatgagtttcgataaggatctcggtggctatcttgttagatcttagaaagctgaggcttattgagaaagcccttttccttcgggaaaaggaatttttgtatggttgggaaaaggttggtcactggctgatctataaagtccttttcattgtaagattatatgattttcggtaaactgtatattttttaaaaacagtccagaatatccgcaagtgttttaccacgtgcttcttattgttggagaagctgagcaaacatcctgtcataaaaagacaaggatgttgcatcatccctggtccctgtagtgagtgtcctgaagataataagtaagaggttaccagaggctagccaacatggagtagc

SEQ ID NO: 336922 - DNA, 1000 bp, Homo Sapiens
ttttttttttttttttttttttaagaccatttcatcacatactttattggacatctcctgtggctggtcactgggatacagtaaccaggaaatacagtcggccctcatgaatgaacaaaacttacaaccccaggaggggagccagaaactcaattagtggcttagtttcacaacactacgtgctacaaagaggtacagaacaattccaggcaaactaagaacctgccccagcctggaggacaggcatgggggtgagggaacccacaggcaagaagcctcccttaagctgagctcaggactggatgaaatgatcttggtggggctggtgggaaagttccaggcagggaaaacagcagggagtgtgtggtggttggaggtgcctgcctaagggaggcaggagatggtaggtacagagttagtgtaagaaagcccaagagaggctgggggaccagatcgcacaggccctgggaggcgaaaaagtaaaaacagcttgtatttaatgggaatgtcctattacatggaaattcacttggaaactgaagctcagagaagttaccataccatggtggaaatgggtgggtatttgttctcaaatccagtcagcctaggggaatgggcagtatttgtcagatctctccctcccccagtaccaaggagggttgtgtagaagtggtgttcatctattaaacacgggggtagcccttaaatgaacatttttaacccatcatcaacagccctgtaaaatgaaaaccacccttagcgtgctcttgaaatactgtacttaccagggtgagaaaaggtgctgacatacttcagcaagatttctggttagagctgaactctaaaggatttttctactaaacagaatattccactccacaggcatatggctggatgaaatttttctatgtgaggttcataattactactaagtctaaagtgttagaacaacttgatcatagcaacattcctactgaaagttttgaggttggcctacgta

SEQ ID NO: 336923 - DNA, 1000 bp, Homo Sapiens
ttttttttttttttttttaagagatggggtatcactatgttgcccaggctggtctcaaactcctggactcaagctatctttctgccttggcctcccaaagtgctaggattacaggcatgagccactgtgcccagctagttgcttacttcttaagtgacctaatggtgacttcagtgctcgagggcacttcctaggctatttggtggccctcagtaataaagagattgtataatcttgtatactgattagccaatttatcttcgttacagtatcatcactttcatttgatactactgcaactgaaaaaactaagcctactaacatatgctaacaaaatactacttttagtgcattaaattgtaaatcaagtctgaatttccaaaattttttaagggaaaatgtttttagaaattgatgatgtttagatggccaagatgacacccattagtggttctgactgttaaaaaaaaaaattaaagaaacaaaacagactagcattcagtttctgtggaagctttctctttcttaacctttttttcttctgctgtcattccagacacaattactaagctgcttacactactggcatgtccagatctgtctaactttccctgaatggatttcacattcctaggatgtccatgtaaactttttgacctgagagatgggaatcccaaagtttgatctggcttcacagacagtaagttttccatcccatttctgtcagtaatggttagggacaagcgagggattcgaggaattgcttcagcgacatggtgttcatcttgcatatctgcaaactgctctttatgctcagcttgcactgcagcttccgacacaatgtaaggaatatctgtgctatgagagcgcgtgatcttttgaacttggcattgccattccgtcgtcaattgctggtccgtgattgaactgtactctacatcctggttaaccccaccgaccagctttcttccccgggaatagacgaagcttctggacttca

SEQ ID NO: 336924 - DNA, 1000 bp, Homo Sapiens; identical to SEQ ID NO: 157959

SEQ ID NO: 336925 - DNA, 1000 bp, Homo Sapiens
ttggcttggagatgcgtcactccaatctctgcctctgtcttcacacggcctcctcccctaggtggctatgctctcttcttcttataagaacaacagtcataatggatttagagcccaccctaattcagtgtgatctcaccttaacttaactaattacatctgcaaagaccctggtaagctcacattcatgggtacctggggttagaacttcaacatatcttttatgggggacacaattcaacccacgaaacatatcatctacatttctttccaagggtagaaaacagcaccatattttctgtaaaggccaagggtactgtctaggttgtttataatccttacttctaaccaaaatctagttctaaattgcatgtagaagatatacataggacattttaagaaactgagggatgtatgaagtcagataggcaagtaatataacaataaatcctagaagtcagatatgtaagtattgaaatagtaaatattgaggtgacaaaaaggcttactttccttctctttgatggaatcactaatgtaagatggaatgtgtaagaactgaataagcctctgcaaatagtggaatattccaaacatattttcacggaggacaggtagaatggatacagtgatgggaaacaatgacttaatattgagaaaagtataagcaggacacaatgtaacgaaaatgcatgctgaacttcccttcaacattctgaaagtggatacagccacatttgattttgcttcagccatatctacagttaagccatttattgcctcttgcaactctggtaactctctgagcaataagatcaaatgcgtaatatcttggtccactgaagacatggaagaaatgttcttgctggaaaactgcatcaactttactctctattcctggaaaggcacctgatatgcttttgggataacctggctccatgaattgtctttggttatcatatctccagaattggtcatttacaaagaagtatgttttact

SEQ ID NO: 336926 - DNA, 1000 bp, Homo Sapiens
aaggaacaggcccaaaataaaactttttattgaggaagtaataacacatctatgaaaatacattctctcacctattgcacatgagtatttcttaattctgttcagtgcaattcaaaagcaagtgaagaattccagaaacattcttcatgacacatgcagatatctgcaaggctcatcttcttcagtcacagaacatgcaggaaaaattaaccattttggctcataatacattagatgaataattattagatttattaaaaacacccatatctgtcttccccctatctcgcctagcaatgtaaccagctgttactctttaatatgtgtgtcaccatcctggcattggggtcaaactcaaactgtgatgatccactgaagaagtagaaaaatccaaatgcctgtaatacagcatcaaccttaggctcaactcctggaaagtcatcagctattagtctagggaagccttgctccatggactggctattttcatcaaatctccagtatttgtccgctgcaaagaagtatgttttcttcttttccttgtcagaaacagctgcatcaattttccttatggttggaggaaaacccagggtatggatgcctcttggataacctgcttgtacctcatttcctctgatggcccagaactcatttcctttaaaaataaaaacggtgtccctgctgttaacttcatatgcagcatccaaatatgatggaagagagggccaaaatgcagaaatcaaatgaaattcaggttcagggttccagtgggatcttcgccaaaaatatctgtctttaaagaacagatattctcccctcagagtgctgatggcatcgaaggacaaagcaggatcacacttggctggcatctcagatcccgaaggaacagattttgtgggcaccaggggttcctcagtagaggcagggggaggtccgtagagagactgaatgccattcacatcatcttgcgaaaggcggaactgggcgagctctgtgaatg

SEQ ID NO: 336927 - DNA, 1000 bp, Homo Sapiens
tgatttttttttcaattttatttgagccaaaatatatatacttaattttagttatgccagaagtaagtataatttctcagtccaaggatgttaggaagcaacttacagagcatgcttcaaatagaattctcttggcctttgaaggtaactattttcaaacttaatagtagagtcaagcaagaatggacaattagagttttcaaaattgaaaaatattatgtattttatataatcattacctatggtttacagattttatttttatgatacatatctctaagtagtggtacactgaggacatagcaaatatgcaataaatacttattaagctgaagtgaactaacaaaaaccattaattacaccatttctaacaaccaaaccagctattgcttttcagtgttttggtgatacgttggagtaggaagtcatattcaaattggttagatccttggaagaaatagtagtatttgtttttagagtagaagactgcatcaattttaggcccgattccttggaagttcttggtaatcagtttgggataaccagggtccatcatctgtctcctttcatcatacctccaatactggttatctacaaagaagtaggtcctataaaaacgtgggttaaaaacagctgcatcaatttttttcacaaagttaggaaaaccaaaagaatgtatgctcttgggataatttggctctggtcttaaattgctaattaaccagtatttgtcatctttaaaaagaaaaacttgatttctggcttcaatttcataagcagcttcaatgccagatggcaaggttggccataaggaagaaattaaattaacactggtctttggtctctcagaaaccttcagccagaagaacctgtctttgaagaaaaagatcttatttcccacggtagtgacagcatcaaaactcaaattggggtcacagagagctggttctgaattgtcaggatttggcaagcgttggttctcttttgggtctccatacag

SEQ ID NO: 336928 - DNA, 1000 bp, Homo Sapiens
tttttttttttttttttttttgccggctgtacaatttattcagtgcacattatttacagaaataaatgtatgggggtggacacggaacccccgcagccccaccccttagctggctctccggttctgcagggggcagaagctgccggacccgcacttggtgccagtgcacaagaaaccactcgcagaggccagcagaatccttccccctcaagtgccttggggatcctgggtggcagactccactcgctcagggccatggggaagtagagccagctgtacagtaccatttcccacagcagccacggcctcttgcttgctttgggaaggaaaagaggaaggaggcatctgtcctcagggctgagcacaggagggcagcctcttaggccacaatgggctccttcgtggggttcacagtctgatgcgcggctggcctatccccaccagtgtctctcctcccaggaccctgggggcacagggagctggaggggaggaacccctcatgcccagtgcctgacactgtgggcacccattcacggccatccactgcccaggcctaggcacccaccagccccctctccctggggctcaggacactggcagctgaagcccaaaggagctggagctcagacccctgaggctagtggtgtgagtcggagagggagggaggaggcacagggaaggaacagagggttctagctcagggaggcatctctgccaggggcgaggctgctgcttccctggggagaggggccctggcagactccctttggtccgtggtgaggcaggcccagggccctttctccagagagggaaggaggtgtgggcccaaggggaggtgggagctgggggctgctgccgggggtgggctgggttctctggcacaaggagccagggtcactgaggctgtcagaagtggactgcgaagtccactggattgggaaggaaccaagcctcaatggggactcaagggccacggcccacctcccttccaggtcccctt

SEQ ID NO: 336929 - DNA, 1000 bp, Homo Sapiens
ttttttttttttttcaccattaacgtcatatttattgttatttaactgctcaggaaaacatatacaggtatatacaatatgcaggaatacagaagactgcactttacatatttttttaaaaaagaaagaaaaaaataacactcaatttcatgagctattgtcacagtcttccaaccaagcatttcagaaatgaatttcttttaagagtcaaaaaagattacaggattgcctaacacacagcagagttaagttttcatattttacatgtgcaataacattttcgttttctttcccaaagagtttgctatgcagtactgattaccagtgttcggagtctagtgtgtagggtgtgtttttcatttacttttattctttccattaaaccaaatttaatgaaataacatccttttgcttaaggctatttttaaagctgtttcattctggggtcgtggggagcgagaaagtttttaaaacttcaggggtttctgaggttgccaggaccatgagctaattggcaaagtgttgatgactcaacgctgggaaagtcaaagacagaagttaagacactttgctccccggccttaagcaattaaggagaaatcattcctgtttcaaaagtaaaatgatgaggctctcaaacagctgtacactgcagaatcagaggggtcatggagtcttgcccagaatacggtcaactctcccacagcccatggtggggggaaattcccttccctttccattccttttgtagcagaacgcaggaactgcctcggctcacacctttctcgctgatcaattcatgccacctgctttgtctgccctctgaaggcggggtttgctcctcgtcaagactgcccaggcgagaaccgcagactcagaccccagccaaaaggaccggcagaaggaaagaggggagaagggaggggaaagagtgaggtttttctgaaagctcctctcccttcgctgaaaagttctttgaaataaacaacgtgggtgttgt

SEQ ID NO: 336930 - DNA, 1000 bp, Homo Sapiens
cggttttttgcctcgtgaatgtcataaaagcaaaatgtaatatctaaaaaaaaggaagagtataagaagaaaattttattccagaaagcaaactaatctataactcagttataaaagctcttaatatgctagaatatatctactgaaacatcatttaaatgaattactgaaatttacaaaatcacagttattaacaacttaattgttttaagcggaagttgtttgttgcatttcagctttcatatttcaattaacattcattggtccttccttgtttttcttggccttgatgaccttgatgaagctgtgacttccacacaccagtttcagcttgcggtcaactgttctcagttgaaggcagaagagtcgaagtttatctcctttctcacacttgatattgtgccattttccactccccactacatccatggatcctgtattatcctgtatttcataaattgtgttcttcttgtgtacgcttttcttttgtaacataaacaacccatacaccattgttccagatgcttgcttgtaaagttgactgatcttgggagttttatttgctatttcgataattctgtttgggacctcaaaattttgattaaagtcagacacagatgatgcttcctttatttccattactcctttacattcagagtaatcagatatggtaatgaccttcttccttacaaatttctctttcaagttgatgtcgaagactttcacatggaaatattgagtcttactggccactgtagcatgaaacattgtgcttttcccattttctggggactcgtatttaaatggcgctgttgctttcagtaccaccactgtcactgggtcgttttggggaacatttcttcttgcatccacctgccgttgggcctgggtttcctgattcggagtaaacgaagtgttggatggagttgatgatgaggtctggggtagtgggggatgatccacagctgcagatgtgctggctcctgagggacctgggggc

SEQ ID NO: 336931 - DNA, 1000 bp, Homo Sapiens
ccaacacagcatttttattgcttttgaaggtttccctagagcagacatcattctattgcacagatgtgtcattttggcattatagaaagttgcagttaaaaacgctttctccaaaataaaaagacaaatgaaatacccagcatatacagttgaaggcaaaggagggcaggctttagagggatggggtccattgcttttgctgtgcatcacccttgattagcagttacattttggtagtacttcttacccccaatttctagaaatccttttcaaatccagatcagtggggccccatctatcaggagaatcaacccttcaggagcctgagcaagaagactgaaccttactggctgaattaggatagctgcagagagctggaagctgacacaaaactagttggagcagccctgtttgtcttaaagcaaggcgggtggaattccaaatgctggagaggggcatacagtgggttcccccattctacaagcttagtaaacccaggagacaggcacccactgtggagaactgcacgcttggtcgaaggcttcttgtaatttcttaagggtttcatcaacaccattattgaccagtgagaggtcaaagtagtgagcgtactggctgcggatggcctcagagtccttctgcagctgctgcagggcttctgtctgagtgccctggtcagtaggtgcaatgaacacaatgaaaggcgaaagttctgctgtccgaacaattttcagggtctggggctcaatgtcaaggatggcaatcttgttctgcttatggatctggtgcactgtttcaaatttggtgccaaacatgttgccttggtagctgccaaactccaagaactcattggcagagatgttcctcgtcatctcctccgttgagataaagtggtactccttcccatcttcctcactcttccttggcggccgtgttgtatatgggacagggtacacaaacttctccggattctggctgagcagggcattcttaatgtggc

SEQ ID NO: 336932 - DNA, 1000 bp, Homo Sapiens
ttttttttttttttttttttttttttttttttttttttttttttttccggattacatatttaataacatatttactgaggcaccatataaagggttccgggagtctctaaagagctggagctacaagaagcctaggcagggttagagtaacaaatgtgtctatgaagagtggggatgagtggcatttgctgggatatgggtgtaaagttgataaggtcatgaaggttcaacagatatttatggagtgcctagtatgtggtgggaataagactattatcaagggctctaaagcagtcagtgtacattttagagtgaagaggggcattgcagggtgctagtcctcttaagctctgaccggcaacccaaccccgtggaaactggtatgcccactttgaggaggttgtctgaccgttccagggtcaagctgcatcactgcaaggtggaaacgatggagtgaggcaggcttagagccgatgtgccttccaggacaggtaggagttccagataacagcaacacattggacaacggccaacctgtaatgaagggggaccaggtagaagttggctaactgcacagcaggccatagatagtagttggtgataagggcatcaggataatcccgctgtagtttggcccagttgtcctgggctgacagtccattaagtgcccctaccagtgggagaaagcagcctagaaaacacggggcaaagcccccctgatccaacaacatcttcttcagtgcatccactttggtggtgccagggatgaaccgatccaaaaccttgtaccagcctcctaccacagggcccacaaagccacagcccagggacaccatggtcagagtccggcctctctggtgttcctgcagaccccgcctctccaccagctgctgtgagataatgtcacccaggcccatcagggacccagctgtcaggacctgtactttccacgggtgagcggccagggcccgctggtatgcccgccagagtgccatgcttc

SEQ ID NO: 336933 - DNA, 1000 bp, Homo Sapiens; identical to SEQ ID NO: 157961

SEQ ID NO: 336934 - DNA, 1000 bp, Homo Sapiens
ttttttttttttttttttttttttttatagcaagtattcattaaatatttattacttgaatgaatgacaaataatttcatccaacaatctttaaactgcttaatcctatgacaatatttaaccttttaaatttcatgaccttattccttctgtgctctagtttttaaaagcttgataattctatttcttttcttttttctttttttttttttgagatggagtcttgctctgttgcccaagctggagtgcagtgacgtgatctcggctcattgcaacctccgcctcccaggttcaagagattctcctgcctcagcctccggagtagctgggactacaggtgtgcgccaccatgcccagctaattttttcgtatttttagtagagatgtactttatatttttagtaaagatggggttttgccatgttggccaggctggtcttgaactcctgacctcaggtgatctgcctaccttggcctcccaaagtgctgggattacaggcatgagccaccatgcctggccaattctttctacttataaaaaattcttatgttcttggtggataaactggttgcataataaaattattttagttcaatggatagattcctgccagattcacccagttgccaattatctgaactgaaacaaataaaaatatcaagtaaatttttatatcaccctccaaaagcttgggaattatattctgccacttaaggctttactggacttactgtccataaaattttctaattacaaagtggaagtctattcaagagtgtttatacgtagaaaagttaggaagacagaaacttgaaaaagactgtcttcagaaaaacctctctgtttccaataggaatataccatggtcataattttatgctcacatgtcacacaaagataggctgttactggagagttattttgtacagttggtatttttaattctccattttttgttcacaaatgtagtcttcattttaatgaagaagagaagtctgt

SEQ ID NO: 336935 - DNA, 1000 bp, Homo Sapiens
ttttttttttttttttcagacctaaaaagaaaggtgtttattaaactagggtatttacaataatattttaaactataacttgtaagtataaatgaacttaggtcttaataatgtgaatttttgtgagaaaaaagtggtgtattgtattttctcctaacataaaaaccattcctttaagtagttctcatttgttaagttataataaatatttttcatatagaatatatagatgacaattgtgatgttaatataatgtaattttcaattaaaatatgaaatttggcaaatgttattttccttatctctaaggagaaaaataaattctaggttccttgaattaagatatattattacattagaattgtgattattcttcagtcttttctggaacttgttcagtcctgggaaaatcttctttgtacttcttcttgaggttacttaaatatattcgtaaactgtctggatccaattgagagtttcgagcagtttgaacaagcctagtggctagatggtacacagctctctgtctttccatctcaggggtactcctttggttttgcaaaatttgtctcgtaatttgagttgtgatttccttggcatccaagacaattgatggtggaagtgatgacacctctgcagcttttaatccataatttttctcttctgtgagtcccttagaaagtttgtaggtatacaaaattgcttctttatttcttgaggtattctttacatgttgaacttcaaaatgcatgttttctacattaggatacagggcatcaatatggcatagttccaggaaatgtgtagcaaacagtgtaaatgcctttaagctcagtagatattcacaaacagcataacaaatgccaataccttcttccgtattagtacctctgccaagttcatcaattaatatgagcgatttgtcattagcattatgtagaatatatgctatctctttcatttctttcataaatgttgatgaatttgtttcgatatcatc

SEQ ID NO: 336936 - DNA, 1000 bp, Homo Sapiens
acatctttaaaggactttatgatttcacagagcatcttcacacacacaatatcttacttgatcctcacaacaaccctgtgaggtaggtgttaacatgttcattatacaagagtgggaataaaaatgctgagatacacagaggcataccatctagagttctactagaatcttaatagtatgaatcttgggtctgtgtgttaaaacgtaaaggaaagaagagttgtgaaaatgtagtctgttgatcagtagagagaaaccaaaaatataacatgtaatcccataagagatttttagaacaaaagaatattggtattctttttcatgatcaaaatatttttgtttgaaatgaccaggtaatacatgaaaagttttatttttggtttaaatgggttggataaattgcccaagctcgactacacttcaaaacttaaaaaaatatatatatatgctgtaatttggaaaataagaagatgagaaggtaaaataagaatcaatttttaaaaaatattctaaggaattaaaatttttttatctcctctgcatacctatccagccctgttcctcccccagtatagcttagatgtattgtaattgcttgttcatttgtctacatctcttagggacaattagctctgtaaaaccagagacaattatctcttattagctgttatgtccagctcatggaggtacataatggacatgtgaattaatgattgaatgaatggattttcttctatgacatccctatctctggttgagaataatgtttgaatataaagaactctcatattatcaatactcatgacagttctcctagaacccaataaattaaattgtgttctagactctaggtgaatgcgtgtagtccagcctgtgcaatagaacaaggctctgtctcttaaaacaagaaaaagaaaaaaaaaaagcccttgactcagtctttactttgatcaaaaatgctttggaaagagaccagtattcattgaagattgagctgatt

SEQ ID NO: 336937 - DNA, 1000 bp, Homo Sapiens
tttttttttttttttttaattgtgagtttggacaaactttactgcaataaaacaaatgcttaatttaattcagaataagagataactcttcaataaaatatatcaaattgtacaagcaccctttcaaagggataaaggtataccggagggaggggacagatggacaggaaggtgaaataccagggaacttaatgggctgtttgacaatcccattttcaccaagtcaaaacatggctttaccttctgccccccaacatgtaaaaaagtatataaaattttctaataagtttaggacatacaacaggtacacacacagagaaagcatatttttttttctttctggatctactaattgttcaagaatatttagcatataggtaatggttacaagatactcattttttaagcagaaaattactaaacccccacccaaatcacctttgcaatctgtgaggatgaatgtacctagtatttctcagaaaccatcaattcctctcaacaggttttaacattttactctccaattatctgaaataaagttaccaacagccttgagaagaattaggaagtatttctaattttctacctcacctccaggcagtctcaggattcttctcatcccaggtattggtcttacaaaaatattcttaaaaaaggaaaaactttaaaaatatgtgtgtggtggggcggtggggggcgggggagagataggaacaactgtagtatataaagaggtttcttttaatgcaagtaaaatgcagaaatatgatgtgtccccttcactttgaataatctctccatatctaatattttctgtgtgcattgtgtctgtttctttgttttccataagcagaagtcaataatcccgtaaaaatcattgactttagcacattttgcaaataatttgtctccctctttaagaaaatacaacaaatggacttacacagtgtcttttgggaaggtgagatatagaaaaaaagcacatatgtatataaatttt

SEQ ID NO: 336938 - DNA, 1000 bp, Homo Sapiens; identical to SEQ ID NO: 157964

SEQ ID NO: 336939 - DNA, 1000 bp, Homo Sapiens
tttttttttttttttaagattatgccatttctttcagatctttatttctcaaaaggatcaaaagccttcaacagagatgttttaaatcccaagctatcaaataaaaatacaatatatattagaacagtggagaaagattatcataacattttgttttgtttgtgcaaattataacagggaattagacactggggaatctaaaaatccaaggatactaactaaagtcagtattttaggtccagcacactgcttgagtggtatcatggagacaaataatgtgggaaaactcaaaaatgtgccaagcagcagaaataaaaggagtgaaaataaaaaggttgtatctttctattaaaatatgtacgtactggtacctgtaaattgaatgcaaatgtcccaaaattctgaaattgtgacttaaaaaaaagtaatggtgatagataaatccatatgcccagagtgaaattttaaaatacatttcatatttcccagcatcataaaaataaatccctctgtaggcaattatcctaaaatattttttatcagaaatatagctttagtaacaaataaccatttgatagttacataaacatataacagatatgctctacatgtgtaatttaagtacattaatatgagcattctttatgggtatacatcatataaaaataaatcattttcatacttttttaaatgttggcactgtaagtcacaagaatgagctactcagtcagtctcccctatttcaggaagcctttgcatggaaggacagagtctctgtgaagttctctgggaagtaaaggaggcgctgatagggactgaaggctgcctttagctcagaagagctcaaggcaacagggcaatttggggagagtcacaggcacaggaagggcgtagatagaagatacgtaaaatcaaatcaggaagttttgttatattgttaaatgatccaatctccactccatgtccttcaagaaatgttgaaagaaaattttcttttgaa

SEQ ID NO: 336940 - DNA, 1000 bp, Homo Sapiens; identical to SEQ ID NO: 157965

SEQ ID NO: 336941 - DNA, 1000 bp, Homo Sapiens
gcatgtccccctgagtttattattggaaagcaaggactgaacaaagactcagacaataaatatctgaagagaggaagccgagcttaggaggctcagagggtccgggggaggtaaagctgtcgagggcagtgaagggggctgtgcccaccccgctcacccgctccccagatgcctaggggagcgccgggcccggcgggaggtgccggtggggagcccgcagacggtgtcctggcactggcagctctcgatgtgggtgtaggtgtgtgtcagcgagccgccattggggcagctcaggaccacctcacgctggctggttttctcctctttgcagcaggagcagctgtggtccagggcctgggccttggccgagtacatgacaaatgtcccgcaggacccggagcaatgattcatgaggacggtcttggtgcagccggcgtacgaaacctccgtggtgacggggacggtggagcagggcaccctggtctcattgcgaggggtgcaggtcttgcagcatccattgggcatgaatgtgatggagcccgggatgcaaatgctggcatcaaagttggggcaggtgatgttggagacggacgagatgagctggttgtggatcttcacgcagctgaagaatgtgcagttgttcttcgggtcgctcttgaagtccccgggcttcaggatgacgtgctggttgtcgggccgtttgatgatacagtgcgtctgttcacacttcttacagcactccccgggggcctccatgagttcgaagccagggctgcaggaggtgttgcagggcacgtgggtgcaggcgatgacgttgagcagggtgttgttgtccaccttgtccgtgcacacgcagtcctggcacttggaggaataaactggagaaccgggctggtactcagcattcccgtgaacacacacccccttggactcacaccagtagaagggacagcaccttccaggcaccatcttgctcttcacttcgaatcccagcgggcac

SEQ ID NO: 336942 - DNA, 1000 bp, Homo Sapiens
ggtacgggggatgctgaagagggggaagtggaccccattgcctgttaagtcccatctgtctcagtttgaagcaacacgggaatttccattggaggagggttggcctgccggcctggcccttctctcacgtcccctctacttcagctacatttcttatgcatgttcctcaaagctgtgaaaatcaatacaaaaaaaactgacctttacttcattcctgtaacaggctatcaggatctcaaggagatccacctgcatcgagatcagtctcaaaaacggggcatgtaaaacataacttacaaaatggtgtgtaaggtctgagagccttcacgcaccattcagacagatgcagctggccacagaggacttggggagatacgtaatacaaataaagaccttaaccaatcccaacacttcagaaaaactttcacctgtggggaagtgggggcatgtgactggagagcaatgaacggaagtttacactggatctgaattgttactaaaaaagtaactgacacgcacacacaagtggccttcctggcggagcatcaacaaagccaagaggtgcgagtacccaagactcccacagttgttccacccctggggctagctgtatttatgccctcgctcaaagaccagctttttcaaacactaatacctacctgcccttggtggtaacaacactgtaagggctgctcattccactgtaggattttacatttttctcaccatggcacagtctctttttagttcatacccaatagtctagctgggttttctgtagggcgactaactctcctgttttcgctcaggactcaggggcttcctaggtttcagttgtaaatgagtcggtcacttggttctctatagtgttccaggagatattaattactgcttgaggttttcctaaatatacaaaatctcaagaacaagacataaaccaagaaaatgcacctggggagacacatacattttttccatatgacccagtgctctttaacaa

SEQ ID NO: 336943 - DNA, 1000 bp, Homo Sapiens; identical to SEQ ID NO: 157966

SEQ ID NO: 336944 - DNA, 1000 bp, Homo Sapiens
acgtttttaaaaagtttctttgctttattaaattcctcttcaagacttaacagaacaatggaagctcatcataatcagggaaacaagaagaaaagagaatcactcaggctcctttctggcgggggagtggagaggctgggaaacacaatgacagtgaaccatgggaagcagggggcatggccactggatctgaaagggaccggctaacagtcactaaatgtccaaggcctgggcttgagcaatagcctcaggtatctccatcacttacacagcactcattcgttcagtgagatgtcatttattaagcagttacaatgctgcaggtgctgtgcaggagactggacatacaaaagaagaatttgacccagaccttccccctctggggtctcataatcttgtagggggaagggaatacaaatacaaattagcgaagaatgatagcagtatcttaggacactgtaactgtgtgctacgggacccaaggactggagagccatcccttcgtgaaggtcagggaagagctgggtggtggagagagctgagcctgtgtggacccctgatgcatgctctgatgctgagggagtacagtagagatggacactgatagtgacagaagagtttggccccaaagcagaagcggcatcctgcaccgactccccttagaatgaatgagtacgcacaagaaaacaaccacaggcatcgccgcccttcagtggatctctttgctggagaattgacagagtgcgtgtcgcgcctgagtgagccggtaaattctctccttaaggattcttctcttggtagcggtctcactctgctcttgaagcagccaggaatagcgatttttttcctgtagtatctgcatcatggctttctgcaaggagtcaccattctctcggagcataaaatactgaattataaatgggatctggttggcgagacgtttgctggtttccaagaagtaggcattcaggtggatgcctatttcagtaaaggaggaaac

SEQ ID NO: 336945 - DNA, 1000 bp, Homo Sapiens
ttttttttttttttttttaagagagaggcaattttattcttccaaaaaaatgcaccaagagagggtgagcacaggagcacccctggccacatcccccatcctaagcagggtctgagatgaggccaggcctgacgtgggcttgggagaagctgacggagctccctgtggccttggggagggaaccaggcagacctggaagtggaactttgttgttagcaccaggagccgcccacagctgggctcggcaacagggcagcacatggccctgttgcctccacctgagagtctggggaggggctggtggcagaaggctccctgcaggaggtcacctgaatgactctcagattcacagaccccctctgcccccacaacccctgtaaacatgagaatgggctcgtgacaccctcaacacctcaggacaagatgagggtccgagatgtgtggctgggcttcaggcggcccaggagctgccgggctttctcctgcatgaaaagctggtccctggtccccccgcaggccaccgtcttccaggcactggacataggggcaggtgtcgtgaagtggcttcggggcttctgggccactgctgccttctcgggcttggcctgcaagaagccctggttgagcaagctgttgtcttctttgatacctgacagggtgaggctggaagagtttgaaggggcagttgtcggcaaggatagagacttgggcagtgtggacatcatcagcttcacatcctcatccacaatgtcaagagccagagacttccggactttcttgatggggctccgccgcagcccaggcttcctcttctgcttctcgggcctgatgtcgtcctcgatgatgagttcgatgccagcctcagaacgcagcacctccttcaagtcctcctccaggtgcggggtctgtggcaggggcttcaggggtccgtacttctccagggcgttcttgaacggggttggcgtgtggggagtgttgtccatggagtacttctgatctg

SEQ ID NO: 336946 - DNA, 1000 bp, Homo Sapiens; identical to SEQ ID NO: 157968

SEQ ID NO: 336947 - DNA, 1000 bp, Homo Sapiens
catatagaaacttctttttaatattacaataccaggatcctcgcacattttatatacatcattccacatttaaaatatatttcaggtttacgtaaaaaaagaaagtgctaaactatttacaaaaatacattaaatacccctaacattaaatgcaactttcccacttcagacaggaatgaacttcttttgaacatggcacaaaaggatcaccgtaataaaagttaatatagtataaaaccaaccaaacaaaaacaaaatgaggctagacctaagccactcgcagttccaaaaaaataaaagcccaaagccgaaaggcgttttcatttgagcgtgcacaacagatttcgcaattttcgcaacttttctttgtgaatgtgtctccttccctttcagcaacttttcggtctgggttcctaaatgttaatgtaatgtgacctaatctaaaggattaggccaggaagggtcggtgggatcttcctgctgcgtggagaaggtctcaagcgcaggctcagttacttctccaccacttcctccacgcaggggagtttgcgttcctccgaggaaatactgtccacgatggaagaaaggcatcgaaggctactcgaggctgacgaatcaatacttgctcctccttccttagccgttatcacgagccccctggaatgatcggaaacacttggccactgggagctgcaggtgcgcaggaaatccgcaccctcaagattttcttgtttgggtctgtagctgaaggggtccacccccagctcctgcatcttctcctgctgatccagccggtgcagcaggtcctgcagccgctcaatatagctgatggcgctccgcagaatctccaccttgggcagcctctggttggggttggccacagttcgccgcttcagtgcctcgaaggcctcgttgattttctttagcctcctcctttcgcgcagggtggcggcttttcgccggtcagtgggggcagattttctcttgcaggtcttgcaag

SEQ ID NO: 336948 - DNA, 1000 bp, Homo Sapiens
gaaacaaagcaaagtttattgcatgtgaaaaagagtcacatggacattaagtatcaatggtcaggaatcaagaaaatatacattttgcatatcttctgtcctgctcctgctccagaagggctggctcactcttcactctcgtggaccaccatcctgctggaggtgaagtctcgagtcttagcgcggagcttgttgacttgagattctgcgatatccgcacgttcctcggcctcctccagctcatgctgagctttccggaatttggtgagatgagcattggcttgttcatcagcctcctccgcctgcctcttgtaggacttgactttcacttgcagtttatccaccagatcctgcaatctcagcacattcttcctgtcctcttcactctggtacgtcagctccttgaccctccgctcatacttcctcaggcccttaacagactctgtgttcttcttctgctctccctcaagttcaaactccagctctcggatcctggtctccagtttctggatctgcttcttcccgcccttcagcgccagctgctcggcctcatctagacgatgctgcaggtccttcaccgtctgttccaggttcttcttcatccgctcaaggtgggcgctggtgtcctgctccttcttcagctcctccgccatcatggcagcgtccgtgatggccttcttggccttctcctcagcgttccttgcatccctgctggcatcttctacctcactctggagctgcatgaggtctgtctccagcttcttcttggtgtggatgaggctggtgttctgggtatgcagcagctgcaccctctcgttggagtccaggagctcctgttccgccagtttccgggccctctccgtctgctccagagtagcccgcagctcctccacctcggcctgcagcaggttggctctgcgctccacaatcgccagctgctccttcaggtcctcctggcctcggagggcatcatccaggtggagctgcgtatccttcagct

SEQ ID NO: 336949 - DNA, 1000 bp, Homo Sapiens
tggcactcatatttattacaggttggcaagagtgaggttcccgaggcagtgtcactcctcatcgtgcattttttgcttggcaccaatgtcacggctcttggctcgaagcttgttgacctgggactcagcgatgtccgcccgctcctctgcctcatccagctcatgctgcaccttgcggaacttggacaggttggtgttggcttgctcctccgcctcctcggcctggcgcttgtaggccttgaccttcagttgcagcttgtccaccaggtcctgtagccgcagcaggttctttttgtcttcctctgtctggtaggtgagctccttgatgcgccgctcgctcttcctcatgcccttcaccgactctgcgttgcgcttctgctcggcctccagctcaccctccagctcccgcacccgcgcttccagcttctgcagctgcttcttgcctcccttgagggcgatctgctcggcctcgtccagccggtgctgcaggtccttaatggtctgctccatgttcttcttcatgcgctccaggtgggcgctggtgtcctgctccttcttcagctcctctgccatcatggcggcatccgtgatggccttcttggccttctcctcggcgtttctgcactcctgcactgcctcctccacttccgactggagctgggtcagatccgactccatcttcttcttctggttgatgaggctggtgttctgggaatgcagcagctgcacccgctcgctggtctcaatcagctcctgctccgccagcttccgggaccgctctgtctgctccaccacggcacgcagctcctccagctcagcctgcagcaggttgttgcgccgctccacgatggcgatgttctccttcaggtcgtcgttggcacggaccgcatcatccagctggatctgggtgtccttcagcaagctctggaggctcttgacttgcttctgggcctcggcggccatgcggttggcgtggctgagctggatctccatctcattg

SEQ ID NO: 336950 - DNA, 1000 bp, Homo Sapiens
ttttttttttttttttttttagcacatggttctctttattgtgatgctcagtggaaaacatctgtaaaccagcttactgtagtggtgacagctgcaacacatgctaaggcacttttattatataaaaaagggggtagggtgggagtttcactcactcctttgtgacagcaactgggacctgaattcagagctttgtaggcatatgcagcttttatatcacttcatgatttgagagtttgtttcctttaaaaaaaaaaaatgccttcttgccgtaagtctcaatgcagcatatacaaaacagttaggaatacaagtaaattcggcaaccagtgtagaccagtgaggacgagctactctcttctaaacaaaggcagtgagaaagactcggaattttatcatttattacaagaaaggggaaaaaagaaaaccttattttgctttcaaaaatacctgtgcaggtggcagatttttaaactatactgagtcaacggtgcaggtaaaccaccctcgggcccagtcctagagtagacacaagatcgcctgggagggccgctggcccctctaacgctctggctgtcagacttgggacaagtcccttaaccattaaatatatttggtccccaagagtgttgggagaagccactggaaggctgctggcctttccagcttgaccccgacagccttgctgtggcagaggcaggctgtcctcggtaaaggaggggagggggcattgcacttgagacattttagaatcaggagggagacagcggacagtggcgctgcctgggacagggtggggaggaatccactcctccccccaccccagccttctgtgccctgcacagaggtggaggcccagggcctgctccttctggaccgcccagagccatgggagtgggaggcccaaggggcagaggtgtgtgaggtcaccacgtgtgattgcaaacagcaaagaaaggaggaggagtgggggcgctggtggcagacgtcagggaggctg

SEQ ID NO: 336951 - DNA, 1000 bp, Homo Sapiens; identical to SEQ ID NO: 157969

SEQ ID NO: 336952 - DNA, 1000 bp, Homo Sapiens
caaagttaaaacacagttttatttactcatttataaatactgttgtgtttacaggcatcatatagaagtgaatattattattcccaaactttcaaacacagaatactcaaaactatataacaacaaccagtaaaacaaaaccattcatcttagggttgaaaggccactcaaaattgcataaaaatacattcagttcacaaagcaagtctggctgcttctccctaaacaaccccaaccccaccccatcccaggtgtatttacagtggactgaagttaatccatacaactcagctgaaaaacagttacatctggtgtgtgaaccttggtggaactagggtgaagggtggagtaaagacacaaaatgctaccactaaaatgggagaggcatggaaacctcagggtggttcttttcacccctgttgatcaaggtcagggcaaagacaaggaggaaggaaaaccataaagccaaagtctgagtgtgaaccactcaactgagcacaggctgtagcttctccaagaaggatgcaagggtgaaacattctttccttccttctgcagggaaatcattgccctggtgtgccagccagtggtaggcacaacctttcaaaagttcaagggatgctggctagaaaaggaggtattctggattgctgcctcctctcagaaccctctcctaccccgcagcctgcctcctggtgtcttttttcctccaaactctctttacctaacctctcttcatcagaaggcaagcgggaatctgttccgggtttcagtagagtgggagaaaggacaggcaaaggcacagatatttaggcgagagtcaagctacttctggcccttgcatgtcccttattcaggaatagtgggccccgacgactggcactccgactctcaactctggttttgggagaacattagaggctcttaagaggctccccaccatcagtgtgcctttcctgaatccttgctctttgaatgggctgagctgttgccaccagat

SEQ ID NO: 336953 - DNA, 1000 bp, Homo Sapiens; identical to SEQ ID NO: 157970

SEQ ID NO: 336954 - DNA, 1000 bp, Homo Sapiens
gagatttgagggggttttattcttaaaacggcacatttgtagagaatgccctttatatatgttctaaagaaaagtgtacaaatactcaatgattaaagtgtctctgagaaagtggcttcggaccacaccagcatctggtccttttgctgtgacccaccccatcccggagctggtcgggtctggctggatgtgctgcccagtgagtgcctcgctcggtaactgcttggtcctgaacattctctcgtttcaggaactgatgaggttctcttcttttgactgatggagattacaaaactcttggattctctgaattatacttctgtaggctaacgtggctggggaatctggggcgtcaatgaaaaaagactggcctttgtcacaattcttacctatgagcggatccaggggcactctgccgaggagagggacctccaagtcctggcacatgagctccgcgcccccggttgtgggagggaatatctgagattctttcttgcacttaggacagatgaacggactcatgttctccaccaccccgatgatgggcagcttcaccttgcggcagaagttgatttctttccggacatcctggagtgacagctcctggggagtggtgatgatcactgctccatcgatgtgtgctgtggccaggtaccggacgaccgagaggtgttcatccgacgtcccaggtggggtgtccacaatgaggtagtcgacctctccccagtccacatctcggaggaactgcttgatcatgccgtttttcttgggtcccctccagataacagcatcatcaggactgctgagcaggaagcccactgacatcacccccaggttgtcttccacgtacactggagaccagcctgagccactctggtgaacctgctctccttccaatcccattatcttgggaatcgatggcccacatatatcgatgtctagaagagcaatctgtgtgttttcatcctctgctaggccatgggcaaggtgggcgctgaat

SEQ ID NO: 336955 - DNA, 1000 bp, Homo Sapiens; identical to SEQ ID NO: 157612

SEQ ID NO: 336956 - DNA, 1000 bp, Homo Sapiens; identical to SEQ ID NO: 157971

SEQ ID NO: 336957 - DNA, 600 bp, Homo Sapiens
ttttttttttttttgagacagaataaagttttatttttatattaagctactttgcctcagtggttgcacagtaaggggtagagggtagatgaggacaagaacaccctgagaaagtattttacagcacaagctttatgaggaataggagaacacatttttttcacattatactaagtccagcagagcccaggctctggggctgttgctcttaatcctcagtggaggcttcaggctttaccacttagaacgttctccagggctctggttacctgatcagcactgaagttgttcaaagggacattcgtctcttggccaaatgcgtagcgggcccagagcttgggctgcacatcggagcattcgcggattaggatgggtaggtcgggattcgccttcttcagctccacgtagcgtttctcaatgaagtccctgacgccctggctgccgggcgagcgctgacataagtggatgcgaatctcacgcaggcccagctttgccccgactcctcgacttgctgcggccgccgccatccttgttaatatcgaagtcgccaattccaggtcttcaggccaagtgccccggtctgaccaaccgcggaccctc

SEQ ID NO: 336958 - DNA, 823 bp, Homo Sapiens
aagagaaactcaaaggtttccattttgccagtgtcagatgctggagtatccttcccaatttacttttgtataatttccagttccagttgttatgtatgctctagtgaagttaccaacagtctatacacaaaatggaagtgttttactaaagcagcttaaagtcgtattttcaaactacagaaattcaagaaattctttaaattctaatagttaatttcctatactctaaagttcagagcatactttcagcataaaaaagtgacacatatcaagtttcagttatttattgatttaatcattgtaatctccaatagagattacaatagagatctccaacatgatttcatgcatttagaggagaaatatttcctggttaagtggaaaattgtgcggatgtggcttctggaagaccttcattctaaagcagcgttatagtgaaacatttcatttagaaatctggacgttccttcttcagcttgctgtaatccacattcactgagtagaacttgtattgatcattgggacccagtttgttccagggctctgggttatttctgtcccaacaaacatctggattgaacaatgccagacgcaagagatacagtgttgctccagtagctccagttccaataaatacaaagagggggatcaagctcggatgcttcttggcctgaccgatgatctggcggagcatgtttgcggcagaggtctccgactggaaaggagagaaccgacctagccaccaggccctaagctaaaaattatctgcaatgagacactacggacttccaaagtcacccaggacctcctacctgaaggaccc

SEQ ID NO: 336959 - DNA, 693 bp, Homo Sapiens
tttttttttttttttttatatatattttaattgattaaatctttactaatattctgtaagggataaaccagacaagtaggctacagagaagaaatcttattttggagagttaagaaaccactatgatgcttccaggtattatcttcagtgatgcttcttatctttattcagggactccaggtaatattcagctcctacagctaccacaaatgcagcaaatccccatttgaatcctttaaagaatacatcagaaaaggaaacactctttgcaaagccacccatgtatctccaagcttcattgcggccccatggatcccttagcccttttgcagccagcttcttctggatagtttctaatggtgtcccttctatcttccattgtctataatctggaagttccattttatgatgtccatgctcatgtccatgttcatgggccatgtctgacagcaatctgacctctcaggacactcaactctgcaaccggagccaaccggaaacggaggttggtcacctcgagtttctcacggcaggaaagcggagaagccgcttaacgttccgatactgggttagagattcctgaatcaggtagagactacatgagggacgctggaagtcgattattttcccagtatatgtgcatcctcaatctgactgaggtaacagatactgtagaaaagagaagggcgggga

SEQ ID NO: 336960 - DNA, 668 bp, Homo Sapiens
ttttttttttttttttgtagtttaaaggtccaatttattaggagattaagagatgtatttattatacatggactataaatactgcatagctgactttattcacagtcaagcagagatatagtcagtgccaacctattttgtggatactcttgttcttttgttccaagaaaagtttgcaccataagacttggacttgggttttggaaccttcctctcttcaatgtcatagctccatccatttttttctgcaaaggaaactgcatcttctttagtactgaaggttagaaccatgttggataagggatcagccgttgatgcccaacccatcaaaggattttcccatcgctccctggtatcaaactccatcttccatttctttgtgttgtttactccagactgcatgttattgcgagcaggaacaaagatcctgacttttctagtttttatatgctcttctggaacgccagttaaagtagtgatatccaatttttcatcaactgttatgagttgtgtgtcttgagtctggtcctgtgccaatctccatgtggaagtcctcaacgacctggtcggaaccctggaaacggaaagggcagctacagccactgcccttctccgccacaacgtctgcctcagtaccactgacattgagaccgccgccatcttgctgc

SEQ ID NO: 336961 - DNA, 1000 bp, Homo Sapiens; identical to SEQ ID NO: 157974

SEQ ID NO: 336962 - DNA, 1000 bp, Homo Sapiens
cactttcaatactattttattgcaactggatgaatgttttctaaattgtgcattacaccataatatacaggattacaaacaaaattacagtacagatcgattccagtggtaccagcatcacatctcaaacagcacttattctggactgcattttacatgcaatagctattgttctaattatgaattaaatggggggaatttatttaagctactgtactaattgactactatagatataactcccaacattaacaacctgattagatttaggctcagatttattacatgaatatatgacaacccaccatgggggtgactatgtataaaatcatgcatttatattttctggaaacatcaatagcttcagattctctgtaaaatcatggaatgcaaaggagtaaaagactaaaaagtaacagtgcaaattgtatgtgatagtcaagcagcttgtgatttaaagaagggtatgttggcatctatttataatatgtatatacaagcttgtgcaagtaatgtgttgaattgatatgttgtgatagggaatgtatctcttaattttttctcctcttgaaaattatgattctggtttttattttagggagacggaaagactttaaagtgaaatgaattgctcaaattgtgcaattttttttttttttttttttttttttttttttttacaattggagaggaaagaagtgctaaggcaacacaataactttctaagcacttttctgctggtttaaattagttaaattattttgtataaattagatataattctacttttctgatatgtataaaaattgatgaagctgcatggttttaaaataggaaatccacattataaaaagtcattaaaaattctgtacaaaatcacaacaaaataattcagcatgggaaaggtaacaagtagtaaaatgctggttgaaaaatatatatttatatatattttaattggcccattactagtttaaaaattgcatagatcctaattatt

SEQ ID NO: 336963 - DNA, 1000 bp, Homo Sapiens
tcgcgtttgtttttctttatttctttatttcacatacacattagccattcaatggagaagccggagagagtcaggcaaagatggtataacagaagcgcagtgacgggggcggggcggggcggggcggagagggaacagacgggctggctgcctacttgcattccgctaggacactgaaaacccagaaaacaaaacagacagtaaactacccttgtttcttatgtatctcagtgcagagacgggggtggagggcagagaagagggggagaccaggctgaaggaggaggagcagagggagggggacgctaagggggaagcacaccaaatccattagtactatatatagagatactcgtatatactgcgtttcttagcctaagaagaaacttgtttgacgggacgggcggcctttgcggtccgcgatgctggtgctggtcgggcgcacggatctcccgggaggggccgaagcggggctggcccaggctggcttgcggggggaggggggcgccccgagggtgggtggggtgggggggagcagaggcggggctggggtgcccctcgggctctcgattgggggacgaaagttctcgtgactttattgctcctttattttctctcgtgtgggggggtctgttcagcacggtcagggtgggggagtggtgggtcgtctgagccacccggcccctctgggacccagagcgcggcgtccgctccgccagcacgggggtgagaacaaggcactaggtcggccggccagcgcgggggcgggtgtataaggcagtcgacagggctggttgcggggtggggcggggctgtgtgcggggccgtgtgcgtgcgtgcgtgcgggcgcgggcctgggcaaatcgacctgtctgcgtggctggtcctgtcctggagcgtcgagccttcccggtgttccccggagggggtcggggataggatgagagatgttgaatgggggcgggaggggcgccgggaaaggggggaggaaactaccaac

SEQ ID NO: 336964 - DNA, 1000 bp, Homo Sapiens; identical to SEQ ID NO: 157975

SEQ ID NO: 336965 - DNA, 1000 bp, Homo Sapiens
ttttttttttttttttctttttttttttcaaagaagaaccaatttttattcttggtatttaacccccaatgttcctcggaattattgggttttccttgtttccagagaaggcagccaactcttctgaaatatcatcttagttctctcagggttcaacatctaaaagagaaatagatttctgaggcacaacccgttctgggaacagtggcccagttcctgaccctgcaggcatgtttctttcagtctgcagtttattctcacagtatggatgcaatgagaaaacctttctgcacaaggcctatggagaaaacatgaaaactggcaccaaagaatcagctgccatgggaagaatgaaaatgctcgctttctagggccagcattgtgctgcaggagtgaagccaacatccacctcaagctttagtgggtaacttggactctgtccaggacagtgtgactgaccagtgctttccagaaattgtcaaggatcaaatctcaggcttcttcctttcagtgcttgttaaaggttctagagtaaatgtgaattactctcttcatcttaatgatccattccaggtatccatccactggagaatcgtgctctatgataacatacgggtatacatgctctctctctctcttcctctcccccactctctcccactaggctgaaacacatgaatcttttagttccccaaatgctgtcacaaagtctatgattgaaaatctctagtttggcccttcctttaggagtattacaaatctcctcagtgcttcagcaaagaagttgttgaatagtcttgttctctacttaggaaaggcagtttcaaggtttaataaccctctacattgtcttagaagtagccacagcaagtacgatggtccagatgaccagtcaacagagggacaagcaggccacaacttttcaaagctagaaaaagagattcggcaatgtatatttttagtgcttgagtcttttatcattctatccccagaattagct

SEQ ID NO: 336966 - DNA, 1000 bp, Homo Sapiens
tttatgcttccaaaaatttaataaataatgattctttaaaactgtataaactataaattaccatgcagtccttataatttaaaataatttacaggttgaggtagggaggggcccaggagagtgtagaaggggcagggggagggagcgtgtcggcaggtcaggctcttctcacagccttcctgctgagcacacacacacaggccgtatctatccggataaaccgccaggcagcctgcttgccatccatggtcagcgccttgacaaaggtgtgagtcgtggtacaatatgagttccagtgctttgagtcaatgccccggcacccgctgtcaacgggatttgggtcccggcacttggtctcaaaaaagtactgtttgaatacactgttgttaatgttcacctctcccaacaccatcacctccttgcccttgatgtctgtggcggtggtcttatccccaacccacacgctgacactgtcacacaccgagaattcgcccctgtggaagatgggatgggatgatgaccgcttgctcctgtgagtcctgttgaagggggcagcaccaccgacctcgaagtccagatcctgagtgtctgcagcttcacggggaggctgggtgctaaacagcacacggggtgaacggagtcgccgctttttaaacagcctggggtccacagtaatgttgcgggtctgccccgccacgcgtgcagctatcgccgctgccggggcgctgcgggctctgcgaagggcagtgtcaagggaatgctgaagtttagtccagtgggcttgggggatggtgtgtcctgcagggacattgctctctgagtgtggttccgcctgtatgccgatcagaaaagctgtgatcagagtgtagaacaacatggacattacgctatgcacctcagtgtggccaggatagaaagctgctcccttggtaaaactgttattgggtccggacgctgagctgagcttgggtccagcatgccatccagccccttggactgc

SEQ ID NO: 336967 - DNA, 1000 bp, Homo Sapiens
cggggagggagaaaccaaggaggggtgaggtcatggttgagtgtaaattggttctgtcatgtggaggccggaggtgagggactgtggtgggacatcatctggtgccagccccatcctgtacctcagataggtctccgtgaaaaaggagggacatcagtgccagcagtggggctaaagaccagcacagcaacagagactagaaccttggatgcaagtattttgggcaaagaggaataattagtaatctttggtataatttaaggcacatcaaaaaaatcccctattctcaaatatctgacctacaccttgaaattcctaccattggacattcttttgatttaagcctttaactaacaaatgccaatatcctactgctcaaatattgacattctatctgggaggggctgctcattatcatccaccaaatgcccatagatctctaggacagggtaggttttgatgaaaaagcagcgcatgaatattataatgggggtcttagacaagatgatgatggtgaggaactgaggagtaaaactataggactataataaagaagaaattcagagcaccaaaacaaaacattaaggaatgctaatttcctccttaactcccaacttttcctagtcaggccccagctcataggtcaaggagctgacaggacggtgggtacctcaaagcgaggctgagctcataaggccacagggaagggtgcaactcaaatttgggaggttctgttcaccactggggggctagtattgggaaaaggtcctaggacactgggatgggcatgtaatcctcactcaggggtgtataagtctgtctgagggttgggggtaggggtggagggttctgtccttgtgtaggggtggagacttttctattagagaagtccagggtgcatgttttggggaacagtgagggaaaagttgttgttggggctcaggctgggctgggtctgggcctagtggccactcagccagaggacacttttcaatctgga

SEQ ID NO: 336968 - DNA, 1000 bp, Homo Sapiens
ttttttctttttttcttttttaaacacaggatttttattaaaattcttatttaaaaaatcgaaagctttctgcgcccggcgctgttggggaaccgcgccgaatagctgagctccaagttcggggctgaaggcccggaggacagggcagagggctccctgcctacagggttttcttttccatatttgagaaatgtttgcacaataaaataaaaagagaaaggaagaaagcaggggaaaacgcaaaaacaaaaacaaaacaaaaaacaaacccaaacaagccacaaagaaaggagttggacccagacgggaaacaggccggtcctgaaggtcattttggcaacaatcaccaccgatatttacaacgaaaagcgaaatctgccaccagttgtcagaacgtttacatggccataaatatttagcattttcttatttttttttaaaaaaaggaagaaattctctgtatttttaaagtgttctccacttgctttagaagacggctgacaatatcgctactcacacaaacatattttacaaaatgcacgaaagcaggggtggggggtcggtctttttctcgttttcaagtgacgacattaacgctgggacggtttggtccccccggggagaggcaaagaagcgaagctgcgcaaacattctgtaaacacggcgtagagttcagccctctcccaaggttcagaaggagaggcatgggcagagctgggtgggtggaatctgccactccaaggagacgcaggcaacctcccggcgcctccctagtggagccgagagtcaactcgactccataataataattataataataataataaccaccataaggaccgaggcctcctcgccgccaccgccgccggggtggggcctgggcctggggccgcgagtctcgttggggcggcgctcaccaagtccactgctgggcctggaccagggggtgtgctgtcgggtactggggggtgctggccgagctgtactgggcgttgtactg

SEQ ID NO: 336969 - DNA, 1000 bp, Homo Sapiens
tttttttttttttttttttcagcaataaaatcgtgtttatttagtgatatgacaagtagagaaatcaaacataatattttacaaaatgtacaatttatatttttataaatactttaaaagagagaagcggaacacgtgtggtggcattaaaagaatgtctagatttaattttgcagcctaccttgtagcctgacaaaccagatacatgtatgtatacacatatatcttgatcatgagttttcataattatggcccaaggataagttttgggcatgtctacaataattccaaactctcataaaatgtgtggtctctcaccaccagtcatgttgattttgctctatttttctcaaaattccacaaaatgcacatttgaaacagctatcagaggatgtaagcaagtgctttgggcctcagtttactcatcagttagatgagagaatccctgctaatatgctgtttctgcttaattaaaaaacttgggggcctcagcagcttccaatatataaatgtctgagggctatgagggaccagtcatctttgtattgggagttttctgtttagtttctttctattggaaaggagtcaatgtgtcttaaatggagaaagtttatgacaccagtccacttagtaaacatttcattactgtagatacaacacgtttcctagtgtaaaactaaacagaaaagtaatagtcatctctggatgtcatgttgaagagctgcatgtttccttggatttggagcttggaagttcagagctggtttacccaaaaagggagccaatagagaatcttcccaatgaacctcaatatatggttgtaatacttgtacaatgaaatgttaagtatgattctagacttcactgactcattacagtgatattttcttggaattgcactagtgcacaacaaaatatgatgagtgcaatgtgaaacagtctacaaagtaaattatatacttgttttcttaaatttatagaaatttgcatttgtaataaa

SEQ ID NO: 336970 - DNA, 1000 bp, Homo Sapiens
tgatgctacatgatgaactaagcacatttataatgataaaatgagtaaatataatagcggcaatgctaaccactgattccacgagatacactatttgtcaaaacttacacagctacagagtatcgacgataaatagtcattaccaattaacacagtttactacagcttttctctttcatttaaacaagcatatcattcccttttaaaatcattctctaaataaatatttagagatagagaactctaaatgaaataacagtccaatgttaaaaactaaaaaaaaaaaaatgagtctactcttacagtttgacagaaatgaattattaatagtggaaggggaagggatcaggaaataatttcaagttctcaatgtccaaaagtaaattgcacagtaaatcaatatgaaatgaagagtccatatagttcaatgaacaaaagggaaagttcatgaggacaaagatcacagttcagagagaggctggacgaaattcagacatggagcatcacactcattgttctttaattggttgcacagaaaggagcagctgggatgccatttagcttgctaggatggacgtaatcaatgggttgaagttgagatggaagtaattctcttttgtaattcagttgctcagccagatgatccagaggtagccagcattttatttttgtccattgaatttaagactgcatgcacagcatgaggaggtgcttggggatggatgcccctatgagtggccttgagtgggcaaactcagaggttaacagatggtgtgtcaaatggcctggacagttggcactcaggagaggtacagaagagggtgacagttgttgggtcttgggaacaaaggcttactctgaaatgacctgtcaaaaagcctgacaaaggtagataacactacctctcaagataagctgcctcttctaaataagcatgcaggaaatactgtctggttggtgacataaaaatgctccacaaaacatgcaaattaccgagtat

SEQ ID NO: 336971 - DNA, 1000 bp, Homo Sapiens
ttttttttttttttttttttttttgcagggagagccggcgtttaattctcagggctacgggcagagccgggcctactgtcctgggggaccccggttgtcgcagggtccggcgccggcagctctgccagtcctcagtcccccttccgcggcagcctggtgcccgcgggccccgggtagggcaggcccaggggcgggtaaaaggcctccgggagcgcggggcccggacccagcctctgcaggtgcgggtacaccaggcccagctccgcggggccgtagcggatggtgccgggtgtgcacaggccccgcaccaccggcggcaggaagcccgcgtgcaggagggtgggcggggggtccccgggaggcgccaggccccatggccgcaccggatcctgcttcaggacccctgcccggatgacagaggtgaactcgggcctcggtgtggccgggtggctggagggatcctcgtcgccactgtcctcggagcctttggtttccctcgggccgggctccactttgatgcgtttgccctgggtctggggggcctcgttctccgctggggcagcctgcttcccttccgtcggaggctccggctctgtgggctctggccccgggctggatgcctcctcacaggccacgctggctggaagctggaaggcatccaaaggagtttggccaccctcggcttggctgagcacgtggctgacccaaagcacatggtgctccccggggctcttcccgctcccagccactgtggccacagactgcagccacacgaagcccccggcacgctgcagccaacggtagtaaccagtcatcacctgacccttgtccagcaagtccacgtggctctggcggatcctcgtggcgtcctgtccgtggacaaactggtagcagctgcggcccaccagctctgagggccccaggtccatgtggtcgctgactctgctctcacaagcaaggatggtgagacccaggctgagacggaagacgatcatgtgtc

SEQ ID NO: 336972 - DNA, 1000 bp, Homo Sapiens; identical to SEQ ID NO: 157978

SEQ ID NO: 336973 - DNA, 1000 bp, Homo Sapiens
ttttttttttttttttttttttttttttgaagttaatgaaaatatttattcaaacctaactgtagtacagtctcaagctgagttaaataaacattaactatatgatatttagttccttaggaatagaccactgccacaccatacaaatttcttaacatcacaagtttttgcagtaaggttcagcaattaagaagacatgatttctacactgagaaatgttgtgttaaagttggatggatttatttttttaaaggcccagtacaaaaaaatggttgaggaaagtgactcttcaacaaaatatacacctgtagaaaaaaatccctaatatactgatatttaattgaacggaaagtactaaagagaacatactttaatatctaggcacaattggtcaggtactaattataatttctgttctcatttaaaagtttaaaccaattcttcaactggactgatgtgtgtgagtctaatacagagaaggcacctctctcatctctcactctccttaaggaccttttgagagaaactctttgtaacactttaagggacacagacaatgcactatatctaagtatagatatagttatttaacatacccattgtaggagaaactaaaatataaaactatgatttctctttttacatcttatgatggacacaacaccagaagataatcctccacataaactctcacatagaacacaagatttaaattatatgtgcattggtcactacaatgtaaagagttctatgaattagtgcaattctttaaatccccagcatttaggggaaaagtacataccgagaaatctctactacaaaccaaaattttatggctcaatagtctaaccacttaaagttctgtaaaaaatcttaagttataaatgaaagatcagaacattcaataaatggtttacaaaattctctctttaaaacaaagagaacagagtgatcagagtaggtaaagtgtgaaattccagaaatataatacttacagcaa

SEQ ID NO: 336974 - DNA, 692 bp, Homo Sapiens
agcttataatgttgactttatttcaccgtggaaattttgtgctcaaaggtaagaaaccatcttatataaaacaatcaaataaatacataaatacattaaaaaaatgagtcacttcaaaggcggccacagggttgaggaaaaagccccttgtggaatcagaagcaggtgtctgcagccaggacttcctcttaatgccgcctcagcactttgcagcccaggccactggaggagctgatccggtccatcttcctcccaaagcagccagacccttgcaccatcttggggcttcgtggtgcccgcagggtgtagaggaccattttgcggtgcccacggatgccctcggtggctacctcccgggacttccagacacctgtgggacgggggctctcctggaggggctccagggatgtctgctccacctgcagctccgacagtttgccctgcaaatggttgcgctgctcctgtaacccggacgtttccaagtccgaggctgaaccggggctgcccagcgggtgggaacgacctcccaggaaagccagatgcaagaagagcaggagcaggagcgcccgggaaggtgctgtctggggatccatgtctctggagggactgcggaggctgctgctgctgcttctgctgctgctgctgctgctgcgatgcgtccgggtttgcttcccacctgccctcagcctgcc

SEQ ID NO: 336975 - DNA, 1000 bp, Homo Sapiens
aatttgttaatatactatatttgaggtttgaaaatcactgatcacagctattaaataacaatgcaccaaagttttacaatatttgaacatctgcaaatgtagagctttctggtatgacacaaatttgaatacaaatggaagttcattgaatattaggtttatcagtaagctaggggaaacaaattacatacattgtataggtagtaacctatgaaaaaagtggagattaggtaaaaattattaagtgaaattattcatatgctttcagtttcatctttctcctgggaaagccccaaaacaggcctctggaaaaccaatttcatacatgtacaaaatggcatctgctctcaaatagatatagctttccttcaatggtagataagtcacagacgtatctcagacattcatttcatgcataaggatttttgagacatctattccactgaaatattataaaggagtctacaaaccacttctaggaaaaaggcacttcactgtgaaaagttggatttaattacgtcaaagttgtgaagactaggatagactcaaaattcagtattcatttttgtatttatgaatctagagcagatgccagtttagagaatagagccgataacattataaacaaaccaaacagcaataataactatattcttggcaaaacagtaatttatgacatttctccaaaaattaggcatagttctaagttcaacagtaaaaagaaaaaaaaaatcaccagcagttgctactttagagctcaagacactgttttcaatagaatttcacgtttgcggtttggttctctgtttcagacatgaactgcttttcagatgaaaaacctggggtggcagaggtgtgttgaggtgtgtttgtgctgtggaagaacccagggcagaaaaataacagggagtaacaagaggtgcattctctggtcagacagccaagtgaggaggtagttattctgagaacttctcaaatagagattattgtactaaactac

SEQ ID NO: 336976 - DNA, 1000 bp, Homo Sapiens; identical to SEQ ID NO: 157979

SEQ ID NO: 336977 - DNA, 1000 bp, Homo Sapiens; identical to SEQ ID NO: 157980

SEQ ID NO: 336978 - DNA, 1000 bp, Homo Sapiens; identical to SEQ ID NO: 157982

SEQ ID NO: 336979 - DNA, 1000 bp, Homo Sapiens
ttgttgtgactatttaatgagagagtgcatattaaagggcttaggacagaacctgagcccgaagcagacagtcaataaatggtgttagagattatttattattactcttaggggaatgaattctggacaagggatgtgaaaattccagaaaccctcgattgtgaccaaaatgactgtaaaatatggagcacagcctgtcactatatgaatataaatggcctttggcaagaggtaagttctttggaaagaatggtctccagctatatgtctcaagcttcatggagaggggcagggatgaatggcagggaggaagcaggaggtctcaccagcagaatccaggagctcactggggacccatcccaattcttaaagcatgggtaattcagccaggcctcagcctcttgtgccagctgcctccaaccctttgggtctccaccacccaagtttcctgtagggtccgccgggtccaggatcacaggcctgggtttcgtgagctgccttctcaggtacttttcaataatggggtttttaaagtcataatactttgtccagtagatgcagagttgctggtagtttatgactaattccaagaccgtccgaaatccctgggctgtgttgaaatgtgttttcatgctccctcgctcccaagcatagaccgtcaggagctccagggcatactgaggtggcagcttcccaagcttcttcttacaattttggtaccagtgcttgactaggcggatgaggctcttgagcttggtggggcgctgcttcaggaagtctctctgtagttctgtgaagcaggtggagaactcgccctctttctgcaggtcggtgcactcctcgatgagcttgacatagatttgggggttaggtttatagccgccagtcaactgacccagggcatcaaaggcaggcagcacatcgaactccaccccctccccgagctggagcgaactcagtacgaagctgagcgcacgggggttgccccagcgtggagcct

SEQ ID NO: 336980 - DNA, 1000 bp, Homo Sapiens
aaagtggatgacagcaactatttttaaaggcaggctgcctgcagagagggagttcagcaaggcaagactttatgaaagggtttgcagtcttgattgatttcaagaagtccaagaagcaagggaaggaggaatagggaccatcaagggaagaatggatgtgagtgactctttctcacggtgagccgagtctttaaaagcgattgccagatgatctctagaagtttcttttagaattattattcaggattctatggcttctggatgagaacatctcattgacaataggatggatcctagctccacaacttcctggtgtctgcattgtctaaaaagaaaaacatacgtgggagagcaatgtctcctaatagttacaatcattgcttaaaagagttaggggaaaaaaggggggacctgtatctgggaaggtaactattgccagagacaattttttggtatttatttataatgcatatcttaataattagagctaaccccacggttggcttggccacctcttccctacattccccccagggttggggtgtagggttcctctagtgcaagggttctcacctagggcagaagacacatgataaagtctcaagacacttttaattgtcacaactgggtggcatctactgggtacaggccagagatgctgctcaacatcctacaatgcacaagagagcctccaaacaaagaactgtctagccccaaatgtgagtaagtatcaaagttgagaaatcctgctttaaagaaagaacctggtggagagaaccaagtatatctggagggaggatatcctggtggaatatatcaggtatatcttggtaggtagggagggctttggagaggtgtggcagacatccttgggtggccagtgcaacccacgtccacagtcatctttgtagccaccttcaagttacaggtagccacatgacatttctgagcaatgaaatggaagaaaatttgcggatgaaacttctaataaaatcactgt

SEQ ID NO: 336981 - DNA, 1000 bp, Homo Sapiens
acacacaaaccacagtgaccttcatgtgtgcaaagtatagttgttaaaaacaaaacaacagaaacagaataaataggcgtggcctctgcggggcagtgccaaagcagagctccacatacttaggcctggggaggaagggctctatgctccaacaagtctagggctggcaggcagggagggaggtggggtctcatgtgttggccctcatggcaaagaatggagatctggtggggccgatggagggcttgagaaagcctgatcaagatgcggctgtggcctcagccccctcctctgagtcccacacctctgactgcaggtaatcagcaaagagagccctagcccggcgcaggacgcgccccaggtggtgttttcgcacaaggcggtcaaagtgcatggccagctcattataatccagcccattgcgcatgatgtggtcgcggtgctccagcaggatggccaggcagaggaacagcatgaatgggttcccccggccaaactcctggggtgggggcaggcccattggtggtacaggtggcagggactttccagggtctttcggggagcctacctcttgcatcaagggggatcctacagccatatcaccagtgggagaggcctcctgggtggatggtggagatgaggaagatggggaatcagggtgggaaaaggaggagagcagtgggtctggggagttcaataaaggctcagagagggacttggagctgataagggcagctgggtggggcagctggaccagagggtccctcctggagcccatgttatccctgagttgctggaggccatccaagctggcctgtctcaggagacgccccccaccaccaggcccctgactggctgtggccaggtggtcaacagcatcttcaaaggtactacctcctccaccagcaggcctcagcatgtgcctctgtcgcacgggccaccccctgtggccaccaaaaccagcgtctgccacttggctggggggtccaaccagctctac

SEQ ID NO: 336982 - DNA, 1000 bp, Homo Sapiens; identical to SEQ ID NO: 157983

SEQ ID NO: 336983 - DNA, 1000 bp, Homo Sapiens
ttttttttttacttttacatgatctttattatttaagaaaaacctcttttaaccatttatataacagaaaaaaaatagggaggctggtagatcatcacatatatagtagctaaaatatgaaaggccagggaatttattattaatgaagtcataaaacagacttaaccaaaagtgtgtgctaggaaacaagcagtttcacttcagagacttcattgcaggaacccagtttccttatgtggaaaaaagtgattataaataacagttatctgaaaggtggttgagaggattaaatgagatcacctatgcaaacaaatacatgtaggtatgaagacatcgtctggggtgtgaaagtttagttcacaccagaaccttcctttaaggcttaaaaacctcaaacagtatttcattcttaatacaagaaccaatgtttaaagcataaaatccttaattggagtgttcagcccagttgattatcaaaagcgatttataaaatgcttcaatactgatgatgttaaagcaaccaaaactttgtgatgctcacagaggtttggcttccggggttatggtccaaagtcatttgccttctgagaagattgcagagatgtcagatacttaatttctcaaacaacttggcatcagccttctatgttttctgtctatcatagtctccaaccatcttcttgatgtgtgacaatttgctctttaactgcttgcaatgattcttcttacttttgtaatctgcagatcccttcacttgcttcagtctattgtattcatcagcagcagccatgtactcttcactttcttctctatagtcatccaattctttatccaaacgggagagttctttattgatctcatcaagttctgattgtaagctcttgtattcctgtaggccagtgtcaaaattcctcttgtacagttgtctttgttgatctgaagtgataggtggatattccctgatccagtcctcctccagctcatcacaggactcgccgcc

SEQ ID NO: 336984 - DNA, 1000 bp, Homo Sapiens; identical to SEQ ID NO: 157985

SEQ ID NO: 336985 - DNA, 1000 bp, Homo Sapiens; identical to SEQ ID NO: 157986

SEQ ID NO: 336986 - DNA, 1000 bp, Homo Sapiens
ttttttttttttttttttaaaaaataatttgaaaactttaataatgtcatttatatagttataaaaccataaaatcttttaaataaggtacattcaatttctcagagcatctaatattcagataatttatatttcatatgttttccaacattaaacaattgactaaataatgcattttctataaaatgatattacagcttatacagataaaattataaaaatactccacacagaaaaatatggcagtacctattagaaaaatgctacaaactttccattaaaaatatatattttctctttcatttgtcataataaacagaatataattttctttctaaaattaagtcataccgtttctttataggatgataatatgtacaaatcttatatctgaatgaatataaatagcaatactgtaatagtgttacagatatattagtaacttttacagaaaaaaatatggctttctaataaaagcctctagcatagctgaaatctcaaagctatttaagttagacattcccatatttagtaaggcacaatggagtctagttttttttttttaatttccagttgaattactgcaagcagtaataagggaaaatatagtcagtagataacgatccagatctgacagttggattaaccatttggggtttattggaggagatgttagtcctttctccacatcatagtttcttttagtaccctgtggcaaaattagtcactggtaatgagaaagatatcactgaaagcctcaagtgcctgagaaacagtttactcatccatgggatctcgccaattgtgaggaaacagctcaatggccatttccagttataagcagcttatttttactgattggacctggttacctatcatttctaaaaataacttctgatacaatttgtacattgtgaagctgtgaaggaacctgatggtcttctttagactctgagtgacagttttgggaaagtggtacgtctttgagtgctttagtgcg

SEQ ID NO: 336987 - DNA, 948 bp, Homo Sapiens
tcaagccagtgaccgcctccctgtgagcatcctccagatggcactctgcacatcagggtttctgaagctgtagatgattgggttcagcatgggattgatgacagtgttgaaaattccaacagctttatccttgtctgaaagcttggttgaacccagtcgcatatagttaaagatacctgaaccatagaatatggcaaccacagtgaggtgggagccacatgtggagaaggctttcttcctgccctctacagagcgaattcgcaggactgcagctgccacgtggatataggagatgacaatgagagccatgggggtacctgccattataaaacccacagcaaaaagcagcagctcattgagttgggtgctggagcaggagagctggaagagctgtgggaggtcacagtagaagtgattgatcacattggggccacagaagttgagcgtggacatggccacagtgtgggtcagtgcgttggtgaaagcacaagcccaggacgcagccaccaacatcctctggactgtctgactcatgcgggtgctgtaggtgaggggccggcagatggccaggaattggtcataggccatggcggtcagcaggaagcagtccactccaacgaacagatggaagaagaagagctgggtaaggcaggccccacagggaactgcacgcttgcgggacaggagacgactcaacattgatggaacagtgacgctgatgcacccaacatccagcactgataggttccccaggaagaagtacatgggggtgtggagtttgggctccaccaagacagctgccaggatgctgaggttgcccctgaccgtgaccaggtaggcaaagaggaagagcacaaagacaactggctgcagccctggcgcctccagcaagcccagcaggatgaactcagcaatgactgttccattggccccagattctggctgcat

SEQ ID NO: 336988 - DNA, 1000 bp, Homo Sapiens; identical to SEQ ID NO: 157987

SEQ ID NO: 336989 - DNA, 1000 bp, Homo Sapiens
ttttttttttttttttttttttcggagggatttagtaggagtttattgccagtctgtgtctgggcagcggtcaccggactttgtccttcctctggggcataggtttcctccagaggaccaggaggacaagggtattgatagcaacctgcacgtggccgaagacggggacgccaaagctgcggtacaggaggccgccgaccgtgggtcccagagttcggagcagtggttgtacagaggcgcagaggcccagcatggtccctgtgtccgaggtggagacagccttgatcagcatgctgtcggtgaccacgttgagggtgcagaggctgaacaccaggccgggcaccaggaggcagaagtggaagacgctggacatccaggccatggccaggcccaccacgatgaagaccagcacgctggcccggagcagcacctcctccgagaagtggctgctcagctgcccgatgaccaggccctgggtcaccatctggaggagcccgaagaaggacatgaggtagccagcttgggcggcctccagctggaagaagtccatggagatgatggagaacatgaccatgaagagccctgtggggcagttggaggccaccttcaccaggaagatcctcgggacgtctggcagccgcagcagggaggcgatggccttcaggtcgaacacactggcccgggggccgcctggcagtggagcctgggcgtcagttttggcccctttggtgctggcggggatgcaggtgaagctgaggacagctcccaggagggtggccagggcagccaggatggccgggcactgaatcccgtacgcggagaccagggtcccgcccagcagggagccgaggatgactccgacgccgaagcagaggcccagccggcccagggccgcgggccgctcctcgggtgccgacaggtccgtgatgaccatctgggcggctggcagcgtgtgcatgagcgctccgggcaggcgcgaggcgaagagcaggtagacccc

SEQ ID NO: 336990 - DNA, 1000 bp, Homo Sapiens; identical to SEQ ID NO: 157988

SEQ ID NO: 336991 - DNA, 1000 bp, Homo Sapiens
tttttttttttttttttgggttcttgtgtttacagtttatttaatggaaaagagattggcctattctggttttgatgcctgctttgccccgggatgagaaggcttccaacatgtcacttagaagaaaagacaagggttttccctggtttctgacaccagaggggcttaggcttcttcatccacagcagagttttctgggatttctttttttagagaaagaggacttgtttgaggggttactgagttgacagaggaatggtttccatagatgggaacaaagcggttgtcaaaagctagaggagtttgttccgggagctggatgacggggctggaggacagcatcatcctgttttcagcttccatctgaagacccaagttacccatcctggggtgagtgcccacctcagaagtcaaattctcccctcttaaaggcatagtctgcccttcaggggtgactgatatgtttctggaggggacagtcaccttttcacgggccacagccttccttctaggggccactgtattctgtctaagggtctcagtctgaaaatggacaggggtcatagtcgttcctccagggctcacagactgatgactcacaggggtcacagactgatgacccacaggggtcagggtcttttccccaggggtcacagactgataacccacagaggtcagggtcttctgtccagtggtcacagattgatgacccacaggggtcagggccttctctccaggggtcatggactgatgacccacagaagtcatggtcattgccccagtgatctcagtcttctctcctagagctacagtgtgctttccaagggatacagtttcctttgtaggggtcacagttgtacctctaggggttatagtcatattttcacactttccgtggatctcagtgaccccagcctctcctcctgggggcaaaatcttactatcagtggtccatgccgtggtcacagccagcctttcagggtcagtgcttgaagaattc

SEQ ID NO: 336992 - DNA, 1000 bp, Homo Sapiens; identical to SEQ ID NO: 157989

SEQ ID NO: 336993 - DNA, 1000 bp, Homo Sapiens
tttttcttttttttttttttgagatggagtctcgctctgtcacccagcctggagtgcagtggcacgatctcagctcaatgcaacctccacctcccaggttcaagtgtttctcctgtctcagcctcttgatagctaggactacaggtgcccgcaccatgcccagctaatttttgtatttttattagagatacggtttcaccatgttggcgagtctggtcttggactcctgactttaagtgatccgcccgccttggtctcccaaagtgctgggattacaggtgtgagccaccacacctggccaggataggcagacttttaaatggcgtctggcttccccgatagcaagagttccaagggacagcaagtagaagctgtcagcctcttaagatcaggatctgaaactgacacaatgtcacttccacttttggataaagcaatcagagccacccatattcaaggggaggagataaaacccttaggtcttgggggacttgagtgtcaaagaatttgtggccacctttagttctccacattctccagccaggatgaaaagggtttgtttttagttggacattatcctagtctgacctcataatgaaatgttttgcattcatgtagatctttacacattaaaagacagttcatgtgcactgtctcaatttgtcctcacaatatctctgagatagtagttgggcaacaaggagacagaggcacagaggtgagaggcctagggtcacacaacttcctggggacagagttgagacttacatctcaatctcttttctctgagtccatgtagagggattctggtttgtttaaccaggtcactttgctctcagacacagagagcaacagaagatgaaagcatatttccctttggctgaaaatgtggccacagagctttgcaggtgaagttcaagttgctggtaaatgtcatgttaacatggctactgcagcccctgctattggtaaggactcttttttttttttgggggacagt

SEQ ID NO: 336994 - DNA, 1000 bp, Homo Sapiens
ttttttttttttttttcttcattcaggtttctatttttattcaactacaagcaaacagcacaattaatgcaacattcagcaactccagaccagcttttcttacccccatgaagaacgatcaatttaaaaaacacagatctcaggtttcctcccaagctgtcagcgagcgctgctaccggtctagattgccatgtcccaacaacagcaaagccaccctccctcctgcttcttccaggattgctctttaaagggaccagagtgacatactgatgcctactgaggcatctgagatgcactgtgttggaggttagcctcaatgccagcctctggttgtctaggtgagtgacatcaccataaaatcacattgtgtaccattctggactcaggatcacaaaggcagaggcaaccaatctttttttttttttttttttttaaacctcccttaaagattctttgatgctttgctctatcactgtagacctggtctttttccccccagttttttcttttttacattctgggttgctattttcagattaataatttgatgaccccatcacagtaccaaaataccccccaaaatgaagttcaaatttgatcaaaacataaatcagagtgagtgagtaaaattataaaggccaggcagcaggaaaagtcaccctcaactaccatctgactggtcaggtctcacccatgccaaggggggcaggaagaggagaaatctattatacatgcaacactgaactggggaacatggcttggggcctccaggacagttcaggtccccaagctaaccccctacttcccagacagctgctcgtacagtttgggcacatagtcatcccactcggcctggtaacacgtgccagccaccggggccctgagctcatactttttacggaaggacgccaccttgaatttgccacggtggtctccagatcggttgctgaggatgggctcgtcacactttagcggcctgtcctgctcgtaaaccagccag

SEQ ID NO: 336995 - DNA, 1000 bp, Homo Sapiens
tttttttttcactgtttaaggaatttttattaaagcaagaattttataatccaaattacgtttccttgctcagttatcaattctgttacttaaaacagaactgacattctgagctattccacagtaaagaattacaaaattaaagaaaggaatgctttaaatttttgtactttgctgaaaattctttttcccagggtctataaaacattaatttgtttttatattttactatttttttgtgtttttttgtttttaaatcaataagtaatctaggactagcattatgtttgctagacctggcatttgctcggtacataaggttcaaagtttcctttcctttttttatttattttatattttgcaatgttttttttccataatatttaagtttttcgatgtttagatatttttcttcggtgaagcacaagtttcttttcatggtccctgatcaattttaaacagttggaacaccggtggcactgttaactgctttctgggcagcctctttagcttggtgggcttgtagtacagctacagcttcatcaaccttagaacggagtgactctggagactcgagcatatgaagaagttctgaattatcaatctccaacaacatgccagtgattttaccagcaagagtagggtgcatggcttgaataagaggaaacagccgttcacccaacatttgcttttgctcttgaggaggggcagatgccaacatggaagcagtcaaaggttcctgaccttgtacatgaacagcaggctgttgcattgtaacttgtggctgtgcattaagatgttgctgaggattgcgaactcctgcagcatatttatactgtggaacggtgcggacagcaggagtagctgcagcggctgcagctgcaggacgtggacccattgtctgtgttgatgtgttagcaacacgctgtgttgacatgactcgtggaacctgtgaagaagctggtctcatagtactaaatggtggtctaggagcagctgg

SEQ ID NO: 336996 - DNA, 1000 bp, Homo Sapiens
ctggtttgcatagtctgcacgtttaatcactttaaaacctctaacattatctcatgtccattaaatagaaccagcaatgctgggcctgtttaaattacaagaaaaaaatcactgtgcaccaacccagcatcttacaaaaccagccgggctggccacgagggcagggggatgggagaggagggggcacccctgggcagatggctgggtaccaggaatggctagggtagaaaagaaaaggggactcccagatgggaggggactgattgtcctaatgggaggggtgcaaaaggcacgtcagaagaggaggtttgaggggggcatgacaggtcagtgctttctccaccagggcacagtgttgggggggctcagtgccaccacctgcccacctctggcacttggagagccagtgacctatgaacccccggcatggcgagccccacttgaaacacagatgtcagcctgcccctcccactgggaccccctttccttgagcccgcctggctggcccgcctcttcaggacttggggctcaactattcctcactcctcagcaacatgctgcagcccccacacctcagggccagggcagccagggaggagcagggcggacggtgggtgtgagaacgtgggtagtccagctgctacccccattaaaaatacaaaaacaaatcatcagcatctaaagtgaaataatcacaaagtgaaaatatatcctcaaacagcccctgagatccccacaggggaaagcagcatcgggtgggaggccagagaggccggctgggccagcgcccctccccaccacccacccaggggctccaggtctgtgagtgccaacagcccaggcagcccgggctcagaaaacagggacttgggccctgacgggagaggcgggtgcaagagaggggagggtggtcaggacaccagcacagggttcagccagagcttcggccttggctgcgccagcctggtggccagtggtggtggaggcacggagcacaggg

SEQ ID NO: 336997 - DNA, 1000 bp, Homo Sapiens; identical to SEQ ID NO: 157991

SEQ ID NO: 336998 - DNA, 828 bp, Homo Sapiens
tttttttttttttttttcatgctccaagggtttattaataacctctgccagagactctgcccccagggagcagcctccccatggccgtggtgcaggtgtgcagcaggaaggggatggcgacacagatgaccacgtcatcgtcttctgagctgtggttattctttgaaagggcaggaggaagtcccactgctctggaggtgtggaagggtgggagtctggtcttcctggaggcggaggtgagctagaaacggcacggctcttccatctgtttcaagtccagcaagtaccataggtgcctgggcaggggcctgaaagccctgatgaatccctgcatgatctcatcgtcctccaccaggactctggccaggtactggcacatcatgctctggatgggggtggtggtgtcctgtaggcagagaaacaggaaattgtcgtagtcagtatcgagcagcgtggcctcgttcgccaccgtatagttgatcttgaacttctttggattctcagtcttctctccaaggaccttcttctcaacacagctgttgttctcccatctgtgcagaacgatctccaggttgtcctcgggggtgggcaacagtgaggtgatgtggaccctcagaggggccttcagtgtcgccatgagggagatgttgttggtcgccatggccatggagtgccaggtccctgccaactttgggagctccaggtcctgcttggtctgggggatgtccatggccgggacaccacagaccagggccacgcccagggtgagcaggaggcacagcatggctgcggctgtgggtggctctgagctctggagccagagggatg

SEQ ID NO: 336999 - DNA, 1000 bp, Homo Sapiens
ttttttttttttttttttcactgaggaaggagagtttaatgttgtgggaaggcagcaggatgcttagggtgcgggctccagcaggggagcaccttggccctggtcttgggccagcagacgcagaagcagggagtgcagagcccggcaaacaggtgtgtagcccaggcggctcagatgcaggtaatcatacatgtcatgatggctgatggtgccatctgagtgcacaaagccagggtcggcatctaggaagtgggcccgagggtggccagccagtgccgcccgtaccagctcgttcacctgtcggttcttctcccgaagtgggttgggatgttggcctcgcggaagcaggcccagcaccacaacccgggcctggggctgtcgctcattcaccagttgcacaatggccttgatgccaccagtcacctgctctgctgtgtgtccgtggttgttggtgcccacccagaccaccacaatcttgggccggatgtgttccagctccccattctccagccgccacagtacatgctgtgtgccgtcaccaccaatgccaaagttaagtgcatgcagaggagagaagagctcgcgccagatctcgcactggtgcatgagctggaccaaggagtccccgatgaagacgacttcgggttccttatctttgctgtcagccacgaaccgatggtgcagggacatccagcgcccgtcgccctgtacgtcctgcaccggcgtgggcttgctggctgggttctcctctccactcatcttggcgccgcagctcctgcaggatgagcgagtcgggtcggcccgggagtgttccgaacggagctggctccgccacgcccactcctacccctcgcggcaacaaaggaccgtcccaacgctagcacacccgcggaggacgaaggccgatacagggcgccgcctcctctccagggacggaagccttcacttaggaggtaggtggaatcaggaaccttcgcttcccccacgacggccgcacagt

SEQ ID NO: 337000 - DNA, 1000 bp, Homo Sapiens
ttttttttttagaatattttcatctccttttattgacagaaatagaaatttgtgctgcagaggcagtagtacctcagagcatgagaaggtagtcaatggggctgacatgacaagccacaatgctggccaggggtcctaccatagtgggagaaccaaaaccacaaaaatagcaggaggtagcaaacatccccaacacccagtgtaagcatttccatttgcagagagcttggccatgcatcttaaaaacggggtcccctcacagctggcagggtatcatgtcaggccaccaaatccatccagaactaacatgcagtctctaatttggagactctttattgtgaccaaaagatttggaccattagaagatccaagttaatctttcagctccttatcctaggcagaaaaaggggctgagttcctgaaacatcacacaagtagagctggacaggtgctgatgcccagccttgctctaaaagtagtcaccattttccccgacttctcaacactgctctcactcagtatgtgccctagaaaacctctcaatgttataaacaagggacaggataggggcagcagcctagggtatgcagggaatcaaaagctgctacatagccgagagcatttcacaagaaacagcatgggaacactattgggtcaaggtcctcccgaacagctgctagaagcacacacaaagaaaaatgtggttgttctcccatgtcaggatcagctgagccaaagtcatggtccaggaagctgagcctcttcatgtccctggcagattatcaaaccccatggcattcccaagctgttccagttttcaagtacaatgaggtgtctgggcagttgagtcacagaaaagcaagcactaaagaaatctcaattgattacaaattgataatattatcaaaccataaatttatatagtcaagaattaattgtgggagatggttatgaaggaggtgaggattttgacacacggaagactagaaacatttattta

SEQ ID NO: 337001 - DNA, 1000 bp, Homo Sapiens
ttttttttttttttttaaaaagtttatttctagccctgaaagaacaaaattattgaacaaagtcaaaatacagcagttaatgtcaatgtataacaattaaataattgaacgggattaaattaaaaataaaaggcataaaatttgaagacaacagaaaagacaaaaactacttttgcttaattccatttctatcaaaacaagaaaaaaaaagccaatgcgttccaaccaaagatgttgaattccacacgtaactgtttctcttattacttctgttctcttagaaacacttctaagttctaagagaacagaagtgtgcttgacagaactatcatccatttctttctgcctctgtcttggcagctttctagagaagtgaatgggaaagacttcggttctttcaaggccaggccagcgcttgcttcttctttcgaactccaacctcatccaccacagcatctttgccagagtgttcaatcaatgtgttgactgagaaaaaagaatgtgtgtatctattttttcttatatacacacactatcaaaaaactgattttaccagtttcaatacctactgtgggagcagcggagacaggaagacaatctgctttttgtattactatgaagttccactataaaaaaccccaaatgagtattaatctggattttagctataatctataatattttgacactgacatttcactagatgtggatctcagtatattttaaaagatttagactcaaaaatggatgcaaattctttaagcatctattttgtttttttctaattttagctactacctgatcagatctaaaattattctggctagaatacagtatatacaaacatgtatttaagtgagccctaaaagaaatactcataggtggtttagaatcgcttgttagaggcacaggttcgtttacagttgctggttactagactgtacgcagctggacacttctatgttaaagggaagagaatgaatactatgtgccaggcagt

SEQ ID NO: 337002 - DNA, 1000 bp, Homo Sapiens
tgctttctttttttagaaaaacattttgacatcttttttttttctggacatctaatgacaatgcaagtgaaaaacatcacattgggtaaggagttttgaaggaggtttgaatgcaagagggactactctctaacttaaaaacaaacacaacactatgaagagggagtgtgcatctttgagaaacctttttcttcaaagtgaatgcacaaaatgaggggattcactactggctctttcgcttcacggtggaagtgaccactttatggtcacttcaacattgctgccctgtttgggctgcgattcaggcttacaaataaattacataatctgagggagtaggaaaaaggcttataagaagtttctattcatttgaaaggtaaagaacccccaccccatttgactgtcttttcttccatctttcctgcagcagagttttatttcagtcttactcatgagggagatggtgaggtgtaaggcttgcagtcttagcggctgctgttcttaattgcttcctttgcagcgataatcagaggagtcaggctggagagaggcttggctaattttaaaaatggatgctgcaaaagctccttggcagatcctcgcctatccacatccatctcaagacagcgatttaaaaagtcacggaatacagctgacagtctctcaggattctggagctctggagttccattagtggctatcagatacaatgccctgagtggattttcattaaggtaagggggttcaccttccaccatttcaattgccataattccaagagaccagatatcaactttcggaccataagcttttcgagtcaccacctcaggtgccatccaatatggggttcccaccatagtgcttcgtttactttgctcaggagtgatctgggcacagaacccaaagtcagtcaatttaacagagccatccatcccgagaagaatattgtcactctttatatctctatggatcacctggtttgagtgcaggaaatccaaag

SEQ ID NO: 337003 - DNA, 1000 bp, Homo Sapiens
ggggctgttcacgctgtttatttgcttctctgggaaaatcaagaacatcgggggcctcgtcacacaccagaagcagagggggttatagcaagggcacttcagcgaaggctcgcggctcgagggactcaggcagactccagggaggaggagggggttccacggctgacgcccaggtcacccccgagagggcctctcctcccagccacccaggggcagagcggaggcagggacccaggctcccatccgaggtggcccctgtacctgccctgccgaggctgcaggtggtgactggaccaggaggtggcctgagcactgggcaccaggctggaggtccctagggcagggaccaagttggggcctggttgtccaaagccaacgtgtgagacggtgtctgtgagaatgtgcacgaatgtgcctctggggacgagtgtagctgcccccaggagggaagccccttgccacttccaatgagagggggcttgggggcaggctcacattggtctgggtggcaaatgagggtctcctgctccaacccaagaggcttcctgtcccaggctgtgtccctccctccactgcccggacgtgctccaagcccagtagagctggcaggtggggcctgatctcggggtatggttgggaagacccaggaccctggtccaagcaggatggagaagaggccgggggcggcccctggggtccccaaattagcaccaggaggaaggagggcccagtgggggcgggagctcgggacaaggagtggctcactcggtccctgccctgtgcagggggcaggtcaatgacccctggttcgccccgtctagaagatagcccaggggttaccggcccctcccgggtgggggcatgtccccggggttccccctcccccagactccattgtccactggttgggcccacacagggcataggggcacagcagaggggcctgtcctccacccaagacctttagcccccaaagaggcacggcctcaccccaactgcc

SEQ ID NO: 337004 - DNA, 1000 bp, Homo Sapiens
ttttttttttttttttttttttttttttttttttttttttttttttttttttttttgaagcgtacaagctattatatattttcataatatagaactttaaagtatagtaatcaacagtggcaaaatatttctgtctctgacattattatttgtgagatccaacctgtaattgagatcagagaaaacagtatgggaaaacaaatccatgagaacaggataaaaatatcatgaacagcaaaatatgtctgagtatttaaaactgtatagaaaaaataaattagatgaacaattgtgtaaatataaattaaaaaagatgacattcttaataaataaagtttactatttacatttttatatattgccaaaagatttaacttagatccataaaaacacataaacagaaaaaaaaataggagcagcaaatttatgcgcgtgaggtacagaaaaaggattggaattgtgtttagtttttggtgtttagattattttctttgtgtctttcttctttttctttttttttttcttttttacaataggccagtagaattcttatgagaacagcttttaagcacttcaatggagtgtcatttttttggtagcttccagaaggtgccaaacaggtttcaacatcatattaattagaaatacccataataattataacaataataaaaaggtataatatggtacataaatatggaagagcagtttgtaatatgaatacattttctctagacgagatcacagttttattttgtaaatattacatttaagtatatatatacacacatatatgtacaactatatatacatgtgcatatatatgtaaatttatatttatatataatatctttatatagatagatatctgcagacaggttattgattatagagacccaagaaagcaactcaataattgttcaaagttttcctcactgactgctggtgtgtagtttaagaagcccccatttgtttgcactcagaatgccttatcttcttt

SEQ ID NO: 337005 - DNA, 1000 bp, Homo Sapiens
cctatgaaaatgtttttaattttcatcttttggaaatacatttttcatttttatttccaccatacaaaaatgtgaaatatctaacaatgatctatctgaagcgggtggagcaaagcagcgccatgagcgtttgtcgttgctgtgatctgtttcaacggagaatgggctgggacatgttgtagatttgcacgatttcacacacacacacacacacacacacacacacacacacacagacacgtacgcacacacgctgccgtaccccgagaccgccatccaaacaaacgaacagagactctggaaagtgaacacagcgccacgcataagaacagaagttaacctttttactcgtacatcccccatgagaaactcacgtcttaggagaaaggaactctacataaatatgcccaaaggccagggcatacggcaagccctctcatgggtgggcatgagtggacatcttcctgaaggaaggacaagcttgagagcgtcatgttttcaggcagctatggtgggaagcagggaggcacaaccgatttttccactgggagactaaccgagggctgcaactgcctcaaaatctcagtgcgagaagatgcacaggcaggacagtacacccccaaattcatgatcacagcagctggaatgtcagctctttttgcagatttcacagccgacactccccatcaggcaggttcttaagcacactgggtcatgacaggaaaggcctcacaagagcaacacggaattcactggttaagcacgtacacattcatgacagcctacaaccgtgatgagtgtcaatgtcaacaggcagttagattaaaaaggggaaaaaaccacagccacaaaaataaaacctgttttctcccccccaggagacaacttggtttccaacccctcccataccacatttgattaagttaaatacagtgcggcttccaaatgtgccagccggctcttgctcacagcgacagcaccagcggtttgctgccctcag

SEQ ID NO: 337006 - DNA, 1000 bp, Homo Sapiens
tttttttgaaaacgtacaaacacttttattattttctttgtaatttttttcctctttaaattcctctaattgttgaaaatatccttcagtgatatgagagagggcggggaccccgggaagtctaggacagaggcacaggggcagggaagatgacgaaaaccaggctgacagctggaggcagggaagggtggcttctacccagaaaaaaaagggaagagagtataaagaagtgtccagattggctgaaatagcatcccaaagaagagaagagaaggagactcttattgtgtttgctgattgcttcgacctccagtctgaccgcttcagcttgggagagaaaccctccctcctgcccctgccccaactggggcagagggtcagccgggatgcgattgctgggagatcagttggaggtatcagagtgaacactgccagggccttctgtaggggaggtcactgatgaaggggtagtagcatcctgccaacctccattagcactgatgccctgcggactgtacatctgactggctgcgagtccatcactgtatcctcctgtctggctgataacatggcgaagggtatccacctgtgattgcacgttggctccaacctgggccccttggtaagaatccccattgagtgactgcacgctcatgaacaaatctccagagtttgacatgttaaaagaactggaagaaccagccgagttgggagttgagggcgagttagcttggcttccatgggctgacacattggtagcagtgacagctgttttggcagcataaatattggcttcctcttgaaatttacctatgttcttcttgtaccggattcgcttatttccaaaccagtttgatacctgggagactgtgatgccacacttcttggctaactcctctttggcttcctcactggggtaagggttgctgagatgggaatagaaatattcattcaggatttctgtcgcttgcttgttgaaattccgtctcttccgccgcgc

SEQ ID NO: 337007 - DNA, 1000 bp, Homo Sapiens; identical to SEQ ID NO: 157994

SEQ ID NO: 337008 - DNA, 1000 bp, Homo Sapiens
ttttttttttttttttttttttttttttttttttttttttttttttttttttttttccaaaaatagagaactttattgtcagggtcaagggcatgtgggacccagccccagaagcctagtggtgaggaagaggttaatgcacaatacacacagaaggcacaatgggaaggtgccctcccctggcagactccccactcagttatccacaggaccccaggtctccctgtttccctcctagagaagcacctaggtctggtctgacatagagacctaggtttggagtagacttcttacccatttccctccccacttacgctcacctgcctaccacccccaacccataaggcccagtagctggtccagggtccagggacttggcaaatcacaggtctctccccagtggggagagggcagggaggagaccacagagcacaccctcccttaatcttcactcagcctaatccgtgtgcccggtgaggcactaaggccccacctcccactgctggctcaggctggcccccaacacgggcaggcacagtaaacctgctccatcactcccacacctcggtccagatggctccgtggtaggggtggggtaggggctggggtgtgctgagctgaaagggctggcctacctgcttgctggggtatttgggggggttggtgcggtagctgtagtcggagtactgctcagagcccgtggacgtggtgtccccggtgcccacgaatgtgtttgcaggtggcaggtcctgtaccacctggtgcttcttggaggctgagggtgactggggctgcagctggatggaaggcagtggggagttagagcgatagtggcggcccaggtcagggctgcctggtgggtagttgaggggcaggtggatgcggggactgtccccaggggcatcgctcatcaggttgaacttgagggacttctgcagcccggcctcatcctcgtcctccactggcttcacgggctttggggacttgctcttcttgcctt

SEQ ID NO: 337009 - DNA, 1000 bp, Homo Sapiens
ccatcttttctataaaacttcattttgtaatttttttccaagaagtagtaagggggaaatattgcaattatgtaaaggtaaggaacaatggtgtataaaaataatttaagcacaatattaataacaaagcaactttttttcaaggaaaactagtaggtcatcttgcccaagatttttccaaaggtattaaatatattttcaataacagtacatacaaatacacatacacaaatataccacacagacacatgtgcacatacatgcacacacacacacacacacacacacacacacacacatatatatatacagctcaagtatttttttggtgtgcattctagctaatccacatagctaaagtgaaaaaacactgaaaagatcaatgcctgagtaaccttaaatttgaacaaactatgcattggatgtgaatttttggaggcatgctaagatttcccttctcaatttcattagctactacccagtgttctgtggttcttatccttaaaaaaatcaaagtgtgcctttcagatctgctcacggtgtggtgatgattattatggtggcgtcaatttgggaacacttgccctctcttgctcctactgcaccttatggatgggaaagggaatgattttaaaggtaaagcactcaggccctgattacatctggcttattctttgcttcaaggcaaggatctctctctcgatttcacaggggaggtcggcattgacttgatcctccagatacttctcgatgtcttccacctccttctcccagaattccttggagatgctgaaaagctccatcatgttgatgtgccccaggcctttcaggttcagggcatcctccttggggatgtagcctatgggcgtgagcttggtgctggcttttccatcgatccggttgaacatccactccagcaccctggagttctctccaaagcctggccagaggaatttgccttccttgtccttccggaaccagttgacatggaagatcttgg

SEQ ID NO: 337010 - DNA, 1000 bp, Homo Sapiens
tttctggagcataatgttttattgttgagcctcctaatttacaacatgtcttttgaaatttgcttataaaattttgtcacagggagcaacaatgttaacctaattattattcacttattttcattttttaaaataaatgactataaataactgtctcttcagttaggatcagggatatcataaaaacatcactagcgagacatattttagtattaatactgatgcaaaaaatgaaatagagaccaaatatttatatatatagcactatatatatttttatatattgtatactcatatcaaaacttgccatttctcttaagtagctgataagttgctttctaattttataaattacaccacacctgtgaaaatatggacaactattttatatttttgctgctatataagacatttaatgtttatacagagagctgaaaaattacagaggtgatgcaatgggaattgatgaacattttcacctgaatttccactggcctttttcagccagaatcatcttgatattctctgaatattcttttagaaatgagtatggtatctgtttcttcaataaatacacatacacacattataggtatatgtgtatatacatttatacaagtgtatgtatatatacacatatatacacacatgtatatagtctacatatgtatatatatttctgtgtgcacttatacacacatgcacacataatgtcctttggtttatttttagaccattaatgtgaaatgaattttcgatgatttccatttattttttcttgaaatctaaactggtttaaaaagacctttgcaacaagtaataaatttcttttaaaaaatcatattattacactttaaagcatgatatagagaaggtcacaaggtgttagagaagacagaaatccatgccaatatgggagaaaagaaagcaaatggggttttcagatttctctcttaaagtggccaccttcagggaattgaacctagtgctctgtgttgct

SEQ ID NO: 337011 - DNA, 1000 bp, Homo Sapiens
atattttcatcttttatacgcaagaattaagcctatgaaaagctataatgtcaaatttgcaacaaatcaaatatacattctatgaagtgacaaatttgatactttataattgagagtgctataaaaaaaacccagcagaaattactaagcaaatgattggcacaaacagaaaacaataacacctctagcacagtgagacttcattatcttaagaacgacccataaaagaaaaggaccccactcggcacagccttcatccccaagaaagaactgtgactcaataaaaccacattttaacaacatggagattttgttattataaatttcaaaacaaaatgaaggaatttccacatatttataaccttcaaagtacaatattaatacatgtctgtcagttagaaagaacagcagtttgttaggctacaaggtttaacataaaaccaatttacaaatgtgaaaagcagtagtggtccaatattcaccattacacatgaatctgtttcttccagaattttttaaaattaaaattttagtatcgtgaaatattaaaataacaccccaaacatgccacaatcactattcacaaataaagttaaaatgaaatatacaaaaatccacttaatactgttaaataacaacaataaactacaagatttcctgaacagaaatggtaggacccctgaatgttttacagtgaatttcaggaaaagaaattaagttatgactattttcatgatatataaggcaaaaatttacacgaccatttcaaaatataccaattaagatttatagtttgtaagatgcactaaacaaatagtccttaaaagtgaacaaaaatgcttaaaatactgttaccaacaccaaagtgtgtttatgatgttcaaagagatgcataattaaaactaatatttagtatctctggtaaacagataatacccacaataatttcaagcaatcctgtaagttctcatttctcttgtttgtaatttatcatggctca

SEQ ID NO: 337012 - DNA, 1000 bp, Homo Sapiens
tgtggatgtaccaaaatttatttaattccctgtcactggacacttttgtttcactaataagtagacactgtgtaagcaatctgtcaacatctctgcacctctatttttggtataagtatttccttaggataaaatcccagaaatggaattgcaaggtataaaagattattaacatttttcaaggctttaagatgcctttacggtgtatctgttacatcctgcttccacacaaattcttctgtatagccagtacccaagctgcagctctcagcacaggtgaagacagccaggatgccccagtcaatgctcttgcccagtctgtcagccttcaggtagtttaggagctgaggcatgacctggaattccaatattctcttggcaccacaggggcaatctggaatatccttttcttgaggaatattttcaccagaaatccagatgggggcaatacctctgccatatctaagaatctgttctggttcaagggctatctgagttttaaacttctgaaaaattttatcttccctggattcatgttttgccatggaatccagttcttcctcaagtgcttcacccatgctccctataatctctgagtaatcttccttttccacaacctcaggcataatctcatcttctgtttctattacaatttcaaattctggaaaaaggaagttgtggtctggaattatatggtccagatgatctggttgtgcacaagcctgcttatgtcccaatctccagtctagggtctgatgctccttgctgcagtaatatgctttgtggcatctggagcacgttttggggcctaaacagccacaaaccctgcagagatgagcaccagacttaagctggagacacactgattctcctgtttctgggggaggattctcagaaggtggctcatatgagtaaaaatcgtttttcctgggtagttgattcctaaaaactcgcaggccggcacagcacggctgctcgcggcagcagaagaggaagatgc

SEQ ID NO: 337013 - DNA, 1000 bp, Homo Sapiens
gcggccgcattgcagggtccaagacacagcagggcacactgctgagttctatgcagactctcacggtgaacgacaccactgctcctttctaccccctaatttgttcaattttattctgtttacagcaaaaagttaaaagtactgttggaggcaggcaaacagagagaagttttaagagtgactgtggagttggactggacaacaggggaaggaagtaaaatgtggttagaagtgtatcctttctgtctgtttgcaaaagtaactgtagtaaagtgaaggatattgcccaagaaagaaggaagactattttctttcccttttccagaaagagtcaaaaaagtttgtcaactttgaaagcttatctgtgtagaagttgatactaaactccaggtattcaacaggcattttaaagacatgaaaatgttttacaaaaaaggcacacaggttggcagacaaagggacaagtgagaagattcataaatgaagttattagtcagtgagttcagtcactgtcggggataagttcccgaaacttagtgcagaatgatctctcagttttgtgtcttccattttcaagccatgtgtcttgatcagaatcggcccccagcaacagcttcagccctctccaccaagcttgccatcaaggcaagtcaaccgtgggatttcctgagctgctatttgcttcctggtcttgctttctgactccaaactcaagtaactgaaaggccaggtggcccttgtcctgtgcaggtcttggcccccatggtgggctggccctaccacatagctggcatgctcatcaaggatagaatgttcatctccacagggagagggggattatgtatccacgggggacttgtcttctgttgcaatgtctatgtcagtctctcccagggaatctctgttttctggatcaatcacacaaagcgtctttgtgctgctgaaatagctgtgtccctctccctccttctcaggtccttcagaatcttcctcatcgaga

SEQ ID NO: 337014 - DNA, 1000 bp, Homo Sapiens
ttttttttttttttttttttttgactgtaggaatattttaattcatatttttaattacattatgtaataatatcacagtctattttacaagttaaatgtatgagaatgtatgaaatagaaatggtaggaaaaaactaaacatgggtcaggaacacggaatttttccaaaaccaggggccaaaggtagatgtgtagcctgtagggcccaaggaggagacaaggagggtgacaggtacagttaccggtttgtggtatgtgtttgttccctgtgtgtatgctgggaaggacttgagacctgtcccctgccctggtctggggttgggagtttagtctggtcagctggaagatggtggcttgggaaaaagagccatctggttacctacacagagctggtcccctggtggctgcaggtaggttctgctgttgagggaattaggggtgtatgtgtcaaaaatcaaacgtgtggaggaaaaaagtaaacagtttcctcctccctccaaaaaacccaaattcttgaaatgtacacacattcttctttcaaacatagaaaagtctcactctggatgtgcttacaagaagatcgtcgtcaaaaaactttgtttctatgataacgttcccagttaagacgcttgctggcatcatctgggactcgggtgctgcctctatcaaggactgccaggtatttgtggagttagggatcacaaagccaaactcgaagaaccattcttctaggcattgccctttgaagtaaactttttgttccaggcggaatttttccatttgttctgtcgaagaaaaattaagttctcgagacactgccttgcacttgaggattttcttgggaacacgggcttcatgctccacaccagggacagacaggtcttctgttccttgccagagtatcttccctgtctcagcatcccgaaggttcatccaatttagtttgaagcccctcaggatctccctggcccgctcgtccttggctgacatgatgcggcgg

SEQ ID NO: 337015 - DNA, 1000 bp, Homo Sapiens
gcttcgttgactatggcccctgggtgtgcaccaaggccttctgccttgacccagccatggcctgacattgcgtgtcttggggccaccagcaaggctcagtgagagtgtgagcccaagggcgtgcttcccactcaggcaggccagcccctcctgccccactgcccaccccttcccccatgtgctccggctcaactcaagtgaccccaccacaggccctgtcccatgcacaaatatgccacagacaggcaaggacacactaattttattttgaaatagggactgcaagggcaggctgtattgagaaggatggccccctggtgtgatgagcttggggcctcatctgctcaccgtgcacgccctggagtcctgctacccagcatgtccaaactaagggcacccccctgggaagggatgcagagacggggagcttctctgtatccccttacaggcaggacaggggctggggtgcagaagcactctggggagacctgccctagctttccagctgggaggaggggacgatctggggtccagcaggctcccgggctggggtccacttcccgttctccctgggagtggagaccgaccaagcctctctgtgggcaggactgaggggtgggcctgtatctccagatgttgagcagggcctggccaccctgagggggcatcctagagggaggtggtgggctcctggtgactggtattaatatgtagggggagacctgaggttgcagtcccatcctggtgtccaggtgccatctgggctagggaggcatctcctcaacaggaatcctgagcagggtttagagcacagtgggcaggagggggagggtctggacttcagcagggcctcgtgctagatgatgccatattgggccagctcgtgcagctccaggtggttgaaggcctcccaagggcagatgactgtgatgtctgttcccaggccttccattccagggatgtcgtccccaaacccttgaacgcctttctttgggggctt

SEQ ID NO: 337016 - DNA, 1000 bp, Homo Sapiens
aaagccaaattcatattgctgtatgttcgggtcttgcaattaacaagtgggttcaaatgatccaacagaggaaatcttggaaataaataatgctggctggcatcactcacttggaaaccttggcagtcaagagttaagttctctcacctcaagaccccatttcacatttctaaaaacctccaggaggcagtttgtcccactggttctgggggttatgataaccgattttcctgaggtaataactgtgagttcaactcaaatgcagcatcagtgtcctcactgctcgactgttctctctgcagtcccttccagctggctttattcagccccacgtgtccaagcattgtctgggatagccttgtattggaaaacctggcccattctgtaaataaaggctccactaggtaagtcataaaaccaatctggatgttggcaatagattcagtgtgacgatcgcaaagtggactcacacccaaatgatattttttttctatatctccttgatggaagaattcctccgttactttttcactccactgcttgcttaattcccacgtccgacatgggttacaaatatcagcacatttcaaagccatctgtaaaaccaaatgtctgtgtctggtgtcttctaggcataaatcacctctatccaaatgggacctaaacaaagacagatactcattctggcgactgatgtctgtggctagtatcagagcacctatctgtgtctccatttgttgcctgctttctaatggcagatgtgagaataagcctgattctctcaataagcccactgcagatctccagtggtgattttccagtactgaggtattcttgtataaagttgccaagtaatggttagttttaataaggaaaggttgattaacacctggatgatccagatcatgagtggcagctgcaattaagctcagcaagatatcccaaggagttacagaattggcaagcttaggttcctttaagtaacagtgcatggcctgag

SEQ ID NO: 337017 - DNA, 1000 bp, Homo Sapiens; identical to SEQ ID NO: 157995

SEQ ID NO: 337018 - DNA, 1000 bp, Homo Sapiens
tttttgtgagtgagaagcaccaggtttaatattaaaatctttcccttaaaaaaaagtacacagatagaaaaacttaacagcatacaaaatagcatttctgctgtataaatgtgagttaacgtgagtcctaaaaatatttgtaaacctaggtgattatatctttggtaccgtattgagaacccactctccctccttggaccaactctggggatcccagggaagtaaggtgccaacctgcaatgcagggttggtgcccagaggggttgagcttcctgcacccccttcccaaccctccccgtgcgggggcgtcttggctacaaccctgactcccctggcacctccaatgcccactgggctggggacaatgagatgtcactgctaggtctgggcagtgacaaaaccatacccccatggagcgctgcctcagggatggggcagctggtgggtgaggggcaaacctccaaagcgcccacctctcacatccttcttggggtacccatctgaagcttcttgtcttttacaagacataactgtcctcactgtccattctgtcttcgacgcagacctcggcacaggtgctggagtggtgggctgcaggaggtgatctcatttgccctctttgtcccttttgcccaggatacccccggaggtcatcgtgggtagtgaaagaggtcccgtggtcttcccatgtccctggggcagctgctgggggctttccaggacaccggctgtcactctaagtcaaggcctgtgcagctgtgttcttgagacttgctgggggcctggggaaggggcatggttcctgagtccccagagtgtgatgtgtgatctggaatctcccaggagcccagctgacccccaggatggaagtttagggtatatggccttgcttcatctggacaaatgtgcaaccacctggaatactctagaatgttagtgctggcaaggcactcagagttaataagtccgacttattcattttttgaaggggaaactgagg

SEQ ID NO: 337019 - DNA, 1000 bp, Homo Sapiens
ttcaaatttcaaatttatttacagtgtttgaaaagcacacaacagaagatcttcatttatgcaacaagtcaatcatttgcagtatgtatggaaaataaaaatctaaggtaagtcaaacatacaaactctacctcttgctttctccattagaatatacacattggaaatctaagttccaaacagttcctctctactgaagatagtgaaatttagtgcaagccccctaattaccaattttttggatgcttacaaaatgttgagccttgatggtggaagaggattctatttaaaagagatgactatatttttaaaaggctaaattgactcagtttattttcaaaagaagggttgatccatgttttcagtttattgccatacagaaaacattttataaaataatatggtagacttctacttcaacatattcacgtaaaaacatcacagtgcaagaaagtgatcacaattaagcatgaagacatcaaaagccagccagtattttaactacagagcagaatattcttgctgtcccttcctagaaaatgttggcacattcattaactgctcaggttacaaaaatcacttcgtgtccacttcctgtccttcaatatattttcataactacactgtgttacattaatgctggtggacaaattagctcctataaaatctaaaaacctttcaggtggcacaatgatttaaaaccaactaggaaaaagctctcccagaatatttttgtatgtaatattctgtccattaccacaataacagagtaaaaagctgttttaccttaaaaataagctaaaggaagataatttcatttttcctttaaaacatttcttagcttttaaatagagagaaaaagtttaaattttcttgggggaggagaatatttcataagtaaaaacatcaaatgttgtacaaatgtttcatttaggaaacaaatacttagattcaaaggattctaaaacatttcaacattataagaaaactgtaatttaaa

SEQ ID NO: 337020 - DNA, 1000 bp, Homo Sapiens
ttttttttttttttttttttttttttttttttttttttttttatcatcataaaaaatatttattataaaaaattatcacatttctctgtacatagcataaagacaaaaacacaatgtatacattaataatttaagggggcctgagtattcagtatccatctactaaaatcctaaagctcttccccagatttcacaaaggccaatgtagattatttctattttatcaaagttcatttgcacagttggtgtaattgagatactaacatttcttttttctagtgttttaaagatagttcacagtatttgagttaattaattaatcaactgatttaaatctttggtaaatacaagtattacatgtaaaaatgtttagctcaaatttcagtaaaaaactgaaatgacagataacctactgcaaactgttttgtatgatcagaaatgcatgagctggactcccaccattaagaaatgtcactgtctaggacttctgatgataaaaactgaaatccacaaaaaaatagttgagcttctattaccattaccagaagcaccacaacactaggccaccatgaaattacacacaaatgtcaaattcaacatataaaccatactgattattttacaatgcagaaaaatcctcctttttttctatatgccagtttaaatgttaattgacacgggtaagtttattatctcaaagcctactatcttgtaagagtgagaggcatttaaagaatccatactgctttcgaaacaccagttcttcctcttgccaatgacatatcccagaaaatacagattttttttgaaataatttgtggggaaaatagaaaaatgactgccttctgcttccctctcttcctgtatcctttctttccttcctgcatcctttctttccttcctgccttctttcatttttccatttcttcttctctaagagtaatcagcgcgactggtctgccaatcttcaaattataccttaactctcccaaaaatacca

SEQ ID NO: 337021 - DNA, 1000 bp, Homo Sapiens
ttttttttttttttttttttttttgcatttgttaatggtatttattctagcaaccacaacattgttacaaaagcacaattttaataggcttatctgctaagatgcttttataagcagctgtcacctatacagagttatgaatcatctttggtgctcaaggaacctgtagaagtaagagacatcatcatacagagaaatgtagttaagttaagttgaagcttggaaaagatcacatgaaaaaaatctagctcttgccttatctcttcctaagttaagcataaattagccgtctgcaatagccgcctgtaagacaaatgataacagaagacaatcacacatggtgaatggtttccagtggagtttttcttctaaagagacagtaaacaggtcacaactcattccttgagaaaggattcctattaaatacccagaaacagctatcaaataaacagccaaagctattacttgttttcatcacatctctgtatcttcagaattggaagaagaatgtgaggctgtactgtgggcccgttcttttgccatgtgcgagtcatggtttgactccaccactattccttctttagaatctggaggggtgtcaagtggatcagccagggaggaaacaatagggattttcttagcttggaaataatcataggccttctttccacagactagaagtgtgacattcttcccactgctctggattctatccaccaccttctcatagggttcatctagcacattcaccccattcacttcaatgatgacatcctcatcctctagcccagccaagtcagcaggaccgcccttctgtacctctttgatgaatgagcctggcagaccccgaatcgcatttaagtgaaagccatagccattttcacctttagccagcctgcagagtttaggcttatgatctacttcctctgtagtatctggtggacttgagacttccagagaagtgggagtaggagctggagcctccttgacagagccattg

SEQ ID NO: 337022 - DNA, 1000 bp, Homo Sapiens
ggcgtttttatctttttgtattaaaaaagtagtaacagacacaaatatcaaaaacacaaatgccatcggcagagggtacagctgagaacccctgggtcccacctgaggggcagcaccagggactccatggtccaccaacctcccccactccagagcagctaggggctggaacccccgggtcctgcttgggcctcaggctctcctcccatctggggaggaggtgggagagagagctgtctccccgcaataaataagtgcagccccaaccctcaagagtcagattcaggctcagctggaatatggagaggccacttcagcagcttgtcagcaactttgtccaggggagggaaggattcctctccaaaggtgggaggtgacactcctctgggctgggctgcggagttctgctctctgctccctaagaggccagaggcagcccctggatcctaggctggtgatgggggtccggccccctatggtgggagaagctggggcagtttcccactggttggtctagccacatctgagttctgagaattgggacataggagaagaaagcctctcatggactcctggagatggtcccagaatggagtctagctggtgcagtttcctgctgtaggtaaggctggactggatgagctcctgccttcttcctcctcctccatagccaagtcctgagagcttgaagccttggccccgccttgggcctcctcgcagccctctccctcaccactgccgccaccgctgctgccctgctcgcctccaccctcttccatgggctccagccccagtccatccagctctgagaagagtgggtcatcagggtgaccaggatcttgggtgctgctcccacagtccacacaggccatcacatcaagagcccgaggcagttggcccttccggacccaggagtgcacagcacccagttcccgccgctggtcctcagaaaaccgaggctgctgcttctgcatggctcggagccgctcccgatcctgct

SEQ ID NO: 337023 - DNA, 1000 bp, Homo Sapiens
ttttttttttttttttttttttagtaacgtacccacattttgctggagttagtttattaaagatgcctacggtgaactctctggcgcaggttaaatgcagttttgaaaacctggaaacatcaaatggaggcgggaaataggctggggccgagctgaggggctgaacacagcagtgaccgtgggtcagcaggtcgcctgcccagcaggccccccaggagagggctcgggcgcccctggcagcccccatacccccaggacctggctcgtgagtgcgtctgggtcaggaagagacctctctgtgcgtctcaggctgagatgcagatttctgttttctaaaactggaagcgaccttgacgtgtattgaaggtgtgtgtgccaaatgcttccgacggaggtgctggccttggttggtttctctctgccccgtgtggtcatcaagtcctgggggatgtgctctgcccagccgccctcggggagagcagcgccgcctcccatggggccgtggggctgctgttctcactgcactggctgaagcaacccgccagcctccgtgccccaccccacccagcacgcactcattcagtccattgccttaacacaagcctgatggggctgttttctcacaatataaacgaataaagtgtcttctggcctacttctgaattacttctcaactgtatggtttggggaagggagggaaacctaaaatcccgtccaaataagtgaaattcctgaagaagtggctgagtcctaccaggttggggttagggaaatgttctgggttcaggcgcccctcccagggctgagaaagcgcagccagggacagctttctgttctctcccagggtggctaggttagtatcttacatgacaaaaaactgagagtgttctaacttctgtgcaagcaaggttaatcctgagactaaatcttggcgttcagactcccgtagaggtcatctgtgtccaggcccacccgggcgccggctcagcggtagtgccga

SEQ ID NO: 337024 - DNA, 755 bp, Homo Sapiens
tctttgcagatgtaatgcttaagagctactaatatttattggcaagctaattgtaacattcaaggtaaatatgtagctataaagtactgcaatcacataaatgaacaaatatgtatcagctaacatataacactgaacaaaatcagtctttattaaaccaagccttccttcataatgctttttgcttaaaattctggaaattttaaaatatgaaattgtgatgtgtcagcattatttttgcagtattattaagaaatagattgactataccacaacttgatttattttgttaatataatataagaaggataatacaaacatcagaagattctttcacagttagattgaaagtgcacacttaggcagctagtagctaactctccaaatgttccttaatgattttcttgtacagcagggcttgcagatccaagcaaattttcctcccattcttcagcgtggctatgagttgggcagtggggcagtggggtccggccttgatcacctccaggctggtgatgtgcctgggacggacctgggaggtggtcttcacacacaggcactgcaggtccccatcttcttcagcttcagctctggcgaaggcgaccacaactggcaggagcagcaacgccaagaacagcatctcctggcgggtggcgcgggtgaggcgggacctggctgcggagctcatgttgcagctgaggttccagcaggatcccagtgcgcagggaaagtcgggctggggttctgcaggcagt

SEQ ID NO: 337025 - DNA, 1000 bp, Homo Sapiens
cctcttgtaggcagtaagtctttattcgtcagagaataggaattaagaaagaaagtttcctccagagctagatagctccttggttgcggccagcaagcgaggcttgtttgggagttgcggaggacttcttcactggaagtggggtgcctcagtgaggccaaggcagagtaggagaagagcaaagatagcatttcctaaaggtggaaggcgatgaggacacaggcagtttgacttcttggaaagggctcagtagtgggctgggacagtatccagggcttcctcaggttcccgggtgatgtccacattctcaggcttctcccggtgtgtgttcacggcctccacattcaggtagatggattccactttgcagccataagccacaggagtgagtttgagcactgtgtgcagagggcacttgagatatggaagctcatctgaacttttatccaggaaataggccaggaggcaccgcatgacagcctggtggcagatcaccagtacattctcctgtcgttctagctccattatcactggctccagacgctgaaccagatcctcataggactctcccttgggatagcggtagcgatatttatcttggtctcgcagtgcaaattcttcagggtaatgttcctggatttcttcataggtcatctcctcacagacacccgcatcaatctcattcagggccttccactgctcataggggacacccagggcctcagctgtctggatggtcctcttcatgcgactggtccacaccttcagggagctgatgccctgggactgaatgaagttggccagggcataggcatactgcttgccgcgaactgagaggccagagtcacctccgatgcggcctctgatgttgagttcactctcgccatgtcggcaaaggtagatggagcgaggtgtgacatggatattcatgaggtagtagactgtgcggctctggatgtgatcctgcactcggttcaccatgtagcgtgtgcccacgtcg

SEQ ID NO: 337026 - DNA, 1000 bp, Homo Sapiens; identical to SEQ ID NO: 157999

SEQ ID NO: 337027 - DNA, 1000 bp, Homo Sapiens
tttttttttttttttttttgtttatttctctttatttcaatcatacagagtccgggatcccttatcatcctccctcctcagtctctgcccccaggggttaaataattttaaaaaatatttaaaaagctgtaacaaaataacatcaaaggaaatgggaaggatgggaggggtcaggaatcatgaaggagggtagagaagagggcctcttccccactccccactcttggattccagcctgggcagtagggagaactaccccctatctctccaggtacatcccagctgtaggtgaggtcagaggtcagggtatgaaagtgccggtgtgtgtgaatggggagctgggcagaggcaggctgttcagaagatgccccctcctccccactcaaccaggtactgcacagagccatcaggccgtactctccgagcaaggacccggacagggtcccctcgggacaggtaaccaaccccacctcggactcctcccccagtcccaggagacaaactacggcacaggggagaagggggtgctgagcgtctaggaagacctggggatggggatgaaactgaggaagatgaggcagtcatcgagtggggggcacttttagggatgtctgtggggaaaccaatgtgaagttccaggggtgacctgtctgggggtccactgtccccagaggtccctgcggtgctggcagaagggtggaaggaagcaaacatccggatggggctgctgcagtgccctctgcagatgagcccgctccctctgctcctggggctcgggctgattgcgcactgctgagggtggccccagctcctccactttccccttctgcctcctcctcaggggctctggctccggcctccggcgcttccccaggggacgtgagacccctcccccagggccctgccctggtgagtgctccatctccagtagggggctccacagggggaggcatccgagcatggagaccaaacaaacatttcctcttcttaatctctctcc

SEQ ID NO: 337028 - DNA, 1000 bp, Homo Sapiens
tttttttttttaggaataagttattattaacacttgctccccaaacaggagttagaaaactatattggtaacagatctagagaataaaaacacatgcaaacttttatgaatgatgaaagaaataaagccaatcatgacaggcctggctgagtgttcattatactcataagattgtcactggttctgcaaggtgagcctccaggtaagtgttcacttcttctacagtagttagtttatcgaaaaagttctctcttcttgggaaggatgggacagaaaggggcagggttggagtgattaggcaataacattttagttccatgcacaatcaaccgaggcagggaccagctgtcaaaaggctcccagaagccaggaaccaaagccctcattgcatggcacagatgctgtggggcaggaactcctgcacgtaggtggcggctgccttggagaggtaggtcatggtgccaaacctgccactgggtgcactgtcatacagaagagtacagatgccagatgcgggatcctttgccaacatggtatcatctgcgccaagggttttctgttcttgaaggaacaagtcattggcaatatgcactattttttccacagcaatgatgcttccgatgctatgaatttcaatatctgccagcatggtgaggacaaggatggcttcaaccagcagctgacggtactctggctgaggtacacgattcaggacagactccacatgaacagagaatttaatctcacctggagtcatctctctagtggtagaggaaggaaggacaaacccttcaacagaaagtccgtgacacttctgcaaaactttccatactttctgataaaatccaactggaactctattcagtgccccatccagccttcttcggcgttgccattgaccttgacgactatctttagatgactgctgatcatatgcactaggaaaggacccactacttggagtcatagaggttccaggtgactgactctcagctgagat

SEQ ID NO: 337029 - DNA, 623 bp, Homo Sapiens
ttttttttttttttttttttttttttttggagcagaaggaactctttattggaaagtggatgagagaggcagctccagccgtgggcatcctgaatgggaggaagaatggacagtgtgggaaggggaagggcagcagggacttaggaccagatggggcctgtagctctggggacggcacaggtgcagcaaggaccggctccctctcactggggaacgaaacaggccatcccgcaagagccttcacagcacttcttgattcctgggcagtcagtatctttcaagcagcggttagggggattcaacatggcgcaccggatcaagataatggggcaggagccaggcttagtggagactggacctttgactggctcttgcgctttgactttatcttgacctttaactgaaacttgtcctttaacgggatcttgtccattgaatggaacacggcctttgacagtgtcttgacctttaacaggaactcccgtgacagctgcctctagaaccagcgtcccagcgatgaggaacaccaccacgatcaagaagctgctggccctcatggtgtcaggaaggtgtttggctaagagctaaggccataccaatctttatgcagtccagcttggcct

SEQ ID NO: 337030 - DNA, 1000 bp, Homo Sapiens
ggtagttcaataatattttattgtcaatagcataggagaaattcaatattgaatctcagaacaagaagaacctatttacaatgcatgtcaaggaagagatgggagaaggaatgtcacaaaattttttggtaaatatatattttttatagagaagtaatccatgaaccggcaacagggatagcttatccacccaactttacaaattactattaatataagttacatgcttgccatctaaagtaactaaacccatagactgaaaaactatgtgtcaaggtaacgtgagcactttaatcactttacttatattttctaaaggcagtagtttcctctccttttcccgctatcatattagatgaagagacaagttccttcaacacaaattctgatatcggctattgtgagaatccctgtgcgagtcagctagaagcccctgccaccagtctagtgccaaccacatgaccagatgggacagctatcaaaaatgaaagtgaatttatattaagatctgaacttcctcttggggtcttgcatttcagctactagaggtctataattccttatccaacattccacaatctgaaaagctctgcgaacgaagtgtttttgtaagttggtggcatacgcatttggcagcaaattttgaccccttatgggctacttagtctttatgtatccattttgtctgaatattctacattttgttgcagcatattaaggtgttgatttataggttgctgccccagatctgatccatgaagttctataacatacagtgtatgtaaaatattatcttttgaaaatccccaaaattcagaattttaataaacacctgcctgccagggcttaacataaggacttctggacctatagtagcctgagcatgtgcccaagtttcactggagccagggcagtttcgtgggtcccatgcactacactttcttcagtctttcagggaagcgagaatgtctggaacattctctatcccaaagaaggaaag

SEQ ID NO: 337031 - DNA, 1000 bp, Homo Sapiens
atcaaaatgtcattctggtctttatttttggacatgtagcatgttttaacaaatcagtttttcataggcaaccttttgaaacatcaaaagaaatacaatatatttttcacaaatttctcatcactgtaaattcactttaaaatcaactaagtagcagggtagagcaatgtgtttccatataccgaccagtgcaaactgacagttacaattaaggtatccagaaaggttgaaaattaagatttacgtgaaacaaatttacttccatttgttaaaaaaaaaggaaaataataatttgcaaatcacatgttttacaggcaaaggcaactaactttagatcttatttccatctcaaataaatgacagtttaagaattaaatgacaatttaaaaaaattaagcaaaaatataaggaaaaaatggtggcatgcctctaaaacctgttgaatagaataatggccaaatattacagtttctcactttcctatgaatactggcactgtttatttcatgtttatatgtgagtttctatgcataaaaatcccagtaagactgaatagtttaaagatcagtccatttttctccaacaaaacccctaacttctagattttaaaaattgcactcttgcttttgcattttagtacaaacaaaacacaaatatatttcttttatatcagtgcaaccagttaataggcatgttattttttaaaaagtaataaattttgtgaatgttgtcatttttaaaaatcctatacagaatcacaacactgtcagaatctatgtagtgcacccacaagtgccttattgttttgaattcacagtccttttctcacaaaaaccttaagagttcaaagaattcataatacacaccatgtggataatttggggttaaaaaacccatggctctgggcaacaacaatgacagttaataacatccacccacaaagactgtttctaaaattttcaacttagtttgctataaataaaccattctgaagtaaagc

SEQ ID NO: 337032 - DNA, 1000 bp, Homo Sapiens; identical to SEQ ID NO: 158001

SEQ ID NO: 337033 - DNA, 1000 bp, Homo Sapiens; identical to SEQ ID NO: 158002

SEQ ID NO: 337034 - DNA, 1000 bp, Homo Sapiens
ttacaagtatgttgccgcagtcagctgataccatttaaccgtctctttgctcaagttgaaatctttcaaaggcagggttactccacccaagaaaaaattctcccgcagagattctgcactgagtacacttagttgaagttctcgctgtcttagggtttctttgctatatccactgtatacaagcatttcattgaatgtcggattcctcgtttttcgtgaaattttggttttacgtttggatgttttgtggttatctggaagtaggtatgttttgacatatggatttgggtcagctccatcttcagtaacaagatctttgatatgcatcaccatgatgaaaagagtaccatttcggtaagagatggataatttcacagctcctcctatttggcctggagtaggactgaaggaacctgcatctgcagacctagctatcccttcagctttctcatcacgaagtaaagggtggaagaaagtacaaacaagatcacactctgctacatccgttgaagcattcatcaaactctgtaagtaactgtttaactcaattttccttttggctgctacatcttttatgtgtgttcttcctagaaccatcctattaggaaagcctggtaacttccaaagtggaaaaataatactgagcttattgtgaagttcctgaaattcgacaaatgttcggaagacaaatgatggttcaatctgtccttcccacaaaattcggactacataaatataatgtttatctgggttgtatttcttatgatatgtaaaaacagagacttccttgattcgaccatcttgtctaaaggagtatgttttaggtgaaaatgaaaggatgggctcatcattagaaggaagaccagaaaaacgaagctgagcaaggttgtgaatgaagaagttaaactttgtggcaatgcttcccaaacttgattcaataagcctagtaaagaaaattgtagcttctgcgtctgtagtttggggttgaagtgcatctcta

SEQ ID NO: 337035 - DNA, 1000 bp, Homo Sapiens
ttttttttttttttttttttttctcaaatgtcatttattagaaaatacaattcccgagaaaggagatacaagggattctgggaagtgggaagtaaacagtacacagatctctttaaatcaggagcatataggtcataataaaatgagctacaggcacaaagccagtaacacatttatggtccgttcatctggaaaagtttcaccgcccactccccactcctcttccccctcctggaagcagccagctttatccttggcattttaattttagagaaaatttaaacttccatgctgccctgtggcttcggtcaatggagcttctttctccagttatggaatgagtcagcaaaacggggagtttctgatccttggaattagggagggacagtttacagaatgtcctcatttcactcttttcccaatcatgggaaatatccagccaattctggttttaaagattcatatcaaattcaaagtccctccctccttttggcgaggaagacaaccctttggagcgaaacacaaaagagcaaatgtaaaatccatctggggcggggcatggtggctcacgcctgtaatcccagcactttgggaggccaaggcaggcagatcacgaggtcaagagatcgagaccatcctggccaacatggtgaaaccccgtctctactaaaaatacaaaaattagcttggcgtggtggcacatgcctgtaatcccagctactcgggaggctgaggtaggagaatcgcttgaacccgggaggcagattttgcagtgagtcgagatcatgccactacactccagcctggcgacagggcgagactccgtctccaaaaaaaaaaaaaaaaatccatctggtagggaataaagaatatgaagagataagggagtcagtctcagtctctcccttcgggctcctgagcttagctccaggggaataatcaccactccaatccagcctcctactgaccaaagaaaaatcatggggcaaaaaacaacagt

SEQ ID NO: 337036 - DNA, 1000 bp, Homo Sapiens
ttttttttttttttttttaaactcaaaaactaaaatgttttactatttcaacatattacttcctccagaactctcataacatgtacataaataagaatgtttctcatttcttaatttattaacaatgtatacatttgaaaaaatatatacaatatttcaaaacaagcccttcaagactatatttaagcaatgacatccaaggaagcagaactcaggtaccatgtaatatttggaaaatatggtaacttgaagattaagatttctcttccttgctggttactctgaagtctccaatatacaaaggttgctcctaacgtggttttcttattgagccaagcatcttgatgggtcaatcccagtttcattttctccagtactgggcaaacttgtgaatctgttccaccactgcagcaaaaagagcatggacactctcatcaatcagactctgcatgtaatgcacagcctcttcatccgacaggtctaagcggaatttatcctgaacctttttcacagttttatctggttcaagtgcaatatctggaatgtttgcatcaaccatcaaggaaaacaagttcaaaatcagattagaataccttcgcaggtggaggaaagccgtgtaacactgtttacggaactcttggtactgctcactctgtgtgccccccattccttctaccatttctttattcagcttcattggtggaggaagaggctttggatcccgacccaaaatatatccaaagtctatgtggaagagtttgcctgtttttgttagcaaaaggttatccaggtgcctgtctccaactccaagtatataggtgatcacgcaatatccagcacagcttttaacgtaagtgtccatgacctcagcactaatcccatttggcccattctcacttggtgcatattttctaaaaaagttctgaatgcttccctctgtatcaagaacttcagccacaggaactgactggataaactgcatgaagccatgttttgtact

SEQ ID NO: 337037 - DNA, 1000 bp, Homo Sapiens
ttttttttttttttttttttttttttttttttttttttttttttaagacaaaaggtttttattcaaaaaacgccaagtataaaaaaaaaaataagatctcttttattcccctgtacagtatttcactcagataaaaccagcaggctacctgctgctcaaaacacagccccagagaggatctggaaggcacaccatccagaactgcttttcataattatcctatatacacagtcagcaatgcccctccccatcacccacagagccgggacccacctgggtaagtaggtgaggggccccacagaagccagggagctgcagcactgtcccgcctgagtcccgtcaccccacaaacagagcaagcgtcgcagccctcccccaaaaggtccccaagtcagaggaggaaaggaggaaagaaaactagggcagcagctatggaagcttggaataggaagggaaccaaataaataaataaataaatacataacattgacctccaggttagaatgcgcatctttcaaaacaagaaacaaaaacaggtaaaataacttaaaggcaaaatttcttaaaaattagatccactacaatctttttgtatactaccatgccaactgtacacacatttacagcttttctgttgattgcattgtttgtgcattttttgtgtgtgtgaggtcttggctttgaaacagttaagtaaaaaccaaaaaggaagaccagttcactcggagttttactaaaggaggcagaaaaaagggcaggtggctcagcgtttggccctgtagcctcttccatggcacctttcatatgaaggagggggtgagggaggacaggagagaaaaatagggaacaaaacccaggcagatttttggagaagcagcaggtaaaagaggcaagttcaagtatttctcccagcacagccggagtccccacagaaggcactcagaaagagtcggaagaggtgacagggacttaaaatggtgctagtcctatcccatcccaa

SEQ ID NO: 337038 - DNA, 1000 bp, Homo Sapiens
tgtttttattttttattttatttttttgagacagggtctcgctctgttatccaggctggagtgtaaggacatgatcatgactctctgcagtttccacctcctgggctcaggcaatcctcctgcctcagcctcctgagtacctgggactacaggcacataccactatacccagctaattttttttttaagagatggagtctcactgtgttgcccaggctgataagagtgtttttaaaaagtgtccctgttgattcttctttgcagccaggcttaggaacctttgggcttttgcacacattaaaaaaaaaaaaaaaaagaaaaggtctggactacctcaaagtcaaacaggtatctatttttaaaattaaaaaattaagtatatatttatatctgattatacttaaacagagacactgttaacatagtttttttctatgtaatgtattagctacaggtaattacaaaatattttataaataatttaatggtctctctaaggttaaacaatacctccaataaataacgagatatttcagagatgaaaatatttttaaagtaagatatttcaattattttcaggaaatctgaaggatgtgtcaaagtttaaaagtcctttaaatgggaaatggataaggcaagtagtgttcttcctaacttggaatatttttaagatattaaatatcttcttccattaagaaaaagaaaaaactgttcaggccaaagtttaaaattaaggcatttggaaactaattcatattttctagaatgcctcctttaataagatacttgaaaaaaaagtcactaaacatctttacaaataagtacctaagattctaataatccttgagaagtaattatttttcaactaatttttgagttatagagtaaaggtgttcttgaagatttcacaagtctgtaaagagttgtgggagcattgcaattgatgaaaaagggaggcagggaaaaaggaagggaagaaatgtcaggcataaaagaggcc

SEQ ID NO: 337039 - DNA, 1000 bp, Homo Sapiens
gggtttttactattttgggtttttattttgttgatgttggttaaatcttatctctttttttatacacaatacttcatgtacctatgaaataagacaggtagggaatatgtccagtgcaaacagaggactcacacctgtgcatagacagcaccatccattgattgtcgctgcagtccatggcgttaccaaggctgcgccacccacgtgctgccccaggaggcgctaccaggttctttgggccacaggcctctcctccactgcatgtggcggcagggcagggaggtcgcagggctccatgattgtgggacagctttgagggcacatggggcagaggccctcgaaggtcccctcctcagtaggggatgtcattctgatagtactggatcatgtcgtaggtccggctcctgttgctgaggaagcagctctggatgaccttcatgatgaaatttgcagcctcgcgctcagtcatgttggggctaaacctgtgcttcaagagcttgattgtctggccgcgaaaacagggcaggcccgtgtccaacatgagagtgaccagggagacgaccgcgtccatgtagggccgcacagccaggtagcctcggacacacatctccatgaaccacttgaagggtgtggcctccatcttgccccccatgatcatcaccatctcatccgtcagcttgatgtcgggttcccagccgagattgccgcccggcgagctttcaaacatgaacccaaagtcgatgtggatgatatgacccttcttgtccagcataatgttgccgttgtgtctgtccttgatctgcagcaggaacagcaggaggctgtaggcggccatgcttcggatgaagttgtagcgggcctgctggaaggccagagtggactcatccccgtactggcgtgtgaagtagtcgtacatgccgaagtctgtctggcggcccagctggtcccgggaggtgcagtcggggatgcactcgatcaccccgcacccaggggcagtggc

SEQ ID NO: 337040 - DNA, 1000 bp, Homo Sapiens; identical to SEQ ID NO: 158003

SEQ ID NO: 337041 - DNA, 1000 bp, Homo Sapiens
tttttttttttttttttagtcgatatagacagatttattacagtcagtccaacatacacagggacgctgtaaacaggggcgcgggccggagagcgggtgtgcaaagtgggcgcagggccctggggccgcgccccttgctctgccggctcgactcttgcacggcgggcggtgaggagggggctgttcgcccagacagagggccacctcctagcccgggagcagagcagagggcctgggcctgcagctaagctcaaggctggggtgttctgagatggacctcccccacctcccgccaggcccgcactgcccgctgtcgctccgtggccttaatatagggctccggggcgcggggccagcgaggctctaccaggcgcgccggggccgtgtgcggctccactgagtgcccgatcctgggctgggggcaccgtccccccaaacccaacgcccgccccaacacggatccgactcgagctaaggcgctctcggccgggcctagctcggagagggcaacttggtttgtacggggtcgggaaatcctaggcaagtccaggccccgcacatccagtccgcaggcccggccactcagtccggatccagcgcggcggggacgcgggatacgaggtcgtcctcccccggccgctgggcctcggcgctcgcctaccgcgccgcgtgccctccgcggagtgggcctccggggcccgtgggaacacacacacaccacccgcgccatcccgagagaaattgcaactcatccattttttcgcggcacttttctccgacgtctttttgcttttttttttttttttttttttgtctttttggagggcagagtggggtccggaaaagcaaacacaaaaccaacccggagtgggaagtgggaggagggggctgcgcaggtgtgaggtccgcggcgcggtgagctggggcttgcgagccggggccccgcgtgcgtcctccgcgcccgcgcccttccccgctccggccgccggcccgcgtggtg

SEQ ID NO: 337042 - DNA, 1000 bp, Homo Sapiens
ggcacgagattttattcatatattttgtggaattcacatatcttattcttacagcaaacataacactgtaggccacaagaagctgcagtactattatttaattagcagcaaattaatattttaaatctggtatatggacaataaatagtctgcttctttggatgtgaatgtttaaaatgtagtatcactgcagcttcataatgtgattgctattttacagagcttatacacacacaaaaaatatgatctttgtctatattttatacaaatacaacagtagtttgtgaatacattttaagtacacgatatacatgataagccacttgatttcccaatattacagaatagcaattttaaatgcaataaaaatatacaaaattcggcctggaatgcagatttttttcttttctattttgactcaaaactttatcattagaacatttttagagtactagtccaaacactttttcattagctaaaaatacaatttcagcagtccagcttatgttcaggtatgatgcaatccgtttcctaatggattcccagtttttgttaaattcaaagggctgttagtaacatacagcatgttcttcactccacaccctattataaagcccactttccattctgagttacagtcaccttgtggacaaaagctgggtttgttctggtaacatttgcatgtccgagatctccttttgcaagtgcacatgaatacattgtggtggtgtaaaagtttgttaatgacaaattaagtcacagtataaaaatatattgtacacttttacacctaatgtagtcctttttctatggataaaaaaatacgactgaatgagacagagaagtttgtagcaccatgaagagttgtagcccaagttacattagcagcatgatccaatataatattgaaggagtgtttctgagaagataaacattcattctggttcatctgtaccactgaagcttatataatgaagtgttttatacattagcaatagtt

SEQ ID NO: 337043 - DNA, 1000 bp, Homo Sapiens; identical to SEQ ID NO: 158007

SEQ ID NO: 337044 - DNA, 1000 bp, Homo Sapiens
tttttttttttttttttgtttattaattctacaagcatttattgccatctcctatgtgccaagcactggtccaggctctggggatacactatgaacaaaatacagtgaagtccctgccccatggagcttacattctagtagggggagacagacaaacacataaatacaaaatatcagagggttcaaaacagcttagaggtatcttgcctgaattctgtttactgcatatcctcattcttgggcaatgataaagtgaagagagaggccaacaatgggctgcagcaatgttgctagtcccagctctaccatctacacattgagtggatttaagtgagttctcatctgatctgagcctcagtttcctcatctataaaatggggagaaattggattaaattacttataagggaaagggtcctttcaggcttttttcatgagagtagggtgctgaaaatcaagagccagtttgttgactcctctaaggtttaaaaaatatttaaatataaaatctaagaaatccttagagatcccatacactcaatacttcaaatgccaatctgaacttctttcatcaatagcaaattcttatttacaatggctatagaatgaagtcattttaccatctttagccatatgaaaaataagttatttacttataaaaacattcatttttattattggttacaaaatctcaccttatttgtgaaatgttccctagctatgagatcctgcccttgatgtgacactatttctctcttctgctaacccctatccctgactttgtgctcctgtttaatttttccaactgaagtattagctttatgaaaacagggatcggctgcttgcttctttgaagaacaacccaaatgagagtatgtccaggtaatccatatacatgtataatcattacacctgcattttgttttacaggtacaggccttttggtaacccacattagctctttagactgtcagagttgttcagcttagtaaaatttagtt

SEQ ID NO: 337045 - DNA, 1000 bp, Homo Sapiens
ttttttttttttttttttaaccttttctacacctttatttatgaaatgcttattgaacggatacaaagttagtgtctgtcagcaggctggtggagggagttaatgtgccctccttccttcccctggtgggggctgaagccagaagtggctttatccttccctccaccttggcagcaatgggctgggagggccctgggacagggagggggttcaagggcaggaagaggaagggaacaatgggtagtagggcctggggcagagcccccttctcctggaataagaggcttgaccctgctcaccctggcaggagctgtgcttctcctttgcagcatggagaagtggtttgcactgggcagcaggggggatgagctctgggactctctcctcctccccagcccagggttgggagtgcccttttcagctatttctcacgtaagggtcctctgtaacacctctagttcccttcaggaatgcctgcctccccagatctcaaagggcactgccctcagtccttggggttaaggggcagggagccagacgtggtggggcacagcagctggtgacctctccctgacgggggcctcaactatgtccacacttctagggggatcatgccctccttgctacccagcgggggcagcaaagactcatcctctaggaacttgagggggaagtggaccaggtggccctggacctgggtgagctcagaccgagccaaggggggactgaccgtggccaagggctccacggccacgtactcccggagagtccgcagggaacgcgtggcattggatggcaggcagcggaagatctgctcatagatattggcgttgctctcagccatgtcttgccacaactggaagaagtcatcacagatggggtctcggagatccaagtctggccgggtatttgctccaagaatcacaccgaagcagtgcttccgcagactcaaggcaaacctgcccgcctgatactctgccccattcatgagggatggttc

SEQ ID NO: 337046 - DNA, 1000 bp, Homo Sapiens
ttttttttttttttttttgataaggacatttattatagcatcgtttgcagtagcaaaaaagaaaaaaaaaggaaacaacttaaaagtccatcattagggaactagttaaatcaaataaggcgtatccatattatgcagtagttattatgtggccatcaaaaagagcgagtgggatttataatgtgatacaaaaatctctccaagctgtattattaagtgaaaaaagcaggcatgcgtaacaccccacagcttgtgtaaacacaagcggggagtgcatacacacgtgcctgcaggtgcatagccctgcatacacaagagatggcaccgtggtggttttcaatgaaggggaacaggggagctcggggagaaagacacacatccttttgcaatatttgaattctgtaattgtatgaatgcattttctagatttatcaaatattaacatttcgaagactagggttggggatgaactgtggctatacataaagtctatatatcatcaccattttggttccccagcatcaaaagagtgactatgcaggtgaaggcagtaatgatgcaaatggaaatgtggctgtgagcaagcagctggctctacaaagcacacaggcctggactcagcctgtgaagcggcgggtactcagaaagtgacactagtattttaaataaacacccaagagcttttgcatctgattgttcccttcaaagtagcctgctgggagcctagatcatcagaggatgttcatcagagggggaacagatcatcctagatcacagaggagttcagtgctaagaatgtgtcaaaaccttctgtctggaccttcagagtggtgacaggagttactcattcgtggcaaatatttatccgcagaggcagaatctgaattttggaaacggtcaaatatcttttggccacaagtttggttaaagagatgaaaaatcaagttaggcaattactcttatagtaacaaccaagccatagaatcagagcaggctgcgg

SEQ ID NO: 337047 - DNA, 1000 bp, Homo Sapiens
tttttttttttttttttttttttttttttgttgacccacttccatttaatgaatagtaaatatattttctctttcttatgattttctaaataacattttctctagcttactttattgtaggaatatagtgtataatacatataacacgcaaaatatgtgttaatttactgtttatgttatcagtaaggtttatggtcaatagtaggctattaggtagttaagattttgcggacccacgaattgtcagctcccctaacccccatgttcaagggtcagctgtagatgtaatagatgggccaacaagttcatttcaaaatataatctaataattagttaatatttggagagagaattcatatatttttaaaaaatacttgagataatatatttttctgtcactggaaatcttttattttccttgcctgcattggatgttaggctggaatggaagacaacctgcaaaatcattctgaagtcttaaggtttcatgattccaaagatatagtatggtaagctaggtaactctagctcagataattcactacagtgccttaaatgaagattagattctgttgttagtatattagtgatatgactaatctcactgtcacatattaaccaccagttctcatctgttgatcatatgtcttagaacagatttatgatttacctacatgtactagaattctgtgattctttgaaaaaattacttaaaaggaattttattatgtaagagtatggccttacttttccatacttgattctcatcaactttaaaagatgttaatgtggcatagaaaaaatacaatttctgttttagaatgtagattctgatagttactacaaatagttctttataataagataacagatgtgaggagtcagtggactattttgaataatgacacttcatttgtgttattactttgatacttggtgaagacctgaaaaatacttagtattaaagaagcttttacattgtaatataaattatattcac

SEQ ID NO: 337048 - DNA, 945 bp, Homo Sapiens
tttttttttttttttttatattttaacaatgtttattattcatttatccctctatagaaccaccacccacaccgaggagattatttggagtgggtcccaacctagggcctggactctgaaatctaactccccacttccctcattttgtgacttaggtgggggcatggttcagtcagaactggtgtctcctattggatcgtgcagaaggaggacctaggcacacacatatggtggccacacccaggagggttgattggcaggctggaagacaaaagtctcccaataaaggcacttttacctcaaagagggggtgggagttggtctgctgggaatgttgttgttggggtggggaggagttatttcaatggaggagttatttgcagattgcagagagaaatgagggaagttcgcctacaccgggccatctgcggggtcagtgggggctgctgtatgtcttggctgccgaacggggaaggtgacataggcgtcatagccaaagaggcacgtagcgattaggcccagtacccctgcgacgattttggagtggtttcctctctcaacaaggacaacaatggaggtgatcaggtagaggattgccgctatgagggttcggaagaaatcactccagggccagttgatgaatggtatcttggtgtgcaggtcacacatgtagacaacaaagaaaatagcagcaaggatcatctcaatcaccgacagggaggagtagcctggtgtggaggcactgaagcagatcaggatcaccaggcataatataatctcagcaaacaggaggattccctttcgagtgcgcgagaagttggtgcaggcggcccagcagccaggagccgagaggcgctcagaatccgccatggcatgggctggagtccctggtgcctcggaggatctgctcacttgctcgtggtttcgaggacgctgtacacccag

SEQ ID NO: 337049 - DNA, 1000 bp, Homo Sapiens; identical to SEQ ID NO: 158009

SEQ ID NO: 337050 - DNA, 1000 bp, Homo Sapiens
atatacacagcatttttattaaatatactctgtgagaaaaagaacaccctaaagtgccagatttcatgtaaatccaataacttagtaaatacaatggtgaaaaaaaatcagagggaaacataatttaaataatcttataaaagagcaagaacatatcttaatcttaagaaaacaatcatcaaaatataaaagggaaagaaatctcttttgtagaagaatatatttcaaattccacctgttgatcatttcatttaaaaaattctattctaaacacatgggcagtctctcttaccaatatatatatttaaatcaatggtagaaagggaatttagactactcattcacactgagataaagtgacatttttgttgcacaacagtattgctcactggcactaacagtggaagatggagaaagtagatttctggattcaattgttagcagcagaaatggactaatgctaaaaatttagaaaaaaatagtccaagctgtagcgatttccaagtaatacaaacattaaccaaacattgccaatttgtaacgggctgtgaaaaacatatgaaaatactctacattgaatactagctttatgttactttctattaaagatattcagtgggcatattctaaattatatagggcttctatagagacctaaactagcaagtataatatgaagctaacaggacagtgtcagcatatcttgggatgttctagccaatgtttggctacaagtatttggaaggggtcaaatgactatatgcacattcaaaatgaatacttataaaaagaaatcttaatgtatcagatatccacagactgaaaagtgttacacatgtcgtggggggaaaatactgatggttggctgaatgaccaattaaacataccacttatgaaaagctgggtgattcaggtgcaaaaaaatatatatgcacacatatctctctaataacatcctaccaacatatatatgttgcatgacatagttaaagctgtgtta

SEQ ID NO: 337051 - DNA, 1000 bp, Homo Sapiens; identical to SEQ ID NO: 158010

SEQ ID NO: 337052 - DNA, 757 bp, Homo Sapiens
ttatgcagaattttcacaaagtttaatgcacagagaaagcatatcatttcagttactgatacatcttaacactactttcttttaaaacagacatttaacatacacaagttatagtagcagtatgggcttctcctcccattggcaattaaatgcttttattttcttctgaaaagatgatgtggaccaacaggtatcagacttgccaacaaggtcggtagactcttcccagcatacatctgagcatgtcaaaatctctccttcctataggaaatttagctgagttttcttcatccccaatttctctcttttcttgtgttgattcagtattctgaactccattctcagctgggaaagctacagatccttttagtgcaagataaggttttatagccagattcagtggcagaccatgatttaagaaattatgtttggagcctgtgttctttgaaactttattttcctcttcgttcatgaaactgctctcatcatttttatattgttccagggaaggagcaataactgatttttctgcagtgtcttccttctgaaagcctttccccaacctgaatgtattaaataccatgtcatcatctaaatttcttatggacttggatgctgaaagtaaaataccttgagaaaacaaagaaaaagttagtattaatatataggaagagagattcatttttgccattcttagtttgatgtttgcatacagtcaaacaagaaagaaaatgaaaaatttctctgtcagcctgct

SEQ ID NO: 337053 - DNA, 1000 bp, Homo Sapiens
tttttttttttttttgcatagtagagaaattatatttattgaggaataaattttataacaagttgtattatcacaaatctctaaaaataacaacgcagtttttaaactcgtattttgtgagttggagcctggcaacaaaacaacaataacaacaaacaacaacaataaataaaaaaccacttaacacagacatttctaggctgaaaaagagaagaagttgccaagtgcggggttttttttcaatcatgtttggaaataagttccaacttacagaataagttgcaagaatcagactgtctcaaagaaaacacatataccttttgctcagattattgttaaattttacctcatttactttatcaattgctctttctctatttatgtgtatcagattattgttaaatgttaccttatttgccttatcaattgctctctttatgtatgtttgtgtgtactgttgcacatgcaaatgcacacaaatatatgtttctgaattttttgagagtagattgcatacattatggccctttacctcaaaatactttattgtgtattttccaagaatagggattttttttacttaatcaaagtatacttcttatctgattgactgtctatattccaatttgccagttgacctaacattgtcctttggagcacttatgttacctctggtacagaatccagtctagtattacttactatgtttagttgtcaggtgtttttactatcatttaatctgaaacatttccacaacctttctttgtcttctatgacattgacatttttgaagaattcagtcaaaaccccctgtcgtttctggttgttgttgttacagtgatgttgtttccttctcagtgggtcacatttgaaggcacatgttgaacatccaccctttattggtgaggttaattttgataacctagtcaagaggttgtccatttttttccattgcatggttactattctttccccagaaactaacaacaatctgtgagga

SEQ ID NO: 337054 - DNA, 1000 bp, Homo Sapiens
tttttttttttttttttttttttttttttcttcaggaagaattttaatggtttaaaaatatgtatgtacaaaagcagcaccagcatttggtgcttccggtccacaggcgccacgtgtcttccaggactatctctgtggccagttgtacctgaagcctctgtctgactttccagttggaaaggacatgcttttgtttcccaccgactgtttaatttttttggctgcaatgcatttcttgccagacggggtctgtttatttggatcaaactgagaagaaactttggatttgctgtttccagcaaaagccttgaagtctgactggctgtagtcgtaaggcgtaaactctttttctggtggctctgggtcctttggcttcttggaaattttgagtcgtttcttctcttgtttctgttctgtggtccttgggtcgcttgttgctcgctctctcttctttgcagcattttctagcacgacctgctgtcggacggagatggcctgttctgctgcagctttgcacgcctcctttgcctgttcccgggcagctgtttgctcagctgccttcttcttgacagcttctttagagtctttttgtacttgtacctgggccagcttccagcggttgctgatcatcctaaatggattttcaaaggactccatgatgttctgggcttttttctgtgcaactgtcaatggaccctttttactgtcttcagcactaggttcattaaataacgtgatgacagctgtggcaatcaggcatgtggtacccagcaagttatcttctttttcatcagggaagaggctcgcctgcttctgaactggcacagatccactggttgggatgattggatagccatccggaggggcatgggagcagtcgtgaggtccaaagagaacattctccaatctctcagcactgggcagcggtccgctcttcttcactccggctgcaacttcagacttgagcaggggcatctctcgggcctgctggattaaaagg

SEQ ID NO: 337055 - DNA, 1000 bp, Homo Sapiens
ttttttttttttttttttttttttttttcacactcagaatttaatttctccaaaagttgtttctgtgtttgattcatgtagaaaatcacaaagccttctcgccttttctgagtgggcgggatccacagctggcttacttctggacacggagcatggactgagaagcaagagcttccttccaggagaggcaccactcagaggcaggcccggctgcacaagtcctccctgctgggcctggtcactgcagctgcccctccctggctggctcctctctcctttcccacccaactgttcaccttgtcacagggctatgtcttggctcttggctaagactttaagggcccacacagcagagaacagcagaggacagaagcctcagatcctgacgacctgcacagcaatgcatgggctctgcctctctgccccgtccgctgccggcctcctaaggtagagtcgggcgaaggtgcctcccacctgccctttggtaaggcgcccagggttcacacagacacagccgaggacatccttcacgaagtacctcagctctgacgggatgatgaggacatctggggtgacaggcagctgtgcgtaaacatagaacgactcatagtcaatggccatgtcttcttggggcgggtagagtgggtagtagctcctctgggtcaagatgtgcttgagtattcggctgaatctgtctgaagttccggaagaactactgatctcctcggcccccaggtggaaaagcagatctgtggatgtcaagccgaagatcactccgtttatggagaggctgcagggctcggacacaaactgtacttgctttttgtcctctcgagacagatcggagtagctgaaaggcggctgggggtacacaggctcatggtgcacatctctcaatgacgggacaaagacaaggtgggagccggagcttcttgtgccttcaataattgttcgtagacactgcttgaaaatgtcttcaaatggacttgtcagtagacaa

SEQ ID NO: 337056 - DNA, 1000 bp, Homo Sapiens
ggttttattgactacattgcaagcaaaagcatgaagaagaaacaatcatttaaaaacaccaaagacccttacatagcaaaggttaagaaataaattaagactcctattgggttgtgtctgccagggaggatacaggcctcattcgctccggtccttgggttcccggtatttccactggatgtaatcaaagatgtctttttcactatccactggcaggggttctcctgcaactccagtgactcccaagggacggatggtgtactcattgattgtgaaacccttttctagggcatgagccctcatattcttattgaaaatatcactcccagtgaaatagagaacaccacagtaatactgatctttgggtatcaacctgatatcaattcttctgtgtggatattctttttcatcatttttactgggaagctggcaaacacccatgaactttgtctcaccctttgacagggtatctgtgataaaatgaaccttttgtaactgctccacaacctgatgtaacagttttggctgtttggttgattctgaagtgaagctgggatgggtcaggagaacatccatgtcaccactggactctgcacctcttctgaaactgccacagactgtagcaatgtattcagaatccacttttttaacttcatttagtacaatatcttgcatttgtaacatctcttcacgaggaattcttttttcaaagtccccaaaatatttcagcccaattcgctgatgatggttcaatttatcttcattttttctgagatcttctagtgttttaattccttcatctacaaacttccttgcagcagatggaccaatgccactaactcgagtcaggaaattgatggatgaactcgtatcatcctgccgaatcttttccagtttacgtaattttccagttgctaaaaactcatcaatcttttcagcaatttttgttcctactccaggcaatttcttagcttcagctccactctttattttgtgtggg

SEQ ID NO: 337057 - DNA, 1000 bp, Homo Sapiens
tttaccataattttattgtaatatcagaatcacataagatatagagttaagcagaaaactgatgaattttcttcagatgatctttaagaatctcaaaagccttgaagtttgctatcttctactgtcttattagaaggataaaaaactttgaatgaaaatccacttcttggaaaagagccagggtttatgcagaggcattcggtatttgtcgtagtgaaaggatcatatttgtctgcaatgacaagtagatcgggcacaggatacactctcaaagcatagtcatatgcccaatacactgggcagacataaagaggtaggggagtcagatgtccttgggataagatagtctttacaaagtgattaggaatagccaaattgctgctaggaaaacggacgcagtttctgcacattttatttactaagtcttcacggaagacagtaatttcctgtgtacagtactgaattctgcaaggattagtagtaaaaactgaaaatggtaccctttgtctgaattcattagtgatgctttcagcaagtggtggccttggtaagatggaaccaaatccaggatcctctggaccaggtacaaacacaaaacgactactttggtgaatatctgggtattcacatattatatctgccaaagtttttagggaatctttcaaagcttgaacttgattttttccatatggtgcagatgaaaaattaccacacagaataaagcaggttggaggtgctggtgaataaccagcaaacattatgcgaagtttttccaatacttccacctggtccaaccaaacatcagataaaaacacaaacatagcatctttattctcctcttctagctgttttagttttgcagaagtcttcacagatgtattagaaggacctccaaaaaaattaatatttccatagtatgccctagtagtactagagggctcagtgggtggaaatccaaaggcattgacatgaaacacttgatcttcaaaccaaccttctg

SEQ ID NO: 337058 - DNA, 1000 bp, Homo Sapiens; identical to SEQ ID NO: 158011

SEQ ID NO: 337059 - DNA, 1000 bp, Homo Sapiens
ttttttttttttttttctgtatcaagcaaatttatttcgtcaaaacatctttaccatttgaaaacacccaacctcctacaacaaccgagaactccagagctggcatctcgcaccctggtgtacttgagcgcgtgcatggctgtgaatggagtaaagagccgaggccgggtgggggccgccacgcatcagggccccgagggagggaagacgaggggtggaagccgagggcccaggaggaagcagtggctggtgggagacccggaccccaaacccccaacagaggggacccagcgtggtctgggtgaagacccggcaccagctgcccccaggtgacctccctctgggggccttgttccttctgaggctgcatctcgcacaaatccacaggtgaatggggcgggctgggccacaggaagcctcaccccaggacgggagaacgtgggtggaggccacctgccttggggagtccagaggagcagcagccgtgagagctgtgggggccggattctggcagggcaggggcgtttgtcctgcagggatgggggtcgctgtgtgtccgcctctaggggctgtcaggcggtagctactgcaccagccggtaggtgatgtacctgccagccgtctcactgggccggatgatcttcaccacctgcccacgctttatcccaaagtagcgcgccacagggtcccccgcctggatcctgggcagctggttctctcggagcttatatcgggccagcagctctgtcacctcctccttggtcatgacgacgtgctcagggactagctcgtgctccgtgatgttgatgagcagctcctgctgcagaaactgctccaggatgtacttgggggccatgtcgaccagggactgcttggcggagggtgtcatgccctgctgcaccacgatgagagcccgtgtgatgttctcctcctgcatgcgctggcagtacaccttgatggtcttgatgcccaccttgggctcctctggaaagaacacaaa

SEQ ID NO: 337060 - DNA, 828 bp, Homo Sapiens
gagaaccaaaggactttttatacttagaacacatactgaaaaatgaggaggcagtagttaagctacaagaagcaccagatgccttctgggatgagttgccttccttgcctccacaacagcagccagactggacctctggacaacatgataagtgtgacaatcacacttcctagagtaggaccaagggtaggaggccaccaggctcagcttacaagccccaagtaatcgtccatcagggagccaatagcaaaaatgtcattcttgtccacacgggtccccacaatctttaagcggatctcatcgtcctgctgaatcacaatatcctcatccattgtcttgtaacatggtgggttggagttaggatcaaactccatctctgaagggatggaatgtcgagagatgaagcaagacatgggcccaatttctgtgaagagtccaaccttgttgacctgagtgacaacagcatccacgacctcccctttaaatggccggaaaacaatggccttgtacttaactggataaaggacaaagcctcggcctggctggatcacaccagcaccaatattgtcaatggtggtgacagcaattacaaagccatacttccctgtgcaggtcccctccacctcggtgaagagcttctgcttcaccgtgttgagcaagttggggccgaagtagcgcgggtgcagcaggatttcgtgctctagggagatatggtagaacatcttcccagaccaggtaggcaggcagagtccacacctccgacagtccctgggaatccaccggaaacacttagacgccgcaaccccagttccgcgcttggtgcgacta

SEQ ID NO: 337061 - DNA, 1000 bp, Homo Sapiens
ttttttttttttttttttaatttttggttagaaagttctccaatccatgaagcaatcctgaaaagacagtgttttattacaaaattaggcaaatgttccgtctccatcctttctttctttttctggtatgtgtgtatgggtgtgtgtggtttttttttttttttctcccttctctcctttgccctcacaacacggcgagaggaagccaatcacatttttcagtttattaacctggctggcagtccaatcacactgcagagtgaaaaaggcttctggcagcccagctctgcccagctcactgtgccttggaggcggtggtggtggtggacgcagccccgctggcagaggccactgtgaagagagagttctggatggactcagcagaggtggaggtggcgtgaaggctggctacaggtgcagagttccctgcagatgctgcggcggcagagaccaagctaacagggttgctggtgagcagagagaggttctgagggttcaggaacagaggggcagtcacgatgttgggggctcctcccgcattggcaaataccaggttcccagttgcatcaagtgatgttattggaagagagccaccagaagcaagagcttgaatagttgccagtgtactgttgctcattagagctgggctgagagcaccgctcagggtccctggattcagactgagtaaggcacctccagccgcaaactgtgagggtgccatcaggcttgggtttagtcctgcagcagctgccatggcagcaagactggcatttgctggcaactgtgcagctccttgaagggcagcagctgctgctgtttgcaaacctgatgctgtcaccatcacctggctggtcccaagaggggaggacaaaggagtggaggtggtctgtgttgtgctggtctcactggcactggatgcctcggaggtggaggctgaggcagaaggggagggactcagagagggggacgtgactgctgaggaagctggaggcgctgtgga

SEQ ID NO: 337062 - DNA, 1000 bp, Homo Sapiens
ggctctagagggggtagaggtttttttttttttttggtttgtttttggttttttttgtttgtttttcacctctggttcctttggggcagctggtttctgttgtgattatttttggttttctcttttgttggttagtttctttccttttttttttttttttttggttggttgtttttttggtctttcctcccttgtcactcctgctctgaggaccctctgcgtccccaccactggcctcctgcccctcttcccaggcaagggaccaaggcagggaccagaggaatgggaggggaggcatggctggccctcactcaggtttggaccctgcctcgggcccccctggacctccaggggtctgtgctgccgtctcgctgcaagtggaggaggaggaggatgaggatgaagaggatgaggaggagaggccaggagacttgctggagatggaggctgccacagccgcagccgctgctgagaccaggcccacaccaggcggggtgctgagcaggggcagcccagcatgattcaagaagagcggcgaggtcaccaggccagggctccccggggctgcaccggctgcccccagcaccagattcccgctgccatcaaggctggtaaggggcagggttccaccagaggccagggcccgtgctggggttcaggcctgacaagccgatagccgagtggctgccttgagggctggggtttgtgctgttggtggtggccgggggtgggggagtgacagaggggatggaattgagggggggcgcagccccgcccccgcccccaccccctccagctgtccggctggggtggagcgtccccacagctgaggataaggtagtaactgttgtgctcagactgctggaagcttgggacaacggtaaggtccccgcgcccccttggggtgtgaccatatgggggctgtagctggccggcttccctgggctgggcagcatgggggccgcactgcaggggttgatgcgtttctccttctggcgcc

SEQ ID NO: 337063 - DNA, 1000 bp, Homo Sapiens
gaattccgttttttttgcttttttttggggggagggtagggtagggaaatataaggggaaaaataaattaggctagattaaagctttggctatttcctgcttttatacacagacgcggctctcgcgacctcccctccggggccccgataaatacagtatactgcgatttaaattaagggcgcgggcggagttagaaggaccccaggagccgagaggctcacgaataaataaaaaccgtaaaaaaccaagcccggagaaaggggaaagcggggtggggcgcatccttctaggagagaagaggcgtgtagcgaataaagagacagccccccaccctggacccgcaggctcaggagtccacgcggggagaggggatggagaactctcctcgcttcgtcctctctcccggggaatccctaaccccgcactgcgttacctgtcgcaaaggggaggccgctcggggatccggccccgaacagcccgggggggcaggggcgggggtcgtcgaggggatgggggcagagagcaggcggcgggcaggatgcccggggtgagttggcgagttccggatcttcgctcctctctcccggggctcgggcgacgcagctaccgggctgtcttcgccgctcaccggagagggtgctccgggtgtttggttttgttcgaaagtttctgggcttttttttttttttgtaaaatccaaagcaaccgaacaaaaagagtccaggcccgggcgggctgcgcgcccgccctgcagcgcgccggcgggggcccggcccgcggggtcactgcactgagccgggcagtgtgtggtggtggtggtggtgcagcgccgccggcgggggcggtgggggcgcggagggtggcgatgcgccgcccccgccaggccctagctccccaggcgcgtatacatcgtccatgggcgggtggcccgcgccggccgcaggggtcatgcgcttctccttctgccgccggttgcagaaccagacgcgcaccacctcct

SEQ ID NO: 337064 - DNA, 1000 bp, Homo Sapiens; identical to SEQ ID NO: 158012

SEQ ID NO: 337065 - DNA, 1000 bp, Homo Sapiens
ttttttttttttttttttgaccgtacaagcagactccagccaccaggtttattttcatgctataaataaatttccctattagttcccattttcttatgttctacatgagatacagagacccagatattggcgtggtgaataatcaactgttttgtatacctaaataccaatgagataataagcgagacttgtaaagcactgaaactaaggctaacagcagcacaatccactatcaaaggatttaaatgccagaactgtgaaacattctctgtaggtgccgggacagtctggtggctgacaattaacgtccactccagcaccgagggctggacacttgtggtttctgttcacctttcctggcttggagcccagatctgtctcatgagcagagtaactactgaggaggcttctcggatggaaagttggttttaagccagaaatctggagagatgtcatgccaggcagcagcccccacgggcccaggcctttgtggggcagtgtcactgtctggtgtgccaccagtacccatgctgcaaggagtgggcttggctgctgtggttggcttgtccttcagtggttttcagattgtgtgcagttatcatgaggagtttgttgctgggagtgtacaggaaaagggaggaaaaggcatcgcagttgtccagtcattggaggatgaagtacgtcactcagggtgaatgatggttgggacgagagttgcctgtcttcagccagtgcctgtctcatatgtgggcgggactctgagcagcctggcagcgagggtatgtataaaatgcttggcctgcaccagggctagggagaggacgacaccaaggaggtcactgcgtcgtaggagagggccagcgtctgccgttacgaagagttgcaagagctgtgcctacttctgcccagataccaagaccgccagctcctggatggacatatccttgttgacatagcggtcatactgagcaggggtcagcctgccactctgcagggcctc

SEQ ID NO: 337066 - DNA, 1000 bp, Homo Sapiens; identical to SEQ ID NO: 336291

SEQ ID NO: 337067 - DNA, 1000 bp, Homo Sapiens
aaacagttgtttgtttaataaggttttaacacactaaaataaagacatttcttataaaacatgatcattcaaacctagtgaaaatttaattcactgttttaaataggttttggcaaagtgatggaaacatattggattaatggcaaaatatatttttaaaagatggaaagtgaattatgttgccatgatttttattacaaattatttccaaaaacagaaaaaataagcaaatgaatttaaccaaataaataccagtaattttttttactgttctcttcatataggagtacagagatagaggtgcttgaagagcttggcttctcatttatttcagatctcgttgcagattcaaagtcaatcttatttctcagttctacaggaactggctaagacagattcaaataactaaataagatcctattgcataatccaatttcgatattctcagtaaaaatttgaaaggaaagtcagagatcacaaaaacagaaatcagtagaggaatctgcttgtatttttactagttcttctgctagtttattgttttgctttgcttgcttttttgttcatttatatacaaagcttgccatggatatttttaagtttccatttaaccagcagactggtttgagataacaaattaaagatagacctgcttaataaattgatagatgatatagacatagatatattagttgaaataattaactatcaaaatactggagctcagcaggaaaccaaggctgcattaacccaatgttcttttatgttgaagggtgaatgtcatctcatgagcttattttctcttaccttgagaaatctattgtgatattgatggcctatactgatgtgattttttttttaaagataattgtttttgctacccacacttacttgacttgcaaatttttagaattttgtttctaaaagtcagaagcccagcaaaataaagactaagttatgtttcttacccaacatatgaagcggatgtgtgatgcacctc

SEQ ID NO: 337068 - DNA, 1000 bp, Homo Sapiens; identical to SEQ ID NO: 158013

SEQ ID NO: 337069 - DNA, 1000 bp, Homo Sapiens
cacactcatttagggcatctttatttgtaatataatggggatggagcattgcctcccaagcccagtgactgtgcctttagcaaacatttccagatggcagtggcaatcagtgactgagagacaaattcacagcctgcacccaaatgacaaaagttacgtttaatttacaatgtaataaaggttacaggtaaaaagctacacataaagcatgaaaaggcctattacacaaatgtacaaatctctgtacaaagcttgtatcaatgtttcctaactttgtctcctatgtttgttagccaggtctagtcttggagctctgaataacaagagctctcaattgaggggggaaagagcctccaaactgacatctaaaaattcctcttagagacaccagttacttccaaacaaatcttttcctttttaatttgaattaccccaactggtcatatcctttgaaaactgccttcataatacacttaaaagtaatgccttagagtagaggacagtactctggaattaaataagaaacttcagcaggaggagtgctcaggtttgacaagaaaaacaggtaaatttcaaacaatactgtaagttaaaactataaacctgtgtctatggcaccagtcacagatgaaggaaaatcgaaatgttttcattccaacaggaaggacaaaagagaaaagcctagctactggacctcaaaaccactgacccaaggaaacattttttagtttaaacctcagcttaactgcagaattctaagccttctttttgatcaaactgagatctatggcaacccttctgctacccgggacttggaaggatagtgaatataaattaggctctggacccccaaggctggtgatgctactgtaacctctacagctctggattcaacctgagggcctgggatatgtgactttacataaaaatgatcctagaaagtgggagaaagaaaggaggtagtggaaggcctaggaaagagccagggcagtctattgaa

SEQ ID NO: 337070 - DNA, 1000 bp, Homo Sapiens; identical to SEQ ID NO: 158014

SEQ ID NO: 337071 - DNA, 1000 bp, Homo Sapiens; identical to SEQ ID NO: 158015

SEQ ID NO: 337072 - DNA, 1000 bp, Homo Sapiens; identical to SEQ ID NO: 158016

SEQ ID NO: 337073 - DNA, 1000 bp, Homo Sapiens
tttttttttttttttttcaatatttgacaactttatttagttttgctaaaagggaaaaacaaagtcatgcagccttctccaaacacatcttaacatttcaaaaagctgagcaaatctcatttgatgaatctagagttttataaacactttgaatggtacacagtgacaagatgcagggaagatatatggaattttattagtttgattaccttggtaatgttatgctattaaactcatttctcattgaattagcattaaggtcatgataaccctcagcttttatcaaggggcctgggatattataataacttgaaaattccagtttggcagtaatgattatacttaaccatgatctttaccagaaagtcaaatatattctaccttaattcctcagaattcacattccttgcattcagctccaaggaaggagtacaataaaacacattcttataattcctgaaaatgtgataatgtgggtaaattacaatagcccattttaaatggaatggtattgatggatgtacttttataatagagactttgtaagagaatggggtcttgctctgtcgcctaggctggagtgcagtgtcgtaatcatagctcactgcagcctcgaagcctggggctcaagcgattctcctgcctcagcctcccaagttggtaggactacagatgtgcaccaccatgcccagctaaatttattttttgtagagacggagtctcactatgttgcccaggctggtctttactcctgggctcaagtgatcacctcccttggcctcccaaagtgccgggattacaggcatgagtcaccatgcccagccaataattaagagacttcaaaaaccagatcaaagtgaaagcaagaggacttcagtaaggagaaccaaggtaaaaaggtaaagccaaatagttaaaaaaaaaaatgtatattgtaaaattgaatttttactttttggtgaatcttattagtttagatcattatggataataaaacatt

SEQ ID NO: 337074 - DNA, 1000 bp, Homo Sapiens; identical to SEQ ID NO: 158017

SEQ ID NO: 337075 - DNA, 944 bp, Homo Sapiens; identical to SEQ ID NO: 158019

SEQ ID NO: 337076 - DNA, 1000 bp, Homo Sapiens; identical to SEQ ID NO: 158020

SEQ ID NO: 337077 - DNA, 874 bp, Homo Sapiens
ttttttttttttttttttccatttcagtaaaacccattttattgcagggaggtggagggagggatggcaagcagaggaggggaggcagctgcccaggagagggcagctctgaactgctggctgggaccagctcagtaggaacagatgaaaggaagtcttctgaggcagtgggctcgacgccagtggcctcctcgggtacacagggccacgcagtgaccaccgcgggaccagggctggtgagcagcccagtacgcaaagttccagcggctgccgtcaacccactgaaagcgtctgcagcgacccgagcctgtgatcctgcctccaatccagacttgaccctggttgagcgcgctgacagaacactggattcgataattaatattgaagttgtggatggaaaccaggttgcccctgtagcacctccggcaagtaaaccaagcttgactaaacgtctgaagacttctcaccaggaggtagcggcaggtctggcacccagggatgcccaccacttttactgtgtcctcttcctcaggacacgtaaggtttttgtccaccatatctggcactgagatagactcaacagccccatctttcttggaggcatcttcacttccagagccccactcctcctcttcctccagctccctgcaaggggtctcctccatctcctgctctggtgtctcctcatcctcaggcagcgtcttagcacccaaaggggtctcaaaggtggaagtctcagaccttagatgaagagcagaaactgccccaaatagaagagccagaagtaaggggagtttcatcttggctttatcccacccagagaccttcctgggtctttagatcttcccaaagcccaggtccttctttgcttcct

SEQ ID NO: 337078 - DNA, 1000 bp, Homo Sapiens
ttttttttttttttttttttttttttttttttttttttttttttttttttttttttttttttttttttttttttttttttttttttttttttttttttacgaggtcagtcgtcccacggacggctttattttatagtcaagttacttattaaaaaaaaaacacattttggccattttttttacagtgaacaattctatatacacattataaacattgtttgatataaaacagtatctacaatctacttacatttaattaacctgtgacttctagttcatctgcgattaactttagtcaggtcagtttctctgcttgaattgggaggtactatccccttaacaccttggtcaaacaggtactaagtgatagtgcaaaacaagcatttaagattctcatcaaccatatctctgacaaaaagaacacacatctctgagacaagagctctgaaatgtttttggatttgagacagcagtataagaatgtcatataaaagtaaagaatgttttccttttaaaatactccaaggctgcctgaaatgtaggcagctctggatttggggtacccctttgcctttccattaagtgggagataaacagattacagaaaagtcgttcaagaaggtcctattaaaacctttaaagctataacttaaaaatttaacaaaaagttcaaaattaattttttataaatagtgaaaaccactaactgtttttttaaagggggaagaatttaatcactataatgtcactttatcaaaacaacctaagagcagtacataaactatttgttaagtcaaaattaaggtctccatgtaggtttgttaattgagcagtgcaccaaatatttttaggtttccagaataccagagaattgattccctttcttatatagccttccagttcttctatgaagattttctgtagcaaaacattattcctaaatccagttttctgaacatgccaatgccagtggtcatcatccagcattaaaatagctttt

SEQ ID NO: 337079 - DNA, 1000 bp, Homo Sapiens
ttttttttttttttttttaaacaaaactttattggtaatagttttcaaatatgtttacaacagcacactgttcaagaggaagtctcgtccttcgcagcacacaggttgaatcgcccccgcacccacccggggccccaccccaggcctgagaactcctcctgggatggggagaagttatgagagggggaaatacggggatgaatggggtggctccccagcggctccccacttttctattacgagagaaaaaagcacaaatgagaaagtgggggagaggtgatggacagctgacagctaagctggaggaggggcgcccaggatgggggaggcggaagctggtgggtgagtaaaacaggcagcccctccccagcagctctagccttgaaccccgggccgtggcttggggggacttggcctcttctgttcccttttgcagggatgccctccccactcagctgagggaaggctggacgttaaaatctagcggagaataaaattaaggagttggggggaaacgctgctgggaggaaagacttgggcttggggctccccctctgtctttttgggggatgactcctctttggcagggagaggggcagctgctttgtctggctttcaaagcccaagggtgaagacaggtctgttggggaaaaagagagcggaggcttcctaaaggggcctagaccctcgcaggattggcagagaggattccccggggaggggcccaggggagattagcagcggggaggttcaaaccccagcgcctccctttccaaagtcagtctgcttctctttaaaatggatttgaggaatggggggacatgggaggggtgggagtagaggaaggagggagggaggcactggtggaacttaaataagattttaaattgttgtttttttaaaaaaattctagcaagcaacccactgaacatgtcactaaaaatctctccttcccaggcaggattactccgaaaggaaggttggcgcttcgttcatttgc

SEQ ID NO: 337080 - DNA, 1000 bp, Homo Sapiens; identical to SEQ ID NO: 158022

SEQ ID NO: 337081 - DNA, 1000 bp, Homo Sapiens
ggccctggctcccaaggcaggagccccgtgtgtcttggcgcccggcttcctctccaattaggggcaagatcaatctcacagctcagagactctcccactccggcatccgcagcagggcccccgggggaggtgggggtgcggcggggtgcagtggcgcgggcaggggtacacatttgcgggaggggccttgacttcttcggcctcaactccctgctctcagcctcatctcccctggggggcagccccttttgacacacttgcccacactcagacctcaatctgggggacctgacctcacagggtcaccaggccccaggggcaacgtcctggcctggttctggggaggaccgatcctcaagcatctccaggagactggcaggggtggggtgggccccccaggagaagcccacagaggcagccggggaggcgtgtggggaggaagctggcctgtcccttccttgatcttgggatgcattttgtccgcttgtcctttgatttggaaatgcacaaggtgatcatttattccaaaaagtgagtccggggaaggggcagtcctcacgctgccgggacccagccccacccggcccacacctcacacagcggctcccgggcccccgacacagacgagcagggcacggccaccacactggggagctggggctgcagggcgggagctgtgctcagacggtgagggagatgaagctgttgtaacgctgaatgttcctcttgaggatctcagagcagggccccagcacacgctcgaagcggggccggtccagcttcacacacttgaggggcccccgggccacgacagtggccgcccggggccggttcagcagcagtgcaatctccccgaagtagtcagagggtcccaggcgccccacctccacgtactcctcattgggggaccggcgctgcagcacggacgcggtgccctccgtgatgatgtaaaagtcgtccccaggctctccctggaccacaattttctctccatcttcaa

SEQ ID NO: 337082 - DNA, 1000 bp, Homo Sapiens
ttttttttttttttttttcaaacttgagctgttttaatcagataattttacacataaattcctagttagccagattgatttggttattctaaatggccaaataaatctgcaacacaccacaattatttctcccacacatgatgaatagctaataattttaaaaacctattgccatacagaaccatactttcttactatgttatgccctgggggttcgcttccacatgccacattgctatcatgcttttcaatgaattatgcattatgcacgtcagaaaactttaaagaaacaagcaaaaaagtatgaaaaacaataattcatgtattttattataaaagtgtgctttattgtaaggaaaatttaaatataaccaacaatactgaaaataatgtacgtggcatttatagccttggtcaaagttctttattaaacaggcgtttgctgttccatgaatagttaacaattagtttatgcaacaaaatagataacttgaaaaagtgagtaagaatacagaatgatgaaccaggaatctggagttcttttgtgttttttcttgtttaacagacatggcttttaaaataaaatctgaaatataaaacaagtcatcttcatgtagagagctctcttttcctacaagaaggttttgcaaaaatgttaaacagtgttctaaaaatgtggctgaagttatactttacatactttaacttcttatatatacattatccaattaacattctaaccacattttcatatacaagtgggaccataaacattctctagtaagactacactagcacagagtaattttacccatgtatatatattcatttgaaacctgtttcccaaaatgaaatcactcatttaaaagcaaacaactggttagaattaatgtctctagacactgggtcatggggcctagaaatcatgtaagagtatattgctttggttgaatataattaaattcatcttatgtggcagcatactgagcatatcaatgaa

SEQ ID NO: 337083 - DNA, 1000 bp, Homo Sapiens; identical to SEQ ID NO: 158023

SEQ ID NO: 337084 - DNA, 1000 bp, Homo Sapiens
ttttttttttttttttttttttttttttctttttttttttttttattgtatctcgatgctagaagaaaaatggcacataacagagatccagatacaaatgaacatttccacaaacatcttgcaaaacaacatcaaagtgaggaatacaaccatctttgtttcaagaaacggtgtctttttcagagcacttaattagctttctgaagccagtaacaaacctagatttgtaacaaatcccattcccacaggcctgagtctgctaggctccgcagccgtcttcttggttaaatcaaagcaggtcgtcattgtggttaataacatttgaatacatattttaaagcatgtgtaacaatgtgagtcacctttttttttctttttttttcttttttttgcatttgaacaacaacagaaacaaaaccccaaagcaaataaagtttgaaatgtaatgtaaaaccagggccctttgggggccttgctagagtgactgtgttgtttcagagagtggtgccaaatgcccttttcaagtagtttggggatgagggtgagcaaagacataaagtatcagaaactacaacactgaggtagcacccaagctggttgccctttgaccccttgaagtgcttttagattgagaccgtctaaaagcacattcttggaattttagaactttgatcatcttaactttgagtttacaaaaataacagataacattttattttgagcatgttcttttcaaggtctggtgcctccagaacaggtgaaatagagggattcctcttaggcaaagcaaccatacacttggatacaagccaagctccaggcccggaagtggaagagtaccgctaacatccaattatccacagattggatggttgggggtgaatatggcagtgcagaaaaagagggaaagaaagcaggcattttctctccccattgggtctacttagctgacatgctgcggaaaataaattgtaagaggactttgataatgtgttaatta

SEQ ID NO: 337085 - DNA, 1000 bp, Homo Sapiens
tttttttttttttttcatcagcatcccaaatttattctccagcagctgtggccgggtgggagaggctaagggaagaggaggggaggaggagagtcccagagagtggcaggcactggggagagttggggtgggtccgagccagacaggagccatgcacggcaggcgggctgcggggagaagtgatggcttcgggatggggaagtctagaacaaaagctgattgggagcctctggggaaagaatcctccatatatcccagaaatccccagagcacagcagcgggacgtactggaggaggggggcacgcctcccactcatctagaactagagtggaggcggggagcctcggaggccgagggctgttctggaacctgagtctggaacagccaaccccgtgaggctatttccccaggggcggggtctggggggaggcacagaactaccaagatggagtctcgaaccccatggagttggggatggttagtggtgtggtctctggacccgattggggcagagtccagaacgctaaggtcagggagaatatcgggctccgctcaagtcttgaacgcgggacggctgtagaggctgtatggagttcagaaggccaggaacgcttgggaggggcgtctagaacccgcgggggcagagctggaatgctggggtgcaggatctagaatgggacagggggtggtgaagttgggggtgaagtggggctgccgccggcacggcggaggggacgttggggacacctagtggcggcgggtgagattacatgacgggcacaggcactgggctggtggggctgcgggcatccgggtgcacgaagtcggggttcacgtaggtgaagccctggaaatcggcctggtcgatgctggccaggactaggcggtctggaggggtcagcgctggcgccgcccgcgtgaagaacttgtcaaagttctcgccgctgcggccacacgggcggggtctgaaaggaggcgggatctccaatcgttccagcc

SEQ ID NO: 337086 - DNA, 1000 bp, Homo Sapiens; identical to SEQ ID NO: 158024

SEQ ID NO: 337087 - DNA, 1000 bp, Homo Sapiens
tttgggtgggggatcacatttattgtattgaggtcacaggtcaagtcattcactagtccccactaggaggggtggcagggacagggctgggggtggtggggcgagtcaccaaggtggggggcccagggagggcaagctcctttacccatctttgaaggctgttggggcctgggaatgtggaccagccccgcctgggccccagagcagggcacgaagccccacaaaggtcctgccgccacagaggagggcaacagagccacaggcaggcccagaggggcgggtggacggcactgcaggggctggcttcatgccttcttgaggttctctgcgcccatccagctagagctcgtcatggtcgtcttcggtgggtgcttcaggcggtggctccgggcaggcggctggcgtcatcagctccatgaggtactcgcagcgactgggctctgtggtgctggtcaccatggtctctttcccgcacaggaggcgcacggtggtggagcggttggggccctgccagcagcccgtgccttgctcatacttcatggcactgaacttgtcgtggtcggggccaatccatgagccccaggtgccaaggctggtgggagagcccccgagtttgggtttctgcgagacaagcttgaaggggcagaggcggtagacgtattcgttggtggtgagctcgtagcactggctgtacaggtaagcaaactccccgttggggccaaagtcaaaagaaatctcttgctccaggttcctgatggactcctccatgtccttcagcgaccgctcggcctcctcgaacttgttgcgggcctcctgggcagcatcgatgaaggcctgcgtctgctcgtcgtagggcggcattttgtcttcctcagcagggctggccggctgcgggggtgacagtggcggtggggcctcctcggaatcctcctcctcctcctcttcttcagcctcttcttcctcctcctcctcctcctcctcctcctcctctgtgggcgac

SEQ ID NO: 337088 - DNA, 1000 bp, Homo Sapiens; identical to SEQ ID NO: 336297

SEQ ID NO: 337089 - DNA, 1000 bp, Homo Sapiens; identical to SEQ ID NO: 158025

SEQ ID NO: 337090 - DNA, 1000 bp, Homo Sapiens; identical to SEQ ID NO: 158027

SEQ ID NO: 337091 - DNA, 1000 bp, Homo Sapiens
ttttttttttttgtatttgctggccatgttttatttgtcctttttcttcaaacaggataaccaaagatacagacagtattcaataaaataaaatagatgaaacaaattctaagagactgcgatgccacatgctacgtttaacctaattttattcatgcttgccttgggatggggaatagatcattcagtaaaaacatacagtaaaaacaaaatgtcttatcatgtacaactttcaaactacaataatgatgtaccttaattacttccatgcacacaagtctaacatttgtttttttaaaaaataaacacaattaagacttctaggagcattttataataaagtaattcctaattaatttttctttgtagatagatcaagcacctccaaaatacaaattcctatacacagtgagcacgttacttaaaatgaacacttaagtaaattaagtacgtggacagccttaggataagctgacattatagatgcagctaggtaggcaacaaaccatagtgccaaatggaaaaagtatatttgcaaataaattttaaaaactaagttaattttttataattaaatacagaaaatatactgatttgctaaaataaataagatgtgatgtattaacacttcactataaagaatgcataccagaacatttataaacagtgagtgagttttattaagaatagtttactacaataaacgctggctaaatagaagtgcattttgtgaagcactatgggtggtatatgttttgccacatactcttgttaccttgaggtagataacacatgtgtaccaaattcggcattcattttcagttgctgctggtatcatgtgttttaagaaatgtgtacagtatgaaaaacttgaaaatattcatgaatgaaaaatgtcttaggaaaaaaatagctattttcatgcaattatgtacagtctcactgtgtaaatttcaaggcaaggtttgtttcctgtaaaacagatcaatgttctatgaga

SEQ ID NO: 337092 - DNA, 1000 bp, Homo Sapiens; identical to SEQ ID NO: 158028

SEQ ID NO: 337093 - DNA, 1000 bp, Homo Sapiens
tttttttttttttttttttttttttttttttttttttttagctttctccttttttttttatttcatagtatatttattagaataagagattagatttgttaaacatctaggttaaaatggttaaaaggattttcatacaattttaggcactatacacgttgtttacaacagcattggtacttggatatggggaaagataaatccgacattttaatatcttgatcaatttgtgacattcaaataattccatttaagaaacattaatcaaaacttaaagagacataccactaagtatcccacacagtatactgaaaataaatatagaaatacaaccagaagtctacagatcaccacagtagacagactggtgaagccccagctatcatggcagtgaagggctctggctagatttggatgtcaactgctgagttctacatgaaaagcaaataataataataaaataacatgatgtacactctctgatgctcattttcatagcagcaaagcatgcttcacatgcactgcctgtgaaggatctcacaaggctccctcctagagagaaagtatgcccagcaagataaagtccaccaaatgtcaaatgtcaaagtccgaaaatacaggcagacagccagtcatggagcaggaacagcagtgcaattgtaagaatgactacccacattcaccaaaaatttcactgtaattcagcctggcacaggttttgatcatcagcatacacacaaatagccccaagcacaaagccaatccacttaggggaacaataatagtaataagaataaagacagtaatattaaaaatgacaagagtagaatcttggcacatgctgtgttcttcatcctttgtcacaggtgaaatgcacatctgaacagagacaggcatgggaaggaggcccaaaagcgacatggcaaaccaccgggcaggggactcgctctttgttgcttcccaaacacttagacgccagcagcatgggttggtgtgctgg

SEQ ID NO: 337094 - DNA, 1000 bp, Homo Sapiens
ctctaaaaggggaaggaagagaggattcagggaagcaatcctctccatattgaacttgaggccaagaaagaaaaaataaggtttttttttcttctttttaaaatcaaaaccctctgttcttccttgtccaaaagcaatgcttcctggttatttatcataggtctatattttccctgtcaattacttcactccttgatcatcaagaaacctagagctacaaatcatagaacctgtgggtatatttacccacgagaaagaacttttgctgtttagtcaacttgctaggaactcccaatgaagctcatctcctatagaggagccagctattgcacgctgctgaagaaagatgcggcctcaacgcaacttgtggtcatctggtagtccatgcccaggaattaattcaacctttcccattatttcctcatcttatcaaagaattactcactacctttcattttctcctattctagcccttctatgaatagtaaggctgcttcactgaagaagaaaacaaacaaacaaagccaaagagtacattaactacaaaggcaatccttacaacttacacatggcaggagggacaaacgcagaagaaggcaccatttttttctgtgatttaacacatgtccccctcaaaactgacaattgtcctccttaccaaacagagatgctcatagaaaccacttggcaggacttgtgaattgccaaatagacacacaaacacacacatacacacaggtagatgaataggtaggtggatataaaatcatattacaaatcactttccactaatactataccacaagtgtcagaagaaccaaatgttttactctttgagctgttatatgagtgatttttatgttttccaaagttgggaaaaagagtatgaccagagcatcttgtcacttcccctaaaagatgtggtgatcacccaggattgggcagatgtttccaaaaatggcagcagtcacaacagctggaacagacatttcacaagaag

SEQ ID NO: 337095 - DNA, 1000 bp, Homo Sapiens; identical to SEQ ID NO: 158029

SEQ ID NO: 337096 - DNA, 1000 bp, Homo Sapiens
cttctgaaaagatataaagttttattaaacaaacctagaatcatcagtattattacataaattagacagcggtaaaattttcctagggcatatgtacaaatcacagtgatttccattgcgcaacaaacaagattaaaaataggcactcccctccctgaccccccatgagaaggtggggtcactccgcggggttcccagttctggctcgccaaggggtgcacaaacctgccaaggcactctgcctgtgtgcacagcatccggcagcagtcacaggggccccagaagcacgttggcaacaaggtgaggctgcccagtgttcagcacaaaaaaagaattcagctgtgacagctgagcagagctcaacagccatctcagagcacaaggactgtggaaaagcttcaaatcccacctgctaaaacacagatgtaatgctttttatatacagaacagacatgtccaccatggaagatcaaactaagcctcaacagaacttcccaacacacaacaatttacagagaaacatgacagagcatccccgttattaggaaggactgtactgctgggggcaaggccagatggtttgcaaagcaaacttgattatgaaaaggcttggtgaaaatacagcccaccttcaccaagacacacacacagacaggcacacaccccaaagtatccaaatgcattaagacacctgttcatgtgcttttcttcttgcttttaagtgaatcccgtccatttaagttatactaattagaaggcgttcttgcctccatcagcaagagaaaaacagtgcatacgactcctccaatgtgtgtaaaatgcatgctaggtagattgaaggaaaaacgagaggaacccgggcaccccatttcaaatctgtacaactggagaaatcaaaggctgcaaggactgtgtagacctgatgcaaagttaactggctgcaaaaataaaacccaagccagtgctgtcttgcactctgttcactcagcagctggagcaa

SEQ ID NO: 337097 - DNA, 1000 bp, Homo Sapiens
tttttttttttttttttttaatttggccttttggggtactttggaaaagtgagctgctcatctgtcattggaattatttttaaacatgtaaggaaaagctactgattgagttcaaaccaaacaaaatacttaaatgtatgaagtggtttcattaaattttcagaccttcttagcagtagaaacaagagacacatcactgtctgtagagttgtgctgtgtcatgggttttcctcagccaaccgccatttgcaataagtcatcaatcaagtggatgcatcgttaacaaattcccttcattgctaatagagactttacacacgccaacattctttttccctgaaaattaaccctattttaagtgtccaaatgttaagggccttgggcaaaagcaaactaaaggcagaaagaaaacaaccatccccttgcaatggaaaacaaaagaaaatgagagaaacgtgatgaggaggaattaccagctgatttcataacatatccatgcctcccatacacatatatatgaaatcaaaatctagacacatataacttggacatccaaaggggactgctactcttcatacattcaaaaagagttgttgaaatttctactcatgaagcagctcttgtaggcagttcggggatttgaaaatctcagggacttcactatccagcttgcagatgaccttgtatatggccttcttccaggaaggatcaacatctttgcctgcgataatggcattgaaaaactcccgtaatgtgatctgagcaacttccaggaatctctctggaacctcaaagtcatttgctttattgtagtgcatgttcagagccctgtacagctcacagtctctggttatagacagctcttcagtactggtgaccccatcgttgatggcttgacgtgcgtacttctccatctgaatgtagtaaaactcacggaaattgctaaaccacttgatgagctgagaggtaatgcatctgttgaactttacgtcggagaagt

SEQ ID NO: 337098 - DNA, 1000 bp, Homo Sapiens
ttttttttttttttttttttttttttttcacacaggtacacacactttattagtttcctctacaagagacaataacatcaatcttttttaacaggaatctcagttcatttgagaggccaaatagatccaaagaaggaagatgaaaattaaatacttaaattaatcaaaaggcactacgataccacctaaaacctactgcctcagtggcagtaggctaaggaagatcaagctacagcacatcatctaatatgaatgttagcaattacatagcaggaagcatgtttgctttccagaagactatggtacaatgttcatttgggcccaagaggatatttggccaggaaaggatcaagatagatgaaggtaaagccaaatcgaaagggataggtacaaaggagaatccaagctacatagtcaagcagatggtgatggatcaggcttcttcctcccaagaaacatttgctgcactgtgctgcctcccccctcaaccaccccccaccccccacccaatgtctgctcaagctgagctgcctgctcctgccttacagggtgctcagctaccaggactaggtttggggttgcccagggctcttgctataatttagcatagaccttggggagaactggtcacacatgggttgcctttgttgctagttgttctcaacaaagaaaaccctgaagcattcacatacaaagtagtctgagcttccccagtcacagtcaaacaccctcacacaacatcctcaaaagtctgaaatcttgcagcagctgagctatagttaaagctgcaaggcccacagaattatcaaggaagccagaatgagataatgcaggtaggaggtcccagcagttaatctcaatccgtctttccccagttcggataagctctaatatacctgatgtgggatgtagaaagctacactggagcaagccgggtcttctgctgaatttgtcatcaaataccaaggggaaacaagggtggggtggattttattctcaa

SEQ ID NO: 337099 - DNA, 1000 bp, Homo Sapiens; identical to SEQ ID NO: 158030

SEQ ID NO: 337100 - DNA, 1000 bp, Homo Sapiens
aagaggaacgtaaaatcaatttagtccaggcctgtgacataagcttacaataaatagtttctattggttgggaaaatactaaggttatgcatatgttgaaaattttgatagaaaagacagagaaacaattgagtttctgctaatagcagcaaactaaactggaactagaaaatttatggcagtttatttccaacagtgacatactttgggaaaaacaatttattttctttcttttttaaattctgctcaaatttcttaagtgtatggtatatgctttaaaataacatccctttaaacaacagtaagtaataaaaataatcattaagaattttaaaaatgagatctgtgaagaaatacctgttcacaatgaaatacaaatgtatttaatggtattttaaagttattctgtattgctatggtgaattttattatttttaaaattttgtttccctggccccctagcatttcattgacataggtaagaataaaaacctttggtaactttttaaaatttttgtacgaaacacttaatttccatgctttctagagtagaatgggaaaataatgcgactttcctgtttagtttaagaaatgcgctaatgtagaaaactttgtatccattcggtaaaccttgagaccctggcatacactccggggcgattaggcagggcacacttgtatccaaatgaggtcacaccagcaaggaaccacctgttgttttcttggcacattaatggtcctcctgaatccccctgacaagaatctattcctccttcttcatagcctgcacatatcatattttcagtaatgttatattctggcatctgctgttggcatctctcatttgatagaagaggaacatcagcttcttgcaatatgtttgcagtagtaccttgatatacaaccgtcccccaaccagcaatagaacaatttcttcctggaggaaaaacttgattttcttccggtaaacaaataggttgtatgtaatctgtgtaattca

SEQ ID NO: 337101 - DNA, 1000 bp, Homo Sapiens; identical to SEQ ID NO: 158032

SEQ ID NO: 337102 - DNA, 1000 bp, Homo Sapiens; identical to SEQ ID NO: 158033

SEQ ID NO: 337103 - DNA, 1000 bp, Homo Sapiens; identical to SEQ ID NO: 158035

SEQ ID NO: 337104 - DNA, 1000 bp, Homo Sapiens
ggagtttcaacgtttattgaggtcacggtggggtgaggtgcagggccggcctgtctcccggagccccgtgggagggagtgtggggggacgggtggggccgtcccggacgccacagtgttcggggaagagctgcttctgtccaaagatccgcctcgagggtttggagccaggctcggggtcccggccagcgctgtgggaggggcggttcaggggcggcccttggcctccacacggcgcagcgtggaacggatccagtccacgtagagggctacccgcgtgaagaagtcagggaaaaggcgggtggcacatccccagatcacgaaggagtctattccttggatgatgccatcacagatcagggggccacctgagtctccgaagcagatgccggccttgcggcgagggacgaaagtgcaaatgttatgtggccggcagaagaaggtgaccacggtgacattgagctcctgcaggacctgggctggggggtcgtgggcacccacgcggccccagcccatggccaggcactgggtgccgtggggcactggctggtcctgctgtggcagctggactgtggcgacggaggcactgaggttggctgggctgctcagctggatgaggagaacgtcgttcagtttgttctccgcgtcgtagttgttcagaaacacctgagccaccgagaagtgctgctgggtgggctcctgcgtccgcacgttgtgggctccgagcaccacgttcaccaggcgctggggtatgtcccgcaggcagtgcgcggccgtcagcacgaagctggggtggatcaaggtgcctccgcagaagtggctgcccgggttcccccgcatctgcagggaggccatgtagggccgggagtgtggctgcgcctcgtgcccgcccacgatctccgcagctcgggcagcaccgctcagcagcaaggccagcagcacggacgccagggcagggctggggggccggtgagccatggtggggtccagggtgcacccac

SEQ ID NO: 337105 - DNA, 1000 bp, Homo Sapiens
cgggggggctaacagaattttattgttaaatcacagaaactttagtgcaaaacaaaaatcacgaagtccatttaatagcaacttcatgtcctgctggctttgcttgctgtctcctggcaaccagaagtggacagaagcgtgggtgcccaagtgggccacagacagcttccaacccccacacccccagcatccaatccacacccagacagacccttcggcatgccgccctctaccaggaagccagaggcctaggagctcgccatccatatttatttgaaaaggtcaaaaggagcatctatgagacaagggaggggtgcaggctgaagcagcgcctcaacagccagggacatgtaggcaacacgagcaggcacagcgcggccaccactgtccacacgctcacacaagccaggcccgcagggcttcggagagctagcaggttacattcaggcagatggccctcttcccacccaaacccacagaaccccaaacaaggcatcaccaggaaagacacgggaaagccaaatcacagttgaaccagggacagagaacccttggccccactgatgtcccaagccaccagcagctgcttccaaaatccctatgctattacagtgggaattacatcatttaaaaagcctgattattccaggcttctaatctttcatataaaactgcctttgttttgctgctttgttcaactgagaggcccaggaaagcggggagggtccctgatcagggcaggaggccacctcagaagcccaggcccaccagtgcccaagcacatgtcagggctcagaacaaggcctcaaccaagagggttgatggcctccagtcaagaaactgtggctcatgccagcagagctctctcctcctccagcaggcgccatgcaagggcaggctaaaagacctccagtgcatcaacatccatctagcagagagaaaaggggcactgaagcagctatgtctgccaggggctaggggctaggggctcccttgcaga

SEQ ID NO: 337106 - DNA, 1000 bp, Homo Sapiens
tttttttttttttttttttttttttttttagcaaatgtggtacatgttttattctgctagaatcagtattactgtcacgttttacactgtatctcttaggaaatggtgagagccatccacacaatgtgcatttaaaggagactctactataatttcagctttcctactctttatagaaaccatcttctctgcaaacacacaggcaatatctctgtgttcatttctattgggagccctgtatgcaagatggagagagccacatttcccctgagatgttacgtaaaagtttgaggttgagatgacatatctgacactctgttgttaccctcagaagctactacatgtgaaattctaatgactgcattatcctgccaagtgaaagaggcaggcatgagcaaggacggttaagaggggtgggagccttatcatgatggggagtcttgttctgacatctttggaaaaactgtccacagtgtgaagtcatcaacttgttatcctggtttacagtttgagtagctgttgttatggtgtcgaacattttggtgagttctgagtggctcacatgtcaggtacaagggttttcccatgaaatttacatcgagttgtccacctccagcttatagggcttctggaacagagtgggtcttgctcttcgtgattccatgggagaaaatggaattggaggaactagtagaattcagggtaatatccagtcagagactttgactgtgatggatttggagctttccttgccagtggctgagttacgaacagagcaagcatagagcccactatgctttgtagttatttgggggatagagagcttttgtcctgatagctgaaacttcccattaattgtccaagaatattgtgcccgtgggttagactcggcgaagcaggacaagtagaggttttctcctgaacggtaataggtgaatgaagggtaaatgctggggaggtctggaccatagaggacattcagggtgactgggtcactgcg

SEQ ID NO: 337107 - DNA, 1000 bp, Homo Sapiens
tgggcgggtttcatggtgggtcatgttttaatcctagcactttgggaggtcacagcagaaggatttcttgaaaccaggtgtttggaccagcataggtaacctggggagatgctgtctcagagactttgactatcatggatttggagatttccttgccagtggctgagttacgaacagagcaagcatagagcccgctatgatttgtagtaatttgggggataaagagcttttgtcctgatagctgaaacttcccattaattgtccaagaatactctgccggtgggttagagtccgcaaagcaggacaagtcgaggttttctcctgaacggtaataggtgaatgaagggtaaattctggggaggtctggaccatagaggacattcagggtgactgggttactgcggatgccaccatatcggtcccgtatttcacattgatagggtcctgtttcatttctcgtgacactgggtagaatgagtatcctgttttcaatgggtcgctttaccctcggactgaccgggaggctctgaccatttagccaccaaatgtaggtgtagttccgactcttaggttcacaggtgaaggctaacacatccttcttctccctggggtttaagttgttgatggtgatgtaaggcatgggcagcttcgggaggagattcagggtgactgggtcactgcggctggcactcactgggttccgtatttcacattcatagggtcctgcaatatactttgtgacaccaaatagatagagggtcctgttggttttggacagctgcaacctgtgagtcatagggaggttctgaccattcagcaaccacaggtagcttgcatccggagtctcaggatcacagattaagcgcacagcctccatgacctccctggggtttaagttgctgctggagatggagggcttgggagtctccgagtataaggtgacagtgaaatatccagttactcctccagtcccatcgcctcgctttatgatgtgtaaggt

SEQ ID NO: 337108 - DNA, 1000 bp, Homo Sapiens
tttagcaaatgtagtacatgttttattctgctagaatcagtcttactgtcacgttttacaatgtatctcttaggaaatggtgagagccatccacacaatgtgcatttaaaggggactctactataatttcagctttcctactctttatagaaaccatcttctctgcaaacacacaggcaatatctctgtgttcatttctattgggagccctgtatgcaagatggagagagccacatttcctcctgagatgttatgtaaaagtttgaggttgagatgacatatctgacactctgttgttaccctcagaagctcctatactacatgtgaaattctaatgactgcattatcctgccaagtgaaagaggcaggcacaagcaaggacagctaagaggggtgagagcctcatcatgatggggagtcttattctgacatcttgggaaaaactgtccacagtgtgaagtcatcaacttgttttccttgtttacagtttgagcagctgttgttatggtgttgaacattttggtgagttctgagtggctcagacatcaggtacaaggattttcccatgaaatttacattgagttgtccaactctgacttatagggcttctggaacagagtgggtcttgctctttgaggttccatgggagaagatggaattggaggaactagtagaattcagggtaatgtccagtcagagactctgactgtcacggatttggagctttccttgccagtggctgagttacgaacagagcaagcatagagcccgctatgctttgtagtaatctgggggatagaaagcttttgtcctgatagctgaaacttcccattaattgtccaagaatactgtgccggtgggttagagtccgcaaagcaggacaagtagaggttttgtcctgaatggtaataggtgaacgaagggtaaattctggggaggtctggaccatagaggacattcagggtgactgggtcactgcggatgccaccatatcggtccc

SEQ ID NO: 337109 - DNA, 1000 bp, Homo Sapiens
ttttttttttttttttttttttttttttaccaggcggtgaaacaattttatttcacagttgtctttaaaaccacaaagacacctatgttcttcatataaaaacattagtatagatacccatactttctagaaaatgattatacagaccctttcaaagaaaaatgtattccattatataggtttcagtgaggttgcttggaaaaaactcacatctggactgattcctaaaacatagcattccaccactctgcaacttttggttcaaagtatagattattgtcatcagtatgtggtgcctgtattcttacatatttgataatacatatatagactggcttatcacttaatgttccattggttcatcagccttttctgcaggttcatcagcaggttgagcaggctgtgcctttctctgtggtctttcttcaagaccttccaggaatggagacacatcatcatcatcatagattgtaaactccaagtctttaccaacaattccaatggaaacattctttgtagtcaggtcctgttctgcaggaagcgtctctcttaaggcacgcagaccatgtttaactagttcatttaaattacactccataaattcagacatatgtctctccaagtaagtacgagctgattgggaacgggctccaatggacatggctctgcagtcaaaatagttagcagatggacaggtttggaaaatgtgagggcccatatcatcataaccagcaataaggagaccaacaccatatggtctccggccatatcgttgtgttggtatctgggtcttgcttccaattagagatacaagacgagacacaggcagtggtctatcgaatacaaatctggaatccaaacactcctgacgcataaaattacataacagtctagcatcagcagtaagccccgcaattgagataccaatatggttgtcaacatggagaatttttttctgatgagctgcaagctctgattgcgcccttttcaatgcaaccaa

SEQ ID NO: 337110 - DNA, 949 bp, Homo Sapiens
ttttttttttttttttttttttatagttataagacaaaaatttaatgaaaattggacagtatgtataatccagggctaaatagttacattggactggagtagaaatttaaaatacaatagatgctggagtaaatgttacatattatcatcatctgattcatcttcttccttcagagattccttagcatatttctctgcttcttctcttatatcttttggaacaatttcatgtcttccattagttaattcaccaacccagctgagttctagttcaaaagctttatccttaacttcgtcatgtactatgtaaattatttttgcaacttctttaacgatatcacggcaggtcatttctttcatctgaagcttctctatttccgtctttgcagcttgcctggctttgccgatggcacagccccaataaccgtatgaaacacctgatgggtcaatcatgtagagttgcgcaccgtcattcacactgtaagaccctaacatgaaactgcagccaaaaggtctaacagcactgtagagtgtatatgcatgcacatacatggccactctgtctgcaagatgttttagtggaatgttgtagccaaagttagatctgaagttggaagcttcttctcttgctatgtctgctaaagaacgagcatctgccaacaaacctgctactgccattccaacatgccgatcaacattaaaaagtcttttgttggaaccttcttcataaagtttagaaaggactaatttttctaccccaaagacaacaccatctttgcatctgattccaatagctgtactactattttccacagccttcatagcatattcaacttgaaaaactcttccgtcaggagagaatgtagaggctgacaggtcatacccagtgccgattgagctcatcgtgctaaacccaaagggacgcgtagggattccaggcccggagcgc

SEQ ID NO: 337111 - DNA, 1000 bp, Homo Sapiens; identical to SEQ ID NO: 158037

SEQ ID NO: 337112 - DNA, 872 bp, Homo Sapiens
acttcaggtttctcttttaataaacaaaaccatccaaggtacagttccaaagtacaaaatcaaccaggtctgaactgattggtgataagagcacacagatcagtccttccttaaggaaacagtttcctccctgatgccctctttggtcactatgcagatccggagtgcgtccccagtgtacacatctctctcagccgcagaaatgaagacatctttcaccagccgcatggctctgtccaaggacagcggaacatgctccacattctgcatgttcttaaaaccaacctggttgtcaagcaggggctgtagcatggcacttgctgagcctccagccttgaaggagtctctctggtaagaccctactggatcaaagctgtatacagccccctttccttcttcatcaagtccaccgatgatgttgtaaacatagtatggaaagaagcgccttgaatacaggattgtagacagcattgcagcaattgcccccgtagtcatggccttattattggaatgcttatacatctttagtcttgcttcaataatctttgtcagcgtaagacagtctccatgaaaaccgctgcatccaatgactgttttgtctgttaatttgtaacatttggggctatcccgcgtatgaattgaaaacccttcactcaatcgagtatcagaagcaacaattgcaaaatcttctccagcaattgccagtatagtacctccgttgaaaacgtagggcgaaaatcgcagctgcaaagggcccgcggctctgtgcggttccatccccaagtctctgccaggagccgaatacatggctgtagaggacaacatcgcacggctgcgcgacacttgctgtctcacggcgagatggctgcctt

SEQ ID NO: 337113 - DNA, 1000 bp, Homo Sapiens
ttttttttttttttttttttatatgtaggagaactgaatcaaacagattttattcaactttttagatgaggaaaacaaatgatacaaaataagtcataagaaatgctttcttataccactatctcaaaccactttcaatattttacaaaatgctcacgcagcaaatatgaaaagcttcaacactttccctttgtaacttgctgcaataaatgcaactttaacaaacatacaaatttcttctgtatcttaaaagttgaattactaatttttatgatgttactcatatttttattcatatacttttaatgacatcattgccaatacatacattattttctttaactttatttttacaataagccaacatctgtcatgcagccatcaaaaatcttacagtaaattacacaggtttgtagtccaatttagactccagcttcttagaatcagccacttttctgactgctttcatgaagtcttcctgtactacaaaatcatgatcagcacgaattgcgaacatacctgcttcagtacaaacatttctcagatctgctccattaaagccatccgaaagcttcacaattgcttcataatctatttcaccatgctttgtaatgggacctgcatggattttcagtatgtctaatcttgcttgttcatttggcaaatcaatatgtatttttctatctaatcttcctggacgcagcaaagcaggatccagtgtatctggtctgtttgtagccatgatcattttaactctatgcagagtatcaaatccatccatttgattcagtaactccattaacgttctctgaatctctctgtcagctgaagtaccctcagaaaaccgacgaccaccaatagcatctatttcatccataaaaatgatgcatggttgatgatctctagcataattaaacatttctctgatcaaacgagcactttcaccaatgtacttgtctacaatagaactagatacaacctttaagaaattgcagtccag

SEQ ID NO: 337114 - DNA, 1000 bp, Homo Sapiens
tttttttttttttttttttttttttttcactgtggagaactttttattgtttaaaaatcataatcgaagcttcaaaaaacatacaagccaagacatcccagttctagtcccccactccctaaaggagtacacagaactatccttcccctcctgctcccacactgctggccaggaccctgcccggggaggttgcctgcccaccctcctgcctgctgtacagtaagtcaccggctggggaggagccctgggggaggtcagggtggctggctcccagcacccccaccccctgcacgaatgcagcatatgagctgtgtgtgggaaaatggggacagtgccctgggcaggggacccccaagggggaaagagcctgtccccattccccctacccctccccagccccccagctcaagggaagctgtcatcatcatcttctgccatctccttggcaaactccaagtcctgctgttctcgctcacgccgttcctctgcagactccaagtccttgttgtacgatttgggaggaaacctcatggccttgacagacatgttgtggatatctaggcagaaggagatgcgctggtggaaggctagctggggctctcgggtggaatagatgtcaatcatctccttggattggacatagcccttctcgtggttgatgctggcctcaatgacaccatcccggatggccttggcaacaatgaactctgcatcttcggggctatccaactgcagcttctgggcgatgtcagccaaggagattcgggaataggagaggctgatcatgcgtacacctgtcttaatcacgttgtgccgcagccggataattagggtgtaggtcccatctgcttgaaacttctccccaaactgatccaggacctggttgaacttggctaggtttcctgtcctgacagcttgagtcagaaggaaatagggcatgagtgagcgcttgagggagggctggcggaactgcagccggtcagggatctcccccagcaac

SEQ ID NO: 337115 - DNA, 1000 bp, Homo Sapiens
aaaagttgccaagctttatttaggctgtaatggttacagataacacacatctaaccctatattccgtgcttcccatgcagtcccctaagcagactcagctaccctttccctccagtctcacttcttgtcttcctccttcttgtccttcttgccgtccttggtggcctgggaggccagggagcccatagcatttcgaatggcttcattgttgggatccacacctgggaggttctctaggacactctgaaggaactcggggtcctgcatcacgtcgtaatcatcctcctccttggctggctcagatgtgtccatagctgagctggcatcaatgtctgctgattccgcctggccaaactctgctccctgcagggacatctgcatggcataagcaatctgctcttcctcagtcatactgcttaggtcaggaagcccagtgcggccaaactcttgctggctgatggtcatcttcagcagggcatcgtctgagtcttcagtcccagtcgtagcaatcccggcctcagcagcagaagctgcagctgcccgccgggcctcctcctcctgccgctgccgctgctcttccatagatacacgaagggccaaggccagctcaggatcagcactgggatctactccaaattcaaagtcactggcaccaagacccagcatggcaccaccttcaccagccaaaatcggagaactgatgagagcatcagccaaactgggcccaggaggcactgtcaccagatgagaaccggttccatctttgccattcaacgtgtttacaaaggctgtcagcttttctgtgttcacctcctcttccccaaaattgataatgtcaacatttactttctccttcttgaggcgtttagccagtttcaccagatccttctcattgtcctccactgggcttcccacaaaggcaatgatgcgcatcttgtgattcttgccttgtcggtgcttcagagccagatgggccacgcggatgcccgtgcagaaggtg

SEQ ID NO: 337116 - DNA, 1000 bp, Homo Sapiens
ttttttttttttttttttaaaaatcaagccatttaattgtatctttgaaggtaaacaatatatggagctggatcacaacccctgaggatgccagagctatgggtccagaacatggtgtggtattatcaacagagttcagaagggtctgaactctacgtgttaccagagaacataatgcaattcatgcattccacttagcaattttgtaaaataccagaaacagaccccaagagtctttcaagatgaggaaaattcaactcctggttttagagataaatgaatgaagagtaccaaaatatttgttgacttctcttcatttttctcatacaatctgaagcctgagctgactatcatatccccaactcacagcagcgaaagctgcagttcagatttgagatcagtctccattcacttccacgtagcaccacagcaagagtgaccggaggcagagagctcttgttgggtcagctttctaataagcatgtcaagtgaaaaagaaccctctagcagcacactgatttagtttgtaagattttaatttacaaattaaaaaagctatttaatacatgttttactttttctcctttttctcctctttctttacatcactcttttccttatctttatctttctccttgtcctctttcctatcctttttgctctcttctttctcctgcccttctttcttctctgcatcccggttggcaatcttgttgttgatgaggttgtgcagggcgaccacggaacggatcagcgaggccaagtacactaccaccatctggtcattggtcttcaggtaaaaggccttgacgaactcctgcaggctgacatctggcagcaggttgaagacgtcctgcagctggtagatgatctggtggttgatgggcagcttgcctgtggcgactttttccaggtagctcctgatatccagaagcttggagttcagtcccttcaaaccatggacctggtttgtgatccgctgggacagagtgcccaccgt

SEQ ID NO: 337117 - DNA, 1000 bp, Homo Sapiens
ttttttttttttttttttcatttgaaaaattgtttaattcactgccaacatttattctttttagtaggacacttcaccccctttgttgaaaaaatctggtaccctggtccagcattcctatgtgtccacagctggctagaacagtccccctacctggggccatgccctcctgcaggccacagtgctgctggggccccacagtgggcgtccatgtttgagaccctgagcaatgcccaccagacagaggctgacccagttggaggctatctccaactcctgaatgccccaaaacctccaagttcttcagatataagaacttgtctctctgccgtcccaactggggagacaagggcctggaagagggaatgtcagtccacctttattgggcgaaaccctgcagtgtaactgttttaaataactcgtgccctgccccacccagtgcccggggggctcagacgatcatctccagctgccgggcatactcgatgacctgtttggccagttctgtggagggaatggtggtgtcttccggcttctgctgctggctggcaaaactgtagtagttgttggggcccaggacccaccctcgcttcttggcgtagtctgtcatctttttgggtgtgttgaagaagaggatccgggtggcctcagtgaaaaggattttctcgtaggccttctcgatgcacccagcgatctcatccctgatagtgtcgagcaggatgtcaatgaagaaggtgtagctctcggcggggatgttacccttggccaggaacactttgttgtagctgccctccatcaggtattgctccagggacactgggtgcttgatgtagacattggtctgtatgtccttggcaggcagccgctccaactccgtgtggaactcagccacccggttctgggacagcaggaagaggaggttgaggcccaagagctggtgcatataggctgactcggggagctgctccttgtaatcaaagtagtagcatttgagctgggc

SEQ ID NO: 337118 - DNA, 1000 bp, Homo Sapiens; identical to SEQ ID NO: 158043

SEQ ID NO: 337119 - DNA, 1000 bp, Homo Sapiens
ttttttttttttttttttagtgtaagcctttttccttttatttagaataatctttttttttttctttttctttttttttaagcaatttccccactcccaagttgggccagtaaagattacatgaaaactggcacacctattggctggaatacagatgcaccaaatgaggatttaaaaactttccgagcgaaaagtagaacaaaaagaaaaaagaatctcctagcattttcccccaaggtttcactctcccgccacacacactctccaaaggaccgctacagatccaactctatgtcagtttcttggctttgttgtagagggaatccactactttgctcatgttctgaattgtttccagagcagcttcgtaagttttatctactgggggttcatcgaaaataatcaggacaccctccccctggtccaaaatcccatgaaatttcttgtcaagaatcatctgtgataatttcctttccacgtcggccttggagagtttgatgagactagatatgtgttcaatctgtactctggaaaaaggctcaatgactcggatcagattctgttctagtaagttatcatacaacttggccaagtgtgtgctgatgattgggtcatcccggagctctgcccggtaatctgtcagagccttttcaaaatctgccagtgatctgttcttgctagcctgagccacgcattttaatgcttctgtctgcctccctgcataccgaagtgcaagcttcccgctcaccaaagcctggacatcttctggggtgttgagcatgattttgcacagcaacatgtacttcagagatgtgatggccttggggctgtcgatggagtcataaccctcaaatgcctcatagaagtatgagtacgcagttttccagtccttctcttctgctgcatggataatacccgactgcatgtccaaggtggcctgcaatttaggggggcagtagatggcatttgctgtggttcgagcagaagttaaggcagctcg

SEQ ID NO: 337120 - DNA, 1000 bp, Homo Sapiens
ttttttttttttttttttttttttttttttctgttagaacaactcagcaaaataaaattcctgtttattgttggacaacattgtttcacacatacatcaaacaggccaaaaaaaataaacagcaacttcatagacaaaaaaggaaaaaaaaagaaaccttttatctttggcctttttaaccatctcatacaaaccaactacttatagtacagctaagtacatacacaaaaaagttactggaatgctcggaataagattgtttttctgttgtcatttttgctttttttacaaggttttttttctcctttgagattataatgaacatggtcacaccacaagtaaagtcagaagtaggacagagaacgctccgaaggctggtttggtcatccgagatcattaaaaatggctgaccctaacaatatgtacaaaaatataaaatgtaaataaaaaatacaaacaaatttcctttttaaagtacttttaagaaaaaaagcagggccttggaagttttggttcttttttcctcccctgttgcaaattctcatggtttgggttgggtggtggagagcgcgtgtcatctgcgggtggcactgcccacggtgggcgggcgggcctctctactcgaaggtgaccacgtttagattctgagacgggaagtggagggtgaataggtcacggcggcctttttttttttagtttaacttttccttttttgctgtctagtcatcctcgtcggtcttctgcttcttggtatcgacatcgtcatcctcatcatcttcagctgcccgcttgcccgtagctgactcagcttcctcatcttcatctccaccctcctcctcaccatcaccttcttcttcctcctcctcttcctccccaccttcttcctcttcttcgtctacctcattgtcagcctcctgctccccattttcctcattagcattcccgttagcaggggcgtctcttccattttctgcctcttccacaacttccttcttctcct

SEQ ID NO: 337121 - DNA, 1000 bp, Homo Sapiens
ttaaaaacagaagcgcgaccatttctttattaaattatacaaaaagggaggggaggggggcagctgtggggctcggccccaaccccggccccaccccggcctggcgctgtctgagaagaggggatctgagggagatccagggatcaggcaggatagggatggggcaggacatgaggctgggggatgcagaggttaggtgggagaggctaccggaggaagaatgaggctggtaggggagggagaaagagagcaaagagagagaggagcaattgggggccagctggagagctcagatggagcaggtcaggaggtggaacaatggcagagtgagggtggagggcgcagtgtctggagaggcggaaatgagaaggctggggagaaagaagagggtggcagctctggtgcagggcccagagcagggagccaggtgaagagtggctggacttggctgcccccacccccacctccaggcccagagaggcctcccaaccccagcctgttggcaggggctcacgccgatgccccattttctgtcttctgccgtttgggatccgcttcatcctcctcttcggcagctctcttcagcgcgggcccttcatcatcctcttcttcttcttcctcatcttcttcttccccttcatcttcctcctctccatcctcggcagtttcttcttcttcctcctcagccccgttctcctcctcctccaccacttctttctttcgctctttccggcttgccttctcctccaccttctccttcttctccttcaggtccttggcgctcaactcggccgctgcctccacgcttttctccgacatggtgccggggccggggccggggctggcggggagccggggtcccggggccgagacggaggggccctggacggcggagggtggccgcggccggaacctggcgcggtggcggcggcggcggcgacagcggcagcggcggccgctcggcaagctgggtctctggaagaggcggcagaggcgcgcg

SEQ ID NO: 337122 - DNA, 1000 bp, Homo Sapiens; identical to SEQ ID NO: 158046

SEQ ID NO: 337123 - DNA, 1000 bp, Homo Sapiens; identical to SEQ ID NO: 158047

SEQ ID NO: 337124 - DNA, 1000 bp, Homo Sapiens
tttttttttttttttttttttaaatgtttacacaatttattttccttaaataataatttgctacaatcctgtcacaaatttaaaaaaatttaacacggtattcacaaaggcagaattctttaggacaatcaaaatgatggtgttcttagaataaattaacatcagattgtgtttatattcagatagtctgatcctctcctttgaaatgcaatggagaccattgtgactgggggtgaatgcacacatttgttcttccatacagagactcattctttatatatactcaacggtaatttgaatcgttaggaatcctgagaaacactcacccctgggcacacacatgtacacagccccacggccaaccctccagaagctgggtttcccatggttcaattactagaagctcttttctcagaaggccaaacattcggaatatttagatgacactgtcccatctccccttgggaaaatcataaggtttcaagtggaggagcttgaagtagcagcaatacatgtaggagattcagtagtcggtgattccagtcctgggtgctgagtgtgcagtaggaggcaagcagaggcaagagacacacctgcttctacaactaagccacaagatgaccagaacacactgagagtaccagttctcagagcctcagctgaaaattcacctgaatgcacattactaatccaggttaggcaccaagagggaacctgaagagggacacaattctcagaaacatgaatattggaagtcgctgggagatgggacaaagggagggagggcagagaggtgttgctcagccttcagcctgacccccagtgccctgccatctagtacatacgtcagggtttccttagcatcagggcgggtgaatctgaattgttccagctccacctagaagcacagaaagctcagcccttacagtctgacacacagaaacaaacaaaacatccaaatgacccaagataaccacaccatcttgttgctgggaggaca

SEQ ID NO: 337125 - DNA, 1000 bp, Homo Sapiens; identical to SEQ ID NO: 158049

SEQ ID NO: 337126 - DNA, 1000 bp, Homo Sapiens; identical to SEQ ID NO: 158051

SEQ ID NO: 337127 - DNA, 1000 bp, Homo Sapiens
tttttttttttttcagggagtcaaagcttttattacctgatagtccctagtgtggtgccagagataccgctctggtcctattactccccatgatatcagtggtggggatgggggaggggaccagggagagaggggagggatatttacagtgcatggtggtacggggacaaccactttcctcgagagctctgagaactttgtgctttttttcttagttggtgccgagctacctggaatggattttgtgtttatcttctttagggaaagatgtattaaccaaagcacaatccagcccaatttctcggctgaggatttcacgatatcaatccaaacatcacactatttaattccccaataaaacattggaaaaaggactatcagtgctaacacatttacatataaaatttccacctaataggtaatagaagcctatgtaccaatttctaaaacagttataagatatatacacaatttggggtatattaacaaaacagaatattacaaaatattaaaggcaatcctcctggtccacggacccttgttgccgcttacttgaagttggcataatctgagaatgcatcaatatactcctgcaccaccttgtagcagaactcatactgttccagtgtctggaccatgtgtggcctctgtagccgcaggctcttgacagtctggaagacatccaaaatcccctctgctttcacacgctccaggacggtgctcagggcacagaaggtccccgtccttcctgccccggcgctgcagtgcacggtgatggggtggttccctgactgctgctgctgcttctgcacggcggcgatgatgctgatcatgccctttccgtcactggggatgcccacttcaggccagccatggaagtggaactgccggatctgccggctcttattctccctggtgttggtgaccaggaggtctcggacggtgtagctctcacattcctcctccttcttcagttccactgtaatatctccataggaca

SEQ ID NO: 337128 - DNA, 1000 bp, Homo Sapiens
tttacaggttgaattagttttatgtagaacaagtcatgaacactttagtgtggaaaaatagtattatataaagcttaatattaaacattatgaaaaatacatatttacagaagaaactacaaaatacaactatgtacaataatatctgttacctttaaattatataaaattttaaacattctccagattaataaattatacatagtatcaacagaaatagctggcacctctgtagggcatgaagcaagtttttaaaaacaaatcacacagtgaataatttttatccaggagctcttcaggtacattctcaatgccttgaatagactggatctctgtgatactctggattcacattttcatagattggaaacaaggggttttcttgttcactccgtagctttcttgctctgaggacatctcttacacactgatgtaggtagacatactgacactcagtctggaccatgtgaaccctgtgaagtcttaggtcgtgcactgctccataaatgtccacagagtctttggagtctaactgctggaggattcggtccaatgcaataaaggttccagtcctacccacaccagcactgcagtgcaccacagtgggcccagcacccgggcttctgttgatgtagtccctgacagttctcacaaactggatcagagactgggtggtttctgggactccatggtctggccacaccgtatagtgaaagtggcggatgagtctgtgtgcatcaagctgttcctcaccgcatatcttaaactcccggatggtccactcaggcaggacggactctgagagcatctgcaggatgaggtccccatagtagagggaatcctggtccgctggccagtaatggtcacactttactcggcccttctcaacacactgggtcaccatgacgatgttgtgaacgttttgttcccacaccattttccagaagtcatccttggtgccaggaagcggtccctgagtgacaatgtattctcttctgaa

SEQ ID NO: 337129 - DNA, 1000 bp, Homo Sapiens; identical to SEQ ID NO: 158052

SEQ ID NO: 337130 - DNA, 1000 bp, Homo Sapiens
ctggggagaacagtgatttaataaattatgggatagaaggaaaaatacatgtggatggtggggtgcagagagaccttgggcacagggactccctccgaccccagattatagaagactgatttggtttctgaagtaaaatcaaggcaggatccttcctgcctttggtcctcaagtagccagaactccagacccaaattccttcctgcctcagaatccaggccccagcctgtttctttctgcatcctggaaagacctagggaatccaagctatcatccctctcctccttcagggaaccaggaatccagatccccagctcccataggactcatctgaagcccaccagaccactctctcctggggaaaccagagtttgggataccagccccctcctcccacagcacccaggagtctgggagcccagccctctgctcttccaggaatctgggctcaagtgggtgtccagagcttgaggatgcctgggctgccgacccagccccctcgtcacttagacctccaacttgtgggcctggatggcggccacgttctcgtagatgaggttttcgacatcctcatacgggacttccttctcggctggggcctgggctgactgttggaggaaccgcaggatgcactgatgcaggaatacgtactgagcctcagtctgcaccatcaacggccgactctctctcatcttccttacaaagctgaagggcccaaggagaccctcggactgcagctgccggagcaggacgtccagggcaatgagggttcctgtgcgacccacgccagcactgcagtgcacaatgggtgggcctccctccatggtctgatccagccactgccgaagcatcctccagaaagccagcaaggtgtctggggaggagggaacgccgtgatccggccaggcctggtagtggaattggcgcacagacagtgtcttctgctcctccacctggaggagcagcagttcccgcaccgtccagttctccatcacttcct

SEQ ID NO: 337131 - DNA, 1000 bp, Homo Sapiens
gaaaactgggagggaaaagggaagaaaaaatggagcacaaatcacacgggggcaggggaagcggggccggggcaaagaggcctcccctgatcaaatgagaacagaaatgttactgaggaagcaaacctctgatgctaagctactgtttaaatattccgtatattccaattatgagattcagtacaaaaatatagatctctactgagttttgcctgtggaagcataattcagaaaaggcacatgttcaaatagaaaacccattcggaagaggtgccacgtacccctccctgcgcaatcatcatccacaattaggtattttccatcggctagattccaagacacagtaggtaaaaatagacctctgatacttaaaatatattcaacccaacacaatcctggctttagcatgtgaatcatataaaatagtctttttaaaaaagaaattgttttggaaaaaaaaatcatagatcccttttcctggttttccgcaatcctcaagggggaaaaaaaaaaaagtgacctcatcccattggtcatcaggaatgcagatgatttgctccccacccatccacagcccccgacagccccaatttgtcatctatcatatgcagcttcatgccctcaaaattagttctcacaaaacagaacaaagaattaagatattagacatataaaaacatgtcgacatcggggcatgtgccttcgctgtgggtgcgacggtctggttcactccagaaaggttattcctttggaattaggcgatgtaaccattggtctttccaaatgtggtcacgggcgcaaggttttcatagattgtcattgcagttgtgttctggtagataagatctacttttgagtctttctgggatctgacaatatccaaaacacactgattgaggaaaacatactggtcctctgtctgcaccattaaaggcctatgcattcgaaggtcatacacaatcccatacacatccacggtgttctcattctctatctggta

SEQ ID NO: 337132 - DNA, 1000 bp, Homo Sapiens
ataattataaaaactttatttcattcttactttaattaaatctttataagcaccatgtcatgagctggcaatctagaaagaggacactggaatgctttagtcaattacaaactgcaagctgatgatgtgaagttacagctacgtggagcatgtgaacaagaccacatttagaaaggttcacttaagaatcccatgacaatgcgcaaaacaggaatctggcattgatttgttcacactttttatagtcagaacgcaaagcttgtgcatgtaaacatcaagagaaacattttatcaccctgacagtttacagtttgctcaaatttgaccctgaaagcatatatgttgccatcttgttttcttgaccagtgctgggccacaggctgaaaaactccattcctttaaaatttaaatgatgcttaaaggctatgttcaacattgtgcaagttgtcagcaaggccttttaatgtgtacatttctcatgtatgatcaccaaaccattatttacctaatgaaattgtgaaaaactatacatattcagcaaaatgttttaatttggtcctatattaaaagacccaattgccaagggattttacacaaatttaattcacaagcatgtacacaagagaatcactataaagaacattgcttcctggtttatgaataaaaagtttatcttctacttacactaaaacatacaaaaaataatctacaaaaatcgtttacaattgattttagctaaagaaaaagctttcttcaggaaaaaaagatgattgtgtggtggtagtattttagccatcaaaaaaggaatgtaagtaaccaataaatataatgtgctttctccatatagacatatttacacttgagtctttggcttatgttattttctaaaaagaactttaaatgatccagccatcattgcacattaaaagaaaataagccagttatatatatttatatatttatatagagatctgctacactggaaacatataaaaaacga

SEQ ID NO: 337133 - DNA, 1000 bp, Homo Sapiens; identical to SEQ ID NO: 158053

SEQ ID NO: 337134 - DNA, 1000 bp, Homo Sapiens
ttttttttgaatcagaagtttaatatgacacaattaaatatatttgtatatctcacaccggaggtttctcttcaaacataaggagttagaaattacaagtaggcatatgcttcctatattcagataaattcatttcgattaattaaattccagatagagagaagtaattttggaaaagaaatgatagctatattaaagcagatattcattacaataccatgtagagacataagcaatattttggcatcattctgtccgctcagtaggccgtgttccctctggtagggcctttggagagtaccatctatctaagatggaggaatgctgtgggaagggcgggatggaggtgcgttttctacgctgaaccccacacaggaaatctgcagcccacacagctgcctctgcgccgccttccatgtgatcatcctggtcaatgaagtgaattgtcctatttctggggtagggggtgatggcgaatcggatactcaaatgttattttgtcaaatccgaatcatctctacgtgcttaggtttacatgatgtcaaaacacgtggttcattaagtgatcccgggaagaggggcagggccggtcggctggtttctcacttcccttccaggctctacgcagtgcgtgcaggtcgccctgatctcctctcccgggagggaaatgctcgcagccctctccgagttgccctgatctccttctctcccaggagggaaatgtcccctctctggggccccacaggtccgggacgtgcctggaggagccagcgggggcctggcagggttcgtgtgctcccggggaccctcatagcttgctcaatgcccagatttgttcttcctggttgtggttatctcacaggtaagcattcacgggggcatctgttttcataacgtagaaatcaatattttaacattaaaaacacatctcaatgttggggtgcatctgtaactttgcaaaggtgaggtcaggggagtgccagcctcaagtgggcactac

SEQ ID NO: 337135 - DNA, 1000 bp, Homo Sapiens
tttttttttttttttttttttttttttttttttttaatggcaatatttatatttatttttgcaattccttggataaaaaccatttgaacaatgtttggtaaggtgttattctcataaaaacttctttcaaaatgaaggtatttctattttccacaaaagttaaaattacatgctgaaacaaagttaatgacttaggtaacacaatacaatgtcagaaaactggtagagtaagaccagctaatgaactacgtcattaaactaaacaattacacagaactagaaaacttgactcagtagtaaaatataaaaatctacaattataaatataaatttggtccatggagacactagggcagtatttacaataagtaacagattatttctactttaggtgaatactgcagttgtaaaatgttgaatatcatatggaagagtgttttatttacaggctactgtattaaaagttatatttctagcaaacctgataattgctacaaatacagctaaaaatttgacactaaaaacaaacattttctgtagtttggaattcctaacctctataaattgaaattttctgttaaaatcaatacagaaaaaaataccacaattccattcttagaaatactgtaaaattcaatcattttagttcaaacataataagtaaattacaagtcttgcaaaaaggcacacattgttaatgatataaatttggcggcagaatcctatgtcatgaaagttactgtcaggtgatgggaaatcaacagataacagaactagactgattttcctgcctaattttaggaagaggaaaacaatgctcagatgtgagtccccccacccctttctgtgttaaactaaagactctaagctctcagctatatttccatcaggcaatgctgcaccattactgtccagagaggtggatggattctcttcctgccttgtgctcacaaggctgaggatcactttgtagagaaactgatactgctcaatgtcagca

SEQ ID NO: 337136 - DNA, 1000 bp, Homo Sapiens
tttttttttttttttttttttttttttttttttttttagttttataaaatattttatttacagtagagctttacaaaaatagtcttaaattaatacaaatcccttttgcaatataacttatatgactatcttctcaaaaacgtgacattcgattataacacataaactacatttatagttgttaagtcaccttgtagtataaatatgttttcatcattttttttgtaataaggtacataccaataacaatgaacaatggacaacaaatcttattttgttattcttccaatgtaaaattcatctctggccaaaacaaaattaaccaaagaaaagtaaaacaattgtccctctgttcaacaatacagtcctttttaattatttgagagtttatctgacagagacacagcattaaactgaaagcaccatggcataaagtctagtaacattatcctcaaaagctttttccaatgtctttccttcaactgtttattcagtatttggccagtacaaataaagattggtctcaactctctctttcattagtctcaagtgttcctattatgcactgagttttcagaccttcccaactggcatgtgttttaagtgtgagtttctttctttggcttcaagtggagtttcacaacatttatgaaacatactgagctcctccatgtggctggatctctgtgactccccacccaacaatattcccccggatgtgacaagactctgctcctccggtctctcttatctcttcattgctaagaacactatcccagatattgaagcctgtgagtctcccagagaaggctaatgtttcatcaaagccaccacccacacagcagccattcttttcttggccaatctgcaggattcctccctcaggaacaatgtgacctgtggccatctcaacagtggtagccgccagttcaccatttacccacaaggatgtgagcccttcctctgaattccaggtgccgcacaggtgggtccaccttcc

SEQ ID NO: 337137 - DNA, 1000 bp, Homo Sapiens
ttttttttttttttttttttttgttttcctccaaggcatttattaactcctgagtgtcacggggccaggggaaggctggagccaaaaccaagtctctgggggcgggggtcctctctggatccccactactcagctccccgggctccccatgcagccctagagacgggagaagtccagtgtgctgttccacctccctccaagtcccaagaaagtgggaggcagtgttccactccagtgtcgtccagacgaacaagtccaaccagtctggaaccctaggccggcgtggtcaggtcgggggcgggagggccgggcctggctctgtctctgtctgtgtccaggtcacacataaactgcccgccgtgagatgagggagccgtccagctgggactccatgtcatcctcgagtgctgggggtggaggcaacatgaggcctttctctgccttctcttcctcctcctcctcctcctcatccttgccatctggttccatgggaccagggactactggtgtccagaagacggggtccccatttcccaacacctgagctttcggatcgtagaatcccccgtcgccactggctcctcctcctgctcctccagggctcttcctcctcctcctcaccctcagcaggatgaaggccaaggaccccccagccagaagcagcagcaccagcagtgtcccccccacggccccccacaccagcgggcccacatctcggggcgaggccctgggggtttctcggacaaagatgacctgctcagcgcggcccatgcccacggcattggtgactgtgcagacgaaggtggtattgaacagactgtccactgcgtggatgaccagctgggagccctgggccactgcggaggtcgggaaggtgcctgaggtcgtgctccagtcatagcccgtgggctctgggttgctgcggacgtcacagctcagggtggcatcagtacggccgaggtaccagttgtcatcatagccggagatggacacttcagga

SEQ ID NO: 337138 - DNA, 1000 bp, Homo Sapiens
gaattccttttttttttataggatatctgagttttttttttttttttttttaatctgaacagaaaataagtatacaagttcgctaaacagaagtggtaaaaattgaatgttatgtattatggaattcagtacatcagtttacttcggtagccagtgattgttatagttaattctgcaaaaaaacaaaaccagttatgcaaaaacaagagtacaaaatgcccctttctgaagctcagtttgagaaactgatttcgtatctagcttattgattatactcagtttcaattctccctgtgcaaataatacataaagtcattaatgatgatttgatgaactgaaatcatcttcgcttaggatcgtttgacatcataacccaaatataaaaaagttattcaagattcacagagataaaacagtgcctcggaaacataattcacccatgtatatataataattttagaacatactttttaaacataaaatcacagtcaaagacagtgatagcattgcatactcagtgcattatttcatgtagtgccttcctatggctcatttggagtttaataccaaataaccaccacacttctaatgaatgggcttctaacacacacaaatttgtctaattctcttaaaaatctagaactcttataagaccttgagcctggcatgttaaggactttgtgttttaatatcccaaacattgggaagattaggtgtgatacatggtaacccctccttgtaagcaagactgcacatatactttaaacaactcaatactgcagactgagaggggtacatttatcatttagttaaggaaaaccaaaatggcttttcctggagtcaaatgcactccaagacacacacaaggaatgagtattactgtggcagctaaagaaatctgccactgtataataaacgctgttatgcaatgatgttaaacatttaaataatacattatgatttgtttccaactaccacagggcacaggaaaatgaaactg

SEQ ID NO: 337139 - DNA, 1000 bp, Homo Sapiens
catgggcaaactttattggcataaatcacaggaattgaaatgggaaaagccagcttggaagtttacagagaaaaaataaaatcaaaatcaaattttcaaataaccactgactcagagaatggaccccagaaaccccagtccctcttggggaagatctagggtgggtcactataaacagagcggtaaggcctgcgggtgaaagtggagacatcagacctttggaggggctgggctgaccttcccccaaaaaggagggaccctcttcggagaccccagcacactcggcttctgccaggaggccagtggagtggtttggactgtcaccattagaccccggtggcccctttctggtcatcaggagcccaaggcctggctcctctttcatccttggtaaagagctctggggggtttccccagaggagcctgtccctctgccccaaatcctatcatgctcccttatgaccttctttccagaccccctgagtgccgatcccacctgtgaaaggggaggagcagatctggggaagggatatgcccagaggtaaatcaacaagaccaaagagacgtcagagtcctgatggccaaaatcagacacagctttcctgagaaggcagaagagagagccccatagaagcaggggggctcagaaggttcaggggttcacaggggagcaagaggctcctgagggcttactcagacaggaagcagccccccaaaacatacttccccttctcctcccacagaaacagaacagataaagttcagaattctaggcccaaaagggtgcaacactcttcaaccagtttcagtgaaggcttgctggcctgggaagtaaagaaggggtttccaaatagcagcagtttataaaacagtcctgggagctatgaagtgaaagagggggagtcacagagctgctcccagcacacctgcttgtgctaagaaacaataaaatacatattgcttccccaccccaccccacagacaaagcaatctacacacc

SEQ ID NO: 337140 - DNA, 1000 bp, Homo Sapiens; identical to SEQ ID NO: 157578

SEQ ID NO: 337141 - DNA, 1000 bp, Homo Sapiens
tcagccaaccacagccacaaaggtttaatcagtttttatctcacaaggcagtaacaatgaggggcacagtggtggtcagggtggtggccccagtggccaactaggggagtatggcctcctccacagagccgctgcctggggaagatgctgtcagggcacgaccacagcccagcacttgccccactcaataaaaggctgtagtgctctggtgggctgtgcaccgtgcgcagatcctcctggtgggcactggaggccagggagaaaaagagcctccccgcagcccagatccagcatgcaaggtgctagatttctcggcaattccacagggaaggacagtagcctgttccctgccctctctcttgggcaatgggaggcaggttgccagccttggggaggggcaaggctgtgaggggctcacccccacctcccagtgccaggcctgctgtccaagcagagcacaaatgggttcctccgggacccctggtcctttttccagacgaggctgtggcactggtggaaagggagggagaatggagcctggcccttgtgtgtacaacaggaaatgcacctcaggacacagcaggagtcagcgggagggcacagacctgccccctgccaggcagaaaatgggcctcctcaagcacaaaagtgaccaagtacaattttcagttgctaaaacaagaaaaggcttcagctagtttcatttccatgtgtagttattttctcttttgaataagcaaaaccaagctaagctgtgtcagccaacttcatcctgaccaaggcctctgagacagcagacacaagcacccactccagtgtccccctcagtcatcccgggttccaagcacccacacaatgcccattggatggctacaaagggaaagccccatctgggtccatgacccatataccaggtgcagagccaggacagagggcagggggcagggggctgtgaaggcgatgcctagaggatccgacccctcccggcatggccaggagg

SEQ ID NO: 337142 - DNA, 1000 bp, Homo Sapiens
ttttttagtttgaccagaagtacatatttattcagcaaatatttttagtgtctattttatagagacaaataactccattccttctaagtaaatgtataggacagagaatccaccaaaatatacagcctgtatggtcctcaaacatttccatgctctgtatctgtgctgcagggggcgatatactcagcaaccacagactcatctgtctcatagtaatcatagactttaacaattgctggcttcaagtctcctactgggatgtcttgcagaaccatgaaggaaaaacttagcgtctgatttgtcacctgttccacataaatgaggacatggttgttgctcacttctgtccggctcacagagctagatctttcaagcatttttactgttggtttcaggggaataaaaccagataccatctttacatcaacaatcaccatattggaagcaggacggtttcctgtgtaactgatggtcagtgagatctgaaagctggtgtgggctttgtgtccatcgcaagtctggggcacagtctgcacttttaaagcaaatggggagtcctctttctctggaagaatattgtatttcatggatgtctgaagatacacacatctttccccagttactgttatgacatattctccagggagctctggcaatgagatctgctgcagtaataggaggttgttgttgtctacttggaaatttgtagaaaaggtctgtgaatcctgaacggtgacctgtgcagttttctcagttctggtgaaagtggctgctccatacctggacagggcatggagagccaccactgtgtcctgggtggaggagaaaccaccttgggcgttctgctgcttcatgatccacttcacaatgttagttgcagaggtcaggtcccctgaggtgggggctggctgggccgtgagataagcgaggagcacataggatgtcatctccacctcagcagagggagcctgggtttggtaaagatgccccactggtgcct

SEQ ID NO: 337143 - DNA, 1000 bp, Homo Sapiens
gactttgtagtgtttaatacaattcagttcgtagttaagggcacaagacaacatttaacaaaaataatcacatcaattgacctagaaatcaaatgcaaatagatatgaatacaatctccaaaatctgtcttttaagtgaacattaaccatttattcaaagttatacaagaatttgacggattaaagtcttctgtgacataaagccatttcaaatagtttcatgtctcagctgagcaggaggagagggggtgaaagaataagtgagtaggccccgttgggcagctagacagtaaaaacagactcaacagcagccgcccccagcctgctgtcctccctgattgcctgcatgtgttgcattggtagcagcatgctgagggccaattttaatgccatttgcctcattattaatgtcaaagactccttcttgaattttttcataaatttcttttgctgtattaataaatgcctcttctacattggaagcagtcttagcagacgtttccatgaagatgagtccatgttctcgtgcaaaagcttcaccttcttctttttttacttctcttctagattctaaatcacttttatttccaataagcataatgaccatgttggaattggaatgctggcgggcatcttctaaccaggttgtcaagtggttgaatgtatctctccgtgtaatatcgtaaactagtaaagctcctgctgcacctctgtaatacgaccttgtgatggaacgaaaggattcttgccctgccgtatcccatatctgaagttttatctgtttcccatcaatagttatcattcgagcaccgaactctacaccaatagtaaggtcatgcactggctgaaacctcttgtctgtaaactgtagcaataagcatgatttaccaacacctgtgtcgccgattatgatgtacttgaagagataggcgtacgccatggccgcggccgctcagtgccagggcacacggctcctcctcccgctgctgctcctcctccg

SEQ ID NO: 337144 - DNA, 1000 bp, Homo Sapiens
tttttttttttttttttttttttttttgatggtccattcgctttattgggtgcgtgtagtgttgtcatgacatctcctaaggaactggggggcacgtttgacactcatgaggtcagaacaggtctggtgggcggggggggggggggtcccagggtggtgaatacccacagcacacccccccaccaaaagagaaaacggggagaggagcctggcaggccagactctgatccccatggtccacacagggaaacccccaacagcggcctcggcccaccgcggcagagccgaggggctggcaggcctggccacctcccattgcccgatcagcctgctttagggtgtcatctggcccctcttcacaactgacaactgtggatgggggtgaattttaaaaaaaggcggggggggggttcaggagggtgagcggtgagttcacggggccacgagacaccacagctgagtggggaaagggctatatgtacaggaggggcagggcttggggcgggcaggggagcctgggcccctgggggacatcttcaataaataaataaatagctacaataataaataagggtgacgggctaagtcaggagcaggggtcttgtgcccgtggctggtaggggccgggtcaggcccgggtagttgggggaaggtggggaagacagggaagaggggaaagggagtgggatggctctcagcaggcgcagtcctggtgcggtggcacctgctggtcactgagctgtgggccctgcttggcgcctgtgaccgcagggtccgccgtgtccaacgactcggacatcttctcgcagatgacatccaccaggcgctcaaaggtctgcttgacgttaatgttgtccttggcgcttgcctcaaagaactcgaacccaaggtggtcagctagctgccggccacgttctgatgacaccacccgctcatcctccatgtcacacttgtttcctaccagcagcacctgggcattgtcccatgagtaggtcttgat

SEQ ID NO: 337145 - DNA, 1000 bp, Homo Sapiens; identical to SEQ ID NO: 158059

SEQ ID NO: 337146 - DNA, 1000 bp, Homo Sapiens
tttttttttttttttttttttttttttttttttttttttttttctttttttcctttttttacttacattaaatacatcggtaaatcagcagtcgcattctgttaccacgattgttatgttgggagaggaagaaaggcaaatgctttctcagaagcaaaacaaaaacaaaaaaccacaacacccccccttaaaaaaactgaccagaagaaaaaaatgagctgggaaataaacaaaagaaaactaagatccccaagcccaacagagctcaaaggaaggcagaagaggtggtaggaagtagagggaaggcagccgataggcccagaagctaaggccaaatcctgttcctatgggggtggggggagggagaagcctggggaagtggtttcccaggcccaagataatgaaacatcttcactcctgctccaagggggaaagctgcacagagaaagaacttcatttctagaagactttggaaagccatcctagttcttccacttgtaaaaaggatgcactgggtgctatggggggccagtggcttctgggaaaggaagggggaaatgtgtgtgtttcagggccatgggaactaaggctgcccctggaaaaggaagggaattgaggcctaagtggaagaacctaagctgggtccttcagaatctcagcttcatagatttctcagctgttctgggatagaaggcagtctgcaagccaaaagggcaggaaggttccaatcctaggtcactgtgacctttcctttctttctttcccaaaactccgggctggaacaaggaacttaaagttctcttttgccttgatggcttctcagagacatcttaaaacacctgatgaaggatatgaagagagactagagatttagaaaggaccaaggtcctctgataatatgagccagttgtaaggtaccttcagtgccggtcattccctctccacaggaacaggtggtatgatacgagggcaccacaggaggcctctgtggtactagccc

SEQ ID NO: 337147 - DNA, 1000 bp, Homo Sapiens
tttttttttttttttttttttttttccattgcttaaatgcctttatttctttcagatcaaactgaaaaggcagaatagcaacctgatatttttggctactagggcaacatttggcagttctcaaaaaaggaaatagaaatgaccgatacgtatataaaagtttcactagaaataaaataaatgcaaattaaaacaatgaaatactatggtttcctattcaagtcgctatatatttttttgttgttactgttgttgtttgtttgagacagggtctcactctgttgcccaggctggagtgccagtggtgtgatcttggcttactgcagccaccatctttggggctcaagtgatcctcccacctgagcctcccaagtagcagggactacaggcatacaccactatgcccaggtaattttgttcattttttaaatagagatggggtctcaccatgttgcccaggctagtctcaaactcaatttaaaaaatgcttagcttaggttctggcttgtgatgtgaggggccatgtgcccctagaggcatctacttgggttttgctcctgacttgtgtggataactctgtttttctgcacatgccataacgatggacatgtgaccgtttgtcggaaaaacacagttctctcaattgcttactaaagctcattcaggctaattggagaaggaagccatctttccaggggagtaggttggttgcaaaactgtgcccaaggccaccttgcactgcagtcggggagcccttagaaagtttgggggtaaaggaatgaggaagcaactagaaaacaatggaagggacttcagatggtaaggtttctgtttagtacttatttcaattttaggcctcctgaatagtagaggtggtgacaggaggatacctgaaaccttggttatataataaacttccttctacgacagtgagtcatttcagaatagaaatgatggaataattggaaatcaagttgaaggcttaaacacgtctgctgat

SEQ ID NO: 337148 - DNA, 1000 bp, Homo Sapiens
ttaaattcaacattttaattgtgatataacttatgtaaatactttccaaaaagtatctaagatattccactgtacaacacatcaaaactatctgagaagcgggagacaataaagtgtaaataaggcacacagtttacactcgtaattgcatcctaaactgttgaatagttgatatttacaaccccccaataacgtttttgcatcctgaattagtccttcacatcttgatatttggcataatgttcaaacacactttatacacactgaccgctccttaaaccactcacagatttaataaataccgaaaaaattaagagatttgaaggcttgatcttctatttacttcaagatgacagaagagtaggtttcttgtgatgaaatactacaagaatgaagaattaacaaactgttgtgtaattcatcagaaaagcatattaactctgctgaagtaccactgaatgaaacaaaaatgaagctgtgaagtagcaatctgattagcaggctggcttctatgtcccatcactctcgtagtcttctattattatgttttcttccatgtctccttgggctgaaaagggctggggctggctagcaggcagttcactggcactattctgactcaaaggaagagaccaggtttccggcacagtggcttgagtgggttcacccagagattcctctgcagaatgtcctccattaagctgggcttcatctccgctgtcagggtctatcattccatgttccctgtcagtcagggcttccattttcaatcttccaaagtgtcgcttcagagggagccttccaatatcttggataaaagaaatctgagcttgatttctcattggaatggttagtagagcaaggtatggcaatagctgagtttggaggcataaagctggtaggcagaagtcaggaaaaagtgcttttgctgccaggcaattttcccgatactttttatttattagaaaccactgaggtttgtgcaagggtcgaaaacttg

SEQ ID NO: 337149 - DNA, 1000 bp, Homo Sapiens; identical to SEQ ID NO: 158060

SEQ ID NO: 337150 - DNA, 1000 bp, Homo Sapiens
ttttttttttttttttttcctgacaatgcaatattattcagccataaaaagaatgaagtactgatgcacgctacaccatggaggagacttgaaaacatactagtgaaagaagacagacactatatgattccatttatatgaaatatccagaataggtaaagccatagcaacaaagtagattggtgggtttccaggagctgggaggagggggaaataggaacacttgcataatggttatgggtcttgcttttggggtgatgaaaatatttggaactagacagagatgctggttgcacatcatgatatctagttgccacggaattgtttactttaaaatggttaatttcatcttatataaatttcacctccatcaaaatgaaatattttagaaagagaaagttaaaaaaaaaaaacctatgtgttccacgaacacaacccaacccttgctctcattcccatttcctgttccctgtgtgcccattgtcagtgccatggtatcaaatcagtgcccattgtcagtgccatggtatcaaatcagcttatgatgcagattactgttgggcttgttcttgatcctacttgtgagatacatcctctagaattccatgacttaagctgagtctacacagtagcaaccaaatgttttagcagagaacgatgggtgtttcaccacaagactctttcccaatattttgtttctgtggcagaaaagcggatttttcttggcaagatgaacaggtttgcacatttatctgtctctaggaatttccataggcttgaagaaccaggccttcctccttgatggtgtagacaaatgaggtgaagggagccagaggggacttggcaataagaatctgtcttctctctgaatcaaggtactggaggatcagccgggtattcacactgtgactccaggtatttcctagtgcggctatcacacagctggatccagaagtgccttcagacagggacaaatcatcagctggagacaccaggtctg

SEQ ID NO: 337151 - DNA, 1000 bp, Homo Sapiens
ttttttttttttttttttttgaagctgccacacgactttatttgtgaagcccccgggcacagcccagacacacacagagcacaaaggggaaagcatggggcagtcacgggtgctcagggaggtcatacagcatctgcccagtccagaccctaccgctcccctgccccaggaggtcctttaagagcagcgtccagatgcagctcggacattggggaccctgcctctccctccccagactggagaacagctttgggttgtcaacactccccctccagccaggccagtcacagacgacatctcagcagccaggagaaggcccactaggtccggggccagcgcagtcccagcagctcctgctcctggacaatctggtgtctgcctgtccacacggtgtggggcccagggttgccctctgccaacaaccccacgatccgacccccacagtcccacccatggcattctctgctcttcaggctgagcggtcagcacagtggtatggatggtaggggtgacagctgccgcaggaccagggcttggtgacgagaagcagccccaggcagggcaggaaacaacccaatcacaacacagaggggaaggacagcacgcgggcaactccctgggttctggctccgccagggagccgggccggaaggcaggtgggtggggacggccatcagggcccaggcggagatcagcagagcgccctcaggtggaggtgagtttaatggcggagcagctcacagccctttcccctgggggccaactccccacaacagagcagggctgggccagcagaagacgttaaaacccaaatcccgacaggaggcacagacctgcacatgcgccacacccacacacatactcaggggactgacaggacacatgggacacagacccgccctgcctgtggccagagtcctgtccaaggcaatggcgtaggctgcgcctcagttcatccgagtccctccccagctcactggtccaggccaagggatgggag

SEQ ID NO: 337152 - DNA, 1000 bp, Homo Sapiens; identical to SEQ ID NO: 158061

SEQ ID NO: 337153 - DNA, 1000 bp, Homo Sapiens
ttttaaccaaaaatatttattattcttgaggcaaaagcaagaaaataactgaagtccaggaagcattaaaaatgaaaatggagatttgagtaagggcctttcttccccacccaagcatgataatattattctcagcatctaaatagtagctactactccctcagtctataaactggtactaaactttctaaattgtaaaagagaaatttgaagtaagcaatccactacttgtaattagatctactattgtttctttagaaggcccccaaattgtctttaaaaacccagatctttaacataaagttctgggaccttctgagggaattaagatgcataacgaaagaagctgcaagatacacagttttgtggtatgcattttcccagaatggattacagtagaactaaatgagaaggaattaactaacacctggaagtctggctaagaaactgagtcacagacatacgcatgtgcttaccatgatatgaagatttaaattctctggcacaatgatttttagaacccttgccatgaaaacttaaaatctttgttttttaatgttgaagagaagacaaataaagtgtccccttttattgaagacatacttttcaaattttttttcccctaggttggggagaaggggaatgttgattctgatcacttaggctttgcctctattctaaccacattttcatttaaagtcaacttctgaattaacattgaaaaccatagtcaaaatgttcctgtaataatgtgaaaatgatcaaaaactacctgcaatgtttattctatttcacacacaacagttagtcttagtataaatggtatatgtcctctttagcttagatttcaatagagattattctctaactgtagtagacagcactccaaaatgtgtgacatgagtctgaagtctgtgtctctcaatatctaggtggctgtcagtatagtactcatttggagttcagtctagatcactggttttcaaagtgtggtccctgg

SEQ ID NO: 337154 - DNA, 1000 bp, Homo Sapiens; identical to SEQ ID NO: 158064

SEQ ID NO: 337155 - DNA, 1000 bp, Homo Sapiens
attttaaaactttatttctgcaaagccaatcaagaagtgttggaaggaaaaagtgtaaaagttattcttgcatatttgggaacagcaagcacttagtttgagaaaatgaggacttaaaacagttgaatcaaaggcaataccctgctacttgtatttaaaatcaatggtgatgttctttcttaagcaacattcttctcttccctaatagctacaatatgatacagtacgcaacagctcacttgaaagtgctagaatcagaggataaagaagccataagccaccccacttacatttcctactatacaatgcctttttggcgcttgataaatcaagcattcatgtagcattacattcaacagaaacatttctcgtactttgggtttaagatccttgtccctccagttcggatgtcgtgacatctgactcttcatcattgtaaatattttcagccatttgccatatctgcatgatgttatcctcagacactgagcaaatgacccaaggctcattggggttccagctaaaatctgaaatcttagcagtgtgtcctccatgaataaacaggagttctggaggcccatcttctgcatcttctgctgattgttcttccccaattttacttaaatcccacacattcaggcggcggtcagtaccacttgaagccagaatagtttcattatgtggagaccagtggacctggaaaatttcatctttatgagattcgaaggtatggagttttaattttaagttacgcagatcccataaagctacggtcttatccgcagagccggtggctagaataaattcgctgtagggattgaatgagaggcagttgacttcggcagtgtgcgcatccaccaagtgactcggcttggaggtggtattggacctggtgtcccatatcataagtttctgatcatcagcaacagatccaaacaatgactcgtgcagcaggtgccaggccacatcctctacaacagctgagtggccagtaaagatg

SEQ ID NO: 337156 - DNA, 1000 bp, Homo Sapiens; identical to SEQ ID NO: 246430

SEQ ID NO: 337157 - DNA, 1000 bp, Homo Sapiens
ataaaattaaaagctgtaaaagggcaaagtaggcaggctcagctgtttagaaaagagaaaaagaagaatctggacaagagaaagaaggcataatatgggtgaagaggagatggggtgcatgagctgagagctttacaaaataacatttttagagcctgcatactttttaaaacacatacacacatgcatcaaaaaagtccataactaagctcagtaagtagggctccttcatcgatgttccagcaccacacctttctgttctgttttggtttgtaaagaaataattacaaattgttttaaaagcattcccaaataattccaatacatcgaaaactttttcatatagatgagaagctgcgaccaccatgtctcttcaaggtaggggaaaagtacgttgcagttaaaaacaaaaagctttctttgcaaaagaagaaaagtttttttgatctccttgaatgtagcacacaaaaaaagtgatggttcccccaggctccatcagcaatagtaaagggcaggaacgtagagatttctttttccaggcccaggcctgtgaaaaacgatggctaagtgttagtccttagcagggccgacggatggtctccattcctggttaaccctctggaatctgggagcatgagtatctccaagaattcatttctattcagtaaagatggggaggggaatcccactgttacttgttgaactggaaagaatagaccccatgctctgagggtgcgtccactgccacttggttctgttggccgctgctctcctcgactgaaacactggaagaaggcacaggggtgtactgggagatgtaagctccttgcatagctgcagccgtcggcatatacgtgcctgtgctgctgagggagagatggcccagttgctgggtaaggggtcccatcatggaggcaggctggagagaaatgggatggtccatccctggtgtcagaactgaacctgaaggctgcatgaggtatgaatggtggtgcatcca

SEQ ID NO: 337158 - DNA, 720 bp, Homo Sapiens
ttttgaacacaggtcactttattggcatggctttgttttaagaaaaggaaaagtgacaaagccaagagacagactctgctaacagatgcctaggggtggctggacatttttgcctcatgctgtgcaaagagggatcctggctcacacatcctgctgattggttgggacaaggttgtctgcttgggcctcactgcaccttcttgaatacttgcttgcagaccacaccttccactctcatctctaggtgcagctcatcaccctcgatccactgggtccagccacgcccctccttctcacccttctgcacacactggagcttgtctccgtcccagctcactgttgtcatgcacttgcggtcatctatgcctgtcagatcctcctcaaactccttcccaacttggaagtccatgatgtagttcctaaaagtgctcagcgtgcggatgatcatatggtcaccgtcctgcacgatctctttgtctggcttcagcaagttggcgattttgcgcaaggccacattgacgtcgagggcgcgcaggtactcctcgaaattctcgttgaccaacatcttccagtacccagtgaagtcgactggcatttcgggagtgactggagccagtttggccacaagcgggcgggacggctggagactgccgggacagcggctgccggtgctacgcgggtggtgggcggcccggaaatgagcgccctccgccccccccc

SEQ ID NO: 337159 - DNA, 1000 bp, Homo Sapiens
ttttttttttttttttttccactgggcacatttctgcccaccttctttttattttttaaacaatacacttttgttagtgcttattttgtggcaggcaccaggcagtaccagggtgggggcagaaataaatcaaagtccttgtccttgaaaaacaatctcttgctggaaggctggattcagtagactgcttgggcaggcttgggaaggacccaggtgagcacagcatccaccaggctggctggcaggtaggaggcaggcagccagagcagcttggcatcccaacctgggctgtagcgggttcgggggtgtcgagcagtcagggcatgctccaggcatcggctcaccttggttaggtccgggtcacagatcaggttcatgatgcgctgttgcattttcaggtacttggtgaggaaggcccccccatagtgggcctgtgtggcaggaggcagccgtgcccagcaggcctgcagggttttctccagactctccaggttggtcacaggggttcggaagaagccaggctccacgatggagactcgtatcccaaaatgagctacatcccgcctcaggctgtcagagaaggcctccaggccaaatttggagacacagtagcccccaccattggctgccaggcgacccaggacgctggtgatgttgatcacccggccccgggcttgctgcagcagaggcagcagggcaagggtgaccccgatgggacccattgtgttcacattcagcacccgctggaaatcgtcccgggtcagccatggtgtgggtccgatgataccagccacaccagcattattcaccagaccaaaaagccctgcttccttaacgtgcatctccacccacttggctgcctgctggacgctctggggatcagtgatatccaacagggtggtgtggaggcgggaggaggccacccgctgcaggtcctcggccccggagggggtcaggcagctggccaggactcggaagcctctctggtccagctgcagtg

SEQ ID NO: 337160 - DNA, 1000 bp, Homo Sapiens; identical to SEQ ID NO: 158069

SEQ ID NO: 337161 - DNA, 1000 bp, Homo Sapiens
gagacagagtctcactctgtcacccaggctggagtgcggtggtgtgatctcagctcactgcaacctctgcttcctgggttcaaacaattattgtgcctcagcctcccaagtagctgacagtacaggcacgtaccaccatgctcagctaatttttgtatttttagtagagacggggtttcaccatgttggccaggctggtctcgaattcctggtctcaagtgatccacccgccttggcctcccaaagtgctaggattacaggtgtgagcccctgcgcctggcctctgagttgtctttttatgacagcttccaattttgtattcgctatgtccaaagttgtatgcttcttccctgaaaaaagttttttatattctcaaatacagtattatattctcagtcagtattatatatacagtataaatatagtattatatccccagttagacaaatacaaaatgctgcatctatataggtggtatcaagatttaaaaggatttaaatcttgcaagttatacttgaaaaaattcatatggaaaggagtcactcaattgctcattttgcatactgccaatacctgaatactgactatcttgaacaaaaccatgactgtttggattagtactgtttgatggtcccgactcatttatcatgctgttatctgcacaactgaagtcagatccctcaaatgcatctgattgtgaaacaaaaacagtagtattggaattggcgcctgctgacatactggaagaggacatctgatggagctgtctcaagtctcttgggtctaacactgaattacatgaggggttttcaagattcatgctcagaagtcttggattatcagtctctcccatgctgtcactgctggttgtcatcatattcacagaacaattagacagcatgttgggatcagaaataccatataaatctgctgatggcatggatgacgcttccattccgactatgtcatcggcattgttgtaaatgcaagcattagaagc

SEQ ID NO: 337162 - DNA, 808 bp, Homo Sapiens
gacagcacaatagtggaaacatgtttatttttattatttagggttccaaagactggggtaggtaaaactattgaagattaacaaggcaaactcagcagagaagagagtgtccaggttgagttgagttggagagatggtccggtttaatttttgactccgttgtaattgctggatcagttctagacatgtattttccagttgcctctagtttttgaacttgcagacaaaggagaacttgtcttcacaaggcacatccttccatttctggaatcctgtgcttgaggtcaggctcacacagtagccaggattaacactgcttggggctccaatgccccaggacttgtaggagaccagggacccactgctccagtgccagcggcggttctttttggggtcatggaggccaatccagacattgaagtcatcagtgccactctccttaatcagtgaggccacaaaggcaccctcggcctgggtgagcacagacaccaggttgcccgaattcatgttctggcaatagagatctgcatcaacccaggtctcacggtcttcattaaagtagtagcagtaggagcgataggcattggtgccttctgggcagctgatccgggcctggggcaactctgtctgggcctcttggccttggctctgagacagaaacatcaggcaggagatcagcatgaagtatgagctggtctgagccatgctgagctgcaatgaatctcttgcttaagaggcaaatcaacaatctctgttggctgagtctgagttggcttctcaggccaggtagctgtaggagctttatatc

SEQ ID NO: 337163 - DNA, 1000 bp, Homo Sapiens
gaagtcaaaactgtttattaatatttggtgacaaaagaacttaaattgaccgaaaatcaaaagttacattgccttggtacagtgcgcctgggtttgtcaaggctgctgctacaaagctggagaacacagcacagggcgaagcagaggcaaagcggcccagcccaacagccgggatggggcagggagcgtccctcaggccgccgcggggtcaccgcggaaacctacccggtgcatgcctctacgcggcctaccggaagaaggggaaaccgaaagccctagagcaatgggaataaataagagtccctgccagaaggaaggtggcctgtgcgtccccgtctgtcccatgtagaagccggaatctggaggtgttcggatcagggccagtgacagccccaggcccggggcaggggaagctggaggcctggccgccaggcagaatgacaccccaagccaggcgttcgaggggctggggcagctctcctaaaatgaccctctgccaatgacaccacaccctcagtcccttcacacagaacgcggtaatttctgtaacttgtttccttaccccccagaagcagcaatcaccccatcagcaaagttgccggcaggcagagctcccaatttgggctttcggtgtgcagcgctccgtgtctaaccagcacagggactgtcggtacctcctggggacggggacagggacaggccctcttgtccttccaccaaatcttccaaaggcccccgggaaaaagccgtcaatccgggaacagccaccttctcgcctcctggccacagggccagtcctggccaaggcccctcgcaatggggccaaaagcaccttcctcaccggtgcggggccctgcgccgagtctaggcgggaagcagcttggcttctgagtccagcggagaacgagcagcttccaggctcggcgggcggctaccccagcagcctgatgccccgcagaaagaagccactggaagctaaaaccaacaacaaaactcctcc

SEQ ID NO: 337164 - DNA, 1000 bp, Homo Sapiens; identical to SEQ ID NO: 158070

SEQ ID NO: 337165 - DNA, 1000 bp, Homo Sapiens
ttttttttttttttttttttttttttttttttttttttttttcaagggcttaggcaatgttttatttccataatgaattaatctccataaatgacatttttcacactggtaaatacagtttaaatgtctcaagaactttgtctcatcacccaaacaagactaccagttccttaaagcagggaatacgatccttattttacattcattttagtatatacctcacagaggtagcacagacctctgagcatttaccaacaagattaaaaaatagctagacatctaaattccaggctaggtccatagcctcacggccactcaacacatacagttataggaataacccaaacttccaacagggtttgtggaagccatcacaggacaggactagatctctcaggggcaaagtgaacaaaagccagtgttcattttgtcccccaccatagtgaaattaagagcctgacccagcctggttcctactggtctgaacctgatgggttgagactccagaaggataagaatgtctgagaatcttctgcagccccccacgctgcaaagccccataacagaccactgcatgaaatcctattcacagcagagacgtggtcaacacacacagagggagtgaggctgggaatccgagttctgactcctcgactgccaatgttatgtttcacacaacaggttagtaaggaatacagtgagcttttttaatccaatcatttgcaaattaataaggaagtaatataccaacataatattttgctgtacaagatgacaatcttaaaaagaatttgtacacatatcatgtggaacatttttattcctaatttatactttgaaagatatctgacaatgtacaaagaatacccagttctaggtggtgactgttttgtataatcatttatttacaaaatttcaccacataataggaactgcctttaaaaaaaatcagcattggtcctataaaggccattaggataaattcttaagcctacaaaag

SEQ ID NO: 337166 - DNA, 1000 bp, Homo Sapiens
tttttttttttttttttacacgtaagtattcacagcaactttattcataataaccaaacctggaaacaaaccaaagatccatcagcaagtgaataggctttaaaagtatatacaaaaatattgaacaataaacattaactagtgaaacattcaacaatatggatgaatctcaataatgagagagaatgaagtattacacaagaatgcttacaatatctgattccattaaattcttgaactggcaaaactcatctataatgacaagatcagtgatcatctgggccagggtagggatgaactgactgcaaagggatatggagggaactttttggggtgacggcatctataccttgattgggatcatagtttcactggtcaaaaatcaaactgtacccttaaaatgggtatattttattttataaattatacttcgtagtaaaggaattgttcggagtctgtcacacaaatttgtcaagtaaaccctttggtccatgaaccaaaatatttaattaaaaagggcagagctaatgacaaaacacaaaacctgttcaaagagtaattactacagtaacatacctttctccagaacttcattctgaattttcttcaagagtctcaagtacttaaattagtgaaaacatgcttatttcttagtaccgacctaatactaatctgaaccactgaaataaaagttggaaatctgcagcctcaacagaaatggtatctgcaattttgtccataccaataattatgtttcagaatgaaatcttacatttcctacaaaaatacaattattcattgagagaaactagaattaaatataatggtgtgtcaaacaatcatgttacctgtggcagaaaatggtcatctggataaatgaaaataatctttgctttctaatgtgtaaatctcctttagcaggtgagagattagacggaagagaataggaggatcaacaatgaatacttgaataaccaatgcttaaagtaaattaagatca

SEQ ID NO: 337167 - DNA, 1000 bp, Homo Sapiens; identical to SEQ ID NO: 158072

SEQ ID NO: 337168 - DNA, 1000 bp, Homo Sapiens
ttttttttttttttttttcacagcggaatttattgttttaagaaagactacaaaaaggtagaaaacagctcggcacactagactaccacacgtgtggacactttcaccaccgggagagggagccccgtgggcacggggactgggcagggccgccccaaaagctatagcacgcggagcacacaaaatagtgatttttatacaataggtcagatttccatttttttttcctttttcttgccataaacatctatctcacaggctgaaaacactgagaaaactggaacagataaggccatgatggttggaaaaaaacccaacaagttaccaactccgctcgggcggcgctcacgaatcgcacaatagtcatggggtgggggtcgcacggcacggaggagaagcgtggtctccgggaagataggggcacagaaaaggttccattacaaaccagcggcggagggcgggggcgcgggggctggggtctgtgggcactccccggctccgcggctcgctgctctttggaagctggaggccgtgccccctgccgccctcctcacagccgggccgggcagtgcccccttcttgagcttgggggcaagggagggcccagcgctggagaagatgcgacacccacggctttaattgcacttaataccaagaaggggaagcagtggggttgctgggggtagggtgtcccggggctgctgctgacagtggggagtccccaggtgacgcccacctgcgccggcccggggctcagggctgggcccaggacaggctgtgcaaagccagcgagctgaataagttaacagtttcgcacgggagggggcctgcctgcctgccccctggggtggtgggaggacggggctggggagaagacgctggggcctgggaggggggcggccaaggggccgagctggatgccccgcggggcacctgggcacgcggcgggttccttaaggcacgtcttttgtgtcagagtttgcagctgcggctccgccca

SEQ ID NO: 337169 - DNA, 1000 bp, Homo Sapiens; identical to SEQ ID NO: 158073

SEQ ID NO: 337170 - DNA, 1000 bp, Homo Sapiens
caatattatttatcaaaataaatttattaaaagtattcaaagaccacttcaaagtgtagctgccttcaagacagatttttggcactcataacggacactgcagttttcaacaccatagcactcattctatttcacacatcatttttaacaatgcaaacacggaccatttcagttttagcattacatgagacaacagtactgatgatctgtggtcataagaacttcaatacccttgcacatagtaaacacttcactgttactgaatcctaaactaaaactactatgtggtaacatggatcgatttagggaaagatgtacaaccagctacctaaggccacataatcccagatctattgattttaaatgcttttggaccaacagtattacattgtctctttcatcatcttacattcctgcttttcagagtgagacaccacgttcagaccacctattcccttcttgcgttctgtacacagtgagggaagctgttctgataccagcttctcctagtcagttactggcttcctgattcactacccaactttgaatcaatagttctgagtgatgtttcctgaacacccaggctgaattcaaggtcagtctttatggcaggtcacagtccttcccctcaggaaaaagaatgaaatgtcctccatttctgggctcccttttacatttcatgtagcatgaggctctgtggtgatttgtggctttttacacaagtcctggtagaattctgactccaagaaacgaggataagagttgttctccatcaagctgtatacccttttctgggcagttgtaaagcagccacttgtagcttcttgtatattctgggcaatcagagttttggtttgaaaatctatgtttatctcttttggagcttccttttctatgaagtcagtatatattttccttgcttttgaggacagcttttggggtgatttggtttttttgaagtcttcacaggccagccagaattcaatattttcttcacaga

SEQ ID NO: 337171 - DNA, 1000 bp, Homo Sapiens
ttttttttttttttttgacagagaagggatcaactttaatacatttggagtaaaaggtgtttcttctttaaatatggtataaaaataaatgcgagaaacattaacggagaatgtacagacaacagacgaagacatgagtttgtttctgactgtgacacattggtgaaatgaaactttctgtgcggaatttattgtttaataaatgtgaagccacatgtatacttattgatatatacttttttcttttacagttcttccagtttttgactgactgaattttcagtgaactgtgtgtctaactgaagctttgagagagagagagagagaaagaaggaaaaaaagaaaaggttttacttcacttgaacttgttaaaaaggaagagacacagatccagcatagtagaaggagaaagaaagcagacaacagtttggaatggaggcattgagacggaagagtccattggagatggaatgtacacacaaaaataacaatttaggtcctttgctcatgcaacatcttgttctaatgtcctctgctccaggtcacaacattgagctacaaagtgtgtgcagtgactccagtctgcattcatgctacaagatgatccgtttagtaagactgagcaaggcttgttaacctcttggacgtgagagatttccccacattctgtgcaaatttttcaaaagatgttctgcgatccattgagtttccagactttttctttgcctgtagaagctcctgataggcactggatcttataaaacgtgggtatgaatcacttttcatcagtttgtaaatgtgctcctgagcatcttcaaatgtgtatcgtccaggttccttcacgttatgtgtggttttgtcataactcttggaatccaagttaatagcactgggggctccgggagccagaaactcttgccatatttcctgaactcttgagggtacttctttaataggcctctttttcaggtcctccactgccagccagaatcttaaattt

SEQ ID NO: 337172 - DNA, 1000 bp, Homo Sapiens
ttttttttttttttttttgatgatgtccagaatttattactcctggaagaacagactcaaaacgcaggtgagagccacacaggtgtccaccaagacggatggagggggactcaggccaggggtggaggctgcagagtggcaccggtgggcatgccaggcacctcaggctttctcatccaggcgtgtcctggctgtgaaagggaccaggtagcccctcccatgccacacgtggcctccaaaggcccagatatgtacagatctacagacgtgcactccctggtcccccggcgaggtccaggctacaggtctgacaagaccaaacctcacggcaggcctctcactgctgtcagcatcctggaccagggcacaggacggagaggcgctcccatcgcccccagcagcaaaccacagcagaggtgtccacgcacccctgagcacactccatgacgcgcaccctgagcggctcctctctccaggggatggccacgcaggccacggccctcggacccctggaaacacctttccctaccggctgctgggagcctcgcctcagtttctggtatttgtggctcacggaaacatccctgctgccaggccatcctgttcaccttcacactcactgaatcccctgcttcctttgagaaatgcccgtgacacccgcggtcagagagcgctgctgacgtcacctccactcccgagcacccacaccacctgctacgggggccgccggtgggtccgagctgcactctcaaggctcttccgaggacgggcctgtgtctgggagccctctcctgctatgaacacagcgggcttcacttcctcactcaagacaaatgctattgttttccagtcttgagacagaaacactaaaaacgatcgctgtccagatttggaaaggaatgcctccattttcggaaacccccaggcctcacccagggtgttcccagacctcgctgcaggcactgccacgtatcattcctgcaagagcctctcaggacac

SEQ ID NO: 337173 - DNA, 1000 bp, Homo Sapiens; identical to SEQ ID NO: 158074

SEQ ID NO: 337174 - DNA, 735 bp, Homo Sapiens
gaatttgcaaagcagtttattgcagggttcacaaggcacttcagctcaggaaagctgaaggggtatggagactgatgaggacagatgctgatacccaaagtatatggagagatgggatcttggctatgattgaggagcttggcagatgagtgatgatgaggagtgctgatacaggagcttagatgattctatccaggtgaactggaaccaccggatactgtggagggtctcgtcgttgatctctgttgtcacatgcaactatatagaacatgtttgctggtgtctgcgcatacctgcagtttgaaatattctgtggacttggagttgtgaggttacagtggattaaaggcacctggcttccactgtggtgacaatttttgcgagttttgttactaggacaggtcatatttgggttaccacaaacattaactacgttagcaaaagttgtaagaaggaaagtattttggtttttgcatcgccgttgataattgttaatgacctgcattgcattggtgcattgctgggaggtcatattgatgtgctgggtttcaaaccattgagcccaggtaaactgtggaggtttgacatggagtgagccctccacagccagaagccccaacagaagaagcagacaaatttgggaagtgaacagttttggaaccatgtttcccagtctccgcgctgtagctcctgtgagaactgatccagctggttgttctggggttcaggggcagc

SEQ ID NO: 337175 - DNA, 1000 bp, Homo Sapiens; identical to SEQ ID NO: 158076

SEQ ID NO: 337176 - DNA, 1000 bp, Homo Sapiens
aatgtccacttacaaggtctggttttatttaaaaagtttataaacatgcatttttttctccttttaaatttttcttttcaatttccttattcaaaatgggtcaaacgtattttagttggaagccaatttctgagaatgtaccatagaatatttattccaataaatctacttactgcgaactgaacatactctcggcactgttttttaagcacgtacaatttggctatacattgggtggcataaacttcacttcttaatcaaataaaaaacaagttgtatataaactgtattattttttaagtcatgaatttaagtgatgcagctctatcctctagtgtgcactgtacatgtattagaaagatgaaataagatattgcaatagagtttatatttggaaacagcccgagtatgccctaataataaattgcttctttaactatttgctagatattctagagttcattttgttcgtttccttggggaacttcatattatattctgacttaacgagttggagagcttaattacgataattcagaaaatgtttttaaaaaactgtaatataaatacagctcttgcaaaacaccttaatttcctcttgcttattgtaattctcagatgggtcaattacaatgacaggtaaaattgattctaaataaaactttaatttctttttttaagcaaatttattacatctttgctacctgcatactttaatgcatattcagtcttaagacttaaactactttttttgaccccggcttttgtcaatagtaaaagccacctttctactattttttttattgactcagtccctgatattcaaagaagactttgccaacaccattgttcctttgcatcttcctatttctacaccccaactgaaaaccatctaacatgatttgttacagccatcattatccaatctagcttacagtacagaaactcccttcacattcagtctttttcttcatgtcatgaggagtagagatttgtgctt

SEQ ID NO: 337177 - DNA, 1000 bp, Homo Sapiens
tttttttttttttttttttttttttttttagtttaatagacatttattccttcagttgaacaacctctacacaattaaaatgtatgacttaagatcttttctttttttgtgaagaaatttaggtctcaagaacttttatgaacttgctatgagtacttcctggaaatcaattaactgagtcttttgaaacccctagagaagataggagaaaattggttcagaacgagcatttaaattaagtcagcaaagtcagaatttaaaattgggcaattccttgtctacattttctttacactcaaattgaccctggacaacagtagtctagtctcctggaagacatggtgcaaacagaaatgcaatgtggtggtatactcatagtcaaagtgggtgcacaagtgatggtccaactttgtggaatggtaaggatttttagggttgtttggccagaacaagagaaataactgcagaaaacacatatggttggaaaccatgcgcttgtgactttttctgtagcctatgggagtggacagagtgggtaacccaagatgtttttaagactgactggactaagaatgacgtacttatagccaactactttccccctaatgtgactgaagggattcataatgatcacaattagcattacggttaagtattttagggttgacgtctaagctcacacttgaaaggtatttatctaatggccactggctcaccagcttcccaccctagcattcattgctagcttaccaatcttaaggctaataattttatcgcacattcaacttcaaaacacaccagtgtttaccattaccactaatcactgaatgccatgaagccatggcactgaaccaggagctttcaccttttatgtgaatttaaaatggtactgtggaggctgaggcaattttcttcaggctaacccagattttctaaagcccaacttaaaaagtctacacctgccaaactaaaaaaaacgcagccacttgaaaataaacca

SEQ ID NO: 337178 - DNA, 1000 bp, Homo Sapiens; identical to SEQ ID NO: 158080

SEQ ID NO: 337179 - DNA, 1000 bp, Homo Sapiens; identical to SEQ ID NO: 158081

SEQ ID NO: 337180 - DNA, 1000 bp, Homo Sapiens; identical to SEQ ID NO: 157469

SEQ ID NO: 337181 - DNA, 541 bp, Homo Sapiens
tgttagttcatgtcttttattaactcatacagttacttgtcttctggtttgttgaaacagtaagtcagacaacatttgccacaataatgtctgtcaaagtgacttgccataaacaccccagcaccacattcatcagaagggcactctcgacgaaggcgactaattttgccattctcatccaccttataatatttcaggacagccagcttaaccttctttctcttgtgcttattcttcttgggagtggtgtaagacttcttcttccttttcttagcaccaccacgaagtctcaacacaagatgaagagtagactccttttgaatattgtagtcagacaaagtacgtccatcttccagctgcttgccagcaaagatcagtctctgctgatcaggaggaattccttccttatcctggatcttggcctttacattttctatcgtatccgagggttcaacctcgagggtgatggtcttccccgtaagggttttcacgaaaatctgcattttggtggcggctccaccgcagatggcggatcgaaaag

SEQ ID NO: 337182 - DNA, 1000 bp, Homo Sapiens; identical to SEQ ID NO: 335568

SEQ ID NO: 337183 - DNA, 1000 bp, Homo Sapiens; identical to SEQ ID NO: 158083

SEQ ID NO: 337184 - DNA, 1000 bp, Homo Sapiens; identical to SEQ ID NO: 158084

SEQ ID NO: 337185 - DNA, 576 bp, Homo Sapiens; identical to SEQ ID NO: 158085

SEQ ID NO: 337186 - DNA, 649 bp, Homo Sapiens
ggaactaaaaaagaactttatttattgagggcaaggggatgcaaacaatacaaaaatcaaaagcttatctggtatttaacttttctttctctgcttgtcaaatgagagttagattttatttttacatttgctaagtgtcctgatctgctcatgaaatccttctatgggggaagctgtggggcagattccttaagcgaccctttggacaactcttatcagggaggagcgaactgctcatttctgcctacttctttcccttctgcttcatgtgtactacaaaatagtcattgcatgcaatggtgaggcccgcaattagggaaaagaagctctggaagcccactttgccatctctacactggtccaggtccttcattattttgtccacagccagagggtctttttgattttccaaaaatccagggaactccttttccatgagtactctcaggtcctcctttgttaagtagcctttatccccagcgaatttgtgaaatgtaaacatcatggtttccatggcgtgttccatttgagatggcattttggtgtggtccgttgaagccttggcgaggcgcggcggacgctgggcgagctgggcgagctggacgcggggcggagaggcgagcagcggagtggcttgtgagtgtattct

SEQ ID NO: 337187 - DNA, 1000 bp, Homo Sapiens; identical to SEQ ID NO: 158086

SEQ ID NO: 337188 - DNA, 1000 bp, Homo Sapiens; identical to SEQ ID NO: 158087

SEQ ID NO: 337189 - DNA, 1000 bp, Homo Sapiens; identical to SEQ ID NO: 158088

SEQ ID NO: 337190 - DNA, 1000 bp, Homo Sapiens
tttttttttttttttttttttttttttgggttttttttttttttttttttttttttttttttttttttttttttttttttagtcattattttattgatgatgtgttttatagaatcacaaaatttagaaacataagaaggatttaggtatcacctaaattcaaagaaatgtgtgtttctaggttgctaaatttgaagagaaagtatgatttggtttggttcatttaaaacaggtcagaaacagaattatatttcaaatttagaagacacggtattaaatgattcatcttatcttggacatttttcctcaagggaaatttttctggaaggaaaagtacatttatatgtgggcttattaagagaaagagagaaaggcatgctattttaatcattaaattcttgatgatgactatcatcatcaagatgagatagaaaagaaatatgagccaagagaatctgttgttgccagcaatcagtttaccagaacacctctaggtgaacattttctaaatggagtgacagactaattgcatctatggggatgagaatctgccatagaagaggatgctgttggtcttattttgccttatgaagaataggaaagggtgattacaacagaactcttcattagttgaaggagatgataattcgactactactacagcggtggcagctgcagcttccactccctcctcagtgacctccacaaaggccttgtgtaggactttagatactgagagaccgtggctccaggtcatgcctgagaggtctgcatccccattgaagatattcaccattcccatggttctcaacgtgtccttgaggtcatagctctcttccattttgaaccgaggtaagtgtaaatcgacacatgtctctctcatattctgcaaacttgtccattccatcaatttctcagcagtgagtttctcttcaagcttctgcagaccatcgatttcatttggcagcagcacaatcatgcttagatctttgcctttgta

SEQ ID NO: 337191 - DNA, 1000 bp, Homo Sapiens; identical to SEQ ID NO: 158089

SEQ ID NO: 337192 - DNA, 1000 bp, Homo Sapiens
ctgcagcaatattaaggattctcttgatttgttagatataatgctaaaaagtgaatttggcatgaagtcttgtgaatacaagcttaattaccatcggttgtaaagaactgattattatctctacttttcttttattcctggcttaggctttcaacatttttcagatatgtgaagaaatatgaaaagaggtggtaagtggtattagatctggctttgaataggtgacttttccttagctttgtcaaaataggcaccttctttagtagcatgaacatctctgtcaccatctatcatatgaatatctgatgtatttttgtcatttcgcctcaagcggtaatttttataagcacgttgaatgatggttgctgaaactgcctcttgttttcgtttcaaagtagtcgtaattggctcacatgtgatcttaaaagggttggctaacaaaaaccctgattctatttctgaaacaactttctccatcctcacatcttgacccataactctctttgtaaaagcaagtaagatatcgaggcaatgaattctgtccccaacagccatggggaggtccaaagcaatgagctggcccttgtttggttttgccatgaaaagaggaggatcaagagcagctgcaaaatctgaaagcttgctagagtctatgtactgggtcctatcaggatcaaaccttttccatacctgaaagaatttcctaaaatcatcttcactcaaggtcttgtttttcttcttagaagcaatatttaaaaactccatgacaacaacaatgtacatatttacaatgatcagccatgatatgaggatataactgacaaaataaaaaatcccaacagaggggttcccacaatctcctctaacttgagtcccagggttaattttatcaggatcacagtcagaccatttactgttgaaaattgcatcaagcatcccatcccaaccagcaaatattgcaacttgaaaaagacagagcatactgttgccaaaggtttca

SEQ ID NO: 337193 - DNA, 1000 bp, Homo Sapiens
tttttttttttttttctgtatgcgtgtgttgtttatttacatgggaaacaagactaattacaatcctgtgaaaagatgacaaggcagatgtaaaagttttctacatggtcttctgatttattaaaaaccaaaaaactgaatcaatcacttttgtatgctataatcaataattcctacagagttctcttacgattcttaaagaatcatcagtgcaaaaataaccatctgctaatgctgcccacctttcttaggaaatcagagttagtgactgcactgccttcgagaatattttgataaaaaggattttggcatagacttcctcaaaagagttttattaacacaaataaatcactttcacaggctgtaaacaatatatcaaaaatgaagctctattttttgctttccttgctgtctttccctttgtcttccttttctgttctgtcttgttcatatttctctttgtctggctttgttacactatcatatgaaggtggagaggtggtggatgaagtggcatctgttttttctggacttgagttctcattaacattatcaaaagccatatcttttttattgagtaaatcatcatctctgtctccatcttttatgtatatacttgatatatttttgacattttgccttaagcggtaacgtctataagcacgctgaatgacagtagcagacacatcctcttgtttccgttttagtgtggttgtgatgggttcataggacactttggaaggatttgcagacatgaacctttcttccatctgtgaacgaagagaatccatctccccactctcacccaaaacacgctttgtaaaagcaaataagatgtcaagacaatggatccggtcaccactaaccatgggcagatccatggcaatgagctggactttgttgggttttgctatgagaagaggaggatccagggcagctgcaaaatcagagagtttagagaactctataaactgggtcgcatcgggatcaaacttctccc

SEQ ID NO: 337194 - DNA, 760 bp, Homo Sapiens; identical to SEQ ID NO: 158091

SEQ ID NO: 337195 - DNA, 1000 bp, Homo Sapiens
ttttttttttttttttttttttttctattttaaaggatttattttccagcagtcctgaggggcaaggacaggacaggagggagaaggagatcccaggacgcttgagggccccgttcatgggcagtaggcagattcgtccttctagtgcctgtggtaggcaggttgaccctgggttcgggagggacacaggccctggatgacactgagctggatgcctaggcagtgtcactccccacactttcaacctgagccccacagcaagcctataaggtgaacattctcactgtgatttgtcaggctgggttcagggagtgaaatggcctcctccaattccacaggttcaaataccctgcagagcggcaccagcctccctcagaaaggaccagacacttgtaacatttatgtcctttacctgggacactgctgtcccatacttgctgtatgaaaagaatatttctcaagaggaagaggaagccaggcgcagtgactcacgcctgtaatcccagcactttgggaggctgagccaggaggatcgcttgagcccaggagtttgagaccagcctgggtaacatggcaaaaccccgtctctacaaaaatcagccagaaaggcatagatagacccaaatcccagtctttagcctggcccaaccacctgagaatggtctctacccaggattccttcactcaattacaccctactctttgcctcctgccacagacagagagagagagcgctacgctaccacagccagcttcctcccagggccaggaaagctccaccttgtccccctctcacagttcctaaaattcttccattcatctatttggcctcttaagtatttactctgttttcaaatacatatataactccagcttataataccaagtcaaaggtagtctttcacaccatagcatgaatttgattgtcagctatttaaggaaggaggcagggaaagtggaatggggggtactctgaagaggccaggcctgggtattggag

SEQ ID NO: 337196 - DNA, 360 bp, Homo Sapiens
ttagcaggtggtttggttgccaggatatctctggacagggcccttgacagccactgccctggccctaggggaagccttcttctgcttggcgtccaggttcttcatgtacctctggacccactcctgcttggggtcgccacagaactgctggcccttcttggtggtgaagatcactcctgccttgaggcatgtgctcctgctggacagctggtagctgaccactcggttctcaggaattctcttggaaacaaagaacatgcagcagggagaggggatgaccacagagcccgtagggatgatgtggtgggcacagacaccaaggaacagaaggctggttactatggtcatcaggcctgccat

SEQ ID NO: 337197 - DNA, 1000 bp, Homo Sapiens; identical to SEQ ID NO: 158097

SEQ ID NO: 337198 - DNA, 1000 bp, Homo Sapiens; identical to SEQ ID NO: 158098

SEQ ID NO: 337199 - DNA, 1000 bp, Homo Sapiens
aaaagcatagaagacacttttattatataacattttatttaaaaaattattttcatagaatacattttcacattagagattcccattgtgcgaaaataacaatttattacttatagttttatatttgtggacagattgttttagaacaagtagaatacatttgggaattaaatctcaatttacagttggtagtattttgatacatctacggggaaacttgcccttaaatggaacttctgtatattcagaagcactccaagcgtttcttcctaggatttagaaatttataatatgagctatcagcatttcctaattttaaaatttccctagtatatgtaaccatcagtaggtggtatctactgtctagagagggaagttttcgaaaattaaacactgtctaattttctgcaaagtttttattcatgaattaagagtatttccctttgtccattattcccaaggcaaatatggaagtttgatcatatactaatcgtaataaagttggattctctttaagagattgataaattgaaaggcaaaagctgatatatcatgtttagttatactgtgagtcttataagaagctgggaggcaaccccattaactcaccagaatatagaactcagtctcacaacttagatataattcctctcaaaccttttcctcaaagattaaattctgaaaataatcttgtgattaagagaagaaggctgtccaccaatggacttatctgttatttcttccttattgtgagcttaatggcatgacaaagcagaggcaaagaggcatacatcaattcttcaaagtatgaagtcaaaaaggtcagagcttccacagcatggcaacagctttgcagatgcccacatcgtgatagttgaaatagcaaagcccagcaaaggttaaagctgaaagtgccaaaagccctgccttggcagctttctgcaaggcatccccatgaacatagtcagtaacaacttgtccaaggccccagtgaccatga

SEQ ID NO: 337200 - DNA, 1000 bp, Homo Sapiens; identical to SEQ ID NO: 158099

SEQ ID NO: 337201 - DNA, 1000 bp, Homo Sapiens
ttttttttttcatcatcacatcctagatttattacaactgacctgcaggcaaaaggatagaactattacataaacacttcgattccatgtatatatcttaaatagaggaggaattcaaacaagaatacaggataaaatattccaaagctccaagaagcagttatgttactgagctccattttttacagacaaataaggcaatatccctgcacattagctttttgataatttttatacatttttctatggtacaagagaaaaataaccagagctcacaatgtacagttcttacactattttcacagtttgtgaacactatacacccttttgttttaataaagatacattgtaataaactccttgcccttaagtttatagtttataataatctatgattaatacactaaaattgccttcttatgtggtcatccacacaatagaacggtcagattagctcctggacagtcagaattgcttttatctccatttgcataatggcaaagtgaccctatgctgagccagatgggaagttgacagcagagaaacagattcctcttgagtccccgggagcaatggaggatgatggcttgctgtggtcgaaggcagacatagagcaatgtctcctttcagaacagtgggaagtctaaagtttaggataccgtgggggagaagatagggaaatgaggcaagtagatcaaagagataatcacttttgaattctgcaatttacagggatgtgactttaaacagcaccattctccctttattgtttgacagtatttatgactgtcactctgagaggagacacagcaatacgtgccacgatttggttctgtaatggcatcacctgcatctcaggccatgactgttttatattccagtgtgcttgaaccactcacagtgctgcttcactgtcatacaaagcctaaggttcagtgccagggaggcccaagcaaaacctaatgagaacctggctaatgggtaagtgaagaagcacaag

SEQ ID NO: 337202 - DNA, 1000 bp, Homo Sapiens; identical to SEQ ID NO: 158101

SEQ ID NO: 337203 - DNA, 1000 bp, Homo Sapiens
gaattccggtgagatgtttattcagtattgtcagtgaagaaaccacctaagtatccaatagcacaacagtttgttgagtaatgcatactatggaatataacacagctgttagaaatgagatggtttctgctttcttgacaggaaaacttatctcaataaagggccaagcaaaggaggcaggttatgaaacacatgtatacaggttcctagttttatttgttcaaatcattttataagtgcataagcaaacacctggagaataatatgccaaaatactaatagtgattacctctgtgtagtggagagtaggattagataggattttatttcctttgggcgttgtgcatttattgaatgccttataaaatacatgcttactgtgttagcaaaaggccaataaaattgttttttaaaataaatgcctccaattgtccacaattatgaaatttgttgataaaatgctgcaaataagttctttttttctgattaaagtatcccaactgtcaagtaattctcatttcagaggtggaactcaactttcctctctgtacatttatatttaactcctctcacatgtatttaggcaaagaaaatatttaaatgaagaaaaacaaaatttggcactcacatgaaggccatttttaagcttgtcaaattattctcagggtggatgtcctgggaagtaagatgagtgacatacctctcttgtgggtataaaatacttgagcattagccaactaattagtacctaactcctaatggtacagacaaactcactgtttctggtgctgcttaagagggtgttgacaagaagcatcatgatcatggaaatcaggtaaccaaaaaacaggaatccagacattgtctgcctctcctttttatttatttttctttattattatttttgtttttaagtttctagctaaaaacagaaactgaagtcattggtaaaaaaacacattataattttccatatgctacttctctaatttttcaaaaa

SEQ ID NO: 337204 - DNA, 1000 bp, Homo Sapiens; identical to SEQ ID NO: 158104

SEQ ID NO: 337205 - DNA, 1000 bp, Homo Sapiens; identical to SEQ ID NO: 158106

SEQ ID NO: 337206 - DNA, 1000 bp, Homo Sapiens
ttttttttttttttttttttttttttatgtttctaaaagtactgagtttattttaaagcatagcatcaagtttgaatctcatcaaacaaaggcatctcttcattatatgttgattttggcaaaaagtaaagaccagcatacaatagatatacatgataatgtagtttaaagtaagaggtgtttgcttttggtaataaggtagtgtgaaacttactatgtaaatctatgttggttatttaggccatgtttcttgtctttttagaagtcttcaggcttaatattttaaaagttgccctttttatttgatacttctactttttgctggaatagaggcatagaaaagattctcactgcttagactaatacactcatacaatacatggctaaactgaaataaaaaggtaagatatcttaggaatagtagcatttacgattgtgagttgttttaaacgggcaaaactactaagatttgttttaacaaaaactcaagggaaaccaatcttgggaaatgatcgccaacctgttttataagagttatttaaaagtctaatctctttgctagagaatgcattttaagcttacttggcatcccacttcatgatatacatatgcatatttcactgaggcaaggaacttggatatatgattccatcatagctgtgtagttaaacaaggaacttgtccactgaatgaatctattgcttttgtgcgtgtaaaaggatatctattctgatcactgaaatgtgcaatgaaaggctacatttagaagctcagaaaatctgtggttcatatgtagagtttcatctacaaagaatgggaatgttataattacgataagaaattacaacgtttaactatacataaacattacctgcaagaacttttttaatcgcagtaatatagcatcaaaaaggtacatattcttgttcatgaaaattaatgaggcaacttaggaatgagagacaggttatttctctttctcctttttaatgtagagctg

SEQ ID NO: 337207 - DNA, 1000 bp, Homo Sapiens; identical to SEQ ID NO: 158107

SEQ ID NO: 337208 - DNA, 1000 bp, Homo Sapiens
gccaacacagtgtgtcatgtttattgggctattcacaggtaagcttaaaatacaatgaaaagaaaagaccagacgtcatcaggaatgtcgagaaacaaaatatttagcatttcttagtttcaaatgttaccatttcattgcagctgaggaatataggccattcgttgacataactgcaatgggtgagacttatttttagccacaggaagcaaatacatttaaccaatgacttttaggacaggaagcaaaaaagaaaacaatattttcatgtagcaaggacaagaaaatcatttatacaaattaaagtgatataaaatacattataaagagagcacacatacaaaagtcattaagttggtcagagagcaaaggatgtcacagaacaccgcactgagagcacactggtgtgaattcatttcagttacgaaagtatgtccagagtttgtgttacacatttactgaggtaaaggcacgatcacttccacgtaattaatggggaagaatcccgattctccgtgtatcattccttcataccagttttcatctatttgattggttaatgtaatgatgtccccttctttaaatcctaattctccttggttttctggctcaaagtcatagagaccacgacagcagggctggtccatgggaatgttagaacctgtcgtcttcactacagaggtggtggaaactccattgagctcactagaactccttttcacaggccttggcttgtattctcgtctggggacactggatgcagctgatattcgcatctgtagcttgctctgcagctcctgcagaatctctgtggactgtctgtgatagtctaatgctgcctctatgaacacagccaactggctgacttgttctacatcattttctaaaaagttaaacatgcttctttcagccaactcctttgactcttcaaatttttctaccgcttgtctgacttcttcgtctggtatcttacctactcgtttctttttataatcgtaat

SEQ ID NO: 337209 - DNA, 1000 bp, Homo Sapiens
ggtgttgccgcccttctgtctttatccaggcctccagcccccgtaagtggcaacagcattctagagacatgcagtggtgtgctagtaccatacacacaacacaaacgacacagccagcaacagtggctgggggctggttggtggggggcctctggcacctccaagtctccaggctctgtcacagagcagggcaggtctggtccgctcacagggtcctcacagccacgggatagaggagggacaagtgctcagcccctttgatgggtagctttctggtggtgtagtagtggatgacttccgggacactgtcgaacggagggctgttctgacccagaacgtatttctctttggttttggccagtttcatgtgcataaaaccctggttgctcctcagggagagggggtagtcatgcttgctggtctggctgttccggacaaggtagctacactccttgcagagtcgcagcaggttctcggcgtctcctctgctgatggctccgtgataccatatttgcttctccagggggacggcaggatccaccctttctcctaggatcccgcagaactcagggctcccatgtttgataggcttaaagccccctccaggggcacgaagctggcgccgccggtcccgcgaaggtgagggggatgactgccgcttctcgttgccattaaactgtgctgccagggctgggctggtgacccggttccactcccaaggctggtcgtactcatcggcgggcctgtcgtcatcctggggcagcttgctctcccgcagtcgggggctgactgtgctctccgagtccgagtcaacactttggccttcaggttcgtaaggggtgtcatataactggatacctttatgctgggaccggacactttcctgcctctgaaattctgtcatgatcctctgtgcctcatagggctccatgtagccagcactctccccctttcctgctttgctcttgagatcattcttggcatcaaagggatctgagta

SEQ ID NO: 337210 - DNA, 1000 bp, Homo Sapiens
tttttttttttttttttttttttttttagaagaaatacggactttaatgaagagttttccctttggtataagtgagacccgtggaaacatccaaacagcaaaaggaggccaggatgaaaacggtcaactctcccttatccacaaggccaaaagagggggggccggcttgctgtggtgtggccaccccgggcctaggctgggccgggcctgtagaaggtactcaggaactgcaggttttgcgtttcccctccatgaaactgacaggcattcgggctgacttctgcctctcagtctcgcggtaagagacccaagtttttctagtcctagatggaaataaatttcatctgcctcaggtctctggtataaaaggtgcgatcccagttacctcacaggcctaggcgaggaaaatgccaagagctgtaaaagggcttggaaaagtcaaaaaggtgatgtataaatgtaataattgattatcattttgtgctcaagaataagcaatggaaaagaaaataggaaagtaagtctacagccctaaaatatatgcatataaaactttaaaagaatgcagttccaactctacagatggtatgtggggattgtctactgctttatagtctcaatgccccttttctcacctccacaaaatccacctgggagagttaactgtacaagaggcccaaattcagtcacccccaccccgccctcccagaaagggaggcagggcagaggcttcaggaggaagggctgcactttggcgtagagtacataggcatgcaacatgggagggcaggccttatgaaatgtatatacagaccccttggggtgaggggccccggccaggaggcactgagcaagggaggggtccatctcccgcctggccgggagtggggctctggggcaatctctaagggttgcatatccccagggagaggggacagctgccactcctgcctctgttatcccaacccaaaccggagagggtgctcagcaagaacacagg

SEQ ID NO: 337211 - DNA, 1000 bp, Homo Sapiens
tttttttttttttttttttttttttttccatgcaaaccggaatttactgtcagcagtccagacagttttgccattatttttctctctcctcgttttaatattttctcttttcttgctcttccatacatggtgggtttaaactcaaagcatctgattcaacgtaaaaggaggcccgcctctctcatcaaatttctcgtattaacgtgaacttcgcagaaaaaggtcagtttcaaaacctgtgaacttcccacctgcgcacttttttcatcttagttttttaaataagtatacctcttctttctgctttgccttcttagcgcattttttaaaacacacatttaagttggtaactccccccagtctctcgagaatcgtctgggttgtttttccatatttttaaatgtataaaatactttaattttaaaatttgtttttgctccttggttctccaatttcagcttctgccaaatagcagttaagaaataagttgccttcctctttttctctcccgtttgtctttcgatttttttgtttgctcattttttcattgttaacaagattttttttttctatgcaagagtccatcgttgtagctttgcggtgagccaaactccgcggttccagcactaccctgtccagtctctctccagactcccccaaacccgctcctacaaaacccaattctaggccctcgagtaggaaaacgggcaggagccacggagcctgcgtgcctcgtgagatccctggtcctgcgtggagtctggctttccgagtccaagatgcgataggggacgagggatggtcagtgaggcgggaagagggccggctcccgaggtctcaaaggggtaacggagaagcagcggggcgcggagggcgtgcaggctgagtgccgcgggacaggcgcgacattggtgctggcgttggcgtcacagacccagggctgcggcgtgctttttggctttcagtctgagatcggcgatgctggagtccttgctggtgg

SEQ ID NO: 337212 - DNA, 1000 bp, Homo Sapiens
gccagatattcttttaatgagaattataaaagaccaaaaacattttttgcaaactgcctttttaaacaaatgatttgcttttaattacaaatactgtgcatgacgatgccttcttctgcaaaaccaataaatacaagaacaaattttaaaatatgtgatttgtccaagatatctgaaaaaggaaacaaaagcctgatttgcagtatttataaaaatcaatttattctctaacctttcaaagattaagctcaaaggtgtgactcatctgtagaagacagaaagagagcaccttatagatgctttaaatagcttttgattatttttccgatgtcacctttactttctggaactcatggcttcacaaaatagctgattttaaaatatttctaatgaactgattaatgggggaaaagaaaatattgaacacgttataaattttttaccataaacaaatatgcatatcaaaagatactaactttaaaatggtacaaaaaaaggaaaaacctgaattacagaaaagtcaaatttatttaatgaaaaactaaaattaataaaaattagcaaatacacacaaaaaaagcacacagcagcactatgtattgactcacaaagggaaaagcagtggcccatgaccactcaagatggcttgtcagttaaaggaaaaaaacccaaacacgcacacacccacgcaggcacacactcccacgcaaaaacaaactttttcaacaatacaatcaatctacaacaaacacaaaactcagaattattttacaatgcttcctttcttaatacaaaagatgcccatcttgggtgtatatacatatattttttcagtggtttactgttgacttatttttaaatatattagtgttactacatgcaactgtttcctgtatttaacagcctttctttttatttaccttcatgtgtctagcttccacctaccgaaagagttttaggttggcagacagatgggtgccttattttctgtgaaactgaa

SEQ ID NO: 337213 - DNA, 1000 bp, Homo Sapiens
ttttttttttttttttaaagaaacacacacacatttattttaaaatttgacataatccttgggtaattattagcatttttcagaagtttccgagactgatatctcaactccaaaccaatagcaatagcttatttgattggtggaaggattagagagggtcccatgatccagatgaatagatggctatcaaagaagacagaaccccatagacacaggcagcattaactcataatttttaaattaactgtcacaaatatgaaacatctcaccagaccaatgataacgtccatatcataatttgcattttaccaaagtgtccacatagacagcacagaactaaaagttctgtagacttcagaatcatatttaaattaatttgatcctttatattaataataattaaaaactagattctacccagtgtcgtcccagtcttcacaccaacatgtatgtcctgctgtcggaatgccacctcctctgcactcagtgtcatgattcgaagattaaaatcagtgtgtcaaatcagaacataaaccaagccaggaattcatgggcccagagaggggtaaggggcttgtcctatacagcagttaagcagcccacgtgctccgcccattcccaagcagaatcagattggagctgcaggcagcgaggaggagggcgtgttctgtgttgtccactgctttgcatggtttcttgggtgttccaaggaggacagttgttgtctcccaataagacagttaattccctgaggacaggacctcttccacactagcctccgtcacagcagggtgcatgcagccgaggtgtgagcacagagcaggtccctactaaaggcaggaaggaaaccagcatgaactgagcacctactacgtgccaggtacagagccaggacaggtgctttcctgtaatcctcacaaaagcagtgagataggatcatcatccccactttacaggtgtggaaacaggctcaaggaagagcatttgcccagagtggcac

SEQ ID NO: 337214 - DNA, 1000 bp, Homo Sapiens
tttttttttttttatcagcagtaacattttgtatctttattactcaggaagggattttttaaatctacccacccacttccccaaagagggcaaaaataaataataattttttaaaaaaacctacggttctaaagccagtcttaataagacaggttcttattaatattattaagccagtttgtgttgacaatcagcaacacttttaccccaacattttctttgttctaccttgattggttcctcagccctaacaactcgagtctgtcttgtttttgaactgcatcttctagatttgaaccatgtgctttaccaacagcatttcaccagcattttactagttgcaaatctgccatgtgctataaagtatttcataggatgtttcatttcttatttgtcctccaagccaacgctgaaagtaaagttttgcttggatcttcattgctcctttcctgtttttccaagggcccatgcaaactcatgaaacaacttgaccattccctcttggagtcacatagaaaacctaacaaaaataccctggttcagtcctttcttcttccattgttcctaggaagtgggctggagtgaggtatcttcacatgggtccagctgcattctcagtgcaccgattttatgaagataccagagttggagaaattcctcgggcatggcatggaagccagaaaagggtaagacgttgtcatagtagtggtggctgatgggctgctcatgcatattcacagagaagggccagaagccatagatggccacctcttcacagagacccagagctgcgctcaccagaaaaagtcctgtggacaggcgcttggcatggattcctctacttttccagaactttccaatgctacgcagaaagttggggttggcaaacagcactgtttgattggcaccaacatctgacagtgtataataaaccctcaaagatggctctgttcctgtcttcatagaaaaggcaggcatgtagatgtaactgtggttataa

SEQ ID NO: 337215 - DNA, 1000 bp, Homo Sapiens
aaaaatattaagacatctgaaaaactcagaaagtttataaaacacactcatactcaataattttcttattctttgatagccagtgtgacatgttgaagatgttacaccaaaaccaacccaccatactgcaaaaagctgtatctcgagtttaatcaacatgcatcctaattaaggggaaatacactcttgtataagagtgtaagtttttattaagttgtttttaaaaataacttttcccttaaacttaggaagcggttgatttcgctaatttacccaacaccatgataacttatgcttcttttatgatataggataatgcagagatgcaacatgctggaccttcttaaatatacagtatagctgggcagtggctcacgcctgtaatcccagcactttaggaggccgaggcgggcggatcacctgaggtcgggagtttgagaccagcctgaccaacatggagaaaccagtctctactaaaaatacaaaattagccaggcgttgtggcacatgcctgtaatcccagctacctgggaagatgaagcaggaaaatcgcttgaacccaggaggcagaggttgcagtgatctgagatcctgccattgcactccagcctgggctacaagagcaaaactccgtctcaaaaaaaaaagtacagtataaaagagcagttgagacttagagctggatagtatctgtctactacttaaacttgtaggaataactgatctcagggcttttcttaaaggtttcagtgatgttgaacagctctatttgaacaatgagaacttagtcctatcaccagccagccatctcacagaagtcactcttcccaattggctgctaccaagaaacagtgactccagaatgatcaggagccttgtggtaggctcctgttttccctaagtatcttcaggagacaccctgtccctgtattaaaagggcagggagttaaaaggttaaaataattttggtaactgtctgagacgttttacatctaagaag

SEQ ID NO: 337216 - DNA, 1000 bp, Homo Sapiens
gaacttattctgagagtggcagattcagtcgctactgaagacagatatcttgggggtaaaaagacacgagtcaggatttgctgtacaagatgctggaaggcacagaacgacccccgaagttcagtttttgcattttcgtttttttgtgattcccttgttcaaccaagcaccagagggggtttctaagcactcgagcacttcggatttgactgctctataaagtcggtaaaaacctcagttcactggggaatagaaagagaagggaaggttgtggacaaagtgcagttctaaatatacgtttaaatgaacgaacaaaaaaaaagaaagaaaaattgaaataatgctcttttgttccaatgctgcagcctcagtcccaaaatgaagggagcgacgtttgccgaactgaaaagggtcgcccggtcaggcggcacgtgtgcccggagggctgagggcgtgaccgccagccacggtcaccacccgacgcaggtcagtgcctcgtggtggaggagcgtgggcagaatcacggggtgcagaggagccgaagaccgtcccctcagctccggggcagctcctgtgcggctctgcacttcctggtacccgtggggacagcgctggcatcgacggcggcgtggcgggcggggtaggcggcagtaaggcgggcagtgttcgagctcatctcgcacgcggcactgtccctgctctccctggcagcagcaggaagacctgggtccttgtcgctgaaaaaatagactctgaagaaaaacccctgctgtcctcacgcagccgcgggcagatgagctgtgatggcttccccgggtggggagggtggggcggccgccacccccactccgttgcgggtcttcagatggcgtcatgtgttggggcttttagaagttagtcatttaaaaatgtgttgattttctgaatttcaagtctccttactggttttaaatagcttataacaaaagtgtaaatgttagaatgttccagcaagcagagg

SEQ ID NO: 337217 - DNA, 1000 bp, Homo Sapiens
ttttttttttttttttttttttttttttttttttttttttttccagtggaaacacggtattcatttctgaggactgtgctaggttttaaggcaattgtcacatgtacaaaacagtcagatgagcagtatctgaacagatttaccacaacatgttagaaagagaacagcaggggaaatgttttcagacaaggagatgtgagattttccccagtcacgtaacccctggtctaccgactctgtggactgaaaaccaggaagatagacagcacattctctcttctcgcctccaaggggaagggccacctgcacactctcggaagcacccttctccagacccagacacgcttcttactgcagggccaggccaggacacaggatggtcggccaatgagtcttaagtccagctctaatttcacgctttatggctttgtgaaattcatctttagaaatgggaaaatcaagataccacagacatacaacttgtagttaatagttaagttcccctctatccaaacacaaacttgcttggcttggagctaaaactatacacacacgcacacacacacacatgcatatacacaacacacatgtgtgtatagatatacatatgtgtgtgtgtgttgtgtatatatatatgaaggaagaaaaaaagatttactgaagcctgaagaatagtgagtgttcatttaccatttggaatcaaacaatgtgattgtttcccttgaaaacagaagagtatcagcaacatgctctacccagcggggaaaagtttccagtttcctttgcacggttcctggtcccttttggcttcacaggagactggaatggcttagctggtttaaagagagctgggctttccccctggctgggtcaactctgtgtcccatggctcttcttcaccctttctgctcaggctcatgtccccagttttaagaagggggtgtggcttgatggtctccgttccatctacccattctcatctcaatggtacacacatcca

SEQ ID NO: 337218 - DNA, 1000 bp, Homo Sapiens
ttttttttttttttttttttttttgggggccaaagcactttactgcaggggcagtgggggaggagaatactttaaattattcacttaaataaaaaggagggaggggcatgggagggggaacccatcccaccagcctgtcccctcgtccatcggtccctcggctgtccctcggtggcggctacacaggcatgggcatctcattgtactcgtccacaccctcccgctcatcaaacaccggctctgcctcgttagcatccagacatttcatctctcggtcggtgaagatacgggtgagcaccaccatgcggagcggcactgtgaggatgaggatgaaggggaaggccagggaggcagctgtggacatgacggcccagagcagggccaggcagagcagctgcagggccgtgaacaggtgcatacggagggtccggaccttcttgacgtaagtgacatctgggtggtgtttgggcggcatgagcagcagatgcagccgctcatagaactggatcccgttaagggaggtgactcccatgtacaggaaaattccaaagagcacggccagggggatctgccggagcagatccccgataactatggagaggcccacaagcagggcaaccagcagccccgtcacccgctgctccttgacttcctgaatcttgggcttgtccccaggtgccacagccttgctcatgacagtgagcgcgttggcgtgagtgacagagcggacagtggcagcagccaaccagggcaggccaaagagggcacagatgccgcccatggccacgatgagcagcaggtccaggtggaagccggagcccttctgcagcatgcgctccttcttggagatgatgagcgtggtgatctgtgtctccatgaagatgagaatgaagaccaggatggcgggcagcaggctggcaaccatcatccacacagggaaggggctcttctctcccagggggttgatgacccagcccctcttttctggggcagtcaccga

SEQ ID NO: 337219 - DNA, 1000 bp, Homo Sapiens
ttttttttttttttttcttttttttttttttgttgtatatcatagaacctttattatttatcctctaaattcttagaaacttacataacgcccgtgctctagttatgacaccatttatagacatttaaaatgcatcttcatttataaatattttacatttggtccatagaacagataattttactaaataatactgtattttttaaaacaggctctgtatatactttgaatatgtatatattacatatattttttatatagagatagatttacttggtgttctgagaataaatccttattgcaaaaaaagcatatatgataatacaatatctttttccccccgggcaaatactaaaaaaaagttacacatattcacagttctcacagtaattgtacaacacttaatattgtgctctataaggtaggtttggatggaaatcagttaggggatttcttgccaaacatctcacttagaattgcttacaaacattaaatacactgcatttgtcttagagagacttggtctcagtttcacattgaagaacaaagagaaagctggaagtcttcctgcccttagtctaaaggaattcacacacagatggggaagtgggaccatgagacacagtgatgggttcctgtcattctaaaccttatcatttaacaatacgtatgcattttgatcatggattcaccagctggcactggggatgccttggcaatgagactattttacagatgacctcaggaaaaggcttcagatttcctacacaatatcaaatgagaccttacgtgccacatgtgatgatgaatgtgcatgttgtgcgttcatatgtgtacacatatttttttttctctacaataatgtgcttaatattctgagggtaatatcttattgcaagaactggtatgctggtcacttttggatgagaatgacaagagattaaaaaccccacagtcacagttatttaccatagttattaaggattagtcataaaacacg

SEQ ID NO: 337220 - DNA, 1000 bp, Homo Sapiens
tttttttttttttttggaagccatagaatttattcgaatttgcagaagcatgagataatgtaccacaaaagagtttgattttacaacataaagtatggtaggaagtggtcaatgtacacagtgttgtcagcaaaaaggggaggcagggcagtttcacattttttgaaaggtggtggacgacaactacacttgtccttaaagtaaaataaaagcaggagagacccagcagagaccaacctgatttgcagttagcatcagaatctaaatctagtatcacaactttaagaaactaaaagaaaactattagaaaaatagaacatcaaacaagcaaaaaaatatacaaatgtacataataaaaaacacacaactcttaataatggctccatgttcagtagaagaaaatatttactggagaaaccacagctattcaggtttgataataaaccaaccctcattggtatcattacccttagtgctccttaaactcattgaagctgaaaggcacaacttaagcaggaaacttatcatcttaaatatatattataacttctcaaatgggaaaataagtcccaaacttaatagtctgtcatcaagaaacacaaaatcatttgccttgttaataaattaacagtctgaatgcatctttccatcctgcttcctgaccctgctggacacactaataaataccctgagaaaatcttctctttaagcttggccaaggtactccatctcctgtggggttttcagctggcactcagcacatttgtagaatgacccaggagggctccatggcaactgtgccccgagactccaggcccagccgggtcccgatggcgagagcgttgtggctcagtgaagcactggcacagaaaggctggactcgaggaatcgaggggtgaagatggagtcggctgacattttttgccttaaaaatacattaggagtcataagcgtgatgacacatggagtgtagcttcttgcaccactggatcaacagtca

SEQ ID NO: 337221 - DNA, 1000 bp, Homo Sapiens
tttttttttttttttttttttttacagtggtaaagcagcagtttttatttattacaaattctaaaaaagaatccaactttataagtaaaaaggaacactgatgatcacttaaaacatttaaatttaaaattactactaaaaaaaccctgtacattcacacaagtccaatgcctttgttggtttttacagacatagaatttctgtagggttttgggccctatcaacaatttttattaagtactgcaataacaaaatacagcaataaaacaactggacactcctaggggacaccaaagataaagggcccattaatcaggtgtaggccagagaaacccaacctgttggcaatatgacgctctttcccaactgggtcttggtgagacacgtggcacagcaaggctgtcagtgcatgtgcataaattgtagaccaggtcccactatgctacttcaggattcagccagcccttctatgagtcacagaggtcccttggtccttattcatcttgatatactcatgggatgtttggaattaaggagcccaaactaccttacttgcatttgaagtctttcacttcatatcctaccccatcagtctaagagcccacccaacaagggtagctacacatagatgctcacactctataggctgcctgatcctggaaccagcctggggccctgattatgatctccacggggctgtcagtggctagggaaagctctttaagacccagcgatcatggcagtggcatcaaccatggtgaatcaaagttaagtataatgctcccagcaaacagtgttaccagttgggttgagcaataacaaaatgcatttgaaatcagtaagactaaaccgtgtatatacaaacaataatgaatattacaaacaccaacaaccacaacaataacagatcaggcttctcaaaatccagaaaccggaaggctattttaaagtgtttaatataatcatgtaaggaaaaaaaatctccccaaaacaataaagt

SEQ ID NO: 337222 - DNA, 1000 bp, Homo Sapiens; identical to SEQ ID NO: 158108

SEQ ID NO: 337223 - DNA, 1000 bp, Homo Sapiens
aaggttagaacttctgaagtttaattctacagcacttgtgagcatttatttctcttttgggtcacaaaacttggaatgggatttgggtatttgagtaatgggttaaacatatatattgattagttcaggaattgagtgactttaagatgcttatcagacacttttagagatcccagcaagaggcagattcggtttctggtttcatagagtttacagtcactgaacaagtctttaaaataagtagcaaattctaagttggggataggtgaggcttcttgggtagacaccctgtctgtgttcccggccaagacttgatgattctgatagatgtactggaaatgctggagaaagactcaggcaagactggtgtttttgctgctctctctagtttaccacactggctttcagaattgctttgggaccagaatccaggccaccaggggaagggctaggctgtgcaaggggagcagtcctcccctttgtaggtgccatttcccagagctcctggaattgtttcttcagttgtggcagctgtgtagatcatttttgttttatccttgggagtcttgaatttctcatagcaccaaaatatggcaatgaggagaagcccttctccaagctggaaaatcatgtagaggaggggaaagaagaaaagtggtccaatgacttcaggtggaaaggccacattgaggatggtggaacagagttggacattttggcatccagtctccatgctgacagtgcgtctgcaccgtccattgaggcagaagagagcagagagaacataacccagcagaaagccaataaaaggcatcagggaggaggtggcaatcaagagtggtgtcatggcaaacatgatgctcttccccacattgatggcagagagaactgtgacggccacactgcacaagagaatgatgatcatccctcccttgatgacatagcgcatgtattgtggccgtttggatttgaggacgatccctatggtgcaaggaatgag

SEQ ID NO: 337224 - DNA, 1000 bp, Homo Sapiens; identical to SEQ ID NO: 158109

SEQ ID NO: 337225 - DNA, 1000 bp, Homo Sapiens
aggcaataatgtatttattagcaagtatgaacaatgtcacattacacccctcctattaggaaatctacaatcaggagggatttcaaggcagtttcttttaacttcttcccatgaaatcttgggtctaatcagttattttttctgtctttcttctacttttatttctaagagtctaagaggttcagaaaaggtaggaacacacaggggaggtcaggagaatgtcaataactccagcagaagagaaatgggctcctgtttctgaaagataatgaaaatagaagacacttttcactgagggtaaagcccttttagcagctctagatttagccacagaaaaatcactcactttattaaaaaaaaaaaataaatggaaaaaaaacaaaacaaaactcttcaagctggcatttggcagcaagacaatgctgagaacattttctcaactcggctgggaaaacccgggaaagaacacgttgaggaaaagagggtaacactcttccgatctgttgggactatgccagagaaaatcaggcaacagattaaagaggcttgtcagtcaccccactggtttcaggggcacattactcactaccacctctatgcaatgagtcaccccttgcagaacccgtcacagctcaagtttaatcaacctcacagcagcgggaaggtgcatcactctgtcttcccataaaagatgggccactgcggcaccaaggcatagaggaagagctacaagttacacaggtgagaagagtatcagggacagtgtccatgggaggggaggaaagaagattcccaggcagaggtatgtgaagcccactgagccgtgggctcagccatggtgatctggtcccagggaaagaggtggtcactgaggcatcatgaattcaaggagcaccttctgctgctactcctcatggtcaggctcctcatcactgtcctcccccagaggaaattccttcgtgggcttctgggttgcatacatccgggtctccatggggca

SEQ ID NO: 337226 - DNA, 1000 bp, Homo Sapiens
ctcacttaagtgtgtttaatgtatgtgggaagagtattcacatcacatcagatggtcccgcacctgtgggcaaggcactagcgctccttagaccctgaggccgctgggacgtacttccccagcgcccaccacaaaggcagcccccccaaggctgcccagcccaggcaagcctggcacataccaaggccagcacgtccgcggtgaccgggaccagtcccctccgggctggcacaagtgtgggagcagctgaggacccgcaggtcaggatggacacacttcagaaggacagacaggaccatggagggctgcccttagggtgggagagaggaaccagctccgaggaccagagccgctgctcccctctgatgacaatgtgtctgccgccaacctgagatggcttttccacagagacagagaagccacatgcagttcttcattctacgtcagttaaaaaaaaaaaaagcatctttcaaaaaagcaagagcaccaaggatgaccagcaatgtcacagctcagctacacctgagggtcccggctcccaccctgccctagagggctcacaactcctgtggggccagtgtcccctgagctggtatccaagaggccacttcactagccctggggggcagaaaggatttgtctcaagccccccaaggggcatgagccagtgaggcctggtggacgcagaagcccaccacccacctcttccagcaacaaagcccgcggggcacagtgcagggacagcatggccaggcagctgccctgagtgtcgccagcacgctgtggccaccgccagagtgcggcacagggcagggggaatcctagggggcctgctagcaggataagcggaggcccccattgctaaggcaggcggccctcgaggcaggggtcgtggggatgcactgagggccgcctgcaaagttaccacaggggcgcccgagagtcactggttcacattctgaacaccgtcgcttggaagacactgcaaacccagcttgct

SEQ ID NO: 337227 - DNA, 1000 bp, Homo Sapiens; identical to SEQ ID NO: 158110

SEQ ID NO: 337228 - DNA, 1000 bp, Homo Sapiens
tttttttcttgttaacaaacaattctttgtacagtggtttggtactaatcatgaagcaagtaaagtctctgaaaatagtatacaaacgagattttaaatcaaaactgtttattgtaaaaaaaacttgaaaattgttttttaaaaaagaaacattgatttcacaagtcttcaggttgtttatagacatagctatagacaacatctcagtttcatacagaactcattcaatcatataaaaataaacacaaatttacattgactcatcaactatacaatttaaaaaggcacttggaaggggtattgtattattgcatttgtggtatgcatttgaaatagtttaagtacattaatgaatttgtaagaatcctcttttgcacttattcccatctttaattaattttcaaaaattattaaaatgttttaaaatagtaagacaatggagcatgcgccaggaatgttcaaagctaatctttccctcctcccccaaggcacatactgttaattggcaaaaacaaaacaaaacaaaaatacttttaatacattctcctgtgttttgttcttgttatttttttcctcccttttaaaaatatactttaaagcactacaggtaatcaaaaaaaggctttagttcaacaatggcaaccagacaaccgacatgtaatggagtaaacttggaatactttttaaggcacctgagttcgcgtctggcagatctcttcctatgggaaatcctattacagactctattacaaagcaatactgttcttttcagttgaaatgatttggcagcaatgtaaatctttgcatttttttaggaagaaaagatgcaatgtgcttttcattttatctttgaagagaaaggttactgtcttttattctctcaatctagccatcagcaaatatatagtaattttaaacttcacatggaaaggattatctttaaacacatgaattccatgctcttgcagctctctctctgtgggtgtgtgtgtgtgtgtgt

SEQ ID NO: 337229 - DNA, 1000 bp, Homo Sapiens; identical to SEQ ID NO: 158112

SEQ ID NO: 337230 - DNA, 1000 bp, Homo Sapiens; identical to SEQ ID NO: 158114

SEQ ID NO: 337231 - DNA, 1000 bp, Homo Sapiens
gaaatggtgttccatttattcactgaaaaagagagagattaggccttcttcattcattttctccattcttgccaaactccctcccctcattttttccaaaataacaacacactgagaaacatgtttgtacaaaaaccacatattattcccccccctcacaaaatcaggtggctgaattacaggaataaaaccagatcaaagacatgaaaagaaaaagccaccacttatactgaaatataacagtgttaagaattcaggtattttgtagaattattactatagtaaaaatatttccacctggatcttttaaatttgaaagtgatcacattaaagacctgaggttacaagggaccacagtatgaaccagaattccattttccttctcggactccaggggaaaaaagaagtatttggaatgagtttcctttgggaaagactggcaggaagtaggtaaaaccctggccattgtcaaaaggcactggggtctttctggagccaaatgcattggaactaagctccagtgagaataaactcattctcatttccactcccaagagtccagaacaaaaacaaaaggaccaaggtctcctcggttcccgtattccagtactctgatggtgaccagggacacctggttagaggcaaacctgagggtttgaaaggcaaatctcaattgtggttttatttttttgctttctgatattaaggaaaaaagttctcaagtgttttataaacacctccctataccctctcatatgtaaagctttagaaaatatatagaaaaagatatccaaaagatgtccaccttgcattctaaataatgaaactgccacttgagaatgtgaagtgagaaagccaggcgctttggaaaccaagctctaccaaaaacaccctttccccacacatggaaggacagaagggagggaaggacaagaggaaaaaaccgggaactctcaagtcacttatcagcaggggtaaatacgagctcaaattaaggcat

SEQ ID NO: 337232 - DNA, 1000 bp, Homo Sapiens
tagacaaaaggatttatttggaaatttccaaacctgccagatgtggcactcgccaagccctaggcccaccctcctcaccaagctccaaagggcaacaccagtcctcccagcctccccattcaccttaccctggcctccacatgcacataccccatacctcaggccatgctagagaactggagtgtcccctccccggcccaagccgctggagaggcagccctctggcatcccaggagatgatggcggccagagccgcttgcatagattgaggaaagaaaagaaggaggcacctaacaggctccctgaaaacccccaacttacccctgtacaaaaaaagtggctcccacatagaaaacttgctcccaaaatagtgcaaatacccaaaggaaaggaaaaaaccagcagcaaggctgggcttgtaggaatggcaaagaactttggtttagaaaggctaggaagagtctgggctgcacctcctcttcctagcccagctccccagagccagctctgaccctcgccccagggggagtctgtaaacatgcaaacccagcagcctttggttcggaaatgtcttacaatgtcaaagcacagcctccagcagtcctacttgggcctgcctgcaggggggcagaggaggcatctgctgaacccaattaaagccaatgcaaaaagtataaggctttggggaccaagcaacaaggaatcctatcactacatttataaaactaaagctggagagtagagggtgacagcagacactcctcaccccagcctacgtgtctgcggccccagcaaggacccagagggtggtctccctccaggctccagggctgggaagaaagatccctgagcagttaggtcaggcgaattcccagcacctgttccagttcctgccttcgctgctgcaccttggcaaagatgtgcctgcctactgcttcctgggcccagggctggtggtagaaagcagctcgtctctcctcctcaggatttccaatcacat

SEQ ID NO: 337233 - DNA, 1000 bp, Homo Sapiens
ttttttttttattacatttggacctttaagaaacatataccatcagatataccactattcagtaaaaatctattctagtttttgggaagcttatgtgtcacaaactatcttgcttctagtctccaagactttactaagtttatcaaaaaggtgggctctggtctatgggatcctgagccttgaggtttggatgttctgattattgtaaaacaatttcaagtggattaacttaattcccagctgtttttcttctggaatgggctaatcagtttgaattatctagtccattacaagaatattaaattccttgagctttgtgatctattctgtctttggaaaacctggtaaaaaagtaattttttttctatacaataaggatggatttaccagaacatacccagtattaatcataacaaaaagcagtatagataatgtatatgtgctgtgttcactttaataaccacttcataagtaactactctaactatggggactatttctggatcagtaagatccaagtgtagttagttacacactacactcagcttaacacaactcttggtatctgacattgattaaaagtaaaaaagggtaagtgaacaaatacatactcatacatgatcacgtttttaagaagctaccctttgcagaagtaaacaagagaggagactttcaggaagctactgatggggactgggaaggtttaaagctatggctttggtaagcaccccagtgagctgtaggaaggcattgtaagagtagattctgcagcatcaaaggataattctctaaaagaggtgggtgttttctcaattaatctaaattctgaggctttcagcagttgagggctagaaacaagatccaaagaaaagagccatcttcacaacacttaagaaaggtgactgactgagccattaggctcatgatgctaaatggtccaaaagcctttggtggtgtgatatggacaagaaaaaaaattaatacacaaaccacgtaacac

SEQ ID NO: 337234 - DNA, 1000 bp, Homo Sapiens
tttttttttttttttttttttttttttttgctaataaatgaaaattttatttgcgtcagcattagcattctgatttttaaagattagatatagagatatcacgaatttgatcttcaacccaaacttttttttttttttttgagacgaagtctcactctgttgcccaggctggagtgcagtggcacgatctcggctcactgggttcacaccattctcctgcctcagcttcccgagtagctgggattacaggcgcccgccaccacgcctggctaatttttcgtatttttattagagacggggtttcactgtgttagtcacgatggtctcgatctcctgacctcgtgatccgcccacctcggcctcccaaaatgctgggattacaggcatgcaacccaaactttaaatcccttaataataccatgctggaaaacagcatgaagtataatcaactgtgaaacaggttaaggctgggtacagtagctcacacctataatcccagtactttgggaggctgaggcaggaggatagcttgagcccaggagttcaagaccagcctgagcaacatagcgatactccatctctattagggaaaaaaaaaaaacagttgagccaacaacatgatagggatatggtctgctattggcagcaattcaaacaacatggctcaagcaatctctattaaaatgtctggaacaagaaattaacagagtggcatattcatgaagctacagatttttttttttctgttaatatcaactattctgtaccagagacacattctgaaatttacattattattgttaaagattttattagaaagtacttaaatacttaatacattagtatttaagtacttgttagtacttaattagtatttagtaataataaacaagcactaaagaatatttaattgcagaagtagaaaatacattgtgaacttcctaagttatcaatcacgttatgagaatgtaagttttatgtattaaaaaataaagcaagg

SEQ ID NO: 337235 - DNA, 1000 bp, Homo Sapiens
tttttttttttttttttttttttttttttttttttttttttttggggctgcagactgagttattttatttcgctatttccagtttgaagctactatcatgggcgtttagagttatacaaatgacacttacaaaaaataaaagaccaagacacccagagtgagatgcatgttggggacgggggaggctggcagcaggggggccccggcggctcaccccagggctcccggagggggcgacgcctggcttcatccacccgggaggcccagggagcaccaatcacagcaggggctctggcccaggtgtcggcagcccaggcccagggctggggctggacgggaaggacggaaagagggggctgagatgcaccccctggggagggtgctgagacgccccccgccagatcactcgctactacagccaggcttgcctgggacgcctccagcaataatatttcattaaaaaaaatactgatttggtcattttctgcttccagtcaggctagggtgaaaggaaagagacaggaggaagacggcccccacacccctacccgcccgccaccaccaccttggcagaacgtgcagcgggcagaccctgtggccgtcacgccctgccgctccagggaagggagccaggctgagcctctgccacgtgggagaggggctgtttccagccaccacccaaaaaaacaccacaagggtcagtcctagcccacccgacagcttcccttcccaagcaggggtttcggggacagtgcaccagggagggccactgacaggcttgggacatgtgcccagctctcctggggggctgggaggaggtggctgggagaggcaaaagattccagttacactacacgcccagggctcccagcccccaaccgtcccttagccgcttccagagaaataaggctcagagccgtctgaggtcagaagaaagaggtgccagactcgccccgtggcagacaagagggcaggggcatctgaaatccctcccagggcc

SEQ ID NO: 337236 - DNA, 1000 bp, Homo Sapiens; identical to SEQ ID NO: 158120

SEQ ID NO: 337237 - DNA, 1000 bp, Homo Sapiens
ttgttttcccataatgaaaatagctttatttgatttttcttattttaacgataatacatacaaattttaagcaatacaaaatggtattaaaaattaaaggtaatgcaaacttccatctctagaggtgaccatagttattaacaattcaatcaacatccttcccatatataaagttttatataaatgtgaatatcatgcaattctataacctgcttttttcactaaaaaatatgagttttccttgtcaatgaatatagctatatatcatcttcaatggctgtaaaatattcaacggtgtaactgtaccataattcatttaatcccctcctgatggacatttcaattggcttcagtttttgcaactgtaaacagtgctatgacgggcatttctggttagtcatcttcaaggatttggtttctagaagtgcctatgaggatcctcagtgaatgttctgacacacaggcaaatgcttcacatctccttacacttatattcccatctagggcattggaaaatgcctgcttcagacaggtgtaattctgagaatgaagatggggaagggagaaagggtgcttaaggtaccaagcccagcattaacccagcctcctcgggccacacagaagtgagaagtagcacatttgcaatcagtttccatgaggtgtcggcgctgttgggaaggactgggagataaagagggaaaggtgagctgggtcctttcacagacagtatgaacgccaggtggcagagcctgcaactggggaacaatcattcaacagttatctatttgacacctgttttgagcctgaacctttgctggggcccatggagttataaaggcgtaagaccccagagtttagcatttggtggagactgtaaatcacccaactttatcacaagatgcagttatcggcaggtgacacatgcaccagaagacaggcttcagttgttcttgtccatttatctcagatcaggcacgaccctgtccaaacatggagcaga

SEQ ID NO: 337238 - DNA, 1000 bp, Homo Sapiens
tttttttttttttttttttttttttcacaaggaatatcattttattactgtaatcacaaaatcgtaatttctgtacaggaatgtataagtgaacattattcaaagcattggtaattcacttcataaagagggtaaacatactacagaacatattgtaaagaaaaaatattgtaaaattttctggtcttgcagtgcactatttagtgcaagtatttaagacacaatagtgttcaattcagcaaagtattgcagaatgtcatgccacagtccacttaattcaaagagggtcaggacatgcagcttgtaataaaatgtcagagtgtgtgtgtgtgtgtgtgtgtgtgtgtgtgtgtgtatataaaaccacatgtaattcataaaatatatagtggtttatttagatggttttaaatgatttcactgtggaatccagcataactggaacaacatccaaggtcttcttaacggcaacaatcttattgctaggcaatggctttggcttcaggtaggaatgcttcccagtattttatcagctgttgttgtgtttgaactagtgattctaagtacttgatgataacggttttaaaatccttcactcgttctttctcaaatcttcccacttcttttcgaatcgttttagatatctgttcaaaatctctttccccttgttgcactttcgcctcccactctcttatttcatttttagcttgctgtattttatctggtttgttagcaaccatcatttttgcttcagcttcacgttttttgagcaaagtaatttgagcatcttcccatttctgccagcacttcattcgatggtcaaacacacctttcactgcagcaataagacgaatgtagtcactaagtagttctgaaaacatataaaagtcagcaaaagcttgttcttgatgtaactggtctatcttctcctcaacctctgcaagctgagacaaagctctagataaagcagtatgatcctcagaattacctaacatggcag

SEQ ID NO: 337239 - DNA, 1000 bp, Homo Sapiens
tttttttttttttttaaattcaaaataaaaattcgttttaattttaagaaaaatgtcaagaattacaagccatattaaagcaaactagttagcaggttatgattccattacaattacaatactgttgtgcagaacattactgcgggaacatgcagagtacctttttaaaaataacttcccttgagtgtatttgtttccgttgaagttggatttaatgtttgaaaattacctaaactcatctggaccagtggtatcgtgagtaagatacgtgattaagctggatacttgtggttcaaattaagttgtgactattaagaaactctacttaccttcttgtgagactcaaactgactttaaaacaattccaaacaataccaagagagcctctcaagtggctgttccaagtaacaactatcatttaaataattcataaatcttactttgagtggaaagttgaactacatggtctctgataccccttccaatgctcaatctttacaatcatacctcatacatacaaataattcctacacacattgtattagaaacgggcatcttataaaatggaagtattacataatagagtacatttccttgaaaccaatcacatattaatttattccacctaaaaacatactaccattaaaagtataactgagcaaatgcagaagccagcttctggattcttaatgatcactttaatatgagtggaggtgattaatacttatgttacagactcactagtctgcaaaataattcaagagaagtcaatatttattagacaataaaataattgttccaaaggatatttctaaataacttcaaagaagttaccacaaagttaaaaaggaatatcttccatgttaagtttgtgataaaataatttaaacacatgattgactctacaaatcttttttacaaattacttcagaagttataagaggaaatgtttttctttttcctctgctatctcttattttttccttcctacttctgatcc

SEQ ID NO: 337240 - DNA, 1000 bp, Homo Sapiens
tattccagagaagtttgtatttgggccttaagcttttgaaaataaagtttagagacatagcatatgaataccactgtaatacacatgaaatattctatcagaccctaaaaattaacataaacttttaactttctcatagtcaacaaaatagtggctggttgccaattttattagataagttggttacagcattttaattatcattttacgtctatctaggtgtagctgaaattcaaaatgcacatcaaagtaaaactatatcacaactcaatgccatactaaatgtacttggcctctgccaatagaattctagtcagacttcattttttactcccttcttatgacccaagtggctttaacaggaatgcaggacttagtgctgatcatcacacaacataccactttctttttagaacctctacaaaattttgaggggagatggtggcattagccctgtggaacagatcttgatcacctcaataacactggcccattatctgtccagcagaacccattgtgaaatagtacaaggtgcacagcccttcactgattacaggcaagtgttacagtagcctagccataaggaaggggagttacatcatagtacaaaatacagtataaaagcgttatttaacattccacactgaagattactctgatgccttcaaacagtcgtttggatgttagccacttaaacaaatacatcactaaggtaaacaatataaacataccaaaaccctgtatggttaaatacaatttccatggtacaaaaatcaaagcctggagatgtttttacagattgctttttacacaatgtcttaaattgccaaatatttacaacattaaagaggaaatacattgtgatgcagagtaaaattctgaaatgattattataaaacctcaatctatctacgtgaggcactcctgaagcaagtgcattagccatgaggtcctttggtacaaggcccattgcttgaagaaccacagtagctgctgtggc

SEQ ID NO: 337241 - DNA, 1000 bp, Homo Sapiens; identical to SEQ ID NO: 158123

SEQ ID NO: 337242 - DNA, 1000 bp, Homo Sapiens
ttttttttttttttttttttttttttttttttttttagggttcagttccagctgattttatttccttctcaaaaaaagttatttacagaaggtatatatcaacaatctgacaggcagtgaacttgacatgattagctggcatgattttttcttttttttcccccaaacattgtttttgtggccttgaattttaagacaaatattctacacggcatattgcacaggatggatggcaaaaaaaagtttaaaaacaaaaacccttaacggaactgccttaaaaaggcagacgtcctagtgcctgtcatgttatattaaacatacatacacacaatctttttgcttattataatacagacttaaatgtacaaagatgttttccacttttttcaatttttaaacacaacagctataaacctgaacacatatgctatcatcatgccataagactaaaacaattatatttagcgacaagtagaaaggattaaatagtcaaatacaagaatgaaaaacgcagtacatagtgtcgcgaactcaaatcggcatttagatagatccagtggtttaaacggcacgtttttgcttataaaaaaagtgcaaaaaagatgtggtttacaagttaaagctacagaatccctttttgctgtaattgcaccagttttaaagcctctggacagagcagtatttcgtttaaaactttgtttttcttaaaagcttacagtgtttggctaattctcctcccctttttacaagacgggggccggagggtggacactggtggcaggttaagggatactgtcactttaagaagcctgcagattgaagtgtaaacatggagaaattaggggctgattttttaaactgtgtgagatattaaccagccgccctgttataaaatcaggaaatccaaacagcgatttacaccgattaacaccccctttatatattttttacaaaaatacactgagaaaataatcaaacgttttcatctctcttgtctttt

SEQ ID NO: 337243 - DNA, 1000 bp, Homo Sapiens
tttttttttttttttttttgaagattgatcacacaattttattagagtcttttgaacaaatgtaatcctctgtgaaaaactcttgcaaaagagacattggagtgtactattttcaaccctgagcattaacactgcataccaagggggggtgggtcaagaagctggttagatcgaagcacaagcacaagccactgatattctctatgtgatcaggtttttacaaaaaaatacatagttttcaataaataatgcttaattttacaactttgatacagcaatgtcatacaccgtttcaacacactacactctgcatgctagatagtctacgagaagacgaaactttgccatgcattttctttcccccctagtgctatcaaacacttcatcctccagcgcactgcctcaggtagctttaccttctctctgtttcacagcaataggccgtgcgctggcatgcaaactctaaaaaaggtcccccccacaaaccactcagacttctacacaaaagggtttttcagcttttctgctcccaaacctggagtggctaagaaagtaagtttcatgtggccttggaaaatacacacttgttaacagtgtcatgctgaaaactgctctaaaacatcaggtggttctgtcctggtggccgtcacgaagcattatgggatgccataaccactaggagtcccaaaccggaaaaaataggcctccgttttaaaacagtcaattcaaaaaaaggtgtcacagaacaaatgcaaaagactcttaaacccacaacatatgtacaagagtaaaagtagacaaaatgggaaattaatgagaatggagtataacgtttctccctatgtgattcaagggaggaggcatactgtttttgaacaaaagctggatgaagaaaaatgtgacagagggccctttgtcaatatctatttgatcaaaattctttatatgataaattacttccagttgtccttttttttttttttggaaggggaaatgtaac

SEQ ID NO: 337244 - DNA, 1000 bp, Homo Sapiens; identical to SEQ ID NO: 158125

SEQ ID NO: 337245 - DNA, 1000 bp, Homo Sapiens
tttttttttttttacaaaaaaaatttacaagtgaaatgttactacaaaactttttataaggaatttttgcaaaacatttacattttaccatcaactatttctgttttaaaatcattatgtagatttaataccctatgctgcacatcaatttatgtgggatgacaacttagtgacatgcataaaaaaacaccacaaggcattaaaatggagacttaaatacaaatattgttgcaataaaacagttataaaattgaaaaataggacctaaacatcatgcttatctaagtttgacaaattaactttttctcctagattacacacttttattactgctctcatgagagtgtgataaatgacttaacatcaagttctaatgtaatcagcaacacatacacaaacctaaccaaagaaagtatactgtaagaaaaaactattctaacactggagttttaccatgataaatacatagctttgcactgataattacaataaagaaaagttttataacggtggtaaagggaatgaacagtgaaatgccattaaacaagactctactgcacatctgtgccctattacttataacagctatatcccactgagtcaaataaaggacactgaaatttacgattcttctaaagacagaaaagtagactcagaatggtatgcagaacagactgtcaaaatatttctaatttcagtggtgaaatgtgcacctgctaacacaaattaacatattttatatgctataaagctatctagattcatctgataaatttataataggcctcattgttgattaaaaaataacttccatttctaatggacatacataggtttgcattagaactggttcatggaataatgatgcagagtgttcatacttggtattaacaacaacaaaaagtgtcactctgaggaaacatgattaaaacattaagaaagtttctttgcataaaaaaatttatagcactgattgtgtagcataatgatagataaaata

SEQ ID NO: 337246 - DNA, 1000 bp, Homo Sapiens; identical to SEQ ID NO: 158126

SEQ ID NO: 337247 - DNA, 1000 bp, Homo Sapiens
ttttttttttttttttttttttttttttttccagagacaagaagatacatttatttcactgcccaattattttcttaaaaaagcttaatgtttgataaaataaaacaaacttttagtaccatagaaacctttcaacatgtacaatgacatattattactatgtacaacttcaaaaacaaatgcttccagctgcaagtaaactgatgttgaacatcctgcctatatttcagctgtacgaaatttcctggatggccaatggtctccttggcttggaaaaaattatataaataagaccttcaatgagttgggaatcataaaaatgctatctgaaattcagtcatctggatcttgggaagtttgcaatagctctaagagttcaacaagcaaaataaaaccctgtggatatttaaacttcagttgtccaagacgtcttgtaggttcacagttggtctatcaaaaataaaagctattcctatcgtggcaaacaaaacttggtatctggttcaaataccatttttcaccagctcatgaactccattctcatcgatgattagaggtgcatggaattctttatctgccacataactttctaatccttctccagcataggagataagaggagagatttcacattggattggtacatcattggcatccttcaagcggggaattgctggaaggcgagagccattttcatctatgaaatggccccctgcattgaggacccagcaatgatgaagggacatcaaagcatgccttgcagtagtagggttgtctttcccattctgactatcagcattctttagtggggaaaactcatcttctcgcaatacttcatataccacaaacttctttgcaaactggaagatgtcaaagacaaatttttccatctttattccattgggtttgtctggcttaattaactgtccttgggtatccacataaggaatcttcttttgagccacatggtgctgcaactgaggttcataaacattgacaa

SEQ ID NO: 337248 - DNA, 1000 bp, Homo Sapiens; identical to SEQ ID NO: 158127

SEQ ID NO: 337249 - DNA, 1000 bp, Homo Sapiens
tttttttttttttttagattttccaactacacagtttattagtaaagtatctcaacaattctcagagcagtaaaaaccaaggcatccccaacactgcatgcgtgactagaccagcaagaagtcctcaacttgcaccagtccacatggcagcagggggcagtggtgagtcctccggagcccagtgcctgggcctgactggccccattgatgagtgagctggatgacagggccgctggagataggacaatcggctcacagggtcctttcatgtccgatccccttagcattccgagggagccacaggaactggggcggtcgtgcaagcgtcggcatgaacaggggtctgtttggagtctgaatgctctgctgcctctgggtggcctcagccacactgggaacgactgtctataaccctgggaactcgaagtgttccatgctcactcgggaagcactgataaccttccccataggggaaacgactcacaaacacaggactccgtcagtagtttctgcagagaaacttaaaatcatgaaaagggtcatcaatcaacagatctcagaagtcactgtgcagggactactgagggccgcgagaggaagtgcaaacctcagctgaaaagcaactcagggtggctgagtgagccctcacttcccggaccacccgcacgtgcagccaacacctcccaactacttgggccaagtcggctcttcgcctccaagtggaggctgctgggtctcttcggtctcctcctcgcccaagtcctgtttctccctctgggcgtcgatccacctctgcggtgcgatcattttcttcggcccatggggcggcgggccaatgagagcctcaatgtcctcatagtttatcacttccttttccagaagggcgtttgccagcgcctgcaacttgtccaggttgtcctgcagcaccttctcggtgtgtctgtaggccttggccaccagcagtcttgcttcatggtccatcatctgctgcaggccttgg

SEQ ID NO: 337250 - DNA, 438 bp, Homo Sapiens
gatattcagatacatttattcaacaataaggccagtcaggcctcgcggtgacctgatgggatttcaaaaccttggttctcagcaaggcccagatttttgaatgaggatagaagtctggcgtttccgattttcaaaacataacacgcattcattgggataagtatttccatcagtcccacagacagggtcatatatcttggtgcatccattaagttcattgtaacatttggcctctcttcccagggagtcagctccagtgttaccagatagactcaacagggccaaggcactgagaagaaagatgcctgttaccttcatggctgaagttctgcgtccagaggtcagttgaaaactgcaccgcacttaccacgtctcttcagaagcctgggactggaagggtcatatggcagatggcagcaaggccccacctactgggct

SEQ ID NO: 337251 - DNA, 1000 bp, Homo Sapiens
ttttttttttttttttttaaaggacaatctgtattttatttgtatctgcctttggcgtgtatacagacacccaggagccccttctcccagcctgggggaggggtggtagattctgaaggaaggagacatcagagtgaggacacaaagttcaacagaaggtcctgctaccctcagcaaggggcatctatgtgggctgggacatgtaccgtctgcccttcctcccatccaggccatctgcgaatctacatgggtcctcctattcgacaccagatcactctttcctctacccacaggcttgctatgagcaagagacacaacctcctctcttctgtgttccagcttcttttcctgttcttcccaccccttaagttctattcctggggatagagacaccaatacccataacctctctcctaagcctccttataacccagggtgcacagcacagactcctgacaactggtaaggccaatgacctgggagctcacagctggctgtgcctgagggcagggcagcaggcatgaatgcttctatgtgtaaggcaggactgcccctatggcagggtgtggggagccacagggctctggggtatgtctaaaagtgggggcaaaaaggttcaggaagccaaaaacatgggcttatttgtcatagaagtccacgtgggctccagacttgaactcgtccttttccagtaagctcagcagtttctgggctgacaccttgcaatccaccagcttcccctttgccttcagctcctgcagcccttttcgcatgtctgggtccacggaggtctcccgggccaactgctgcatgtctgtgtccagaggacctggggcatagttcagcaccctcacattaggttcctccagcgccaggacctggaacagcatatcacgagcagcctttcctgcacagtacagcgcccagcctttgaaaggttgcagggcacagagggacgagatgttaaccacggttctgttgaggccaggactgtccggga

SEQ ID NO: 337252 - DNA, 619 bp, Homo Sapiens
tggaattgaaagtgaatttaatgggggtataagggagctgaatcatttgctttcatcttaagtctctcttcagatgaattctgagcagctgaaaactagctctggtactaagaccttcagcttcattcagagactcagagtgtgtaggaaagaaagcttcatagcacattcttttttgggggagacagaatgctaattgcaaggcaaatgggactcatacacagaatgggataggggattcagcatctggtggccggctcctcaagggcatggctgtggaccacattacttctgcttggtcttctgctgggctggtgctggagtgactattgaagggcagggctcaggcaccttggggtggcatggctctggaagcttgggctggcagggctcaggcactttggggtggcagggctcaggcaccttggggtggcagggctccttggttttggggatgcatggttcctgaggtggaggctggcaaggctgtttcacctgctgctgctgaagctgagggggtgggatgcagggctgcttctgctgctgggaactcatgctgcaacagtggctggtcctggtgtgaagagaggaatactctgtatggtcccttagaactgct

SEQ ID NO: 337253 - DNA, 1000 bp, Homo Sapiens
ccccagaaaatcaaatatctttattttcaaatttaaatttaaacacattccaaagtttaaaaaaattgtttgaaaattgccttggattttatttatctactataccatggcccttctttacagtaaaattagctgcccactcttatatgagtacagttcccagaaatatagaagctcaacattttacttaactttgccccaaaaaatatttttaaaaagaattactttattctataatcggaataaaggaaaatgataaagacgtgcaaaacagaacaaataaaaatagaaactttgacacccctcagcagtgactagttgcatacaaaatagcttccactcctccaactctattaacctttctatctcccacccttgagattttttaaagatcctacaataaatgtaatatgcacacaaacacaagcacacacacacacacacacacacacacacacacacgaggccatctttatcttccacatttgcctgtactctttgccccccagtaaatttcccacgacactaagattttctacgatccacgaggagctgcttattagttgccaaagtaggaattggtgaagccaacgtagtcatagccagagagatggcttcgacccgtgggtccatatattgctgcatatgtgtggcacagaatgacacttgctctggggtaagggcctgcttcatgtcttctttggtaatatatgacttgccctctgccagggcttggaaggcattctctatttcatcactggacttgatgttttctgactccttgtcaatcaggaaagcagtatagtcctccagtgagacatagcccttcctccctggatccacagcatccaggaacttctcaaacttgggctcatgttcatcctcctccaccatgggcaagtagtaattgagtcctctcaggcaggaccggaactctttgtgagtcaggcgccctgtcaaattctcatcaaagtgtttatagattgtgctaaattccttt

SEQ ID NO: 337254 - DNA, 1000 bp, Homo Sapiens
gaattccgaaggggaggcgccagctgcttcgattttctgaagtcggaatgagggcagctgcttcaagacacagatctgggtcccacagtgacatgatgattgtgactggaccggaagcgggttagtgaagcaccattttctcctaagtcttattccaagctaagcaggcttaaggttacagtggaaagtgagagcacacagaggagcggacatgcagcaaggcgacgcagggcaagcagcgaggggtgggtgacccagggagtggctcagttcacgaaaagcgagcgggtgaactccacgtagtcgaacgcggtggggagctcgcggcccttgccgtccacgatgggcttcatgtgggagacgcagtagtcggcttgttcccgggtcaggttctggtagagctcctccttggtcacgtaaggctttccctctgagctgagggcccggaaggcgctctcaatctcctcgctggacttgacgttctcagtttcgcggctgatcatgaaagccatgtattcttgcaaggagacatggccatctctgttcggatccaccgtgtccaggattgcctcgaactcagggtcaggttccccttcctccaccatgggcaggtcatagcccagggagcgcaggcaagatttgccatcctgatggttcagcctgccagacttgtccttgtcaaagtgtttaaacatcatgctgaattctttgagggcctcctcagtcacacctgttgtgttcctggcctggatctgctgctccaggttgtgctgcatgcgcatgcccagctggtccagctggtcccactgctgggcgaggcccacggtgctgtgctccgtgtacttgttgtccaggatgagggcctcctccatggcggcccccaggtcctcgatctttttgagctgacttctcatggctcggatttcctggtgcttgcgtttggtagcttcaagctgggattcgagggtccccgactcttccaccatacaggacccatcga

SEQ ID NO: 337255 - DNA, 1000 bp, Homo Sapiens; identical to SEQ ID NO: 158129

SEQ ID NO: 337256 - DNA, 1000 bp, Homo Sapiens
ttttttttttttttttttttttttttctgtgcacaaaaatgatacatttattgaaagagtatttttttttaatacaaaagaaagctctgtacataggactgtgaccatgtccactattcctgggtcagcatcccaggggaagtagaaaccactgacatacacactcacattcaagcacacacactcactcaggcgcacacacccacacacacataccccagagccaccgaggaagggaaacaccaagggtcgctgcacataaaaatatcacctcaactcatccctgacacacgcatgtcctcccaaggccacgctcacacaacacacattataagcactttgcctgattcactcactgggtctgtcttttgtgggaaggagaggaagaattcatcaaaggtctcctccccatgggtgggggagtggggagtgagtgagtgatggtggagtgaaacaagagcagagaaaaggggctgggcagttacagacctgagtcccaagctcccctgctctctggcccctgatttgccatgccccagccttgaaagccacccataagccccagctatctccaggagaaagcccagaaaggtgacttccatcttggcaccccaaactggggcaagacagcaatgagggttagaggttagggggttctcaaacatgtcggcaaatcatccccttgataactaggctgtgcataaaatcttcccccatcccttcacctaatcacagaagccagcttgttcctactgaaggcagtcttaggggttaagaaaatttcaccccactgctgccctgtttctgaaaaagctccccttctggatataggtggtgaaggtaggctctgacacagggtaaaagaccctcccccctatgctggcccaccctcaaggtctaccccaaagggggaggaggggggtggggcatggcccctgtacaaattacataaatactgaggttacacttagaaaaataaagtcattttcttcaaggcttt

SEQ ID NO: 337257 - DNA, 1000 bp, Homo Sapiens; identical to SEQ ID NO: 158130

SEQ ID NO: 337258 - DNA, 894 bp, Homo Sapiens
tttttttttcagtttcaaattttatttcattaacttaaaaggtggacataatgtttattttaaatctaattgaaatttatctgaaacaacttatttcaagtaacttattgtacagtccattgtccatttaaaaatattttcttccaaaaaactgcattgaaagacaaaaaaattcttttatacggcatatacgcgagatgcaaacttctgatgtaaatttgtttcactgtcaactccgatgataaagatgagaggcacaagggttcacagttcagttaaatgatgcaaacaaaaagcttctgtttccctccgatacaaattagaagtctccattcatgtctcttacagtagtaccacatacttgatgctgatactaggttacttctttttctttcctttcccttttttacttccctctccttgttgaagactttggtcagcacctcctgttttttgtgtccttgtttttagtttaggtatcatttctgctgcatacaacattactgacttacgtgatgggaactgtacaaggcagaggctcccatcttcctgtttgagctggacccggactctgcctctgtattggacatcacgattccattctctagagtacattttatttttctcaagaaatacgttaagtccaactgctgaacatacatcttgaatctctgtagctgtaggattttcaacagccttacttatggggattcgccttccctctgcgatggtcttcttattatttaaataagcaggatagatacaaataaacctgtcctggtcggccggggaccgcgcggcagcgcaagccatcttcacaagagtctcaacaacccaggagccgcagggagaaacccggcagaaacccgggaggaacccggctctgagtttccg

SEQ ID NO: 337259 - DNA, 1000 bp, Homo Sapiens; identical to SEQ ID NO: 158131

SEQ ID NO: 337260 - DNA, 1000 bp, Homo Sapiens
taggttattaaataatttgtttattgtacggcatttacaaagaaaacagacaatgccctcagtagaaagaataaaaatgtatttagggctttatttttaactgacagcaaatagaaatcctttagtgagatcgtggcaatttgacagtattataattaagctcaataaaggtacatggggtacctggaagatcaagatctacagctgcctatttccacatctttcaatccatctggctccttaaataggggaaaaagcccttatttggtggagaagcatttccaaaatgaagttacaggttctattaaaacttactgtcacatcaactgttaaaatagggccttttgtgttttgttatttcaccttaatatcaccagaattcctgtaattccacaattgtgattttactatgtagaagataattcagttctagtctattgctttagatgtaaaaacagctgaaaacccaaagtggattagaattgctgaaggatttccctgccgttgtttgatacaatctattctcttgattcttgataggtgcatagaaagcctaacttaaaattctttctacaggaacatgtctgatttcaggagtacccaatgaaggatccgatgaatggctggccagttactcagagtaatatgtttatgagttaaatggattgcataacggcaccacttttcctttgtcactgtggtggataaatgacaaagtagattccaatctcctgtatagaaaggtggttacccaatagcctcactggtggcttgctagcagagcctcaagttgcacctctgtggctttctgtaaattcgagtcctacagccacttcgagaacgctgcaatccccaaggcccacttggtccatgctgaagaagcggctgtgaccccaatcctgcctctcttttgctcttcagtattacttactggaggaatatgtaatattctaggtcaagtctaggagaggctcatcctaaaaaaaaaattgcaaagtct

SEQ ID NO: 337261 - DNA, 1000 bp, Homo Sapiens; identical to SEQ ID NO: 158132

SEQ ID NO: 337262 - DNA, 1000 bp, Homo Sapiens
tttttttttttttttttcacagttttttaaattttattttttatttttaggaagcccttttgcaaaccatacaagatataatagagatctcaccaaagacgacatcctagagatggagaggagaaaaaaaaaacttaagtcccataaagaaggcagaaacatgtttttggttgatcaagatgagtttgggccaaatataaggaggctgcttcactggagggaatcacaaagccatctggggcaggaatgttgatggtgaagtgacttccctgctaaagctcgcttgctgggatccggatgcctctgcagagacaaaggtggttcagagttcatggggaaaagaggcagggtttgtggctgagaagcggtgccaatggggagagtggcagtgtccagagaaagccatcaatagtcagtggatccttgtgatccaatattcagtggacagagggttagaggggctgtgttttttcctccatcattgaaaccaggactgaagaagggccgcagaggtcctgtaaaggcacattcagagaaggagtagatgagggagccatggtcagtgatgttgtagaaggagaccatgccagcctcatagtccaggaaaatcccaacttggcatggaggcacctgaaggtggaggggagtctgggggtaggtgccagcctcatatttttgtttgttccacaaccaaattgtccagaagccactcttggaactaagcaaaaagtgccccttcctgcgcacagagtctctgcagacacccaggtcccaggcctcctttcctgtcacatctacctcccagtaatgttttccagagtgaaagtgctgggcacccaggaccataggataactatcaaatctctcttcatttccaggtatgctctgctgggtgtctccaagcctcacttgtctccgatcttctgaaagtatcagccacggattggctgtgtctggatccagagtgatgtggactgcacatgtcctcagcatcttcttc

SEQ ID NO: 337263 - DNA, 1000 bp, Homo Sapiens; identical to SEQ ID NO: 158134

SEQ ID NO: 337264 - DNA, 1000 bp, Homo Sapiens
tttttttggtttccaaagtcagttccctttattaaatcattttcacagaccagaaatacaaaatgaaagtagaaataggccccaggtaggagctacaggcctggcctcacatgacccctgctccagcaacttgaacaggacaagcagcagctacatccttaaggtcgggaaagtaagatgaggatttggatcctgcattgccctgcctcccaccctatctctccccaaattataaacagccatccttgggaagcagcagagttaagacgtctccccactgccctagtgacatacacaccaacaggagagcatgttcagatggcacagaatccagggactgcatttcatgaggagaaactggtaccaaaatatgggtggggagtcggggggtgtgagaaggcaagcgcaaagagaaccttcctccgtttctactcatcggatcctgacgctgagtcctctgagctggggggagtactggctagttcttcttcttcagagtcctcgctcctcctcctcttctttttgctcttgttctctcccgaagagctctcatcactagacacaaactctttgctcttgaagctctcgcttagctgccttgaggacgacttggatgatgagcccctagagggcgtggatttcttttccatctttacctttactttcttcttcttctttgacttgtccctcttagaagactcgcctcggcccccttcatattctttcatggctttttcatagtccctcctggcatcctcagccttgcgatcccactcctctttcttctctttggacattcccttccagatctcgcctgccttcttggaaagatccgtgatgctgatgccaggatggtctgacttgatcttctctcggctggcattgagccacagcatgtatgcagacatgggcctcttgggggcattggggtctttgcccttcttcacctccacaggcttcttgcggctcttgcggtccttggccatcttggcctttttga

SEQ ID NO: 337265 - DNA, 1000 bp, Homo Sapiens
ctgatgctcctttccagccactgtattgtttttattaaatggaatactgaattagaggcaaagagcatttgtactaggcatccaattttacagaaaggcagtcatatgatctaccctggctctcaaagaatccatcttgacatcgtacacctggttttgcatgtggcatcagagagggaggaaattctggatgctggctttaagataagagtaaggcatccaaacttctgtgaaaccagcagccatcccctctcagttcccaacttcacactgagcgggaacaaaagaaataaatggagatgaatgatgctttggtttgggaaataatgcttacatgcataggatgcatccacttaagtcttttaaaaaccattgttctaatgattttattgctctgtaacaaaataaatcaaactgacattgattccaaggtgattgtgaattgaagtttaaccacgttaatgactaataggatggaagtttgaatgctaggaggcttgagtaggaaggcatcacagtatattgcattcttgtaaacattagtataagtacagagtaatagagattcccctagatgatgctaattgggcccctagttcctctactttctgaaggaagaagcattaggattcttttccattttacatctgctaggatttcatatactgccctaaagaagaatggactccaatttggctacatttcttctaagatgctgttgttggttcccctccatgttcctagttccctgcaacgtaggcacaaccttcaaagtggagtcctataggacagcatgagggaaaagtgctgcctccaatagagaggatgtaaaatgaaaatggagactttttgtgatagtctcttccccaggtccattgccttcaagcagggacttcataaccgaaagggctgtataatcttcaataagtaagaactctctgctccacctttccccacttctcctccccactgtatctatgtctcatgtcctgctctgtca

SEQ ID NO: 337266 - DNA, 1000 bp, Homo Sapiens; identical to SEQ ID NO: 158135

SEQ ID NO: 337267 - DNA, 1000 bp, Homo Sapiens
ctgttaatattgttattaacactggtttcttaaagttgtcttatcttgcaagtttatctgaagctttggtttcaagcatttcagtcacaacactcccaattgaggagtgccacgggagtgtgaagagagcttcagatgtcaaacatttcctagaacctggtatttacaaagctgaagaaataaaatgtggttattgggcaaagaacagtctttaaactttttcatttgcttcctttcttggtgcgtcagagtttatcctgtcattcagcagaataaggagacttcattgcagtttcaattgttgtgggactcaggttttctctcaacaccgcatacacacttggagacatgggaagaaggtctgatggagaatgtggctctgttgaatcacttcggattgttgagatggggataaaaacagaaggaacataacctttgtcacccctttctgttggtcttgaaacttcgcaaggctgagagctgtagtgtttaccgaaggctttgtctttgggaatgtcaggatataggtacttcagagggttttcaggaatgttttcagccataataactttgtagtctcgcaggatgtcagcgaatggcagagcagacaaccggcctttattgtagggttctacagagtggaatctcacttccccactttcagaatggtccacccaggtgaaagttattcctccgagatggctttcactgaatcttaataaaaaggtgccaggcattttatcctttagcaacagccgttccttctctttgctaacaaagcccatgacatacccatcaatccaaaggggaagaatgtgtttcttaattagatccaatattgcttcaagccatgtccaaaaggtaaatgatttaccaggtaaatgttccttgcagaacttggcccaggtgaggtgaccatcactgtagctagattggactgtaagcttctctgccagcatatggagttgatctgagttaagaccacgaccaacgtacgatg

SEQ ID NO: 337268 - DNA, 1000 bp, Homo Sapiens
atgaaaaaaatattttattccaaaacactgtttacacaaatgtgtggtctttgtacaaagtacaaaaaaacccctcttctcatccccacctcccttcagagaagtttaaaccttgggctctcaatcttccatggtcagctgcccctgactgcgagtcctacagcctcagagggaggagcgtgtggggttgggagcaaggcctcaccagaacacagccagttacgcaacagcgcaaggcctgctccaggccccacctccagcggagtcaaaccagatcagcttttacccctcactccagattccacaggcacgcagcacatggctgatttgcagcttgtctttcactgcagttttttgtttttgttttttccaggaggcaagaggaccaaccctccaagtcccggggcccctgtccacccaccatatcctagacccaatcttttctacctctttgtcgacaaggttacaaacagagaggcaagcaaagaaggctggggcccaacggaggggagagaatatatatcccgggaaacgtgggcaacagcatcatagacttgaatgaagcccaaggccaagcagccaagcaaggactaattcagagcagctcagaaaccctcactcaaaccggcggcccccctgtgctaaggacatggccgggcccagacgcgctctcatagggttcacagagagtctggagtccacgttcactaaagtataaaatactactcgaaaatgaacccccagcctcccttctgagagatgaatcggttacatcaacacatgaggacagatgcatttacatagacccacacactctctctttctctctctctgtctctctgtctctctctcttaggagggcaaagcttctcactccggagtgaaacttcagcttacagacgttacctgtctcccctccccttctgaatcatctcattcaaatagctgctgagcagatgaggggcccaggaggaataggtctggctgcattgagtgcctg

SEQ ID NO: 337269 - DNA, 1000 bp, Homo Sapiens
ttttttttttttttttttcagattgtgtacagtagattatttattttgttattttggaataaaatttattttatggcttaggatctatgacccctgccttgagagggagaatgggataggggagtgaagggaagctggcggtggatggggcaacagaaaagatgcagcaggcagggccctctcatacactggagggccacatggccaggcctggacccagactctcaccctggctcccaggcagcattggaggtgtggagccatacgtagatgtcacagccacttggacccacttgggcacagtcagactccaaattcagagtatttgggggttagcatatgtcagagaggccagcacacttgctgctgtcttctgtgcagtgtctcaccctcccaaatttgtgttgtcacgtaggcaaaagcagatagacacatgttctatgtggtcatgcaactaaggtgccagctatacatttaacatatcctaggtacatacacgttcacacagctatacacgaagaatctcagcccttgtacttttgcatagtctcatacacgtatcagaagcctccacctggctaacaggaatttggggctttgggagattttttaatcagggcaaaacctgtactagtaaccacatgtccagacccctcctatgctcccacccagggtcccttgagctgcttcccattcccctagggctgagacccaatatcctctatccctggcctctagtgtaaatgtgtctgtatgttcctgcctatccgtcctaggccctgggtcagaatgggcggagaagccttccatgccctaacctgtgctcttacccagcccccctcctgctcagccccatcaccctcagagagctctgtatgtgtgtgtgcgtgcgtgtgcgcgctgcaggtgcaggcatgttggggcgtgtctcagagcctgaacttcccttccagtcagtgctggaaggaggtgggcaggggaatgatagaaaggaaggagt

SEQ ID NO: 337270 - DNA, 1000 bp, Homo Sapiens; identical to SEQ ID NO: 158136

SEQ ID NO: 337271 - DNA, 1000 bp, Homo Sapiens
tttttttgtggttaaaatctcctacatgctttattggacttcaaagaattttatgaaataacacagaaaaccccatttgagggtgtccagggagtacaaggcagtctgcagcctagcaccctcctaagaccagccccaggtatacccaccccaggcccaaaataggatcccaggataaaggtatggcagggagtggggcagaggaaaaatacctttacagccatagcaaaaacaggtaagggagagagttgtctagagggtgggaagggtgggggaaagtggtcacacagccgccttcacctataccatcttccttagccaccccttccccaaactggttgtgtcctttttgagcctctggccaaggctacaaagtaacatgaaaatgggatctaacaaggggaatatgcagcgtaggcacttgggaaattcagattactttttttccttttaacctgtttgtcttttggttcaaaaaatgacagcatccttgcccaacaactccagggctccataagagccctgtatcatggctgtggctctcctggccaggggagccacttgtcctgagccctaggagtattgatgcttggggagctttggggcagcacctcttagagacaaatcctcctgcagtgtgggggagcaggggtaagagggaggcaggtgtgggtgggagtagagagaaaaagtgactgccttataacctacagttctggcatccactcatgctccaatgaacagatgcctctcccaacccattcccaagcctggcctctctttaaaagtctctggtgggttgttctctgagaattggtttcactcccccatggatccctggaggcctgagtgagattaggatgaggctccttctgacccacatcaataccaaagaacaaacttcaaagattaggccctagccccagtctggagcaaacagaaccactgtgagtggggtggaacagatctgaggcacacatgtcagaagctactcgtccta

SEQ ID NO: 337272 - DNA, 1000 bp, Homo Sapiens
ttttctggagcaatatttatttttagagtccctcgaatacagaagtgaaaatgtactattcaagacttgtatttaacttcataaaatttctttcctagatgggtattacctcttattaaacaactaataaaatatgtgctatataatcatacatttaaaacatggaaagacaactaatatcttacagtacatgaagacaaacttcaggagacaaacattaaatatatccaaaaactaaatggacctggactttgcttacaaattgcttaaatggaaatgaaatttgtgtttaagaaatgttttcactgatggaaaaataaatctaacaaaaccattatgtaaaaacatactgatttacaaagccaatgtgtctcagttttaatttgtatataccctagatgaggtttatattaaatgagaataaaatattaaaagtccatcaatgtgtagaaaagaaatacagctgctcaagtactagatagaacttcatattctttaaatctatttctagaactgaattgactttttaaaattttataatttatcaactactccttaaggttattaacaatagcaggaattatgacgacatattatgtcatttgtttctcctactgcttttatctctacattacaatataaaattttcaatccagcattttatagctctgtgtttaagttaattagtaccttaaaaaaataaaattctaaatataaacttggtggattaaggctcagtaaacagtaatcaaacaaacaacagatttgtcctcacaaagagaatatgaaagccaaagttttttttcttttgtgatcctgcttcatattattctgttctgtccaatttcttttctgtagggaaacgccaaagagatataaaaaagagatataaaacagtggtgagtggcttccaaatgactgtttgcccttgctttttaagccaaaatcctctaaaaataggtctttaattctggcagcagattaggacaaatgctcaaaa

SEQ ID NO: 337273 - DNA, 1000 bp, Homo Sapiens
gttttggttgattcattggtgttaattggttcttccatgagagaggtgattcagggcattgggaccagccgcaggcttgcagaagtcacttgcccgtcagtgccgcattctcatggtatgtcaggagcgcagcttggtttacctgggccctgtgaatcagggcttccctcataacgtgtctcacgaagaaagagaacccggattgctgggttgggcagctgaaagcatcagtgcctcggacctggagtgtcgggcacatggaagtgcctcggacctggagtactggatagggagcaggactggagattggacgatgaagggctcggtttgggacgcacggagtgtgaggcttctttgggtcaccacagcagaagtattctccttgttgttctgtcgtccttaacatgaagcgtctatcttggggtccagaatggtgtctctgtcttctgccatcacatccaccgtctggcagctggagggctggcctgcccttcggtgcgggttcctgccggatgttgctgctcccgccagaggcctggctcagggggtgaatccgaatttctgagaaggaatttttggtttgttgagctgttaagggctggaagcggggatctgaggaagccgggtgatttgaggccgaagagagatgtaacaacttgcgcagtgattttaatggctggctttgggtctgcagatctgagatcttctcggggcgccactcctttggtctgctgcttggagtgctagcagaatgaatggatttctgcaacgtcagaagatcagggctgtcggaattgggtactgtttgagatttcttctttttctttttcattgacctgaaaaatccttgcttctctttttccttgagttgctctgaatgactaatattttcaggacttttccatggatcgaatgctggttgtctttttgagtggttggttccagaactgctctctgatggtagagaagaaactctagttgacacattattttcatggaa

SEQ ID NO: 337274 - DNA, 1000 bp, Homo Sapiens; identical to SEQ ID NO: 158137

SEQ ID NO: 337275 - DNA, 1000 bp, Homo Sapiens
tagggtacaaaatatttgtttttattagtgcttctgcaaaagcagctgcgtgaagttaaccatactctttgggctattaataattatgaactgttcttggtagatgtcagataacttgaacgtgacaaagaagaaagagcacagatcatctgaagcatgattaggtgggtgttgataaatgattattagcaaataaattctatcttttcagtcactgaaaagtaagatttcattggtatgaaataatcactctggtactataaatgtcacatgaataaagtgaattttaaaatagaaattattaaagagatatgccctgtttacccttaaaaataaacagaatttcaaacctgaataagttaaatctgttagtaaaagcagagtcgatcaactattcttcacaatggtgagtgcttgatagctaaactttagaatgataccaaatctgttttcaaaactgtaatacaatatagaaatctgcttgcaaactatttgtctagcatttctgaataataatatatttaacatattattgcatttttctccccctaacaggtaaaatgctttgccaggtgctttatgtgaacagctgaaaggagagtcaaattaaaaactcagtttaacactgcctggtcattatacacaaaggggttaatatggcagatatgataaagattactattttgactacttaatgtgttttaacaagatttctcaggggagaacttggtctaagtttcccgttttcttctattcagtcccagctatcaagcttttaaattatccattgtagcatgccctacttactcaacagggacaagctaaacttgtattcgctcaggcctgcctagcgaattagaaccacctcagaaataaaggcgcctattggggagaaatttgaaacagacctcaggctcacagattcagctgagcttgcagcaacctgaacaaaccttagttttagaaaacagtatatgaattgcaaaactatacttcaaca

SEQ ID NO: 337276 - DNA, 1000 bp, Homo Sapiens
tttttttttttttttttttgaggctgacagtcttgctgtaattgggagaaaacgagctgcagcacatttggcagattgagtcaccagcagccaatgtcaggggttgtgcaggcagctgaagggctcagggctccctgcctcacatggtgaaagaggaagaaagaggtcaattgggaaaattggtccctggggctgcttcctctcttcactcacaggaaggtgggtaagggcatcatctccctttgctgccaacgcttcctttgggagaggctggagagggtttataaaaatctcctagtggaaacaacctcccccactggcccccagctggcctctgctcccttccagtcacttcacagcagagttcaaatctagaaccctgtgtgtttcataggcctgagggtggtggggggaagacagggtggccagaggcaaggggtgggggatcaggggcagtggtcattcttagcagttccagggaaacagggcctttctcccaagtaccctgcacaggctcagtggcagcactggccacttgccttcccaggagggtcccaaaccccaacagagtgcctcagagtagagagggttcaagcaaggaagaccacaaagatgatgaagaagacaatgaggatgaggaagattttgaccatgagccaccggttggaggtgacagactggaagtacttgaggatctctgaatgggcggcctcaacgtccagctgggctcctagcacgttctcgtcgatcctctgaatggtttcctcctgttccttaaccatgtgtgccaactgctgaaagatggagcccaactcaacaattgtcgactcaatgttctgcatggtgtctgcccgactctggatgtaggaatcctgctcgtcaatgagctgcagctgctggctggtccgagagtccatcatgtcgatggcgacatccttggaggcatgggactctgcccccagaaccacagcaccaccgcccaggtggttaggggcaaggg

SEQ ID NO: 337277 - DNA, 1000 bp, Homo Sapiens
tttttttttccccctggacaccgggaaggggtgctgatttctttatttattagactcaagtgctttagtacagaatggtacagagatgatatatgtttgtgcttcagtactttcaaacactgagattctgataattttaaggtaaacaagtttcaagacagactagcttttttaaaatatccttttgataaattatttttatataaataacagagaaagggaaaccaacatcttcgacaaacaaggtcctgaagcatgagcactgtttggtccgagggaggggacagaacaagcagcgggagtaagacgcccggcgcaggtgcctgcggttccgtcctaaggaaatcaggtcgtataagttgggagggagacggggagagatctgacgactaatctcagtgcaaggggagatttcaaagccttgagaagagaacaccacaatgcagcgagcagagagggcggggagcaggctctgaaagggaggcggaggtggcgccgagctcgcgtacagcactttgagaggacatcactagacaagtaatacacacatggcctgcaggaggtcaagggcggcgagggggctgggcaggggacatttttgtgacttccactgttattatatttcacgacaacagcagcagcacaaatggtgtgctcaccactggagaatgagagctgctgagtcttgaggatggcgagacagccttcctgcatttgctgctttagtttctgctttagagctaagttttatacagagaataaaatgaccatcttctcttacaaacacgatgatgtatgaccccacacaacacaaggtattatgaagtatctgaaactgaggataatctgactgaagatgcttgccgagagggtacagggtctgtgtgagtccaacgggccaagaaccttctccacagccatagccctctgttcaggggcctccagaacccatctgttctggtccattcctgacccttgaacgaaggcggactagggaaaa

SEQ ID NO: 337278 - DNA, 1000 bp, Homo Sapiens; identical to SEQ ID NO: 158138

SEQ ID NO: 337279 - DNA, 1000 bp, Homo Sapiens
ttttttttttttttttcttcaaaataaatttttatttgcaaaattaaataaaaaaaaaaaaacaggaacagaaaactagtccgaatcaggttccttcttctttcttctcgtcccttttggatgagtcccagactctgttttttctttgttgtgttcagtttgttgtgtcatccactctttttctagctgtttcagcatgtctggagtgaggagtccttgctgcaccaatctggaagcaagggacagctctcctgcatcggggctgggtggctcagtagctttactccctagagctttggtgccgcgtgtccttctagcttggctctttaaggttcctgacaatcgtgactggctccctgatggaaagccctccaaattcaacagcttatgcgtctcagacattttaatcaatttagtgatattgtgcacaccatcttggataataccatctagttctttctggagatctcgaataaggctggcatctggaaacatatccataaatcggtagcttagccacaagtaaagatccaagacatcgtggacagcttcaagatccatgaggtctttaatattcttaggtggaagtaaaggccatttgatgtatcggcgtaaccatgcaaaggtcaggggctcattcctgctatactgcctggcaaactgtaacagtgaagaacacacaaaaggctgcttcttgttgataggagctgtgcagaaaacatacctcactcgcagacttagtggaatatgctggatcaactctgcagaaaatttaaaatcatccatattgcagacaaaatactgcccatcaacttgtgaaaagtctacaaaaatatcaatgagattggacagtgttgcatcagggagatggtaggcaaacatttcaatctgctcagcagttggatgaagaccagctgcccttataggatccacaggcctcttcaaaatttcctttaataaactgagatcttcatgattcattgttgtaacctctccttct

SEQ ID NO: 337280 - DNA, 1000 bp, Homo Sapiens
aaggtagaaggccagaactttataccagtagcacatgatccagcataaaggcagtcttgaaatactgcattatccagggacagggcttcagcagctgatctgtcacacaccaggtgtcccacgtaggaatttcttaaaccacaggtaggatgtagctgcagagagtccataccaggtcacgatgtactgcagatgctcgttcctcagagtaactctggtttgccctccaatgggtcctccagggactgtgctctggaagttggcatcaatgaagatgggctctgcgcctgtgattctggccatagcttccaggtctcgataatgccagtggttcctttctggattgttctcagggacaaaaggctgcctggtttctgtcagcctcaccatcccaatgaggtccacttctccctcaatctggcctttctgccgggtttcaggattcactttcttcctgggaacgaaccctctatttaccaggatggtgactcccaggtcggtgcagtggaagggagtgaccacataggccccactctgagttgaggaggagatgaggccgccctcccgggcctcccggacagggtccaccatggtccggggcatcatatacagctccttggaatggtcaaagcaccccctgaccttcactggcctatactccagatttttcagttccattgggtcggctggcagagggacaggctcagccagaactctggactccaactctgcaatcaggttcagcttccacttccgacgctggacctgccatgtccccaagccaaaggcagtcacagggatgaggagcaggacccactgaagaaaggagtcatcttccgcttttgtggcagatgcttctgctgcagaactgccacatctgcttggcctccaggccacccctgggcgcggggagaccctgaggacgctcctccaggcggcgctggccggggcccgtcccagccccgccgcccgcagccccagctgcaacgcagccaccgcc

SEQ ID NO: 337281 - DNA, 1000 bp, Homo Sapiens
ttttttttttcagtcgacagttcattttattgatgcccactccaggctgcatagggttgaggggtgtacaagaggagaaccagattcagtccatgcctggaggttagtctggggggccggcgggatggacacacagacagacacatagatctggcatctgatagcagggcatacagtctcatgtaggggcactctgggcacaggtagtcaggaaggacttcctagagaagtcctcacagggggtgggggagcaaggagcaaggcagccatcagaaccttcgccttttgtacatttgtaggcaggtgacttttgagaccagtggaaccagggtgagcacaaagggctggggtctgggaatggcaggcagcaagggcttccctctcgcctcgtcatcccatagtggggaagccatctcccccacccccaattcttggcctgtactttgccttctgccacatgggccctttcctggcatccacctccgtggttttcaaggcttccctgagacaatccacgtggaccaggtgctctacctagtgcctggcacctcatcaccaccccatcaatgcacattcttgtcctaagtgctatctacggactatctagatcttggttccagctctgagtggtgtcagcggtcatgacaccccaggtcagggcccctagcaaccgcagagctcccaagagccctaggtaccttcactgcactgtgaaggcagagcttggtcccagcctacctccagggctggccagctctgcactgccttcctctcactgctcagtggcccatggacacccacttcccttccagtggcatgtgggcatccacttctcagatatgcagccctgaagaagagaccctacagctcttagggccaacactacccagcactgtaagcacgagcagaaaccagcctcagcccgtaggccagggacccctttctttcactagtacaaagtttctgtggttggggaaccagcttcatgtcgggctaggca

SEQ ID NO: 337282 - DNA, 1000 bp, Homo Sapiens
accagttaattgttgtgtttattctgatacttttatttgggagtcctatatcacaaaatgacatgtgtactgtttgtttacaaccggtattagaaattgagatgtttttattttgactatttgagagtaaaattgtagataatgttccaaaccatcatcaaaaatgcagagcaaacttttctgtatataaactgtacataaaaacaaggcactatacatttttggggagatattaaggtagaaaggttgattcgcatagattctccagagtccatgccattaagtacaaattctttgttcattttagcaccggaagcagtactcagaacaagtcatacctaatgctgcaggaaacatttccaaacgtgtatgaagatacatattggtggcagagctaattcaacagaagcaactccatctaccttttcatgttattttgacaccaaaacaaatcttgaaagtgaatgaatacatattgctttgttaaatacatatttgacttatatggtgtttatataaatatatatatattttagaatccacaaactatcaaaataacactttataaagagaactgcttcaaaaaaaaaaaaaaaggcattgcctagctggaacaagaaggcagtgctatctatagcagctgcggcttaagtgcacataacagatacttttattaattctgataacctcctgaatggtggaaagaagtttccaaacagttcccttgaacatttacaaaatacacaactccgggacaagcagtatctttaacaatgtcaggttctgaaaactctgattgaaaaatactttgtgaaaaacaccagtccaaaaatatatatccatttccctggtgcagtggtgttgttggacgtgaccgtgaggctcctctggcgtctccccactcagaacaggccttttgctttcttcaggttcacctgcttccaggcgggcagggcgttgtattcatccctcgtcatgtctagtgcaaactcgaagtctt

SEQ ID NO: 337283 - DNA, 552 bp, Homo Sapiens
ttcttaataataaataatttattaattagaacatataagtgaatacagaagacatttaaaagtaaaaatacaaaggaataattttattcatgcagtgctttcataaaaggtgagtataatctcagtccatgagggtgtaaagtgaaatgagctggctggctggagacggacagggtgccagagactactagccagtcagggtcacagctgtattggtcgattgctgggttcctgttggcttggtctggatcatgttatttctggtgttggatttcctgtccatgctcctgaccacgtctctcacccacgtggcttgtggatcagcacagacttttaggccacgtttggtaataaaaattactgctctcaaggagccttccgtgatggtgtaggtcttgattctgctaactggcagtcgctgggtagtgaggctcacacaggtcctcctatgtgagacttcactccctacaccttccacaatgtatgcagtgagagagcagatgccaaggagggccaggatgagaagtctcatggctgaggtcccgctgagct

SEQ ID NO: 337284 - DNA, 1000 bp, Homo Sapiens
ttttttttttttttttgactaggtggttaaggagtttatttgggagaggagaatcatatttgttcttccttggggaggggggttctttgaacaataccgaagggtttgggaaagggtaggggtctggaggggagaaggaggggccacagccagacaaaatggcaacacacgatcacaggcactactgacatcacagacatagcagagggtgcaggataggggctccagaccaggcctccaaccaccccaggacgggtggaggtgtggagggagggagggcgcaggggaagggggaagaggggtgggccagtcccacagacccgttggttctgtcctcctattaacctagctgtttcatcacgggagtggggaagggtgtgtgtggtggggtgcttctctctggatcccacgcctcaccctacaagccatatcactcgactcttctcaggccacttccgtcccaagtcgtagccagagccattctcccccacccctaacaaaacccatctggaagctcctatccaagtcccctctccactgcccaaacccagccattgtaaaacattttcttcactgcaccatggggaggggctgccctttctgaaaccaccatggaagccccattctaagccccaccctgtctggaaccctggcttggcccattcctgaatcccacttcttgccttgctcaagatctgtcccctttagaatcaagctcagtctcccaaatgttccaagccacaccctttccataggctctggtaccaatccaagacccacctactctggagcccaccattctgcctcgcttaaagcctcgccccttctagaaccctgccctcagcgcccttccaagccccaccccagaatgctctagcgcactcctctccttcagactccagatccactctgtctggaacccaacccccctgctgacccctccactccacacctcctctccaagaccaccttgggtcctaaactgtcctctctaccccaa

SEQ ID NO: 337285 - DNA, 1000 bp, Homo Sapiens; identical to SEQ ID NO: 246432

SEQ ID NO: 337286 - DNA, 1000 bp, Homo Sapiens
caacttaaaaagttatttattaaacaagttaaacacaactaaaagtatatttagaggtccaagattcaagtatttttgtcaaactttctaatgataaggggaatgataaaaattgaacagatataaaaaatattcttaaacaaatattaaagcacatggaaaattcagaaataaaaacacaccaccatataaagaaatcaaaatatttcatatgtttttaaatgcttatggtatgagagccaaattgtctatttccaggttaataaacaatatataagctcacctttttaaaggtatcatactttgtgtcatatagaaataattttggaaacagtatgtgttgggtgtgtaaattgtccacattaagcaaaacatattttacatatgaatattttcatttatacttactggaaaacaaaacaaaaaaacttataatttaaacatcttgatttgaaaataattttggatttgatagttctgctaaattccaacatcgtaaccgccgaatgtgttatcaaaagatagttattcaaaatttttttaaaaaagaattgcttccccaaatctcagtattttagagcaaaaggaaaaataacatattctttgttcataaattctgatgcttagtttctacgttaatacaaaaatggtgcaataaggaagagtactgtagaaaagccactgtcttttcagtagttccaaatggtgttatacaatatttcactggagatagtggttgcaccacagatttggcagttgcttctgtgtaaatcataactttgccccataacatccaccaaaggctttcaaacataattgactttggcggtacacatggagaccatgatgcgaacggggactgccagtggatatgagggcttttatgaaagggagtttgctctgtgtgtgtgttttggggaggaaacagcggatgaaatagtttatccagaactacaaaacacattttcctaattagatcccaactgtataaataacataa

SEQ ID NO: 337287 - DNA, 1000 bp, Homo Sapiens
ttttttttttttttttttttacagataaatttgtttttaataaaggagttaattttctttcaatcctatataaaacaatagcaattaaaaacttcatttctgaaagtaaaatatttacatatgaacaagtaactgtgcaaaatttacatgaaaaaatggaaagacagggatttcctaaaagacaaaataaaaggtgtaacagttctcaggtgttgataaaaaatactgatcagcgttcagttcacacgcgctcgaattaaagtctaatgtgagaattcacacggagaaagccagagtatttacagtcataaaagtactatcaatagacaatttcatacaataacctctgaaaatagaaagaaccaattagtatatttgtaataaaaaaataggtacaaagaaggggctttgctctggacgtctgtaaagtcggcccaaggcttgcatacagtctcttagcaaaataattatagtttacatagccatttctatgtcatgtgccaaaagttatgtacaattactgacaaaatacaccaaccatttttcaacacttgattcacaccgagaaacagtcttttgatgattcttctcaactttgattttatttaatctaggttttcacttttagctaaaaaacacagtgcaagtaaaatatatttatgctgaaaaggttttcatctcttttaactttacagctttacaaactatagcaaataaaatgcatttgtacagatgctgaccacacattcagaaggagccacctttgctgggctcggcctctaccaagcagaaatgcgattacactctgaggtgggggtgcaacgatgaattgtgtattcctccaggattctcagcggagtggaggggaagggaggggaggggagggcagggggcagagaggagagcggggtgggaggggaagggaaggaagataaatagtctaaaaaatcagtttgctttgccaactgactattacaaaaataaaataaacgaaatgagg

SEQ ID NO: 337288 - DNA, 1000 bp, Homo Sapiens
ccctttgtaaaacttttatttagaaatcttcccgatacatcctcacatatatagacacatcatcaccacatgggttttttttgctaaagagtcacacacccacagtgttggcctctgggctgtacaaaggtcaaggtacctggagcggttactcctcttctgcagaaaaatgcagagaccaacgcaattcatcacatacagtacaacgttgacggaaagtgctgggcccgcccacagaaacaatgcactatgtacacgggcagggggcaagtcttcagcagagggtcacgtaccatcgaaatcacaagtacggccagacccacccccaaaaggccgaaagagttgtcggctgactacagatgctgtgccctttgttttattttggaaaagaataaaggttgtaccatcttgtcatctgccataacaaataaaagaatatgaatttgtcttaaaagatgtgattcccttcagtggttatggtcatctttgttctcaaaatgttgttttgttttgttttacctttatgttctttcccctttgtacagatgctattcttggaatgttgccagtttttcatgggtaacaaggaaggagaggaaggataaggtcatggggtacagagggtgaaaataaaaattacagatcttctttagttcttacaaagacctaaagacttgccctttcctaccaggcttgttttgggtagttgcattacattttacacagtctgccagtgttcccatatctcttttccattcttattactgtccctggccttggaacaagatagaaattaagacaatctgggctgggtgcaatggctgacacctgtgatcccagtgcttctggaggcaaaggcaggagaattgcctgaagccaggacttcaagaccagcctgggcaatatagcaagactccatctctaccaaaaaaaaaaaaaagtaaaaattagccaggtgtggtggctcacacctgtggtcctccctactcgggaggctgag

SEQ ID NO: 337289 - DNA, 1000 bp, Homo Sapiens
ttttttttttttttttttttttttttttttttttttttttttttttttggaagcactggaatacagctttattcctacacgattagacccgttaccccgtgggtctggccgaccgtcctgactcggagatccctgagctgcgccgccgcttccttcgtcaacatccagcagctacttgatgagcgccctccagtgggccttaggtccctatgccggcgcggggttacagcagtggacagacaggccagtccctgtcctcgaggagcccatgatccgcggggagacaggcatttaacgacgactcacacgatcacttaaatacaactgtggtgaaccgcacaagagggacgcgcggcggtctgcggggaatgacgaggccgacctcgtctgcgacccagggagggcaagggtggaccaggcaaagggaacagaggactgggacctggaggtgggcgggaggcgtttggttcattggaggaaaggaatagccctgtgtgtgatgagcattgagaggaggtctggcgagcaccatctagggctgaagaactaggcagtggctccagcgcggggcggtgggggggacaagtgagccagggcaagaagaatggatttggccctagagtacgggttctccaaatgtaacctcggccctacagatctctgagactatgtcagggggtttgtgagattttataacaaaattaagatgttagtacaatatcgtgtttcgccgccgggcgcggtggctcacgcctgtaatcccagcactttgggaggccgaggcgggcagatcacaaggtcaggagatcgagaccatcctggctaacacggtgaaaccccgtctctactaaaaacacaaaaagttagccgggcgtggtggcgggcccctgtagtcccagctactcgggaagctgaggcaggagaatggcgtgaacccgggaggcggagcgtgccgtgagccgagatcgtgccactgcactccagcctgggcaacagagcg

SEQ ID NO: 337290 - DNA, 1000 bp, Homo Sapiens
ttttttttttttttttttttttaacacttttataaactgcatttattgtacagagtactctgaagaaagaaaaaaatatgtacagccattcattttcattaacacatatattctgtcctgcaatactggagaggtggaatgtgtctggcacagaaataacccctaggagttataaattagaaaaacaacacttttaaaaaagatttttacttttctggtagaaatataaaaactgtggttcatggggaaaaacattaaaattaaaaagtccaatcaattatagaggtggctttaacacttaaagttttctccctcaaaccaacttgtcaacagcagtgtttaaaatctacatataaataaatgggcagcgctgcccagatagcagcacggtatgagcaactcacagtcacgctgcgcggtgttctcagtgcacaaataatgccccttcccggcatcccgcggtgggcacttacagaagggcatcacctggtgccacaccctgcaactcaacatccatcttctcacaacaccaccatttaaaggtaccaaaacaaactgatttgtttaaaaaaaaaaaaagaagggggtgggggaggcaagggtacatgagagccattacgtcgtcttcctgaatccctttagaatagggtagatgttttcaaatgcttcataaatttctgctctgactttagcacctgttaatacaacttttccagaaacaaaaataaggagaacaattctgggtttgatcattctgtagattaaaccaggaaataactctggctcataactactaaattgttggtgggtgagcacaaggccttctaaccttataggaaacttcacatcacagctccccaccatattctgaatcttgaagtccaagaacttagctggaaaacccaacttctgtacaactctagcatattttcttgctgccagtctggactgttcttcactcttggctcctgtgcacaccattttcccagaactgaaaatc

SEQ ID NO: 337291 - DNA, 1000 bp, Homo Sapiens
ctaaggcgctgcagtttctttattttttctttttatagagatggggtcttgctgtgttgcctgggctggactcaaacttctggggttaagcgattctcccacctcagcctcccagagtttgcagattacagccataaaccaccgtgcccagccctctgcagtttctaaaagaggttcatcaatacaaattctcagcatcattctccaattaggctcccccattaaccaattgtttctaatgaccgattattaatttgcaagagaattcttcctctaactcataccatcccactcagacagagttcagtattttccttcactttaatttttattgcttctccagttcagataattcagcgcttcctctttcttcttcctcaccttgttcatggctggctgttccatcagcagaacttccagcgattgccacattcattgcataagacaaaggtagtcatgggctcatcagcactgcgtgtctgcacctggttataggtgcagttcttcttcttgcatttgctgcactggaagaggtcagtggtggtgccgccagtcttggccatctggtgctcacggatggcctcctgggtcatggcattcctcaactccctcagttcatcactggccatttcctctgccgtcatcttggctataagccctgcggagatggccccactgagcacgttccgccgcaggccggggttcctggggtccttgaggttgcttatgcggctgcgcacgcggttccggtacttcatgtccgtgctcttgagctcttggtagatatgatcttcgatttctgatgccatcttgtcacagttgactccatagtccttgtaatcatcgtccgccttcagggctgctgacagcatctccacacacttgtcccggacagagtcccctgtgagatagcagggggccaggagacacatggaagaggcaaacgtgggggtcaaggggctgctaggtgttttggggctctccgcttttgatttgctgc

SEQ ID NO: 337292 - DNA, 1000 bp, Homo Sapiens; identical to SEQ ID NO: 158142

SEQ ID NO: 337293 - DNA, 1000 bp, Homo Sapiens; identical to SEQ ID NO: 158143

SEQ ID NO: 337294 - DNA, 1000 bp, Homo Sapiens
ctttataaaatgtcacgtttattgctacagtgctgttatatacaggacaggtctctgaatccacctgaaagagggtcgttttaaagtcccaatcatccagccagctgtgttgacacgtatacaattattttctttaaaaaaaattttttgaaaaccatcttgaggcactcagatcacaccccccaccccccataattgtggttcccaggaactgctgtttcttcctcctcgcgctgggtgaatctcgtttgaattctatgcagaacgcacagttccagaggctatggggccactgccacccagacctaggggcagggcaggagcaaaacaagagggagaggcaagttcccttaagagatcaaactcccagggcgcaggggaagccaccgagaagggagaggcagccggacagcccctcccctccgcctggcctggactgggggcagataccaggcattgagctggccttgaggtttcccttgcatctaccatggggcccaggctcccaagccagtctggggaggggagtcaggcagtccaggatctcctgggggtaacggtggagtctcaggagtggcacggggggagacgcccgacctgcagcggggatgaacacagccagcccaggggtccacaaggcctcaatgcagggaggggcatgaagggcacatgaaggcccccagctagccaggcccacacctgggtgccacagtgaccactgccctagttcgtgtggaactggatgggatcccagggtaggagacttgcagttttaaacccaagacagtcccagccagctgggaagagctggttaccctcatggcaaaagaccagaaaaggagacctggagagaggcctgggtgctgggacatgggacacagatgggcccgaggggacaccctgctggttctgcagcagggtcggagccacagcccaaggccttcgtggggctcagaccagcacagtcccccggctccagccactcttgcccttggaccac

SEQ ID NO: 337295 - DNA, 1000 bp, Homo Sapiens
tttttttcaggctttgaaaaacaaacccagtaaaaagtatctttattctcatgtttaaaagtttttctatgatgatgcattaacaatacaaaaatattttgaacactacaataatctttttctcaagacttcttgcagtgttacactagaatatgtgatctttggattctgagaaaccagtggctaaagtaggaactaaaggctttttttgaggggtgtgtgaatacatggacagcccttttttttttttttttttttttttgagatgcagtctccctgttacccagactggagtgcaatagcgccatctcggctcactggaacctccgcctcccgggttcaagtgattcttccgcctcagcctcccgagtagctgggattacatgcgcgcaccaccacgtccggctaatttttgtatttttagtagatacagggtttcaccatgttggccaggctggtctcaaactactgacgtcaggtgatccacctgcctcggcctgccaaagtgctgggattacaggcgtgagccaccgcgcctggcccggcagccctttttctttggatttaggcaaaaaacaaaaattaaattaaagacttgtttttcaaggctgagggttgaagcttggctcaaaaatgggttaacgtaggctatggtgaaaacctgttgtccactactggaggttttctgggctccttgatctagttgtaatggtcctctgtcccgcagccccatggggaaactggagccggccaggcggactgaatgctgaaagacaggctctggctgtcatgaggttttgggtttgccctctcaagctgcccaggagctggctggactgccatagatgaactggaaatggaattgtgaaaaaggctctgtgaatggggaggggtgcacactggatttgggccatgacttctttgaactgttgactgcagctgctagtgacaagcctggggccagagcttcttaggctggtgggtttctcagggaacactt

SEQ ID NO: 337296 - DNA, 1000 bp, Homo Sapiens
ccttactttccaggaataaaccctattatcttttttatacattgctggatttgatttgctaattattttaaggacttttatttctacattcatgatagatactgctggtattttctcatgatgtcttttgcaggatttgtatcatatatggcatttctgaggtatacctaagtatcatttattcaaggacctaagaaatggaaaaatcaattgaggtgatttttccatcatgaaaaaaatttctttaaagtcatctgtctgattctgtaaaaatttcacattctttatgtgaacaaaaagctgaaagaaattcagggaaagaattaagatgtgatatcaattgccaacccaatgttttgttcttgctagttgtgttccccctccttattccatccatttcatagtaataagaaaaaaaagaattttacattgagatttaggtaaatttttgaattacagtatatgataaaaaccttaacgttcaaactccaggtataatgaaatttaattgaaaattactatagcagtttaagtcaatttgtagttttgaaagcagttttaatattttatcttccacaaaaaggtaggaaagtttctgtgctgaacttaaatatataaaggaacacgtccaacatatttagttaaaaatccaaaagtcagaggataatttccaaatgtgtacttaaatagaaaaaaattacaaatttcatgtgcaataaagtgtctgccacttacgtaaaaaaaaaaaaaaaacccaaaactatgtacacatagaaacacgtaacatttttgtaaatagagaaaaggtctaaaaggataacattaaaatgaaaacagcagttatctctggggacagcggttgtgtggaaatgctaactgcttttcaacaatagtttgcattttctagatgagattctatccttgtataattttgttactaatataaacatcaaaaaattcttcataccagtgaatcacaagtcctcactgcaacagacat

SEQ ID NO: 337297 - DNA, 1000 bp, Homo Sapiens; identical to SEQ ID NO: 158144

SEQ ID NO: 337298 - DNA, 1000 bp, Homo Sapiens
ttttttttttttttttttttttactgtgttaaaaaaaagatggcacatttattgctacataaatgttatatacatattgtgttttctgttacagtgacagaaaaaaatttgaacttcttgctgctggttgaaaaggtttatcaataataccttgaatttgacacaggatacaaatctgcaataaaccaacaatggaaactggagaacaagatgagaagcaattcatctccaacaattagctcttacaatactccataggtactacacggtatgctagaatcctactatggtcttaaaatgctattgtaaatttctgatattaatgaacaggttatggtaaataaccctacattttttactacctaatataataaaataaagtaagaaactttttactgaaaactttttgatttcaaaaatctagaaagagtaatatttagaattcaagaaattttcttacaagattattgtataaaagactagctacagtgaaaaataagccaaatgtttttttctttctattttatgaaggaaagcttctgggcatactgcaaagtctaatatagcgaaaaagacaacaagctctgaagaaaaaaaggccaggcagtggcatatgttcactcacacatcataagcaacaacttctgtttagctgattaacactgaaatgaagaacaaggccacagatagagtccgatgtaactggagaatatatgcaaattaaagtaaccaaaaagtccactaagttcacaaatgactgacttgttaggaatcatcctgattagagtaccagaagttctgtcttgtttttgttctttcaaattaacagaaatctttaagctacatagtgatttgggtcctttcctctgtgtgctgattgccactgttgatattggctataaggaattattaagccaagatacctcctttagcatgtttttctctcccagggttgttgtggtggaagacaggtttcatggaagttcaaagtgattatgtc

SEQ ID NO: 337299 - DNA, 1000 bp, Homo Sapiens
tttttttttttttaggtcaatatagtttccatttttactgtgcatacacatatatacaatgtattttaaaaatgggctttacaatatgtagtttgatcacttggtttacaactaaatatattgtgaacattttgtcttctacaacagttaaaagaattgaatagcttggaggaaacacaatttattaagcaatcttgttggggacattgaggtataattttttttctaaggaggcttcattctttttataatgcctttgggaaaaaaaggggagttcttgtcttatatagctttctatagatgatggaaacttgcccttccatttagcctttttacttgcttctctaccaccacctaatcaccaatcaagtaacccattttgtttttcaacctctctcttctatttgcttcctctttcctacccagtctccctgcacacacgcagatggacttccattccttcagcactctggttcctccccttaaagatgttttctttccttttaaagagactattttaattgattttgatcaactctactcaaaactgtattctaaggtccacattagaattagtctccaataatctgaacatataattcaatcatttaaaagaacatattaagaagaccttggtagaattacatgtatcaagaaacaccaggccttgcacagttgctcacgtgtgtaatctcagcactcgagaggctgatcgatggatcacaaggtcagagttcgagaccagactggccaatatggtgaaacccccatctctactaaaatacaaaaaaattagctgggcatggtgacacatgcctgtaatcccagttacttgggaggcttaggcaggagaatggcttgaaccccggatgcggaggttgcagtgaaccaagatcgcgtcattgcagtccagcctgggtgacagagtgagactccgtctcaaaaaaaaaaaaaaaaagaaacactggacttaggcacaatggagatatggctgactttc

SEQ ID NO: 337300 - DNA, 1000 bp, Homo Sapiens
tttttttaaggctcgggataagcagtttactttcttccattatgaggggcacaggaaaagaataaacacagccttcagtggatggactgcctggtgcacagactctagactgaccaggatgaaatgaaatggttctccagggtcagagtgaaggcgctgcccagagcagccagcctgtgtgttcacccaatgctccagagcagaccatcgtggcctgcagaggagacgcaactcctgaagggaaggcgctgtgtcttcctcggctagttaccccaccaacagcaagaataacgtgttgggcaataaacggtctctggatgactgatacagtttctttcgtggcgctcacgtgaccgagatagtttcttttccttggcgctcacaaggcaaaaaggaaggccctaattccgttgatgtcttagtagagcttctaagggtgggaaatccacacacacagtcttgacagcagggtctcctgagaggctgtacaacaatcccaccatccaggaacccaagtccaaccaggcctcctgaaaaacgtccgggaggcacggaacaccatgctggctgcttctctccgtagcttcctggatcctccgccacagctcaggctgcttccgggtcctatgtgaggtgggggcaaactttgttgcgaaggtcacctgatccttctgccccagagctcagcacttccaattatagtgtctgtgtcccagggaatattcttaaggcttagaagtagattacccggtttaattttccatctgattctgattagctgcggccaccatgggcaggattacataggccaaatgcacgtggttaagctggacaggcatccccagacacatttacctgagtgaggagggggcgttactcatagaagaatctagactttcttctcttcaggcatatttgatgttcagggggaaatgaattaacagctataaggcacagtctctagtcctaagaaggtgaactcctatactacaggattaaa

SEQ ID NO: 337301 - DNA, 1000 bp, Homo Sapiens; identical to SEQ ID NO: 158145

SEQ ID NO: 337302 - DNA, 1000 bp, Homo Sapiens
ttttttttttttttttttttttttttttttttttaatatcttgtcattcttggcactgtttctaaagaaaaactccattatcccaagcaaaaagcacagaaggtggagtttggcttcaagagatgttaactcaaaatcttaggcctagcagagaatcaccaaatttatggagagttaacaggggtttaacaggaaggaagtgcctttagtaagttctcaagccagaggctggaggcagcagctaaatcagaggacagcatcctcagtgaaagtgagccattcggggtggcatgtcactccaggaataaacacaacttagaaacaaatgatttcgtaggatagcacagtgacatggtgcactgtgaacctgaggccactgtcaaactgtgcactggttgtgaatagggagagccaaaaattatgtcctactggtaatgagctttcaatggctcgatcctctcacactgaagctctgtagagcagctcagagccacaaccactcccaacattgacccttctgggggtagctgtctgtggcagcccacaggaaggagctggagatccccattaggactgtccacccacacttgaagccacaaaactgcagggattggggctctcactggtttggtcgcctaactcccgcctaaaaggccacaaatttctggaaaacaggtaacagaccaaaaactaaagtgcatcagtaaaatgaacatttatctactgccccgaatctctggcttgacactacctactggtgtccagttggagacagactaaaatgcactgaaggactattaggattgctgcctcctaagttatcacagcctcgctctgttgatgtgaatgaggaactgcttggttgttaaaggagattttgctccctgctgccccaaacaggtccttatctaggtttgctccccactgccccaaacaggtctggcaggattggttacaatgatctccagaggctcaaccattccccttccctatccttgct

SEQ ID NO: 337303 - DNA, 1000 bp, Homo Sapiens
gaattccgggggcacaggggtgtgggagcgggtggggaggtcgaggcgggtgcagagtcggagaggctgccccactgacagtcgagagggcagtcccggagactcggggggacccaagggcagcggcggcggcggcggcggcagcagcagcagcagtagcagcagcaggaagggttgctgatcccggagctgtcacccgccggagggtgggcgcgcggggggctggtgaggcgtgggaggggcggggcgggaggagagcctcactttctgtgcttctcctctttgtcactgcttttggcgttgttgtccgtgtggctgttggggttgttgctgaggtacattttgtccatggccttgagggcctcggtgagatagttctgcagggccgtgaccgcggcacacaccgcggggctgccgaagccgtgggagatgaggttgaagtgggtcaagcagctctggatgccgggctccaggatggggttgggccgtgagttccccaggggagatcggtcctgagccagcaggtcggtgaactctttgcatatctgttttgtagccaggagcatgttttttcttgtcacttgctcattgggatcggaatgttgtcggttgagaaattcagctactgctttggcaggaaattcggtttcgcacacgtacccaaagtccctggctaggtggacagcttctccctctactagtgatgtgagcagggtaacgttggcagctttacgtctccctgcaggcagatttaatcctattttgtccagtttttctcttaaagatcttcctccatttttagacttcgccctccggagcactccgcccagcagcgacgcgttgagacactcgggtggtgagagccgccgctgcacttccgccaccgtgaccttgtacttcgaggtggagctgaggagcgagaggcgacccggaactgaacagaagacttcgttggggttcaccacgccgccgaagaggttgtccttgttaatagggatgg

SEQ ID NO: 337304 - DNA, 1000 bp, Homo Sapiens
ttttttttttttttttttttttttttttttttttttttttttttttttttttttttttccaaccacactcattttcatcccagaagattcccgtaacaatgtgaggaagggagggtaacatggaaaagggtggttgggagacgggtgaggtgagatggagggcggggactgcgagagtttcctaaaaatatatttaaaattaaaaagttcgtgcgtctcagtcaaccagctctcaaagcattgacaccaacgtttctccgattttcttccaataagttagcgtttttctcatgtttagtcttatgtttattttccaaagggaaggggaaatcatggttttcttttattatcagtattactaaactcgaaagaaccgaagtggaaaatccggacggttgtctccaaatgtatcttgaaatagacactgagaaccgatattgttgctccgttgtacgcctcagtttttttttaagttatttagctttttttttttaaattttgattgtatgtgtattctacctaatataattcttccaaagccaatccaatattttaaagctaaaattaaatttttgtctgtttttccttttgtatttaaaacatttttccttctttttttaaaaatttttcatttcctgtgtttctcctccttgtcgccagttttactacctgggccttccccagacgtgtgcctgttagtggtggtgttgttcaagaacatcttgtccatgcctttgagcgcctcggtgagatagttctgcagggccgtgagcgcggcgcaaatggccggggcgccgaagccgtgcgtgatgaggctgaagtgcgtgaggcagctctggatccccggctccaggatggggctgggtcggctgttccctatcggtgtccggtcctgcgccagtagatccgtaaattctttacaaagttgcttggtggccaacagcatattctttcgggagtgcaggtcactcgggtctgtgtgctgccggttcaaatactc

SEQ ID NO: 337305 - DNA, 1000 bp, Homo Sapiens
ttttttttaaaaaacaaagtacaaactttattttgtttctttacaaaggcacggtggcctcttggttttttttctccccactttcttaacaaaatataatagcttctccttgaacacgaagacctcaaaattgtaaaaaaaaaaaaaagaaagaaaaaaaagaaaaacaaaacaaaaacagaaagcaaaccaaaaagaaataaaaaaccaacaacaaacaaaacaaaaagagagagacagacatttttggggtggaagatgagacctggaggcagaggtgggggctggggggtgggagagtggcgaattctagtgccgagatggggaagggggaggggggcacagcagcagcaaaccccaaccaagaagcaacggagacctccgggcccccagaatgccccagcctagtcttacccccaaccatgtaagtgcttaaaggagaaagaagaaaacccaaaaagaggaaggaaaggggattgaaggctgacaatcccaggctggctctgggcagggaagaaataacctggggttttgtttaattttccctgttcttaaaaaacatatttaaaggaaaaaatgctttttggcagagagaggccaggcatctccgtgtcagcttcctccagcccccggggccgaggccccgccctggggtgccgatgctcccacagctctgcgacaccccagccccgggacctcgggttgagtggcttcgttcaaaggtcgatttacagtattgaaaaagaggtcataaaagagacccaaatgacatcgtaattttgtaaaaatttctcactcattcgcccatgtctctccctgtggctgccccggctccctccagcccccagaagggagaggagggctgggggggtagtcagggaagctccccgtcccccgacggctcctcccggctctggtccatggcgtcactgtctgaggcctcggagtcggaggcggtgtcagaggtgggggcctccgggcagctgcggacaggcttcac

SEQ ID NO: 337306 - DNA, 1000 bp, Homo Sapiens
ttttggcttattgatatcaggtggtttattgatattgaaactccacgcccctttcaccacagaccacctgttggccataaggctatggtgccagcgatctctcccactaacagagctggccaggtcccagggcctagcaaacctcccagagtggtctctaggtatggaggaccccagaaaggggaaggggctgtgattgaagggatgctactctctgattaaccgacagtatgaccgtcacattagggtcagctacactgcagggctggggtgtgtggatatctgtgctggggtctgggctccgtggagagatgtgtaggggtaatgagaaattgatcagcaatgagaggtggactctgagccacctccctgaccctgaatcattcaagcgaggagcagaggagctcttgactgggggacggggatgtgaggatccccagggcctcagaagttgttatcaatgttccagacatccccgctaagcgcattggctgccccttgcagcgtccaggtgagcagggctagctgacgccggaaacggctctcctggaagccagtggaggaggtggccccgggggtcccggagctgttggagcgcagcagccgcaggtggtccagcagggcgcccagcgtgtggtctccacggcccatgaagatgtggcggaacggggagtcggctggcgacacgtactgggaaaggaagtagaactccacccgcattatgcgcacgttgtacatgcgtgtcagtcgctcgtctctctcctccgagctgtagatctcctgccgcagcttttccgccgcccggatgtagtccccccgcgccgagtacacccactgcagggtcagcccgcgggccttgaggtccccagagaactcgttgaggttcccgatgtgcctgaggacgacgtccccgtagcggccgaagtcgaggggcagcaggcgatcgtggctgagccggatgaggagctgccctgcgagctgggccacggcctgggccacg

SEQ ID NO: 337307 - DNA, 1000 bp, Homo Sapiens; identical to SEQ ID NO: 158147

SEQ ID NO: 337308 - DNA, 1000 bp, Homo Sapiens
ttcaccgcatgtagatactttattgaaggtaagtggctattttagagaaaaagatgaccatagtgggcagcctcgggtgaggtttttggggagctcaagggctggtcacttgctgtaggtcttagagcctggttcctggaggcttaggagatcttctcttagcccagatccagccgtcaactcctcctcttcactctctgctgactgcccgcccttggctccatctgcagatgtcttcagagacgagatgtacttggaccagaaggagcagtcggctttcttcaggccctgtcgattggggagcagctcactgaactccttgtagttctctccaccagcacggggtacaaagtcaggccagggggttgcaaatgtgggtactttccgtgagaactcataagggtagttgggatttcctgatctgatgaagtgggaaaagtactgcatgattttcagcgacaggctcttctcctccagagaaaactgcccctcgtaggctgggtagaagggaagccccaaggcaaactgaacatccgccagcagctccaggctgccatggccgtagttttcaggagcatggtacatgaagacgtttcctcgggccctctttgcccaggcactggccatgtcgattatagggcagatgataaagtagtcccgggtggcattctccagagcccgggagaaggaggcatagtcatccgtggagtgctccagagagtaataccatgtagcagcagcctcgacgcgggcatctgagtcctcgccacccagagaattctgcagtgcctggtaaaaggctgttttgctactggtccggcctcgactttcctcaaattgcttcacagcctttgctctgttgatgagcccgtcgtcctgagaactcccaatgagcagatcgacctctacccataaagacctcttcagtgctctggctggaggctcacggaggaagtggccatcgatcacaggaccccagtagtggaaagggccactcacg

SEQ ID NO: 337309 - DNA, 1000 bp, Homo Sapiens; identical to SEQ ID NO: 246433

SEQ ID NO: 337310 - DNA, 1000 bp, Homo Sapiens; identical to SEQ ID NO: 158149

SEQ ID NO: 337311 - DNA, 1000 bp, Homo Sapiens
ttttttttttttttttttcatgtatagaaaaccttttttacaatttatttcctgttgttaatctttaaaaatgaggttctagctaagtgcagggtttcagtggtgaaattttgaccatgtgaacacataaataaatatttacagtctttggcaaaacacatgacgtttcatcaacctatacgataaatttgtttagaaaaacataaataatttacaaaaaatatggtacattctaaatattcacatcatcgtcactcccacaccattgtacggttgaccccacaacacagaaacagaaaacctgcacgctgttgacagtcgctacatttaatgaagtatcccaacgcttcgttggtctcgggaatacagctccacacgcaaaaaagtaaaaagtgcagcaaaacaacaacacaacgatcaacctcaaaggaaacaacaaaattaattttatcaaaatgcaatgtgtacattaagactaaagttatggattgttcctgtttggcatagaaatgtgatgactattaacagaaaggggaaaaagatttgccccctatccatcatcagacagacagacttctcttactaaaccccttatgtggagtgggatgagtgactatttcctgcagaaagatcatgcaacttaaagcaaaaaaacaaaccaaccaacaaaaaaaacaaaaacaaaaacaaacttgtgcatattacacatgactgattattgggtgtgcctggcaagactaaatgctgattcttttcagcgtttgaattaaaagaattccatatacagcagatagataacagtaacaaatattgaactaaaatcgctggcaacattatatatttaaggttccatcataaactcctcattattctctatgtattctgttacagcttctagcatgcttcatcgtgacaacctaatattatcaagcctcatattttcacaggattatatacttattagatgtttgtttctagaaattatactacatatgtgtta

SEQ ID NO: 337312 - DNA, 1000 bp, Homo Sapiens; identical to SEQ ID NO: 158150

SEQ ID NO: 337313 - DNA, 1000 bp, Homo Sapiens
ttttttttttttttttttttttttttttttttttacaaggctttggattttttattagttctgcaataaataataggtttatagttcacctgttgttgatctcatcagtggtcgccaagtaagagggtgaatcactcatcccaagagactctgctacctcttagctctggagggtaaaaagcaagggccagagcaaatacattggggagagggggagaaaaaaaaaatcaggctattttaatagccctcacatgccaagtgcttttgattcatcatgtttagttttcataagcttgtgaggtagataatattatccccattttatagatgagggaatttaggctccaatgggttaaataacttgtacaagtacacatactgaatgactgccatgaggagggatgtgaattttggtcacgtgccaacacctacactcttcctaccataccacactggacaggtaattgtctagtccctcctgaaccactggtcacctccccaagctgttaagaggagcgaggggagcagtgaatagcaacagacattctaaaggtgagccagtgactggaatccaggaattggtgctcaggaggtagagaagcatcccggagaactgagccgccttcacttctggctgcaggtctaggcctttctgctctcatcattggctagtgaactgctccgccgacctcatcaaagagtctgtcttctatcatgtgaagggatcttccctagtgtccaaggtctaccaaacttgtcccgtcatttcctggtatttccttgtcacctcctgggctttctcggtgaggtgcatgaggatgtgatggaggctggagaagtgcaggtggaactgggcttccaggtccagctctcctgaggcactctcgtcctcgacttcctctgtctctgcggttccattctcttcgctgcctgccaccttggcctgccactcctcccgcggcagcagcccatggtccacatccacacagatggccttgag

SEQ ID NO: 337314 - DNA, 1000 bp, Homo Sapiens; identical to SEQ ID NO: 158151

SEQ ID NO: 337315 - DNA, 1000 bp, Homo Sapiens
ctgggtgtcttgtcttttttgggcttttagttagctaatgaatgaatacattagacacttttgggttttatttgggattctgatcaattctttctgatgttgttgaaaatgacaaagttgggtggctacatggcttcagaaccaagtcagctgccaaaaccgtgtgtgcaagagcgcgacctaaggggacattcttgtcgacggtacaggagggtgggcagagttagggcaggaagtatctacacacattctctacggggcaggtgacgcagtcagatctcagtgttcagtttcctggagggggcaaagtcttcacgcctaacccaaatgacttcctcgcttgcgctctccaggcctccattgatccccgacagggcagcttgcttcttgagctgtgccatgcgggacgcgtgactatccagggttttccggcctctttcccgctgactgatggaggtggcctgaagccgctcctgcaggtctctgtccactgaggcacccttcacggactcacagaactcatcatcgtcactgaggatgtctgtctccttgatgtcatcttgctcctcatactgagcaagatcaaactgctcctctacccatcggtcagtgtccccaccaccggggggctgctgggactctttctccgggctgcttgcggagacggcatcagaatcaatggtaaacctgtttcgagccagccgccgcctcctcctcccaagagacttgcttggggcagacactgccctgctcatggccggcctggcccccttcagtgcacacaatcttttgcctccaaaagggacatattgctgggatgagggaaggctctcggttttgaggagctgtcttctgtgcttatcacgcaggattgaatgcacagcctttaggaaatcctttcggctctctggggagctgcagcacaagtgaaagaccctctccggcctcccttcagactcggattttacatggacaatttcacacacggcatttgcctctg

SEQ ID NO: 337316 - DNA, 1000 bp, Homo Sapiens
tttttttttttttttttctctttgataatactgtttattgtccacggaccgagcgattgctcaagaatgatacaaagcatcagagacatgcgcagtctgcttgtcaactttcaacaactcttgtgtgttcccagcaccggaaggtctcagacttcatattccagcataaacacagtgctcccctcccccaaaaatccaaacggaaacaaaatcaacagagctttaaattacggcagcaagtccaatatttcttaatacttatcaagcaaagatttgaaaataactacaatgtaaactttattttaaatattttgagttgcttgcaggatgaaaataggagaagagagctgtgcttagaacataacatataaattaaacgatgccaaatggagagccttcttaaactatatatatattgccactatttattgtgaaggtatttgagcggcttcctctgtcagctgccacccggctcttcttaacctgttttgttttctgctcagcacggttaaaagaccaacgtgtgtggatcaaatataaaggccacacctttcagaccgaacctactcaaagatcctttactttgcaataatttgaactggagaaccaaagacgggagacgaatgaaagcaaagatgctcaaagaaccaaaggaaagacctgaaggaatccacctgcataggccacgcgttccactctgggtcaaatgcttccacgatgcagaaacctttttttaaaaaagtgcaagtctaatacctaccaagggtaataaaaaacacagcacaggaatgattacagctgatgtcaaaaacaaaccaaaacattaaaaaaacaatcagcagaaacaggagtaaatgttacatatgatatcaccatacaggaagcgaacaggggtggggtgttatatgggttggaggggtctggtggagttgtatatactgaaatcacatggactggtccattatgacatcttaccaactttaggtcactgtacagcatg

SEQ ID NO: 337317 - DNA, 1000 bp, Homo Sapiens
ttttttttttttttttttttttttttttttttttttcttgttttcattcctgccagtcagcctgtttatgatgctgtcaaaccaccttctgatactgtacatcgcaaggatataccatctcatgtgtatgacattcgccatttctcccctaccagatcgattaagacaaaggaaaacacatattcctggggaggaaagggaatagtcctggctttagaaaacagactaagccagaagaaacacttgcagtaacagctacaaggctagactaatggggtttgggaggcaggggcaacaggctgagggcagggcagaaaagtcatggccccttccctgccttgacagtggccagactgtccacttggcacttcttattagctggcagcaagaggtcaggtggtaatggccaaagctctgcagggaaggagaactggcttgatcttcaggactcttgaagggatgtgatggtcactggtccctactagggctgaacgatgtcaacaaactccttcctgagaggcaggtggccccggtaccagctgcaggtgccgtcaacatgcttcatacagacataatgctgagcctggtaaccatagagctttcgttccaacagccagtctgtccagaggcactcgttaggggccgagatggtacagggtactgtgtagcaggtggtgatttggcagccacagttcagatggtagtgatgattcagactttccctctgcaccaaggacaggtcctcccagggctcgatgtagttgcacagatggatgaagacttttccatcactgaggacctgaccagtcaagagatactgcttctggctgttggcttctagtttcacaccacagagggaagagtcaaaaggcgtatagatatactgaacatccttgactttctcaaaccctttgaacatctttatctgtttgatttcataccggagcattttttcagtgtcagcagggtctgcactggccggaactaccttctcactgga

SEQ ID NO: 337318 - DNA, 1000 bp, Homo Sapiens
aattagttaatttcataagctacagcagaggcgtggaccctgccctctccacacttgaagagataagcccctgggatccaagtcccagcaaggttggtgccacccatcttggtgaaagatgctgttgttcctgtggaaaccatcaccagaggtaggaagggctttgagcccaaaaggaaacaagagggcgtgaatccaggccatcctcaggggagggtgggagcccatcccaggcagagaggcctaagcctcagtgtgggccaaggctcaaaggtgctggcacaggcttcccagggagaacagaaactcagcagtgaaagccgcagaggggaagaagcaggctgatgtcaacagcgtggggctctgtccctcaccccaaggagagggagtgtgccagatcccaggccaccaagcggggccagctccagcctgggcgatcgtcccagcagctgagagggaagctttaagcagaccagtgggtaggagaggagggagcatgcggcaggtggggcagccacacaaaggagagttcccagaaggccaaggtgtggtcaccctccacgcctcccgacttcctcctggagtggctgggcagcatgcagggcagcgtccagtaggcggcagtggcaggaagggagcgggcggcccttgcaggtccctcagttggcagggctgcattgcagaatctgctgtggggcaaagagcttcctggcagccacggcttcccctggctttcctggcactgggcagttctctttgttgtccggcccggcaggctggcctgaggccttcttgaagtagcagagccgacacacggagtggtacttgtctgctcccccaatcacctcgacctccttctctgtgccgagcctcttggtataggcggcttcccggaagcactccatgcacaccgccgtcagcttcaccacgctctcggccagcggcaccaggttcaggatggccccaaatggcttcctctggaaggtcccatccagtgcag

SEQ ID NO: 337319 - DNA, 1000 bp, Homo Sapiens; identical to SEQ ID NO: 158152

SEQ ID NO: 337320 - DNA, 1000 bp, Homo Sapiens
tttttttttttttttttctcatcctgtaaagtttaataggaaatacacagcacttttttctaggaatagcaacaagttttggggagtgccccaaatactttgccttgttgctcttgagatcagctgcacagagaagtgacagctaggtaggacagagaatgccttttgtggccacagaggagtctcttagcaggaagaaagaatgacacagtcattgagaatcttaagttcatttgtgctgtttcctaatgaactaagccagttgctacagattacagttggccctctatatccatgggttctgcatccatgaagtcaaccaactgtggatcaaaagtatgttttaaaaattttgaaaataaaaaataacaataataatataaataaaaagacagtacaactatttacatagtatttacattgtattgggtatcataagtaatctagagatgatttaaagtatacaggagaatgtacacaggttatatgcaaatactatgccactcttataagggacttgatcatctatgaattttgatatccacgaggatcctgcaaccaattcccttggataccaagggactatattcagatatcagtaatagacttatgatcatggttatctcatagaaaaaagaaaaaccaaaaaccaatttttaaatctggcatatgtttataaaacagcaccccagacaaaatttgaagttttgtagttttagtaagcaagtcctcaaatgacggtacatccacgtagtttttatataattatgtctgaatgaacttaactataactagtgacataaagatcccaactagacaaagactggtcttaaatatgggaacctaggactttatcgcagctctcagatttacccaaaatccttcccgctgagcctcgtccatgggccactccaggtaggtcttggtgttcattatcttccgcagcttgcagaagcgctggggaatggcttttttctcaatgggctccagaagaatgaga

SEQ ID NO: 337321 - DNA, 1000 bp, Homo Sapiens
ttttttttttttttttttacgtgcttatatgttttattttgggtaaaattaagtcaattgtcaaaaataggcctgaaataaggagacacattttcctagaagagatgtaattgtgatagaatataatcatttacaaatatgaataaacaaattataacacctttatggaaaacttaaatttgccatagaactttttaaattgagaaagtttctcctttgctaattgaatatttaaataaatttaatgtacagagtttttggatccaagtgctacttgcaatttatgacgaaaggcacctatccgttctttctgaactggccagttcaagatgcagtgagatttaaacattcctcttcgcaaacagagtgcatggttcagtttataatctggaatctcctcaaggaaaaccaatataatggaatccagattttgttcaatagcttgttgaactgcatgatgtaccttgaatcttttgcataatgggtcttttaatagatggtgtgttataacaaaaataatttttctgcttcttttgatgctgttaacaattgcttctagttcaaaaacacccgcctcaaagtccctttcttccagacaaaatttgagagattggtcttccttttccattgaagagaaatgttcccagacccaatccttatctttataggcatgaattatatatgctgcatattcaaactgttctgtctgtctgtctatttctttgaaaccaagaactcgatgtactgaaacattccaataaaaagatatcctccagccctcaaagtggatgagaagtacaataaagataaaaatcaacaggatactggtattgatcatgaaaaagagttcaaagggggcactgtctttgcaagatgatgtatcaaaaagtctcactgggaacccatgatagtgaggtggagtgttgcaaaggtagtggcttgacagctcagggatgttggtatgggtctcgttaatccaattaacaaaccaggcaatact

SEQ ID NO: 337322 - DNA, 1000 bp, Homo Sapiens
tttgatacgaaaattgagagatttatgttgttttcatagtagcaaaaagaaaaaaaaaacctccagagaggaccccaaaatgataacttggtgcaaatacaaagtgaagagttatttgtggcttgagataagttggaaattgctcctttgattaggagatggttgctacagtttgcaacggaatgttattgtctttcttcttttctttttctttctttagtatctgttgagagagtttatgaagaaaccagccaacatcctggagatcctcaggccacctcaaatactgctgtttctgtacaaagcctctgatggattgatgtttcatcaactggtactgggacaaggacccaaccaccaccatgatgagagcactgttaaggtcagataagcacctgccctgggcataactgaaggcttcaaggcaccagccatctctaaggaagtgtctgctcacaagacaaacgatctttctactgttccagatggcatcctggatattggcaatgcggttttctcctgggacaaagtctctttcttcaaagcacaggttgaatctgttttggtcactgtattgagtgtccaggtgtttgagcaaagcattctgcacccatgtgaagtctttgctgctgaagcacaaataggcatcatatttgtacatatcaggttctgtgccctggggatggtccttgaacaccagtctctgggctgtcttataacagataaaacagaagccccggaactttgtgactgtgaggatggtcatgaggaacagagtcagagtgacagtgcatacaatgaaaagggagaactttagggactttaagacttcctcttcatcacaaccttccgtggaaagagagaagagggaaaccccagagaacgagtcagggtacacacaatatatgtctgcaggaggcccagctatagtgacattggtgtgattaagccaattgataaaagtgctaagttcacattcacaaatgaacttgttatgagt

SEQ ID NO: 337323 - DNA, 1000 bp, Homo Sapiens
aatgtgcaggtttgttacataggtatacatgtgccatggtggtttgctgcacctatgggaacagttttttttaaacaaaaacattttttttaatacagagttaaggccgcaggcttatatttcacatctaaaaacagtactctgaatagaaatgtagggcttagctttctcagtggaaaacaacaaccattccagcagattttctacaagttaatttaaacacgatctttttagaggaaagcagtatttattgtataagagttatacttattaatcaaaggcacaaacgaaaactaagacttaaagttgaccataatattgacaagtcatatcaacctggtaccagctaaatttaatgaagataagttccactgaattcctaaggaaaatacaacaattccgacaccatttaataattagaaactttcaaacaagagggaaagtatgaacatcataataaatgcctcaatttggaggcaaagaaatgtaagttgtgtgctgaaacctgatgtatcacagaacatcagtagtcccttccagtcgtggatgccttagacccaaggccttacactgttatcaccatctggcaaccctgatgagggatgccatctattgactgactgaaattaaattacacaatgtgactctctgcctgtcagcagaacagagagtcataaaacattttaacttcttggtgcaaattatacaatcaaaccagataaccttgactgggaaggagccagttcagaggggtgaattttctatcacactacatcaatagcaaagtcagaggaatcaattttccatcttgtaacactacatcaaaatagcaaattcacagtgccttccaaaggccccctactaagaaaaataacagtcaagaggaacacagtattacttcatttacaatttactagctcttccagtgtttcagagggatacagggtttcaacgatctaacatgaatgggatagaaggtggacttagaacatagcaaaca

SEQ ID NO: 337324 - DNA, 1000 bp, Homo Sapiens; identical to SEQ ID NO: 158154

SEQ ID NO: 337325 - DNA, 1000 bp, Homo Sapiens
caggcttcctatctacgcaaatctttagaaaagacaagtagttctacacaggcaattacttttatactgtaatttgatgggtagaagcttaacattttgtaattagccctatctggaaactaaaacaaccttaacagaaaagaaaatgttggcataaagtacctgaaagataagatagatgtctttttgtccttaattttactagtgtttatttccacgctttttaattactttgcatacttctcctccaaataatgttccacctttaaagggagtggaagccagcttattcttagaagctaaattaattttgcaatccttcagccagaggtatcgacgacctacagtggcatttcccatggtatgggcagccatcttcacttcatcaaatgcagcttcacaaatatatgaggctgcatcatatgttttgctcagaatcccaagcgcttggtgggtacgactaggatctgagctaagaatctgtgcagcttgactaatgtctgcctgcatagccttagctacaaaggcagtgtgagttgcaatctgcaatgctgatgctgcagcttcatatgctctacagagtgctaagtccaactgctgattgcaagactcagtggaggctgcttgaatacctcctagtggagtggcttcagaaataaaccctaggatttcatcatctacttttggaactgataatatctgtgttgcctccctggaagaaactggatatttgcatgccagtgaaggcagctgcctgtcaacttgctgccattcttcttcaattacttttaaaatagattcatggaagggaaaagatagttctgaggcatctattttatcatgctgtgattgcttagccacttctagacctaaggtagtgagtgaatgagagacaacagttttggcaaaagaagacatcagttcggatccaggtatgttctgaaatgccacaaaggaacctgaatccctttcctccactgacttctcactcagtctaggg

SEQ ID NO: 337326 - DNA, 1000 bp, Homo Sapiens
tttttttttttttttttttttttttttttttgagagttcaaaccatttactaagcagattcttagccttcccactcccgccctctctcaagctccggtgcccacaagccttgcctggggagatgctggagtgagaccgggaggtccaggccaagtcactggtccctgggctcgggccctgccgatggagtaaagaccagctgtacacatcttccggtgggggccctgggctctgcatccgcccctccgaagtcagcaggagcctctgggaagtaaggcagcagccaagacccccagcgtcttggaggggaagcgaaatcctcagtctgacacccgctctgcctatggaaacagcgccgcgcacagaaaaggaaacttcattccgtctgttaagggcagggccgggctagtggcaggagaaggtcagctgcgggcgcaggcaggagcggatccaggagccgcgtcggggcgcagagccggacgttccgaggagcctgcgcgccgcgctacccggcggaagccgcggtccatgcggggctccccaggcttatccaacgcctcgcaggcgtggctggcaggaggggcccggccgtgcccagcgccctcagacgtagttcttcttgtcgtagtcgccggtggccgtgggccgccgcggcgctgagtacttcacggggaagctgaggtcgggacggccggtgcagacccaggcgccgcagcacaagaggcagccgcctaccatgagcagcgcggtggccgcccagccgatgtacagcgctgcgcccagctcgtacttctgcgacacgggcacagacgggtcgtaaaactcgcggacgacaatgttggcgaaccagcagagtggcacgagcgccagcagcccgcaaaacaggtagagcacgcctcccgtgagggccacacgcgccttggccgggcccggggccacgcaggtggtgcactgcgcgcccgccagggtcacgaagagcgcaacgaacgccagcagcacg

SEQ ID NO: 337327 - DNA, 874 bp, Homo Sapiens
ttttttttttttttttttttttttttcctctccgcgaacgtgcaccaactttatttgcaaaaagaggctccaagcgcacggagaggatgggggctgcaaggtccccaccctcctcccggcctcccgcggctcctgccctcctccaggccccccacggcccccgccccgccggctacacgatcccgaactggcagatgtagggcagctgatcgcggcagcgcttgtcgaaccacttgccgttggccgcgcctgacaggaccgcgcagttctcggtcttgccgccatcgggttgcgcggtgatctcagtctcccagttcttgtaggcgatgcgggcgccggtcatgtccacccaggtgccctcggccgccatgtcgttgaggcccagccagatctcggcctcgttgcccacgctctggcgcaggtactcatacagggcgtcgttctccgagccagtctgaggggtgctcagggtgcccccgcgcgagatgcagtcctcgctggcctcgtggaaggtcttcgtctgggtgaaggccagaaagcatttcatgtgcaccttggtccccttcaggcagaccgtctgcagggcctgctgctccttcagcagggccacctcctgggccagggtgtccagacggctcttgagctcctcaaacatctttgtgttcacaacatctttcttggcatttacaatcttcttgggcttctgggttggtggctcggtggtgacctgggtcaggagggagaagaggcagaggaggaggtaggccccccagagctccatgctcgtgcgcgggcgggggctgctgctgcctgcagcgggtctgggtccgaacgcagtgagcagccacggcccaggctgcacgtcttcccgccc

SEQ ID NO: 337328 - DNA, 686 bp, Homo Sapiens
gggagagcaggctttatttgcatcccccaggacagatctggggagggagtcgggggatttggggttgaggacatggccaggctcaggtcctgggaccccgaccccctccccaaccccaggactcagctggagttggaggctgggcataggcagctctgggtgaaggtcagcatctactccacacccttcatgaactccaggaactcatcatagtcgatgcggccgtcgttgttcttgtctccgtccttcatgagctcctcgatgtcgtcctccgtgatggtctcgcctgtagcctgcagcattatcttcagctcatccaggtcgatgtagccatcagcatttttgtcaaacatgcggaagaggtcagacagctcctcctcagatttccctttgctgtcgtccttcatgcaccgaaccatcatgaccaggaactcatcaaagtccaccgtgccgctgccgtcctcgtccacctcatcgatcatctcctgcagctcctcaggggtggggttctggcccagcatcctcatcaccttgcccagctccttggtgctgatgcagccatcctcagcgcccagcacgaagatgtcgaaggctgccttgaactcatttttctgctcttctgtcagctgctctaccgcagccttgtagatgtcatccatgctggcggctcacaggacagcttgctg

SEQ ID NO: 337329 - DNA, 1000 bp, Homo Sapiens
ttttttttttttttttttttaaggtttacaaaaagatccaaaactgaatgatgtattaggaattcataaatacgtagtaacattatgaagagaaccaagagaataacaaacacaaaattgaggattgtatttacctttgtggagaggaaggggttgtgattggggagggacgcataagggcttcaaaagtatgtgccatatcctagttcttaaaatgagtggttggcagatgggtgttcactttacgattctttatacgtacattaaaaacgtatgcgtgtcctggttacttcctccagggacattccaccaggcagggcttagcacaactgggaattccctggtcaaagtcagggaatttcaagatttttcagccagtggttgggcaaggggtcatctctctcgtcccctccctcgaggttctgaggagcctcagaacagacgttcaacctctggaatcccccagaaaaaagactcatagggcagcttcccctttctcggacaggacagagtggagatccagggggatccccagccccaaccagctggctcgaggtcacatcctgatatttcagttctgttcccattcatgtgtctcagctgagcaactgccatgcttgtggcactcttaggggaagggaagaaatgaatgaggtgataagacccacgccctaaagaatccagggcagtaagctccctggctttcggtttttacaaactaataatattgtgtaatataaatactgacattgtgctgccaccattttattttgtgaagtaagagcattagaaaacaattgccacctactgtcctcctattccataagtaagggctaatttaatactccagtaataaaacaaaggcatgcatgcttttagatcagaggaaggtcgtttccactgaatacatttagctttatgaaaatctcactacatttgtggccctggtttcctccttgtggggtggagcagttgaaatttaggtcacaaagagccagtc

SEQ ID NO: 337330 - DNA, 1000 bp, Homo Sapiens
gggaaggcaggaaagaaggaagggaggaaggaaggaaggaaggaaaagaacctgggttgttgggatgcggtgtagttgatctgtttccttttaaggggaattgttggcaaaactctcttgctgaggctcttttctctgggccagtgtgagaacctggccatgtcaggctgtgacaaaatcacaaatacctggaaggcagaggacatctcagaagaagggtagaaaaatgtgtgtgcctgtcaccataacaatctgcaccccacgacttggctttgaattggccctttaagaaaacttcctacttctcctccttggtgggaaaggaggtgaaggttgaggaggcctgggtaggagggagaatggagactgagggtcaggctccagggcagcagaaaccaagagcagatgttagccagcggattcctgcgacatccctgcttccttcacatactcttaatatgttgcaaaacacattgctattaccctccccccttgtttcatattataaaatacaaacaaatgacagaaaatattggttggcttgcagccgcccactgctcagaactgtaaggactgccgttttctccctgccatgagacggtggttgtaggggcgcatcttcatttccacaaaggggatggagaactcatggcctttccaatggtaccagttgatgccctgactgtgcctggactccccgtacttcccattgaggttggtccggtggcagttcttataccaccatgctcccttgtacgacatggcacagttagtcactgcaacatcattgtctctatcctctgtggagaaagggcgtccttgatgatagctgagggagtcccccgcagtgccgttgtagcttcctatgcggagtttgtacaggtttctgctgtcctcgacagagaacctgtcgtaggaggcgaaggcggcctcctggccatcccgcatgtccacgcgcagctcatagcggccctgggatgtgatcctgtgtatattgtcc

SEQ ID NO: 337331 - DNA, 1000 bp, Homo Sapiens
tttccattaagttgtaggaatttattttaaataacctacagttgattaaaagggaattcatgataaaaatagaagatacttgaggaaagatgtgggaaatggactctgcacacacactaaactaacaatgcctctaaaactaatgattatagcaaaaaatgtcttcacattaaaattctgctttttatgtttttttccattttttacacaattacaaaagaaaaaataaaagccctaaaatcttgattatttttcctttttttggaccaaatactcattttcctctaagtttattgacctgtgaaactttttatacaataaaatctttcaagtgaaagattagggttaaaaagaaaaagatggatatcttaaagggtacagcgaatgctcagaacaaaggatgatgggaaaatggtttcagtcactgattatttcattatccttagattcactcgcccttcatccctccccaaccccaatctacacgatctttaagatcaagaaaaaggtttaaatattttaaaataattaaaaagaaataaaaattcacatttaaaaaggaacactcaagtcaggaaatattttcccatcatgctttttctgtgaacaggtgtctgaaccaaaacactgccaaagccacgactgcttcaagtttaatgaaaattgatccccatgacaatagagagtgacgactctaacaggtgcgctgggttttttgttctacttaattttaaattcctgaaatgggagagagggaagggagtttaggaatttatttctattaaaatatagaagttattgcaaaaccctaactgtaaaaacgcaccaatataatcggactttgcatacagtagctaagagaatccaaacatttcagtgaaacagtgaatttgcctggtagaacgctgacaaattcccatccacttgccctcttgaaaataaaaacaaaattcaaaacaaatcatacagctagaattttgatatctgaaatatttttaaa

SEQ ID NO: 337332 - DNA, 1000 bp, Homo Sapiens; identical to SEQ ID NO: 158155

SEQ ID NO: 337333 - DNA, 1000 bp, Homo Sapiens
tttttttttgacactgaaaaacattttattaataaagaatattgacatgagtataccagtttatatataaaaatgtttttaaacttgacaatcattacactaaaacagatttgataatcttattcacagttgttattgtttacagaccatttaattaatatttcctctgtttattcctcctctccctcccattgcatggctcacacctctctgtctgttaaactgacgaccacggacaccttgtctcaatgttgtctgaagtcttactcgtctgaaaggctttggttgactactactagtatctacagatgagctagaaggaggatcctggctggtggaggggagatctgactcatcagatgcttgaaccggctcttcttcctgctggctatcaatttctaggcctgcttctgaactaataccttcagattctgcctccacaaatacttcatctccatcatcacctgttgctgtttcatttgttgtagataaagtgccagtggatgtagtcaccattggaacagattgagaggcatgttccgaagcatcagaggtggtgctctcagtaaatacagtcactggggctgctacttgtagtggagtagtgggaacacttcggccacctgactcttcttcatgagctaggaacaggggtgtttcatacattcctaaacctccttgagaagcaagctggccaagatcagagtgactagaacttgtttgtggcatatcttcaggtggcccaaaccggaatctagggacaccagcaacctgcggcgaatgaattgcttcagcaaatccatcagtacgatgtggcaccacaagagttggagtacttggaactgttctgtcttcatcatcaaaaaaatgctgttgcatgccacctattcctggagtcaactgaaggccacgtcctacagactgccttcgggtcatctgaattctctgaactggtggtcccaactcctgaggtggggcatgaatggtcagtcttggggga

SEQ ID NO: 337334 - DNA, 1000 bp, Homo Sapiens
tgatttccatgcactttaatgaggtccagcactcaggaggattagcgcccaccaccagctatctgggcaggggagggctggagggcccggtgcaggcgtcaggcttaggacagggaagggggctcaggatagggaagggtcctcaggacaggggaaggggctcagaagagagcagggggcttaggacaggaaggggcactcaggacggggcagggaaggtgtggggggcagtcgccacctgggtaggaagcagtggtgttttggacagcaggggttggtcctccagtgacccaggtggccaacccaggcctgactcacggctttttggggacatagtggtggatccagtccaagtagtaggtgacacgggtgtagatgccaggccggttgggctgggcacagccctcgccccagctgaccacgcccgcctgcagccaggtgccattcaccttgcacaccaggggccctccggagtcgccctggcatgagtccctccgggtgttcccggcacacagcatgtcgtcacggacgatgcggacgtcgtctcccgtgtaggcgccaaggtggtattttgcgtcacaaatgtggttttccattatggggaccttcacctgcttcagaggaaatggcggtgggaggcgctcatcattgtccacatcgccccagccagtgacccagcacggcatccccggggggaaggtctctgaggcagggggcagggtgaccgtgtggacgtggctggagacgttcaccggctcctccagctccagcagggcgatgtccgctccgatctgggcggtgtagaactgtgggtgcacgatgatcctgctgaccggcagcagctggtcctggtagtagaggtgctgctcccgcagttgcaccctgagggcggccagatccttgacgtccggtcccacgcagtgcgctgcggtcagcacccactgggggtggatgagggagcccccgcagaagtgcatccagtatgggccgtggactctca

SEQ ID NO: 337335 - DNA, 1000 bp, Homo Sapiens; identical to SEQ ID NO: 158156

SEQ ID NO: 337336 - DNA, 1000 bp, Homo Sapiens
gaattcctttttttttttataatctaatgtcaaattttattcacctttttttttcttacaatatgctgtcattcaaaatgtacctcagaagcaactcaactcatgcatacagtaggcactctataaatgttttaataattaggtgttttttagaatgactaaaaatccagatgtaaaatcccaattgggaagtgcataatcccatcgtagacaaaatatataactttacaataaacatttttataagaatttgccccaaagagggaacacttaaaatttggaaattaaaaaataaaaatgcaaaagcaagatgaaacaaacaatagtaacctatttagacaatgatccctggatcggtggtgcttacagaccaagggttacctgcaccctgtggcgtaagaccatctgacattcggttaagaagagaattatatacctaatatcctcttaactggaaatgctgcgagaatatataatagcctatgaaaacattttagctacatccctttatgtgaacacaccaaaaatttaaatacatattttattctctaattttaaaaaaccaatgcttttcatcttaagcagcaagaatgatccacaagtaagcatgaagtcacttttatagaagctgtgttaaattatggaaagtaccttgggagataagctcaagaaccttagtccaaatataaaacaaatcattgcattaaagagacttcctatgttttacaaaaacaaaacaggttgtgactacatgtgataaaaaagtgtctcctatctatcttaaaactaaaaacattcactccaacttgaaaaaaaaataggactattatgatacaaaaaaattaaaacaaaccaaatgtcgagaagtagctatgcaaacttataaacataactgaatagctaaaaaataaaacatctactgactgtatttttcaaaaactatataattctataaaaatttaaatgtggactaactacatcaatacatggaaatgtatat

SEQ ID NO: 337337 - DNA, 1000 bp, Homo Sapiens; identical to SEQ ID NO: 158157

SEQ ID NO: 337338 - DNA, 1000 bp, Homo Sapiens
atacctggggacaagggggtggctagagagctttgggtcaggtggaagacagaggcctgtccagggaagggtgggcatcacctcggccagtgctcagtggccaggcagccccaggctccatccggagcctctgcaggggtgccagggcacattggcaccaccacgcaggggaagccaaggaggagggcatgtggatgcctgcatcctggcctggtgggcttggggacgatgctggagcccaggtttaggaaaatgaagacagggagctgatgggtcagaggagaaacttgggggtagggctgaggggctgcaggacatccacaggctgcaggaagctcaccgggggatcgaggagaacttcaggcagccgtcacacagcccctggccctggacgtgtcaggaactttatttgtggaaagcacagaagagccagccaggcctgagatggcagatttaatgtcttgggttttaccacgttcccctcctgagggccctcatggttcacgctcctgtgagctgttgacaccaaaccagaaggcccccacgtccccgcctcctgctcatgccgtccctggccacatggccagcacgtggctcccagggagtagggagggagagcttctgcagcctcgtcccagggtccctggggccaaccctggcaggggccctctgcgtctcttgacaggcctgggctttgtctgggctcctgtacccccacggagtttatcctgacagtcaggagttcagacagtgcccctagcccaggccaggcaaggctccatgttgaggcacctcgaaacatggaggccctcttggggagagtggcagggccccttcctcacagacataggcctgagggggccacaggggaccccgactctccggggaacttgcctcaggccaatgacctccatggtggatgagctgctcggggtgacacagccaggaagggagtggactctggccaagggcccagctgcacaggcccagcccctcgcct

SEQ ID NO: 337339 - DNA, 1000 bp, Homo Sapiens
ccttgagaatgtttatttttcattccatacaatccacatttaccccctcttcctgaatttttgtgactcgatctctttttcctttagttcctgtgcataagaccatgctgagtactgccgtcctgcatatggctgtaactttttaggagttctgctgtattaggtaaaatctgatgctccatcatattcaactcaacaactgggagtcccctgacgtctctgttccctcttcaggtggcttcatcctcttgtagtattgcaggggattgcgccacaggtccttacataggatctcagcaatcttgttagatcctgcgaagttgtggtcagagaaccagttgaagaagttaaggctgctgttgtggtgtctgcggcgataggcctccacttcataatccggataccactcaattggagtggaatgagaagccctgtattctgtgatgttcaccagatattccttggtaatcactttattctggaagtaggggttactccgaaagaacaacatgatcttgcagagatgaacaggatgcttctcttcttccacctccaggctgaccatgtagctcagcatgtcttcatcttcgtcagtgatcagggctgacatctgggggtggtttgcaataacattggcccagaagccagggacgctctggatgacggcgcctctgcggtctaggtggggcttgcgcctccgctccatcttttcccgctgccgagaaaaggccttcctggcttgggcattaaccggctccagctccacctgaacggccagcagctcctccagtgcagactctggggtcatgggcccagggccaggcacagcctgctgtcggggctgggcctcctcccgccgctccacgaggccctcctcctccgccaccacctccacctccgccattatgtcatccaacagcagcaccgcctcctcccccaaagccgcctgctcactctccaccccggccgccccctcctgcacagcctccatcctgaaggc

SEQ ID NO: 337340 - DNA, 1000 bp, Homo Sapiens
ttttttttttttttttttttttttttaatccattaagaactttaatgattttaatccattaagaactttaatggattaaaggactttaatgattccataatttttaattaatatgaacaacttcattcaagcattacatttatgggtaaggtgaaaaataagaaatctagcagaacaacatgcttttattttaccatcatgcataaaaaggaagacaaatatgccaatggtacacttccaatttgtcagagcaatttcacagtatttaagcaatttaggaaaaaagatatatcacttactaagttgttaccagggaaaattatcatgtaagacaatcaattaaaccatacttttgtagattatttttccatgaaggcaatttgacaagcctaacaaagaccaagttgttcaaactatgtttctaggaatatagtttaacagaaacaagaacaagttgaaaactgttatgactattcatatgtctctatattgtacaggcaagtaagactgttgttcttccaaatgttcccaattgaaatcaaaagaatatctgtacagctcaattttcacaataagtttagaatcagaaaaaaaaattttactaaatcctaatgaaataacaatcttccacataaattaggtcacaaaacaagtaagaaagcattcaaagttgcgctgtctttctttaaagaacccttgtctaggcaacatatttaacactttaaccccttcaattctccctgaaaagtatttttccattcatcatcattggggagtaagtactccttcctcgaaagctcttaacgacagcacagtcttcactctaggcccaatttttacctggcccatgcctctagccttttgttcagtttctcctgcttagggcacctttcatcccatctagatgtgtctctctttaactattctaggagttgataaaagggctaggaagtaggaagttgggaagaaggggaggggcgtaagagctctagcactctat

SEQ ID NO: 337341 - DNA, 937 bp, Homo Sapiens
tttttttttttttttttgcagatgacacgattcatttattcattcaaagccggttcccagcgcctttcacaccagccccgcaggactggatgagggtgtcctgcccgcccattcctgggcctccaccctcccagcaggagtctcactgagccacagccggatggtagaaaagcaaactggccaagtgatttatttgcaatgggcacagtgatgcaaaaacaagatattaagactataaaatatgtgactacaaagaaccagcgaaataaatacatagatattagatagtccaataacttaaggcgcccgtgcaacggagcgaggatccgcgcgcacgggaagttcttctgctgcagggctggagagcgccggccacgtcctagcctcggtccgactcgtccagcgtatggcccgcggcgggctcatggcgtgcggggtttgggctgcggggatggcctggagggctccgagggctcggagggtgcggcggccgcggcagccacggcgtcctcggcgggtgcggcgggtgcggtgcgttcctggcggctgcgaaagtcctgcagggcgcggcggttctggaaatcgatgagcgccagcgcgatggccgcgttccagcagctctcgcccgcgcagcggaagtcgatctccttgtggtcggtggtgacgatggtgaagtacacgtacttgcccgtgcgctccacgcagtccaccttgaggatggagtggaagcgcagctccttggggcgcgcgcgggggctggcggggaacaggctcaggcggtcggaggtgagcaccccgcgcttcttcttccatagctggaagaggctgtcgctgcgcttctccaactcgccctcgcgtagcacctcgtcgggggatttcatgtcgtgccgagcgcgggactgggagcggcaatgcgggcggtgacggcgccggctct

SEQ ID NO: 337342 - DNA, 1000 bp, Homo Sapiens; identical to SEQ ID NO: 158159

SEQ ID NO: 337343 - DNA, 1000 bp, Homo Sapiens
taagcacagaaagcttttattaccacagaggaaatcaggaaatgctggaggcagcctcgttagctgtgtgatcagggaggggacagcaggcgggaacccgtcatcaatcatgtctgggcagtctcccaaccaacaggtttgtttggttcaggagaggcttttgctgggctgtgtgtgtgtatgatcaggaaggtcagcctcaacaaatgggcttcttcctggacataggacagccagaatcggggacaccagctgcacagacaccaccttaaaatggaaatcaaattaggttcattacatcaggaagtacatttcaccctgatcataaaagagggacaagggagcactgggctctactggatagcctttcttttagataagatgcttttaaaagttaaacattggcagggcctttcccctagctaacagcaagcagcacacaattccaagtcagcttgtaaagcttttgttatctttgttatctgttattatttggattttgaacgaaattgatggagtacgagccggtagaggaatcctgtttgatctggaaattttccgtggagagcccaaaaggtcggagaaccaagttcccaagatcttttaatttacctaacatctcttcttttagtctttcattacgttcttcaatttgcttaggtaatctcatacaagcttctcttgcttgatgtattgatggatctttttctaatatagatttatagtcttccagggcttcatctagcttgtccgtcttctcatacaactctgctctcctcaatattgccctgatatagctggggtttaattgaattgctttgctgcagtcattgatggccatttctttcttgtcctgtttcatccttgctgcagctctatttgaaaatagaatcgacctctccttttggaagcaggatgggcacatttcgagggctcgactataagaactttcagcttctatataatctcctttcttaaactgttcatttccctcctcctt

SEQ ID NO: 337344 - DNA, 1000 bp, Homo Sapiens
ttttttttttttttttttagtgtcattttagccacaaaactttatttacaaagttttttagaatatacttgctatccacccactattccaagagtaaaatgatgtcaagtagattacacaagagcataaaacagagaaaacaagtctacaatatatacagtaccataagtggttgctatttttacagttttcttttaaagataatctactgaattttttttgctgataacacttcagagtgatgttgtcttcaaatgtagatttccacagggattcaagagtataacagtccaatatattttataggtggtatttgacattacgaataactgcaaatcatttttttcccctttttttttcaaaagtcttggaggatgaagaattatgactttcaccaccactatagtgttcatataaagttttagcagctttcaaaatggagttaggagaattcagaccaacaagttggcccagaacatatttcatttcttcagtggttcccttggccatttggttaactggatgagtttgaatttgaacatagggatgagccaggagctcaggaatggatatcctctgttttgggtccctttttaaacaacactttaacacatcttgaagatctttctctggaatatcgggaaattcaatttcatgattaggatcaattatggcatgtaatttagaaatctgattaattatctgctgaaatggtgttttcccgtaagtcatatagtacaaaatacatcctaaggaccaaacatcacttttggggcttatctttgacttagatttcccattctctctggaggaagacatatctttgattgcttctggtggcatataattaactgtgccaacctgagaatctttaacaacacttgttgtatctggttgcatttggtttgcaatcccaaaatcaattagctttagcattccatcaactatcagaaagttagctggtttaagatcactgtgaacaatgccatgttgatggatt

SEQ ID NO: 337345 - DNA, 1000 bp, Homo Sapiens
ttttttttttttttttttttttttactattcaaagtttactgacctccccagccaggcaggccaacccttccgagcaggggaaatgtccatctagctgccctctgctgggttgcagcctatgccatgagagggtactggaagcaggagggagccctggctagggcaggccttaaacgcaagggaagctgagcagagatctgcacactcaaccccatttgatattcttctcctcctcagtcatggccagcgtgttggtgactagaccggtgccaatagtccggttgccatctcgcagggtgaaacgctggcctttctctaagatcattggctgccgcaagattaggttgaacttcaggtcctccccgggcatggcaagctccttctctgggggcaggataatccgacaggccatgtcccaagtcagggagaacatgacaggcatgaagtgggacacaaagggcttgtggcggccaccttcctccttgctgaggatgtaaacctgggcctccaccttctggtggggcttgatggaacctggcttgaccatgaccaggccccgccgcaagtcctcccgcttcaagcctcggaccagggccccgaggttatctccggcctcggccctctccaggctcttgtggaacatctcaatgcctgtcaccacagtgcggatgttcttgctatgtcctaggagctcacactcgtctcccttctttaaaatgccacgctctagtgtacctgtcaccacggtgccacggccagggacggagtacaccgcctccacaggcagcaggaaaggcttctccaggtcccgggcgggcactgggatgtaagtgtccacagcatccagtagcttctgcacagacttcaggcctaactcagggtcccgaccctcaagggcacagagagcagagcctacgatgactggggtctcctcccctttatagccaaactcggtgagcagctcccggatctccagttccaccagttccaccatctcag

SEQ ID NO: 337346 - DNA, 1000 bp, Homo Sapiens
tgccaaggacgcggctttattggggatgtgggtgcctggccctcgtcccccatcacctaccccctcctcctagcccgccccagctcctcggagccctagcgcggtcccggggagaggggaggttaaaacaacaatgactactgctcccggacaggaattgactggggcgcggggaggaggggggcacagcggcgcaggcgaactccgaaaccagatgtgcggctccaactccagatgttcttcatctccgtcctacccgccgtccgggctcctcctgcctcggcctgtgccaggctggggagaggacggaggtcaccgagaggcagtgagaggtcagccccgacacaggagcagttttccgcgggagctttgctggagggaccctgccagcctccactgaatcctttcccccacgctgacgggctctgggggcgctgaggggctgctggggtcactcgcaagccagcttcccgtcgaaactggagagggcgatggcgaaggcctgcagggcgcacagcgggtaccggtagtctagggtgaaggcgtcctccgccacgcggccgaactgcagcacgatatagtcggggtcatcagcgtggacaatctggaagttcttgactgaggcctgggtgacccggccttggaagttgagggtgtaggagccactgtcatcgttccagacaggtggcttgttgtgcagttctatgaggctctccagcgtcttgttctgccagcgcaccagcaggccgtcactagcatttcggggccggatggggaccctctcgttctccgcactcatgccaggaatgatgacggtcatgcgccgggggccacggaagcccagcacgttggtttcatagatcacagctgccagctcctgccgaaggcttgccacattagtgctgtacccacgctgtgggttctgcccgttgtcaaagaccgtgaagcggttccccaggaggttggacctcagcttcccgatgaaattctcccctcctcg

SEQ ID NO: 337347 - DNA, 1000 bp, Homo Sapiens; identical to SEQ ID NO: 158162

SEQ ID NO: 337348 - DNA, 1000 bp, Homo Sapiens
ggtattcaatgcgtgttcatttattttacacttacaaaagaaatcgcccacccctttgccccattcccccaaaacagtctctttttacaaacatttaaaaattaaaaccaaatgaagatagacaagttaatttcagtacaattatttttcagtgtagctgtcataattagagtttaaatttcctacaagtgaccaatgtccaagtgacttatagggaaatcctgattatcggccaaaggaaattcaatattacaagttagcaaattctagtacaaaaatagtccgtgtgttggaacagctttccttttacataggtcttaggtcagtctgctgtaatacctaacgcttccggattctctctcacaaatggctcaatcgtcactgctgaagcagcatggtgcctgcagcagcaggggctagtgtccaccttggggccgtgctggagacggcaggcctgggactgccttgctggccccagggcacctgggcagagctccagccctagctccgcatcgggggcttggagggagggatgagcttccccctcctgaggcaatgtcagacccaggacacagggcacatctgcccagggagctgggctggcgctggtgcaggacagcacatctcctgccagtgtctcctccccctacagcctggtcaggtgagaggcggtcctgcatgtcatcagcggcgagagtgtggccctgcccttgctgcagccagggcaggctggggcaggctacttgtccctcaggatgtcgagctgttcctgacactcggtgaagaggcgctggaatcggaggttctgcccgatgactggtagcagctccttcagcagctccctcttccgcagacccactactgttgactcccactggcttccagtggagtagtgaaccggacccagtaagtccttgcatatttctcgaagtcggtattcaaacccttcgtttacgaggtaccgtgcgtagacgaggagccaatggcggtactcgtggct

SEQ ID NO: 337349 - DNA, 1000 bp, Homo Sapiens
tttttttttttttttttgccggtcggagactcccgtctgccaaggtttttattgtggtcccgcggggcaggaggtatgcatggcatacgtaagcagagagccggaggcagccatcggcacctagaacggtgcagagttggcccaggagcgtggcggggcaggcggcctgcacctgccctgctcgcccagcagaccctccgggctccagcctggcggggcccagcgtccaccttggtgggcccaggtcagatcttggccagggtggagtgggcgtcggcctgctcctcttggatgggggtccggaaactgcctcccccagggggcttgtgggcatcggggggcagcctctggtccctccggagcaggtacagggccagcaggatggccagggggcccagcagccccagcaccaggcccaggcccaggatggcggcaaccgcacggcccccggggacctccacgggccgggtggagggtccctgtgaggttctgggccaggcttcagtgggctggacagtgatgggcctggccggggggccctgggtctcctggggctgcgtggctggggggtccctgtcctcacagattgcgtccgagctattgctggccggctgcagggtgtgcttcccagccaaggtgcagttggtccagggcttgcaggcctggttgtcgcctggggagaagtgccctggagggcagggggcacagtcaactccaggcttgtagctgtccaggggctgggtgcccgcccggcagcggcagactgtgtcctgtgtggccgtgcacagctgcttccgctcactcccacttctgaggttacaccacgtgcagggcttgcacggcttggagctgaccacgtcgttgtagaagcccggcccgcacggacggcacaccgtgttctgggagcggctgcagcggctcaccatcccgttgcctggcctgcactcgtggcagcaccggtcgttgctggggtaggtgtccccgacacagtggagccccg

SEQ ID NO: 337350 - DNA, 1000 bp, Homo Sapiens
gaattcaaaatcctggatttccgaaacaatggagcttgatgtcacatttggctatcttgcttttgtctcctcttctggaaagaacaaatcatcttcctgaaaattacaggagacacttagtatgacaaaataaggcctctgaaactgtccaatctcacatgtaaaaagtgtaaaatcacagaactaaaatcaggttccggattttcctggaaatagaatgtcaccgggatctgttcaaaggtgagctttggctacattttataacagtgtttaaaactcgaatgcaaaaaaactgctttcaatataatcagatatgtgcaaaaacaatttgttaaataacatgggaagattatattaacaaaagacatttccagaatactaacattcatgtgatttataaaggtgcattttctgtaaagagctatacagcccaaaaacatgaaattcttcaagggagtcccctttatcccatgagttggaagaatttattttcatattctatgcatggatcactgaagtgatgaatgacactcgtcttcaagaaggaagcactctcagccttgtgaagaagaacctcaagggttcctggggctatgatcatgaagagcaccacaatgaagactgctgcgaagtctttttcacttcttcacatttgggatgtgaaatattttacagaaaaataagagtgtgcaaatccctctcacacatagaaaaacgattgtgtgaatattcttaaatttttaaaacttttaaaaactgtgatctttgcactgttttcaagagtcagcaactctgaagaaagatattcaccataagtgaccccatatggtgaagatattcacaataaatgacagttttgcaagatgactctttgggttggcattctgtttccggtcaccaggtttccgcaatctctgtgacagcccgcagcagctccgcaaatgtagggcggccttcaggtttctcatgccagcagctgtacatgacttcatatatggac

SEQ ID NO: 337351 - DNA, 1000 bp, Homo Sapiens; identical to SEQ ID NO: 158163

SEQ ID NO: 337352 - DNA, 583 bp, Homo Sapiens
ttttttttttttttttttgtttttgtgcttcatgtttattttaggagagtattggggagcggtctggtctctcagggatggcactctgtgggtctgtatcgcggtaggagttggaatgaggtgcagggtgggcttcaggaatggctggatccaggtatcatgttgctgactgtcatgattcgggctcatttgtaatacggcctctgtgtgttgaggtcgctgtagacatccgacctctgaccctggagctcctgataaggcgactcggtctcagtgatacgctgtttccgggtcgctgcctccgcagcccctcgcccccgagggaccagccggcccaggaagtacacggccagggcaatgagcactgtcagcaccaggtctcccatcacgatccctgccagcacgcccgggctcaccgtagagcaactgcaatcgctctgggcctgggcctggacaggacggagaccacttacagccagcaggagaggcaggagcaggagcctgctgcagggttcaagtccccccatgaagccggatgctgctggacaccacagtgtaagggccggtgggatgtggcgcagcg

SEQ ID NO: 337353 - DNA, 1000 bp, Homo Sapiens; identical to SEQ ID NO: 158165

SEQ ID NO: 337354 - DNA, 1000 bp, Homo Sapiens
tggagctaaactataaaagcaccacacaattaaagcatctttttgggagccacgattccagtgagtgaattcccatttgtatcaaagttccctaagatcatacacttacctcagaatttgccaagtaatagcttttatttttaaagacagggtattgctctgtcacccaggctggagtgcaatggcataatcacagctcactgcagcctcaacctcctaggcataagctattctgccacctcagcctcctaagtagctgagactacaggcaagtgccactatgcccaactaattttttaaaaaatttaaagtagagaaaagtcttattatgttgccctggctggtctcaaagtcctggcctcaagtgatcctcccgcctttgcctcccaaagtgctgggactacaggtgggagccacctggcccagcctataagcatttatccaatcaatgttaaacgttgcataatgaatagaagctgtagatattgccatactgtaatccaattttatggatatgagaagaaactcttggggttactaaaatagctgttttaactactagagagactacacaggtggttcaacagaatttacttgtatattttccattttctatactatttgaaggcataggatagttttgtattagctttctacaatactgtgttttaaatttatccagtaaactaagatgcagtacaacttttatacaactcaggagattaaaaaaaaaatctccacaagaagaagcaactcagcaggccctggcattaaaacatttcccagaataaacagatatgcattgcattaaaggtaattttcaaatatttaagttacaccaagatttccctccaatatgtgcctttctcaaaccaatgcaactaattcattgctaatactggggcatgaatttttggcaaatgtttatggttttactttcttcattaatcaaaaaattttttaaagtgctaccaagcagcaaaacaagtcgcatcagttc

SEQ ID NO: 337355 - DNA, 1000 bp, Homo Sapiens
ttttttttttttttttttgcaagtttcaaaaactttaataaagaaaaaaaagaagacacttccaaaaataaatgccacacaaatgaaagttgttttttttttttgtttaaagtgaagatattcaagaaacaaaaccctttactatcaaaatatactaaatatttaaatctagtgatgttgagtgttcaaattcagggcaaatgtagcttataataatatagctaagtagaatttttcatgatatggctgttttaagacatcattttatagatttactttttaagcctatattttcttaaacatccatttcacaattcatttaattattttacattcatttataaaaacacatattttctaacaataggttattttgtgctttaataataatgaaccatgacaaaatactcaagtgatttaaatgctttgctaatgactacacccatcacatattcttacatacttctacagctactgcaataatcagaagggctacaactgttcttaaaaatgacactcactcaaggttgacaagcatgctaaacattaaagagatgtatttttccccaagttaaaacattaaaactttctagttttctttaaaatctataaagataacctgcttatttaaatcacttttcgatggcaacttataaaaacagagggaggcataattttagaacttcctttgtaacttctatagtaaaaaaaaaaaaaaagtttttcaaattgtgatggcattaaattccattttagaaattctagattttaaaatgttaagaaatgtaatgtcaattacatcagggtgggggcattttaatgaattaatctagtgactgtgcaggtctataaagacctttcttttggatgggtgatactgccttatactcatttcagtacttttaacaaataatccatttagatataatccaagacaaaccccaaattactctaaattctcctctacagcaagggatcaacatatattatcttatagact

SEQ ID NO: 337356 - DNA, 1000 bp, Homo Sapiens; identical to SEQ ID NO: 158167

SEQ ID NO: 337357 - DNA, 1000 bp, Homo Sapiens; identical to SEQ ID NO: 158169

SEQ ID NO: 337358 - DNA, 1000 bp, Homo Sapiens
ttttttttttttatgctttaaaaaatgggatatatatttggataatttgcaacctataatcctaaaagaactgccagaatgcaaagatctttttaatattattatttctggtgaaatcaaactcaaaatataatacctaggactccttgtccaaagaagaaattaaactagataatttcttttctgaaatagtctgcaaattataattcacaagaagtacacaaaatagggtaaataaaagtgtgtatacatgaaaagctacaataattccaatttttgcttccctggcaaggtactgtacatatacatcaacataatagaaatggcacagtctctgaggacacgtttcacattttatttacattttaagactaactttaatctcaaaatcacatatccatacacctatttcctttttgttgacttcacttaaacttaaatgcatggtttgttaaacaaagactgtaaacaaatatttaccatgtctgttacatgtaacacacaagaacagcttttaacaggaattcatcaactccccccaacattttttattataaatacaggtatcaaaacaatcctgaacatatttttgatactactagtagtcagcacccacattgcttcaaaaattaacacatctgtgacaatattcattgtacctgctactttttaaacaatttcaactgcagctctctttcactaagtaagatgggtaaagcatgccatttctgttttcttgagatttttactttttagaaacacacatgcttccactgccatctgacacttctccacacgctttcatcttgtaaacctgaattctatttcgagtactccaggtttatgtttaaatgacagtgcctttcaagagaaaaaaaattgtgctgcatttttcctcctgttacctgaaaacataatgggtgtacatatattaaatatattcttacaaatgtccaggtcatgtttaccagctggaattcttttacttaatgtgtatttt

SEQ ID NO: 337359 - DNA, 472 bp, Homo Sapiens
ttttttttttttttttttttttttttttttttttttttttttttttttgagatgcttgtggtttattgaagagagcaaggctggtgggcgtggactcaaagcatggcagcggcagaggctggagcagttggggatcttcagcttctaaatgctaattacacagtgagctttgggctattttttccatgagcttaatgatgctttctctgggcttttgggggagggtgtccaccagcttcttcagctgagcccctgcctccctcatgtcttgatcagggctgaaaagttccatggcagcctcataactggagggtgtgtccatgaggagggtttcgatgacacgctgaaagctcgggcagatctctgcagaagcggagctgcagcagagagccagtgtgaccagggtgagggtgacagcgagtttcatggtggaggagggggatgctctggcctgtctctggttccgtctctg

SEQ ID NO: 337360 - DNA, 1000 bp, Homo Sapiens; identical to SEQ ID NO: 158171

SEQ ID NO: 337361 - DNA, 1000 bp, Homo Sapiens; identical to SEQ ID NO: 158172

SEQ ID NO: 337362 - DNA, 1000 bp, Homo Sapiens; identical to SEQ ID NO: 161225

SEQ ID NO: 337363 - DNA, 1000 bp, Homo Sapiens
tttttttttttttttttttcacttctcagcagaggattttattggtggtcacctgtggcacaggttagaggagccgaagtgctgtgtttgtggtgggggggggaccacaaaccccggccctgccctcttgcttacataggcttcccgcctagaagcgcagccagaacatgccgctacggatccggttgtagtctgggagctgctcaatggggccatatccagccactgctgggcactggtcatagatgtacttggagcagatctcacgtaccacactggcatccacctccgcaatccggctttcccattcagccagggggatgcggcggccataggtcaggaggctgcgtccgatgtcctcacacacaggagtagtgccatctagatgagataccagggcatttctgaggatgtttttgccccgggccacctcactctccgtggcactggtacacaggcgcatccactgcccttgcaggacgaacatcatgtcatcgattttcattcggtcacagacaaagtgtgcacccagcaagcccgtctctgcatagcagatgctgaaggtctggaaactctggcatagcttgttggccacagcacctgaagccagtgggctggacaggtgcacgccaccaccataagtgcagtcatagtggccgatgatggcattggccacttgcaaggccacattgtccgggctggcccagccaggaccctctactgcaatggccacgtgggcaaaaggtagagcatcatcacggtggcggatctcactgccagtgaagcggcatggagtaagagtgggcacagcgtcctctgcatatgtccatgggatgccaccgaggtgcttctgggcgaggtctaacagttgctggtgctccactcctccagctgctgccagcaccattcgaggggccttgtaatgtgtgctgaggtactcggtcaagtctgcacgagacagcttcctgacattctcactgggcccctccacagcctgggc

SEQ ID NO: 337364 - DNA, 1000 bp, Homo Sapiens
ttaaacagaatgttttattgactttaggtcagctgggaataattacctgcatttatgccttattttacctcactggaaaaaagacaaatgatatattagagacttctgactttcatgtgtttgctgctctgggctgagagaacgttcagctctctcctgtaatgtgtgcatcagtattacaactcatcaacaaaaggtgtatgtcccaaatttccacttgctgccattgacttctggccagaaacaaacttctttgccgcatttatgatatcagcattagccactgaatcaatctgctgaaggactgtggatggtggcatgtaagaaccagcaactagagcctgggacccgacttcttccaggaaacactcagaagactccactgacattaggtatccagctttcagcttgttcttggcagcttggacatctgtgttggaaaggtttccttgagctattgtttttacttgattataggcagccttgataacatctccagcagctgtggcctgggagatagtataaatcccaaagagtccagaatctgagtaactggcattaaatgcagaaacatcaaatggctgctgagttgccttggcaacagcctggtgcagatggctggtggtgttgctgcccctcttgacatgtggcccagcaccgaggacatgctgaagaacactaaatgcatttgcctctgcacttcccgcgacagcactttctgctacaaaagcagcatggacaagactgtctccattctgttctcggatttcacctccacggtagttggcctttgcaccagataaaccaagcccacccctcatgttgagaaactgttcagcaacttgctttagaacaggatgactcacaccaagtccaatcaaagccattcttgcacttgtgaaatggttctgaacgaagtaatgtaactcctctgatgtcacttttccaatcctatagtcaggacaatacaagggattagccaaggcattccggtaagctg

SEQ ID NO: 337365 - DNA, 1000 bp, Homo Sapiens
ttttttttttttcgctttaagaaaactcagctgtatttataaaaatatacaagtaaaaaattcaaatattcatatacatagttaagcagtttaaattttattgacctcccagtttttaaaaaaagttaaatttaaggtcacacctctaagtttgatgtactatatacagatcgtgcagaatatgagttaaacagatacaaattagtccatgcccaaaaagatatactagggtacagaatcatcttcataaatacatataaaattcttgtgtagaagcgaactgtccaggttttctgagacacttctaagtgaatcaaggcacaaaatgtacatacaccattgtgaatacacacattctagactttgtgcctctgacatagcccaaggatttagcttcatgactcttataaaactaaatgtactgaatgagattctgcttcttgggtgaaaaaccacaggaactataaacatcatgtagataattactccaaaatatggagaatacaaatacgagcactttattttaaaaagcaaacacaaaagactggtgtaaatccaagtgtttaaatgcctccgttttggataatttaattaagaaccgatacaagtttgttcccagaagctaatgcatcactagtctctactgaggaaaatgagttctaaaaattaacatggttttcagtaattcaaatttcactatttatataaaaacctagagagaccaataatatccagtagcttcaaaagataagctaaagattctttgatgtaatcaactttaccaatgtttgtatgggtgtgtttaatatatacacaaggaaaatacactcactctataatttcttataaaatagcaagtaaggagtagaagtaggagatgtagaaggggaaagagaattcagaaagtccttctcttcagtaactttgacttcagaatcatcaaaaagcaaccacttcccctcatactcctttaagctttgcactacgtatgaaattttgt

SEQ ID NO: 337366 - DNA, 1000 bp, Homo Sapiens
gaagtaaactcaatttttattcttctatataatacatggatatatggataaattttcctttaaagagtttgcaaccctgaggcaatgtccttgggtacgtaacgtataaagcaacagcaaatgaaatctgaatgcgggaatgacaactggacttcgaaacataatttaatattcatgaaattgcacacataccaatagtattctatgtctcgtctagcctcttaatccaactatctcaactgccttgcagtttgcctaccagacaccccaactctctacatacattctgtcatgtaaatgctgaccttctgactgaaatttaataaattaacatgggatttacatcaagggatttttgtctggtgagtgcattgccagaaagcatgcctagttcctgaccacagcatctgcccacataaaaactttggcccccacaggggatgagatggcatctgactgcagtaacctcgaggtccttgagggtcccttgggatccaccaggagcaagtttttcatctaatctgagggccgcattaagggtatggcagaggaggggaaggccatggctggttagaagagatggaacgtcacagctactgggttacagaaccagtgaatctgatgtcctgttttcaggacgcatggcccatccacggagaagatggggcgacagtagggtctaaaggtggactgtggtacccgggggcaggaagagggacagttaggcctagatgtaaggagaccactatgctgcttcttcatctacctcacagatggccacagacctttcagtacatggcggaaacctatttctgaatattccgttttcccaaagttttataaaccatggtgagggcaaatgcttatgagaaactaagggtgtgttcattatattatttatatattatcatcttccctctgaggataacatacaagggtaaataaaaagcagacaaatagctaaaaggtgactcgagctgtaagctctttcaactagagg

SEQ ID NO: 337367 - DNA, 1000 bp, Homo Sapiens
tttttttttttttttgcagaaaagaactcaggtttatttgcaagtaaaaaccatggtctgaaaaaaacccattggcaaatgtacagtttgtgtccatttggggttcccgccagctgggggggcccccagatccctgacccacatgcatcgggctcccacatgttcacagctaatctcaggcccctgcagtttagccccctgcaggggacaccccgtctcctgctgaaaaccatcggactcccaggctgcacccagccctccaaccctcctgccttagtgcagtgcaaaaaccaaaccaaacacaaatctcaaaacaaagaaacacaaaacaaaaaaattcacaaaaaccagggttctaaattattttttctcagtgtccttcgtgatcatgatgacttatttgtcaacaaactaaaatatacatcattttcttgctattataaaatctcttattattcacagatatataacgggagatttggatgaaataattacaaacttttttccccttaaaaaacaaacaagccaaacaaaacacaaacaaaacaaaaaccccaaaaccaaaacacaagacctttctgacgacagtaaacacaggggctgctggcttcctccccgccatcctccgcgcctgctgggccgcaggtcgcaaagtgctgggtgtaccccgacacggaggccccagggtgctctctccaaggctgactcttcgcttcccctgccctgcctccacctcccctcatttcccaagcctttgtcgagggcccctctctccccctgccgctccccatccccatgactcctcccgcctcttccctacaccccagaggcatacagcccagaggccacaaggccaacctcagaaggagcccctaggtccccagcgccacccacagcagggaccagcttcccccacacccagcctgggccgggcacctcccacaggctgtgcagctggccagagggagaaggggctacaagaagcccaggtctcaacaga

SEQ ID NO: 337368 - DNA, 1000 bp, Homo Sapiens; identical to SEQ ID NO: 158174

SEQ ID NO: 337369 - DNA, 1000 bp, Homo Sapiens; identical to SEQ ID NO: 158175

SEQ ID NO: 337370 - DNA, 1000 bp, Homo Sapiens
tttttttttttttttttttttttttttttttttttttttttttttttttttttttttttttttttttttttttttttttttttttttttttttttttttttttcgtgcctttgcaaagcttttatttcatgtctgcggcatggaatccacctgcacatggcatcttagctgtgaaggagaaagcagtgcacgagaaggaatgagtgggcggaaccaacggcctccacaagctgccttccagcagcctgccaaggccatggcagagagagactgcaaacaaacaaacacaagcaaacagagtctcttcacagctggagtctgaaagctcatagtggcatgtgtgaatctgacaaaattaaaagtgtgcatagtccattacatgcataaaacactaataataatcctgtttacacgtgactgcagcaggcaggtccagctccaccactgccctcctgccacatcacatcaagtgccatggtttagagggtttttcatatgtaattcttttattctgtaaaaggtaacaaaatatacagaacaaaactttccctttttaaaactaatgttacaaatctgtattatcacttgtatataaatagtatatagctgatcattaataaggtgtataagtacaatgtattctaaaactgttaagcaaaaaaaaaaaaaacaaaaaaaaaaatccaagtgtcctcctccaccactcacgctggtgatcactgtgctctctgccagctgcgtggagtgacgggaggagggaatcactgtgtgtgcgagagtgcttcagactcaatttccaaaataattttcacccctctaagcatgtaaatatacaaagatggatccttcatagaaattaaaaaatcaatttgagctcatttcgaatacagaacaagtatggcacagatggaagtcctgccacgtttcctttaatgatgctgactcttgtatcacacaggccagcatgaagtttcttactcagactttacaggcattttcc

SEQ ID NO: 337371 - DNA, 1000 bp, Homo Sapiens
gagtttttccaaagatttattgaagcagaaccaagttggttggatacttgctggaaaaaaaaaagcagttttaatggtattcaaaataccttttaaaaagtattctagcacaagatttttctgtaaactagattatgttgtaaacttttttctaaatcttgtaggagtgtcggttgttaagaactagagcttattcctattccaaatctatcttgcgctcctgaaaaactgcagaaaggcacttgaaagctgtttctttaagatatggatttcttttttattcttgctggtaatatattgctgcactgagtgtgtgcaatttttattcaaggtcatcgtgatgctgagaagtttcgttgataacctgtccatctctagtttcaaccgtcttaatcagaagtgtcctttttgagtgggtatcaaccagagggagtgaatccagattagtttccctcaggttcagggaggaaaagtttggaagaggcagagaaatcctgctctcctcgccttccagcagcttcctgtaggtggcaatctcaatgtcaagggccatcttaacattgagcaggtcttggtattcacgaaggtgacgagccatttcctccttcatattctgaatctcatcctgcaggcggccaatagtgtcttggtagttagcagcttcaacggcaaagttctcttccatttcacgcatctggcgttccagggactcattggttcctttaagggcatccacttcacaggtgagggactgcacctgtctccggtactcagtggactcctgctttgcctggcgcagggcgtcattgttccggttggcagcctcagagaggtcagcaaacttggatttgtaccattcttctgcctcctgcaggttcttggcagccacactttcatattgctgacgtacgtcacgcagggcagccgtgaggtcaggcttggaaacatccacatcgatttggacatgctgttcctgaatctgagcctgcagctcctggat

SEQ ID NO: 337372 - DNA, 1000 bp, Homo Sapiens
ttttttttttttttttttgcagatgtgaagtcaggctttattgaagtatttacacagctcattcccgccacgtggaggagtctgcgacattccacacacaatgacagttaaagacacctgttgaccactgggtcctgcttcccctgctcaccaggcatctgtcaggatacagccggccctctaccaggagaaaccagtcagctccgctgaacagtggcacatgtgcggttgaggggagattgtcccctgagcacacctgatgactgatgactgcccacacccaaccaccgaccatcaacaaccagtgcctggtaaccacctgacatgtccactcacgcccacttcctcagcgtcccctctgggtcacagctcagtgtcggcacctggccactgacccaacaccttcagttaccacaaatctttgtttcctcaaaaacctgagagtaggtgggggatgctcccttttgtcctttgaaagctgggcaaggctgggggtgggtctgtccaaaccctacaggggaggaacagccgaggggccgcactgaacctggggtctgcagcgtccacctgcctccctctcgctccacatgctcagccgtcctttcctgggcacctggcctgggccgtttactccccagtatccgtctgtgatggatcctctgcggcccccagaaatggtgggttgttctgtagatccaaccgcctcacctgtctccccaaaccaacctcgggttcattctcccagaagtccagggatgagcttgttgcagcagaggggtgtggccggcgtggcccagggtgtgcaggacagggtgcggacctttggggattgaggggtctctggacactgctgctttgctgtcctaacagcccctctgtccggcctcattttaccggggatatgggttttgcaaaccaaggtgacactgacaggatgtgtgagcttccctgtggctgcctcccggcacagctgtcccgacctttgacatcgcgccccagc

SEQ ID NO: 337373 - DNA, 1000 bp, Homo Sapiens; identical to SEQ ID NO: 158176

SEQ ID NO: 337374 - DNA, 1000 bp, Homo Sapiens
ttttttttttcacactgagataaaatttattgtcatagaatgaacatttttttttcggaatgaacaaatctgttttacttttcacatgccatgttcgttgtccctcttttgggagcctggatgaaaagttggaaagttgcttttttcccttttgttgtcattaattcttcaaattccaaagttgtatatttaagagtagatttagtaagttgttgctagcaactgctgcaattttaaaattataaaataagaattagggggaaaatcaattgttataaatttatttgggacatttattgccaccacattggaagcctttgaaaattcaaacagaaaccaatacacttccatcttttttactttcgataaataatatctttgtgtatatgtatatatagatagatatacttaatcaataagtcatttagcagggtttttacattttatactgcattcatccaaaacagctctttccagatcgataggatgcaaatgaggtaagaattaaggcaaacccaaaaggcatgcaaatgtagtacatttatattcactgataatacaagcttctgtggtgtgtggaccagacacaggagccaagggtccctctgtgtctgtccaatagtattttacaggagggtagtgacatagcttataattaagttacattaccatgggggtctcagtgctactaacattatgtaatcaaggagatacgagcattagcaaaacatgaacaagaagtcatataactctttgcagcacatttctgcccaggctttggaggaagagggatttttatgaaatgatattacacatatcacattgtggcaggttgtttgttttgttttatatatgcttttaaaattcattagcaaatgacattctcatgcacacgagtgtttcaaacacaagaagcaagtccatttataggtagtccaagcaatatttgtgtgtgtgtgtgtgtgtgtgtgtgtgtgtgtgtgtgtgtgtgtgaatagct

SEQ ID NO: 337375 - DNA, 1000 bp, Homo Sapiens
ttttttttttttttttttttttttcattctgcttttctttattgtctggctaacttacaaagatgcagatgtctagggtagtctctaccctaccacttacactatcctgatgacacagatagcaaaatgtgtctgtttacatagtgcatggtatgaaaaaaaagtttttcttcctctacggtccttgactataaggagggaaaaattaatttcatgccaacatttttggggaactttaacaatcatcccatttctgctactaaaataacaaaactggtattacactttaaaatataaagacctaacagtttttacaaatatgcaaataatctactacttagacataaaaaaaagttgatttcttttaaatcacaaagtaaggcaccattggattaaacatttctcctggcttttactaaataaaatgcatagtgaaataaatactgaacactgagttttaatactgtaatacatttcaatataaaataagaggtgaatgttaaaatactgtattacatgttgaatacatttatctgaaaatgttataaaaaaacacacatgtaagctctgatttcagggaagaaaaattcatttttgtaattttccatagtttaagattttaccacagaacttattcatagttttagatgcaattaggttgcaaactttcaaagaaagggtgtaggtgtattaatgaaacagtcacttaaacactacattctaaaacaatctattctggatgaatggcaactttgagctatcaccctgtttcagatttagaacggtacctgccaagttcagatatgcaaaggaattgtccaattcttactaccccttataaaattcagactcactttctctgagtcagacttttctccgtcatattttctaggaagggcaaattccatcttttgtgaaatgggtcattaggctttatcatagggatgtttttcactgttgaaatcagataaaagaatcccaaataaatgatgctgctaaa

SEQ ID NO: 337376 - DNA, 1000 bp, Homo Sapiens
tttttttttcctggacctgtcacaagctttattgtcccgagcacagactcgccacacttcaacaattccactgtggggaggggaggggtgaatgaaggacctggggaggggacatggctgagccacacccgggcggccacacggggcgggctgagaggcccacggaggcagaagctcccaaggaaaccgcttcttggacacccgtcaccaggagcccacctccgggggctcagctcctcccggcaccctcctagatggacctctggctgttagtagactaatcggtgcccctaccgatggggcagagctgcctgattttgctagaaagagctgtatttgaccctgggttaggccactaaagcatcgcttctagacggctgttaatagaactgcatgcgagagctaccgaaagccaacagggactgggaggggggccggggggactgactgtgactccccgatgggctgcatttgggcaggaacgtgagcgccacctacctgtaccaggtggcactcatgagggcgatctgggccgttcctatgaattgcacacgtgtcctgtgcgttacgggaaagccgggatggggcatcgggcttctccctctggtccactgatgggggaggcctcacaggaaaacactccctgagctgccggagggtggggcagggacccctgtgctgatgccggggtgcaaagctgtaagcaacctgttggtcccccagcggcgaggtggaggctgcagggccaaggctggctttttccaccacgcacaggcctgggataacttagcaggcttgaggggaagatggcagggcgaggggttgggggagcgcagttagatttctcttacccccagcccccgttaggagatggggctggagacgctctgtgcaggtgcctggcaagaccaggaagggatgctccatgtggcaaacacacccctgaatgcctggctgcgtgtacttgggtgtgtatacgcacctctaggctgtaggaacg

SEQ ID NO: 337377 - DNA, 1000 bp, Homo Sapiens
tttttagtagagatggggtttcaccatgttggtcaggctggtctcgaactgctgacctcgtgatccaccagcctcggcctcccaacatgctggaattacaggcgtgagccactgcgcctggtgagactggtttcaaactcccgacctcaagcaatccgcccacctcagcctcccagagtgctgggattacaggcatgagccactgcgtctggcccagtcttcccctattctctggaccacagtttgaaaatcacagacaggtcaacctagatccttccagctctagttttctactgtgttctttcctcttgagaagttacagctcatcatgggcccttaataacagaattcaacagaaggcatcatctgaaaacaaagtcaattcagaaactgttgttgcaagaaggcaaacagaaaaacggcaccatgtcccactggaatctctttcagcgatggagagttttgttttctggtaaaaaatatagaaatagtggttgtccttgaggggacttgtggtttggttctaaacctccccatggagccgagtggtgtccctgagggtgaggagggcagaggtctctgctcagagctgctctgagcccatccgcaagtttttgatctccagttccaactgtttggcctggacctctcgctgggtcaacagctcccggagccttcggatctcctcctgttgccggtagaacatctgcagcaactcattctctgtctttggtggggggcattcgaaaacgtcaaagccatttgtcagccaggttttcttctcctccagcctgtgttctgctgcccaccttggcatcttctcctccaacagggaggaagacctccagccatcttctgcagccagcttttctgtctgattcaagagccggggtgaggctggggccatggaattgaagataggtctctctgcaggcagtgggtggggtctcagcagctcagagccaggcctaagggacaccaggattgggtctcgattcat

SEQ ID NO: 337378 - DNA, 1000 bp, Homo Sapiens
ttttttttttttttttttggatttcataaaatgattttaatagaaaagtacaagatatgaacaaaaataaataatctttatctcatttctagcccagcaaattgtacactgcatataaaaatggtctaagatgcaattttcctccattccttttttgcttttaaaatactgagacagcattttaattcaatattctaggttcaaactgatacattaaaaaaaaatcataccaacctttaatcattctacatccattttttaaagttagctaacaagatgatgtttcactaaaataaaatatccaatcatcagattaaagtgtaaagtttgtgtgaacagggaaattagatcatttctctaagttttaattcctatgtttctgaatgtttcttgaattaaaaattcatttcatcatcttactttcaaaacacggcatctctctttcaccattccacagagagagaaaagactagaaaatactttaaaaaaaataaatattttaaaagtatagcttacagtgacaatgtagtattttagacctgtgccttcgtgcctatttgcattaaatacatgcttcaagttataactaccttttctatctctctatatattgtgggccactaagtgtttgtggactgatgctgctaacgatctcttggagttagctagtaccggtctcttattcagagtatttactctgctatagcgtcatatttgataattctagtggcttgaataatgttttgtaaaaacaaattgaaacttggtattggcaaaattgtacgagaaaagagctagggtaggcaactaaaacttacacagtgccagtctcaggaggtcagtagctcacagaactcaacagataaactggattaaaacttaaaagtcttctttctatttgagcccataatgactattttgaacatggctcttttgctgctgcctatatataaattttttattaattttcttgtattgggaagatcttgaatacgctcca

SEQ ID NO: 337379 - DNA, 1000 bp, Homo Sapiens
ttttttttttttttttttccagtaacttaatttattttagtttcaaacaggaaccaagaacaagtctcagtatgataaattatcccttcccacccttcctgctgaagaaggaaaaagaggctccaagagtcatgggaaaaccccttcctttggagggtccccattaacatctgaatggaaggagacaacttccctaagggcctggacagacaactctctgaggattcaggggagagtgcccctcagcactctgtctctttcccaagaaaaacctctctaccactgtctcccattatcccacaagagggagcccaggctgcagtaaaggagtttggggatagtacataggagtgggtgatctctttctagatacagatcttatggctccaaacagtgcctggggttatccctcaagggagaggagtggtgaaactatagggactccccagccaaaaggagtatgaatcagggttaaaggggctctggagttgagaagtgggaggagcaatacagtgcatttcatcttagtccattcaggtgtctaaggagcagaagaggggtggcagcttcccctcaagaccctccaattgttggggagaaggctacacatcccagagtccacctgacccccaccacccctaaagctgtttccaggtagatactttaagcttccagggaccaagagtgaccttggaaggaaatcagagcaaagggctgaaaaggcgcccctctcacacagtcctcttccccagccccaaggtaaggctgaccctcacttacacacattcacccactctgtaaccttgcactcatcacacagcacatagcagcaccagtggaagcggcaatggcagcgctcaactcgtgtctgccggagcacgttgtgcccacggccacagcacaggctgccacagccatccaacaggcggctggtcttgttgcaggcccggccccttgtccctggggagcccatagtggggtctcgctcacagaagtcagg

SEQ ID NO: 337380 - DNA, 1000 bp, Homo Sapiens
taaatgtaaaccaagtttattttgctttttaagtagtgttcttaaagcactacagcttggtaaacaatgtaaattagtataagtcatctcaaaagccagagttgttttgttttttaatgagttgttaaaaagatgcagcctattctaacaggataaatatttttaaccatttcacttcgagttaatgaaggctcacaaatgagcaacactcctcattgaggaaaacaaaaagctgttgtcgacaagcgacagcacacacacacaaaaacaaaaagaactgtgtaaaaataactaactgtgttcccatatttttgaagtcgctttacaatgggatgatatgcacatgatcttgctgcaatcttgccaaagagactttgtaatacatgtagtctagacaaacgattcagtccaagaggtgctaacttcagacaatgcagcactataatcctttaaacaacgcaatttgttttactcattatcttttcttctaggctgaaatagactagaaggaaaatgctccctaattaaaaattggtattgtttacaggaaaaattgtataattttgcattagaattacaagtatatgttcaaatcgaatttgcctcctccccccagcccagccacaaaaatgggcatgaagtaaaatttttaaaaatgccttaattttcaacttcatgcaaactaaataaagatgaccaaaacaaaagcttaaacaatggaaggatatttcacagaaaatttcttatacaaaaaaacacataagaaaaagggccactaggtgacattttaatttacaaattggcatcattttggtcgacaaatacccacatgctgttttcctctgctaacgagttgcagagaaaaaaaacagcatgaatttggattttaatcacacatttcttctggaatctcatgtggattaaagatgccagggacagacatttgacgtttatgtttctcttcatcagcctgccgtagggctatttctctctcttccaa

SEQ ID NO: 337381 - DNA, 1000 bp, Homo Sapiens; identical to SEQ ID NO: 158178

SEQ ID NO: 337382 - DNA, 1000 bp, Homo Sapiens
tttttttttttttttaatatccccaaagcagcatttatttacccattgaattccaaaacatttattttagaagtctggcatttcataatcacccatcttgattgacatgggctgacacacatggcgctgtcaggatacacaaggacaatagccaaagagttacaaaaaataaatccatgattcttaaacaattgcaaccaaaaaaaaaaaaaagttacaagtatcaaaactttcagatgcattgcattgaaaagaaggtttgtgcacgtcataatttaaagaggcaaaaccaaggagctactgaaacctcacgttaaacagtttattataaagctgatggaaaggagcaagttgtctctctgtatcagcttcccttaacagttttccattaattgaagaaagaggtgggaggggtgaattcatttttgcatgcacaagatgtactgcttaacgaaacactatcagcttgttttaaatggatcttttaaatatcaactgtagcctggttggctaattctttctaatcttccccattactttcgcctagatttcccatagatcaacaggcatagtaaaatgcctcatcagaacacacttctccacacaattcaaaaagggagctcctgtgggctcaaagcaaccatcagtccagcaatgcccatgatttatctgaaactgcttcccaagagacaggagtgcagatctgagtagctgtgctgccaatacagataggtttagcactagatatttagtgattgtggcaaggaagaatcggtgatgatgggggtggtgggtgaaggaagggccaggggacctgaaggatcttcagttgccttctcctgcttcttcatcctgctggtcgctcgtccagagggtgaggttgtctcgcagcaactgcatgatcagcgtggagtccttataggaatcctcgtttagtgtgtccagctcagctatggcatcatcgaaggcttgtttggctaagaggcaggcttgctcaggt

SEQ ID NO: 337383 - DNA, 1000 bp, Homo Sapiens
acactcagattgtttatttaaaaatgcccaaaacacaaaaatagacttttaaggtaataatatatattactaaatatattatagtctacttataataattatatcgtcgttttcaatattacaaaaaaaggaagaaaaatacaagggaagcagacgacccaatatatataaatactataaaatcatattagaataaataaagtcgtcataaataaagggcccattgatttatgggtggggtttggcaacggctttggctacttgcttttggagggtaatttgagcaccaggattccccctcaggagaggttccagttaccaggagacactggaacctcaggtctataaaaactggaggggcagtgaaggcctattattcacagcacataagattctaggagacagatttgggcagggaagaggtgggggagagggttcattgcctcccttaaatatgctacaattttttttcccccaagaacctcggaagacactccatcccccaccatcatgaatactgagcttgcacacttggggacctgccccagcgtgaggtcaggggagtgggttaatgcattctggaaaaggggattacttgattactgtcccccaagtccccacagccctggggtccatgcagagaccacagtgcaagagacgtggctccccgctgagatccagctgatctgaccgggcagtcactttgtcactcagaaacagagatgcgattgaagatggggagtcgccggggggctgccacgggctggggtggtgcaaaaactcccgcctcgaagacgggagagtcagagccccccaggctgctgccgctgctggcatattcatcagggtcggatcccagggactgtacagagggggtccgaaccaggccacccaagggcccccagacgctgataggagtggcccttcggcaggaggggcaacagactggggtggggtctcttcgagccaggggggtgccaggggcagcagagaaggcaga

SEQ ID NO: 337384 - DNA, 1000 bp, Homo Sapiens
cttgctcctatcctagaccccagtcctatactcctctgcccaatggcaaccaccatgaagtttattctgtattttttcaaagtctattcacatacagatacatgtatatatgcatacaaagatacatacacatacagagataagagacagaggttaaacaaacatacccttttgtacacaaaggggaacatactatatacatggttcagcaacctactttttcacacttcacaatatatcttgaatatcgctccctaccagcacatttgtatcctcagctgctttattttctctcattttcctgttaacattttttacatatataacaacccttttaaaaagatttctgctgatgcagaagccaacacagacattaagaaagagctgggtgaaaatgtcaaagaggcttatacagatggccacactcatttacataaggcaataaacagatatgcaaattcaactctaatatatggtgcttaagtacaaaacaagaagaaacacaggaactgtcagcatatataacttgtttctccattgctttgaatattcaaataattcacaatttttaaagctttcaatttcaatctgaacatgtagatcatttataataattgagtagttaaaacaatattttttataaaaggttttgtatcaagtttaaacccttgtttccatccactgattctatatgaagatccattttcaaagtttctcatgtacaacaaggtgtgacatcttgctaaaggctttctaacactctttaaaatcagcatatttccaaggttcaacaaaaccttaaatttagttaacaaatttcccacattaacttcactcatgagatttatcttctgaatgagttttcacatgtttggttagggatgcattttgtttgaaagttttcccacattcattacattcatagggtttttctccagtgtgggatcgctgatgtataacaagctgtgattttgcattaaaggctttttcacattcgtta

SEQ ID NO: 337385 - DNA, 1000 bp, Homo Sapiens
gaagtgaaattactttaatttttttaaaagaaatcctagcaatgaaaaatgagtttgaaaaattgacattttctacaattctacattttgaaaaataattgactaatacttttttacagaacacaattcaaactattgttggcatttcaatatattcctaaagatggttaaaagaacatttagtataccaaaactggaatagagtttataattctcatttacggctatgaaaaggcaatcaacttctatttaaaactgtaaccagtgatgaaatatatttcgaaaacataaacatttggtctgacaatctttaatatttgttaaaaacagtctgatgtttgttgctgatggaagttattttaatccaatgtgcaaaaaaagtgcagctgtctactttttacttggaatacgtaagaccaacactactatttacacacttaaaagattttaaatttattaatttaagtaagcatactgcatctcctttatggataaatcatgtgccccacagagccccaaagcttgatgacattctgtaaagttacacaaatgtatctgaagaagttatctgttcttgtcctaattttgattctaaataaaaatccaatttcaaaatcaattaagattttaatctaggaaatcttgggattgttacacatgtaaaaaaccttatctctgagagccttttctattcttcttaccacaggtccactcacaaatcgcagctggtatggactggtactgccccaaataagaggaacctaagagcttggctccaagaccccccaccatcccggtgggtttgcttggcctttaggacgtgtgactacagcttttgggtaggtacagggcaatcaagattgaggaagaacacttcagcaaagcaaccattatttgtccacaaaaacagtgaaaaacagtgatataaaattaacaaaccaaatataaatctaacgcccttctgcatttccagaactttttttatatttgtgcagtgttc

SEQ ID NO: 337386 - DNA, 1000 bp, Homo Sapiens
taatccactgcttttgatgtttattaggtttacaaaaactgtacattttttttccttgagaaaaagcattaacttagtactggtatcaaatagactaaacattcaataacaggaaaatattctgatttttatttttgcacgttattctcaagtacacaattacaataatgtcacacatccctatatgattttctttttatgtattttactttctttacaaagtgtacagagggagggacatacaatatttaataggatatttctacagaacaataacttatattatgtccttgtaaaaatctgtacctctttaaaacatttaactgaaacatccatttttttttagctttgctaatcaaaattgttttaagaattaaaactaggttgtaactaatgtcagtacataacagtgactacaatttcattttctctttatacagacaagtatgttttatcatattcacttgaccaaacccttaaataccttttaaaggttttaatgttgtgctttaaaaagaactgtgtatgattccggagtatgtaagagaaatataaaatgtgtgaagtgttgtgttctttatctttcagtttatttaaaaaaatatagttaaatgacccaatcatttatattttctgtattaattttataggatttaaaattaatacatttccactttcatttaagtgtttttacattatttctgggaaaataaaaattaagggagattttaaaggttctcacaaaaaaacagacagagctttcaagaatcgcagggcaatgaatcacggatcacaaaattgtaagttagtttaaaaaaaaaaaaaaaaaaaaaacacattatgggggccaagaaggtacaggaatttcctataagataggctaggaaaacccatgccttgactttgactggcatttgggctggagttcacacctgcctaaagcacttggtttaaaactagactaaatcagtctagcacttcagaggtttgccaaacacca

SEQ ID NO: 337387 - DNA, 1000 bp, Homo Sapiens
cagtaaaaatcaggtagggacatgtataaaggctaagaaggcctaacagattcttaaaatccattacatggttttggatggtactaggtttaaattcatatatgactaaagcactttagaactagatcaaattaatctaacatttcagaggctgccaatcaccaaatataaatttatatttcctaatcctataacttttgaattggtggcacagaaaaaggtgaaaataaaaacctgacagcaaaagttgaatgaagcactaccatactaaagctagaaggtagctgtaatgtgggttaaaaaaaattcgaatcccctaaaatattccaaatacacaggtaccaacagccaaattaaggaacctaaaaatgtattttccattctccaaattcttattaaccaaattctttttaattatatgaattcattttatattatatccatacatataaattattaactgcttaataacattaacttattaactctcaaataaataataaaatttggaaagtgatatatattccaaataaggccatggattttcattatgtacttttatcttctaatcaaaatcaacttgactgttgtctttttaaaactttactcaatgtaaaatagaaagcaggatgaagttgctaatttggaattagctctcattctgttacatggtaccatcattttcccttagtcctccttactttgcaaagagacagcgttccttcacaggattctcagaaaaatactatgaaatctatgtctgaaatagctttccagaaaaatttatgatatgaagctgaaattgtatgaaaacattctatctagaaacatcttaccttccatttttatctatcaaagattatttgaagagaagattttcactctcctaatgtccttttctttttaattattcacctcaaatttagtaactgaataacaagttacaaaatgctctcatacatctctggatctttcaggttattgtaaattttcatcataa

SEQ ID NO: 337388 - DNA, 1000 bp, Homo Sapiens
ttggcttaaatgttggcttttattacgtttacttgctgtgagtaagattattcacaaatgcaaacacactactcttcaaatgttttcttaaaaattatttggccttcacagtctaaacagatatttgaaatatggagtcattttgaagtaaacatttacccctaaaatttatctttaaaatatcctacttaaatcatatgtcatagtgtgatatttaattgttacactgtggtattaaagcaaaaggggcatcaggtacacaacaaaaattagacagttataattcccaatttgaggtaaactacatctaggaataggaatgttcgaagaaaagatgaactcatcatttactatcttcttaaatgcaccagcaaaattacaaaagtaccactattatcatgtttatcattatcacactcatatcaggttatcagacaagctgatctcaatgaaagtgggaaggattattaattgtggtgttatcttttctagagagaagagatgtctttattcctctttctatttttaactaatgtctggacctaatgtctggagtcacttcaaatgcaaatctgttaatcagtttcaaacttccaaaccaattggggctagcttttgcttcgcaaatttttggagctagcagcaattcctgcttaggtattcaacttccataaatctcactaaaccttgcaaggtggcgctcttttcatgaaaaaagccaatattattgttataatcagaataacattttttaaaaagttaaacaccaccctccccagtgtttgatgtggtacagtaagtgcagcaaagtccttcctcagcaaataagactttgttgaaacagtgacaaatataaatagcaagagatgaaaagacaagtcaacaaaggattcttaaagaaattgaacatttttatcttgtaattggccaatggtataaactgaaaaattaatttcactttaaaatagatgtatcttaaggggttgttatactttgtggg

SEQ ID NO: 337389 - DNA, 1000 bp, Homo Sapiens
ttttttttttttttttgtttacgtgcattactactttattcaaacacaaagagcatatttttaaaaattttcatgtgttttacatttggcattaaacttccatgaaaaatgctgatattaatgatattaacgtagaatgacctcacattgttctgatgcagaaaaaaaaacagaacacatattttcacatgaacaccacggattaaggaaaagcagcaacagatttgaaagctgaattatataaataatatttgctttccaaaaacctcaaatactgtaaatacaaatgaagtatctatgaaatatacctgtcaaaacatcaatgttcttgctactttaaaacatataagcaaataaattatctaattattttgcctttagattattctgtacaaaaaatactcttatttagtataaaggctgaaagtgtctgtgctttagtcctttctcacataaattctctgacacatttagacttcattttttattaaatacttcctcacatttattgcatctgcaaacttcctttttctatgaacccctaggtgactcataagtttgatattttgaataaaacttttcacatttttacatctatagtgtttctctagtatggattatcttgagtaagggttgagcacagtttaaaataatttgccacatttttaatatttgtatggattttttcagtttatattctctgctattgtgtaaggcttgaaaatagttaaaggttatgccacattcttaacatttgtagggtttcactcccatataaattatctgatgcacaataagacatgggtaacaagtaaaaaatctgctccatgttttacatttttaaagtttttctctagtatgacttctctgatgtgcaatgaggtatgacctagagttaaaggctttgccacattcttcacatttgtagggtctctctccactatgacttctccgatgtgtagtgaggtatgacctatagctgaaggctttaccacattca

SEQ ID NO: 337390 - DNA, 1000 bp, Homo Sapiens
tttttttttttttttttttttttttttttttttttttttagaaagaagcttctaaggtgaggttaacagtccagctgtggtttatttggtacattcataagatgttcactcctatatatattttttccctaggggtttctcatttctagatttacactttccctcatagcatggtccctccaaggtatatgcttccgatacataaaatgtttgtaattttgttaattctgccattcattagctcaataatttctctcattaaaattctgtaaactatgaatttcaaagaagtctattctatattcatctggttcatgaagtttcctctttgtgaatcttatgttagtaaaatgactttacaacgtttaacatggttcctcacctgtatgaactttttaaaaaaaggtatgacttgctgctaaaaattttcagagtggttactaaattcagttttcctgtgtattgtctactatctttttgcatgtaaagaacagctttctgtggatgcctttccatatgctgtgcattcataaagttctattcagtatgagttttctggaagatgacaagatgattccacttacagagtttctctttatatatgattgtttctatctcttgtgaatccacttttcagagtttcgtaaaattatcaatgtttgtcatctacatgagttctctgatgcataatgagctgtgacttccaacaaaaggctttcccacattcagtgcacttacaaggcttctctcctgtatgtgttctctgatgtgcactgagaattgatttttgagagaaggttttcccacattcattgcacccatagggtttctctcctgaatgagttctttgatgtacaatgagttgagaattcctaatgaaggcttttccacactcactgcattcatatggtttctctcttgtgtgcattctctggtgtacaagaaggcgtaatttcccactgaaggatttctcacattgactgcatttataagggttgac

SEQ ID NO: 337391 - DNA, 1000 bp, Homo Sapiens
aagttaaggctataggtttattcacatatatacacatttatatgtaagtggtctatcccatgtgaattttttgatgctgggtaagccttgagctacgattaaaagctttgccacagtcattgcatttataaggcttctccccggtgtgaattctctggtgtataattaggtgtgaacgccacctaaatatcttctcacagtcttcacactgatgcagtttctttatagtattaacctttttacggctcacaaaggtggacccttccagggcattcccatattcgtaaaaccactgggccctagtgtgtattctctggtgttcaataagatatgagctccggctgaaggcttttccacactcactgcactcatagggcttcacccctgcatgaattatctggtgttggaaaagggttgagttttgactgaaggctttcccacattcattacatttatagggcctctctccagtgtgaaccctttgatgtattgtaagctgtgtgctcatactgaaggcttttccgcattggaggcattcgtagggcttctctcctttatggattctctgatggtaaataaggctggaactctgactgaaggcttttccacagtcattacacacatagggtttctctccagtgtggattcgctgatgctgaataaggtgtgagccctgaacaaagcctttgccacactcatcacatttaaatggtttttctccagtgtgagttctctgatggcgaataagccgtgaactacaaccaaaggcttttgtacacttgttgcatttataaggcttctctccagtgtgaatcagctgatgctgactcaggcgagagatccacctaaaagctttcccacactcatcacacttaaatggtttctctacagcgtgaattctctgatgtgcaacaaggcttggactgtctgaggcttttagaatttgagctttctccccagtatgcatcctttgatgctgggctagggtggagctctggct

SEQ ID NO: 337392 - DNA, 1000 bp, Homo Sapiens
ttttttttttttttttttgagatggagtctcgctctgttgcccaggctggagtgcagtggcacgatctcagctcagtgcagagagctagggaattttacaaacattccatggagaacatgactctgaaaaatctgcagatcactctcagttgtaagatctgttcatagaaatattggtgtagcacaactcagaagactgtgggctttctattcccccagatagtttaacatttctattcaaatgtcaagacaaaccaccagagaaccatgactttggaatatagttgtctattctctgagagtctttctttggcgttaaaaaataagcaaagaaacagaaggtgtacaaaagaacccacccaatggaaattaaacaactggaaaatacaaaaccaaaatgaaaactcactgcacaaactcaacagattaggtatgacaaagaaaacaatcagtgaggaccatggaaggtcaataaaaattaatcaatattaacaagacagaaaatagactggaaaaagaaaaaagatgagagcctgaaggacccatgggagtgtaaaacaagatctgccactcatgttattgaagtccctaaaaaagacaagactggggggtgaaaaaatatttgaagaaataatagttgaaagttccccaaattttgcaaaaggcataatcctacagatcaaaaagctgggcaagcaccagggagcgccaaatagaatacacccaaaaacttccatgccacgcacatcacagccaaacttctgaacactagagacaatgaaaaacactttgaatgaagcttgacagaactgatgcattgtaaaatagggaatgattatttgaatgctagtaggtttcttatattaaacaataatgtacagaacagagagatacatctctgaagtctaaaagaaaacaactgccaactctgaatcttatattccacaaaaatattctttgggaatgaaggaaacataaagacatctttagaggaaggaaa

SEQ ID NO: 337393 - DNA, 1000 bp, Homo Sapiens
ttttttttttttttctttttttttttttttttttttttttttttttttataatggcaaaatttttaatatttgacaaaattggggtttgataaagacaggtgaatactataaagccaataaaatggtaacaacatatttacagacaaaaaatattaagggctggttatagtatagcataatcacaccttgtttccaaaacaatgagagatagtattaaaggatttgctccaaaagtttgacagtgattatctatgattggtaagattacaggtaaccatatcctttttttctttttatctacattatgatgagggaaagctgttttgctaaaatggagagtataattttataaaaggaaagtaaacaatcttctaaaacaaaaggtacaggtattaaaggatacttaaaagtaacagttattgaccataaacaggatgagacatagatacatatatataaatttaaaaaacaaacactgggccaggcatggtggctcatgcctgtaattccagcacgttgggaggccgaggcagatggatcacgaggtcaagagatcgagaccatcctggccaacgtggtgaaaccccatctctaatgaaaatacaaaaaattagctgggcgtggtggcgggcgcctgtagtcccagctactggggagctgaggcaggaaaatcacttgaactcgggaggtggaggttgcagtgaaccgagattgcaccactgcactccagcctggtgacagtgagactccatctcaaaaaaacaaaaacaaaaacaaaaacaaaaaaacactgacctgatatccaagctttatgtgaataaaaatgtaacttaccatcaaatagtcaataaaaaaaatatgaaaatggacaaggttattgaataaatggtgttaggataatcaggaaagaaaaaaaggataaatttagacttgcaataaataaaataatttttcaatgaatcagtaattctgtataatacaaaaaaaaaagaccattga

SEQ ID NO: 337394 - DNA, 1000 bp, Homo Sapiens
tttttttttttttttttttttttttttttttttttttttgcctctaggcaagctttattctttgactccttcatccaggaaggggctgttagttgcatctcacccaaatggaatgcgatgggaattgggggcttgagttgtttggagaaggagctgttgatcttggcaaatgaatatagctggtgtgtggtgtccatcaatccttgagtgcttggccatggagactagggaatggtcagaacagacccagaggtccccagatctttacaataccaaggttcaggaggtatagacagtaaggaaaaagtccatttcctatttctgtccattttcagtaaagtttttgttttgactggcttttaaaaaattacctaggaaatggaaagcttataaacattcgtaagtgaattgttgaactgctaccccaagtggtttccttacccagtcaccacttaaccagaaatattagaatacacggttcaaccagaattcaaccaggcagataacctgcctgttgctcaagcaatcatcagagttttaaaaaacaaaattaagcaaaaaagacctttccccaaatagcatcattaccacttagctttgtacgacccattcctaggaaagccacattccacttcagagaacatgaccgcttaaggtacagttaaaacaaagtccttgcctttaggtgcttactttttgttttaaattagcctctgaaatgcttttcttgtgtcttctgctgcattcctgaaaactataacttttaaggacacagccctcacttttatagaggaggaagaaaacagcaaagaggtgtctcattagggaggcagaaggttatgaccaatgctggaggtcttcctcttccttacttgttattcaacaagatgggttctatggtgtcgcatgaggtgtgagttggaaatgaaagctgcaccacacttctcacattcatagggcttctccccagtgtgggttctctggtgcacggtgaggctcg

SEQ ID NO: 337395 - DNA, 1000 bp, Homo Sapiens
ttttttttttcatgactcaggaatgtatggactttatttatacttctatataatttttataattaaaatgaccctgtagtcaataacaatttaattgtacattaaaataatgaagtgtagaattggcttgtaatacaaaggataaatgctgaaggtaatagatactttatcctgatgtgactaatacatattatatgcctgtatcaaaacatgttatatattgcataaatatatacacatttggccaggtgcagtggctcatgcctgtggtcccagaactctgggaggccgaggcaggcagatcatgaggtcagaagatcgagaccatcctggccaacatggtgaaactccatctctactaaaaatacaaaaattagcctggtgtgatggtggacgcctgtaatcccagctattcgggaggctgaggcaggagaatcacttgaaccggggaggtgggggttgcagtgagccaagatcatgccactgtactccagcctgggtgacagagcgagactccatctccaaaaaaaaacccaaacaagtagtgggcgcctgtggtcccagctacttgggaggctgaggcaggagaatggagtgaacctgggaggcggagcttgcagtgagccaagatcgcgccactgcactccagcctgggcgagagcaagactctgtctcaaaaaaaaaaaccaaacaaacaaaaaaaattatgaatagcacaaagaataaaataaggtaattaaaatcatactatgtacccacagaaattaagaacagtaagtttaaataagacaaaaaagaatatttaacctatagaaaaatattctttaacttatttgcagttgaaagccactggtgaaatagattaatagaaatgttagtccattatgttaccaaatagtatattgttaccatcttttacatacactcttgagtaaggtgaaataggttaaagttagaagcataataatgcttcattgaatgtacaatggtcttaacacat

SEQ ID NO: 337396 - DNA, 1000 bp, Homo Sapiens
gctagtcataattcttgttttattattattctgaaaataatagtttatggaggaaactcctgattaaagccatgtcaggagcccgtccgaggatacaacagttgatatacctccttttaatttcacacagggtcttgctttgtcacccaggctgcagtgcagtgctgtgaatcatggctcactgcagccttgacctcctaggctcaaatgatcctcccacctcagcctcctgagtagctgggaccacagggacatgccgccacatctggctaatttttgcattttttgtagagacgaggtctcaccatgttgtccaggctggtcctagactcctgggctcaagtgatccccttgccttggcctcccacagtgttaagattacaggtgtgagccatggcacccaacgatatcccttctttttattggcaagaaagatctttccccttgtcaacaacttccaggcccatcaaggaaaacaggtggcaagactacctcaaatgactctcaacactcctcctggagtgtggcccttctggggaggtgactgactttaactagaggaggcaccctggcatgcagacctgattggggtgataaggcaaggctcccacacctggaggaaggtggtctggatctaggagccagggaggaccagggtgctttccttgttgagtagctcagaaagcagctactgacaccaaagcacatcatgttagtttcgaggtttgctccccagggagaaattcctgccagctctggggggaaccacgcacaagagctttgccacatccagcgcgtcgatgggatccacgtccctcagtccagcatcccctgcacccagcaggctgccaggcacgtagtatgtgctgagcaggtgtttgttgaactggatggccaagggcttcccctcgctgtgcagcctctggtgctcagtgaggtgcgagctccagttgaacatctccccacatttctcacacttaaacgacttctccccggagtg

SEQ ID NO: 337397 - DNA, 1000 bp, Homo Sapiens
tttttttgagacggagtctcgctctgtcgcccaggcttgagtgcagtggcgtgatctcggctcactgcaagctccgcctcccgggttcacgccattctcctgcctcagcctctcgcatagctgggactacaggcgcccgccaccacgcccggctagttttttgtattttttagtagagaaggggtttcactgtgttagccaggatggtctccatctcctgacctcgtgatccgcccgcctcggcctcccaaagtagtgggattacaggtgtgatagtatgaattttcttatggttagtaaggattgaagactggttaaaggctttgcaacatttttcacatttgtagggtttctctccagtgtgaattatcttatgtttagtaagagctgaggactctttaaaggctttgccacattctccacatttgtagggtttctctccggtgtgcaacctcttatgtctagttagggttgaagattggctaaatgctttgccacattcttcacatttgtagggtttctctctagtatgaattctcttatgtccatttagggttgaggatgatataaatgctttgccacattcttcacacttgtaaggtttctctccagtatgaattatcttatgtgtagtaagctttgaggatcgattaaaagctttcccacattcttcacatttgtatggtttctctccagtgtgcatcctcgtatgtctagttagggttgaggattggctaaatgctttgccacattcttcacatttgtagggtttctctccagtatgaattatcttatgttcagtaagagttgaagatttcctaaaagctttgccacattcttcacatttgtagggtttctctccagtatgaattatcttatgtgtagtaagggttgaggattggctaaaagctttgccacattcttcacatttgtagggtttctctccagtgtgcatcctcttatgtgtagtaaggtgtgaaggctggctaaatgctttgcc

SEQ ID NO: 337398 - DNA, 1000 bp, Homo Sapiens
gacctgatcaataaggtctttattatcaccagttagtgcaggcaaggtaggtgattccagtggagggtgatttgtggcctcaatggacacatcttaggggttaaacacagacttgaccacatccacaaggaatgtgcatcttcctgagctcaaattagatttccctcaaggcccctcaaccagcatcggttcagctgagcacagtcctgaatccctagagaacacaggaaggaaggctcagggtactgttttccccatgcatgaggacaggactgctgcaaatttttggatccaggcaagatggaaagtgactatggcttctgccttatgctgcatgggtgagatggccctgcaaaggttcctgggctggtcagaaacagagtagcttctgaaggcttttccacattagcagtacatgtaggtaatttttctggtatggggattctgctgcatgaagtttgacttggctgaagattttctcacaaagaccacttccataaggctccactcaggtatgaatctttttatgctgtgcaaggttacaaagatggctgaagagtttcccacactggctacactcataagtcctttctctggtgtgaactttctggtgccgaacaagtgtagatctttcactaaaggcttttccacactggatgcactcatagggcctttcttgtgtgtgaactctctgatgacgaaccaggtgggagttactgctaaaggctctcccacattcactgcattcgtaaggcctttctccagtgtgaactctccagtgacaaataaggctggattttcggctaaagaatttcccacattcactgcatttataaggcttttctccagtatgaactttctgatgcttaatgagaatggagttttggctaaagaacttcccacattcattgcactcataaggcctttcttttgtgtgaactctccagtgttcaatgagagtggagctgtgagcaaaggctttcccacactcactacactc

SEQ ID NO: 337399 - DNA, 1000 bp, Homo Sapiens
tttttttttttttttttttacagatgtataaagaagccaagtttattacaaccgaaggccacaaaacatggagaagacttagtgtggagaaagtaaacagtcaaatgtcctttgaccacttacagaatgcatttctctactccatttcatcaaagtgtcaacattctgactcttagtccttgtccccatctttgccttcagagagagtataaggaatccgaaggttgccctgcacacggctcagggtcgggctgcactggcagtctgtggtggacagacgtggtcttcctgtgtctgctgaggtgagacttgaggctgaagccccgcccacacgtcttgcacacatatggcttctcccccgtatgtgtcatttgatgtaaggtgaggtgtgacttttggagaaagccttggccacactctctgcacacacaaggcttctcttccgagtgagcccgcttgtgtgtaattagagctgacttattgccaaagcccagtccacactgcctgcacatgtagggcttctccctcgagtgcttccgcttgtgcctgatgagaccggcctggtggctaaagcctcgcccgcactctcggcacacatacggcctctcccctgagtgcgtcctctggtgtgcaacaaggtttgacttctggctgaagcctcgcccgcactccccacacaccatgggcttctcgcctgagtgcgtcctctggtgtctgatgaggttggattgctggctgaagccccggccacagtccttgcacacaatgggcttctctcctgagtgtatgttctggtgtctgttgaggtgtgacttgagactaaagcctcgcccacacaccccacaaacatacggcttctccccagtgtgtgtccgcctgtgagagatgagggttgaattctggctgaagctgtgcccacacaccccgcacacatagggcttctcctttgagtgtgtcctctggtggttgacaagggtggtcctctgcctgaagcatcgcc

SEQ ID NO: 337400 - DNA, 1000 bp, Homo Sapiens
ttttttttttttttttctaacatgaatttgctattgcttataagacgatggtttaacaaaggaaaaatctccctttttgtaaaacaaatatctgtgtttctaacgcgagttctgcagagaaatgtagagggagaacagagcagcaaaagccatctcagaatcagtgagactctacggaagcagctttacattttgagtcttcccatacaaagcttttcaatctcattgcatataaagattaattgcaaaaataatgcagggataactaaaaacctgtttatagtacactgatactttgtcatatgtaattccaatctgtgactggctgccatgtaccctgatcaaacaatatacacacagacaagacagctgtttactgagacagtcagtatccatagtgattccataaagatgccactctcatttctggaacactctgccatactgtcatttgggaatgaatatcagagtcaacctgcaccattcataagcactttcccccccaaaaatgtaatgtgcaataatggcaaattctgacttcatttggttctcgtatatatgaaaggcatttgttgggtttctcaccaatttgaacatctctggtttggaatacggtgaatccttggacaaaagcgttccctggatccactacatttgttccatttcttttttgtaggttctataacatagcactaatgggcgttcaaggctgaaggtcctgagtgttgattatctccacgtttccctactatttggatgcagagatggatgacctagagcttggtggtcccatggtcatttcccatcagtgtgaactctctgagggtgtctgaggggagtgctgtgtgaaaaggcttgtgtatgaacgtacgtttctcatgtgtatgattgggtcaaatctagaaagggatgagctatggcttaaggtcttcctatgtccccagcacatgtggagtgggtttatccagtgtgagttctctggtgcttggtaagggaggag

SEQ ID NO: 337401 - DNA, 1000 bp, Homo Sapiens
gatccggtaccccagtgtgctctaaagttttttttgtttaaagaaataaaaatcattttattaataaataagccttagaccagaatgtgatgggaaatagaggaaaagagctaagagtttgaaatcagatgcttcagtgttctatacaacccattaaggacatgttttcaagataaacactaatcagtcctcagggaagaggacacatagttgaacagtcacacatagttcatcctgactctacttggtaatggaggtgaccatctgtgtcagctaactagcgtcatcctgagggagggggagaaaccctaacccacaacttttggcaagtgtgagttttacaacatggcgacaggggccctctctggtgaggctcctacaatccgacagaaactgatgtcagcagtaaataataaaatttagaatatatgattaagtacagaatttatttgaaggcaaagcttggaaatagccacgtggaaacatcaactctaaatgaatgggatcagcgttcccaagtagagacgttaagatttcacacacagggaaagacagagaagctttagcagaatcaccacgttttttattctgggccagtgcataggctgcagcaacttgattgattacggatagatacacttcaaggaaggttactttatcactacataagaagggacaatgatccgaggaggtcttatctctggggctacttagtcttcttaattacttacaggaaaactcttagaagttgcacctgcattccactggactcaggttgcctgaccacattcctctcaaggctcagaattatctcaaagtccatagccttaaattgaagttatttgatgtttgaattatttaatttcctactgagataaaggtactgtttcccttgttgtttgcctttcaaagagagctcccaagtccttcaaaaatacacccctgggtcattaagctgaaaaaaggtttaatttctaaaaaaaaaaaacaaagttagccg

SEQ ID NO: 337402 - DNA, 1000 bp, Homo Sapiens; identical to SEQ ID NO: 246435

SEQ ID NO: 337403 - DNA, 1000 bp, Homo Sapiens; identical to SEQ ID NO: 158182

SEQ ID NO: 337404 - DNA, 1000 bp, Homo Sapiens
ttttttttttttttttttttttttttttttcttttttttttttttttttttttttttttttttttttttttttttttttttttttttttttttttttttttttttttttttttttttttttttttttttttttttttttttttttttttttttttggggaaatatctgaaggctttacaccctttattatccataatggcttttggaattacgattgtgtgacatatagaacctttgatattttagatacagcctttatttttttttccacgggaagttaaaaatccatcataagactccataagactttactagtcttgcatgtagactctaggagtttgtgatctgataaaagagtaacatgaaaatttactgtattgccctaatttcatacttccttgtacacaatgaatcactctgagaatctattccaagggttatatacacaaaagtgtcaagaataaaatgttctccactctcgcataaaaatgtgtacagtgtatcaggaatggaaaacttctaattttcctgggcccgggcttcatggatttctgctgccagaagatgaaagactccttctgctttattgctccattgttctgaggattaatcatccaaccctggcgtttctccttgttggattctagacgctattctgatggcttcttccagagatggctgttctccaagctgaactgcaatctgggtgccattggatgttgctactaaggtcagaggtctggtttctgtggttactaagtgatggctatgctgctggtgccccatttctgatgaggcagtatggaatgctgccaagtcttgagctacaattgcaacctgttgcccttctgtaccctcagcagtaaccatagcaacagagtgcgttcctgctgaggagatgactgcatcatgggcggggactgtgatgggcgtgccatcctgcgttaccattgtgatggtgttgccaatggcctgcatgtcagcttgagatatgttgaca

SEQ ID NO: 337405 - DNA, 1000 bp, Homo Sapiens; identical to SEQ ID NO: 158183

SEQ ID NO: 337406 - DNA, 1000 bp, Homo Sapiens
agaatacagcaaattctaattaaaaaatgactcagcaacttcaagaaataagaaaacaaaggtaaatggaacctgtaggttacagacttatgagatacaactactgaaagctattaaatatacatttggatcctgaataaaaatgatcttccttaagaaacacattgttttagacaactgagaaaacagaagcgataaaatatttacattttaaaatatatttgtgtgattttttggggggttataaaagagcctttacattttaaaattgcattctgaagaggctatgcattaaataatatgatatccgggagtataagtaaaataacgcactagtacacatgaggaccgatgaaacataaatgactatgaaatgataaatggtgaaggaaaaaaaaatagtgaaggaagactggagaaaggttcatctggcttcataacagtcttttccatctttttttgtaattgaacacagcaaggcaataagaggcagttggttcccacagttggtgatttgaaggctggcaaactctatcaagagtcatgtgagaccaacaatatcctgaaatatgtagtccctcttttcaggtcaccagcagagtcctctgggccaaactgggtcaggtccatggcctgaatacactgggatgggtgagtggtgcacactggtggtcacctgccaggcagtagaggtaaaatggcttacactatagtatcagcagagacataaatctgacatgggccctgggcagggcaaaaggtgcaatgcagttcacacatacctggaatttatgcagatgttcagatataggatgttcaattcaggctgatgccaccctcataagggatctccttcagagctgttatatcaactggacatccctacatatcaaaagtgtctttcccttgtgaactgtgtggcactcaatgagatatggccttcagctgaagctttctgacattcactgtgtactcaaggactttctccagggtgctaaca

SEQ ID NO: 337407 - DNA, 1000 bp, Homo Sapiens
gaaattggagtaaaagtttaataagtgaaagaaaaaagctctccacagtggagatggggatccaaataagttgcccagtatgaggctggggtccggggtttttatggactgggaaggggaaggaatgcacttagcctgcgggctgtcttggagaaagcgtgattcagcttggtctgggaccttggcccgggaccaatcaggaaccgaagtgatgattcataagggctattcagcttggcccgggaccaatcaggagttgaagtgattattcctaagggctattcagcttggcctgggaccaatcaggagctgaagtgatgatttacagaggctgggcttttccttttccacaaaagaaagtgccaacctgaacctactgaagcccactgtgttcatgcccacaaaagaagaaactttttcctcggagcctgctgattatacaaaggacaaaggcatttctgtgtctggtcttgttcccttaactgagtgagccggaggtttgtgcgagtttttacctgaatgggctggaggttcttctatctgtgcagccatgggcatgtctccaggcacaatcccctgtgctagttcccttatcagtgcctgtagcttgattgtcttccccaggctgctttttgtgttatgtggggatgagacactgacccgtttggctgggggtctccagggacccttcccttgctgtctaccaactcctctcaaatggattttgaattttccaacacaaagaaatggtaaatgtttgaggtaacagatacaccaattacactgattggatcactataaattgtatgcacacattaaaatagcacgttgtaccccataaatatgaacaattatgtgtcatttagaaataatgataaaagtatatccagattcaagcgcctcttgtagcgtctcccacaatcctcacatttggatgggttttccccactatagtctctcggctggtctttacggtatgtcctgtgtacaagcctctttc

SEQ ID NO: 337408 - DNA, 1000 bp, Homo Sapiens
cttcagcagaagaaaacagatggcaaaatttaaaaaaccaacgacagtctgggagaagatatttgcaacacatatgactgaaaaaaaaaggatttttatatattctcatatgttaaaaaacaacatttaaaccaaaaagcaagagatgaacagcccatttgaaaacaatgagcagaggacatgaacagtcaatgcacagaagaaaaaacccaaatagccaatcaacagataagatgttcacacaccactaattagggaaatctgaataaaaacaatgagctatcccctaaggggatcaggacatactttgatacaaatgtaggtgccaaattttcacaggcacactgtgtgccctggtgatcatatgcccccaaggagcttgatccaatggtgagggaagtcttcagtgagaggctttcttcattgtacaacgccaggaccagcctatgtgagttctctgatgttctgtgaggtgtgctttccggcagaaagctttcccacattcttgacactcaaagggtctctctcctgtgtgaattcgctgatgttcaatgaggcgtactttcacatagaaggcatttccacattcactacattcataaggtttctctcctgtgtgagttctccggtgttgacaaagggatttcttcatactgaagattttcccacattcactacattcgtagggtttctctcctgaatgcatcctctgatgttcaattaggcgtgctttcacatagaaagcattaccacactcattacattcgtaaggtttctctcctgtgtgaattctctgatggatcccaagagatgagtgcaccctgaaagatttcccacattcattacactgatagggcttttcacctgtgtgagttctttgatgattattgagagtcatcttcattcggaagaatttcccacattcaccacactcatagggtttctcacctgtgtgaattctttgatgctgatttagggatttctttgcacggaagttttt

SEQ ID NO: 337409 - DNA, 1000 bp, Homo Sapiens
ttttttttttttttttttttttttttttttttttttcagtcttccatcttgcccaatatttattttttatttaatatttttcatattgtgccatttcctcagcatttacttacaaatttaagttccttacattaataggttttccctcatgtgaattctctggtgttgactaaggtttgagctctgactgaaggctcttccacactcactgcattcatagggtttttctccagtgtgaattctaaagtgtcgaataagatgtgagctcactcggaaggttttcccacattcactacactcgtagggtttctctctggtgtgaattctctgatgcctgataagatgtgagttcaggttgaatgctctcccacattctttgcaaccaaagggtctttccccagtgtgaattcgccgatgtctagtaagatctgagctctctgcaaagcttttcccacattcattacattcatagcatctctctccagtgtggattctctgatgcctagcaagttttgagctgtgcctgaaagctttcccacattcattacactgatgagttttatctccactgaaaactgctgcatgtttagcaagttttgggctcttgaaagattttccatattggtgatttttttctccagcataaattatttgatggttaataaaatctgagttccatttgaagctctggtcacaggtaccatgtttacaagatttctggtgtgtgaattcatttgagttcagatttaatctcctctcacatccatcgtggcttattatttcacctctgactgtatttttgtgggtgaggattttaccaaaaccttcatcctgggcagacgagagtctctgagactcccctgattctttttcccattgtctctttaccctgcctgcagacttacagatgtcttgagactcaccagatgcttctgatatgtatcctgagattcttccagatataattctctgtgattcaattttttcaaaaatttccagc

SEQ ID NO: 337410 - DNA, 1000 bp, Homo Sapiens; identical to SEQ ID NO: 158184

SEQ ID NO: 337411 - DNA, 1000 bp, Homo Sapiens
ttttttttttttctggtagatcactcatctttattaaagaagtgtgctcatgataaaaaattgtctggtatgacagcaaatgcataactatatatatagaatttatcccttaacatattttagaggataaagcaacagagggacgatttaacagtaagcgggccacctgcaggattgtcctgattctctctcagtagttactccttgctctctgcagagacttaagttctctttgccccagtgcccagacctgccttctctgcaccctgtcatcatgcacggttgggccctggttggccttttctgggcctcctcacagcagaatgtgcatcatcattcctcaagggcctcgtgctttccttgtaagtcacacagtttttgtgatttacatgcaagcaagggggaggagaaacacaaacaccttccgtgtgaatctaaagcatggagtgctccttttagtccccatggtgaagtcggtgatgctggtgaaggtttgagctctggcgaaagcttttcccacactggccacactggtatggcttctctccagtgtggatcctctggtgcagcttcagggttgactgccgcccaaagcagtttccacactctccgcacgtgtagggtctctctcctgtgtggactctcttgtgtctcttcagctctgaattccacgtgaagcttttcccacagtcatcacatttgtagggtttctttgctgagcgggtgggctggtgaccaagatgttgcaaacggttgctcagactccgtttacctcctttgcttttctttagctctctcagtgggtggctttttagggggctgctgatgtattccaccctgcaatgtctctggtagtgagcaaatggcttttgagcatttggggagctgacctgcctccgtgacaaccgaggttcactcatatttgcccctcttggttcaggattctgcagaccattccctttggatctgccagctgacactgcacatggctttgctcctt

SEQ ID NO: 337412 - DNA, 1000 bp, Homo Sapiens
ttttttgaactaaatggtaaattttattactttaagaaagaagggaggaatggatattgagacagcaactagttctgtctgccacagtacatcagtcagtgtccagcaattatgttcaaatctatgtcacacagaatctacatattgaagaccatgtgttctgttcacaatgcaattaaactgaaaagataactaaaatattcataggatctacagttgtgacacatataagaatgaaatactcactgataaaaacaatcatagctataacatttataaggtttgtcccagtataacaggcatccagagttgggccagaaggctgtttccaggtgaccataacagggcttctctccaatatatgttctaaagtgagaaaggaggcatgaggggcaacaaacacttccctgagtcatttcattcatggagtttctggccattgtggattcgcttgtgcattataaggttagtgcttgtgctaaaggctttttcacactgaaaacatttataaggcttctctccagtgtgagttctcacgtgtaccctcaggcaagaggaattcctaaaggccttcccacattctttacactcataggttttctcaccagtgtgagttctcttgtgcacaataaggtaagagcctgtgctgaaggactttccacactggttacactcataaggcttctctccagtgtgagagcgtgtgtgtttcttaagggatgactgatcaatgaaggcttttccacagtcactgcattcatagggtttctctccagtgtgggttctcacatgtttctgaagggatgaaggaacagtgaaagccttcccacattccttacagtcatagggtttctctccagtgtgagttcttttgtgcacattcagatgagagctctggctaaaggattttccacagtgatcacactcataaggcttctctccagtatgagatctcatgtgtttcttaagggaagactgaaaaatgaaggctttcccacag

SEQ ID NO: 337413 - DNA, 1000 bp, Homo Sapiens; identical to SEQ ID NO: 158185

SEQ ID NO: 337414 - DNA, 1000 bp, Homo Sapiens
ttttttttttttttttttttttttttcaagtccaaggcctttaattcgcagagtgcctgccctttctcgccctcgccctcccccatcgccatgcctcaccccatgccctcaccgccccagctcccttcccgagcccctctctcctccctcggagccttgactccagtggggctgttccagtggccctgggcgccccgctccccctttcctggcctcctaggtgggagcgggtgggggtgtggccagagcccccgccgccgccgcccccagcatcagcatggccagggccttgggcccggtggtgtggatcttctcgtgccggtgcaggttggagcgccggctgaagctcttgccacacaacgggcaggcgtagggccgcacgccacggtgggtgcgctggtgcgcggtgaggtgcgagctgtggctgaagctcttgccgcagtcgaggcagtggtagggcttctcgcctgtgtgtgtgcggttgtgcgcgatgaggttggaacgctggctgaagcacttgccgcactcggggcacggatagggcttgaccccagtgtgggtgcgctggtgggtgactagcgccgagctctgcgtgaagcacttggcgcagatggggcacttgtgcggcttggcgcccgtgtgggtgccctggtgggtgaccaagtccgagcggcgggtgaagcgcttggcgcagcggtcgcacacgtagggcttctctccggtgtggatgcgctggtgctgaatcagcgtggagtggtggctgaagctcttccggcaggcggggcaggtgtagggcttctcgcccgtgtggatgatctggtgctggatgaggtgcgagctgcggccgaagcgcttcccgcagtcagtgcaggcgtagggcttctcgcccgtgtgcgtgcgccggtgcgtcaccaggtgcgagtgccagctgaagcccttgccgcactgctcgcaccggtagctcttcctgcccacctcactgtcaggggccaggccctcc

SEQ ID NO: 337415 - DNA, 1000 bp, Homo Sapiens
tttttttttttttgtttatatcaagtccttttattctgataccacagaattaccttgtcacaatacagggggagggacactgaagtaccacgagttctcacagagcacagaaggacagcacacaatcacaaggtcatgtggaggactcgggtcattgcacttacaactgtaaacttgtttgtttgactttgtacagcactcttcccccctcaaataaaggaggagagaaggaaagaaagggagagagggaggaggaaggggaaagcaaaaacaagacatgaaagctagaggaaaaggtattgagtggccaccactctccagggtagtgcacttggagagaaggagctgatttgaccccagaaactgaatgaggcagaaacacacacacacacacacacacgcacgcacgcacatacacacatgatcatgtgcatacacatacaatatctcacgactgccatggctctccagtgccaccccagtgaacatggcagcagggctgctggcacccagggagacagagatggcatctccgaggagtttcagttgattaggcctgtccctctaaccctgttggagtccatgatgacaagtatttacagcatgggggtgggtaagaggagagcagacgggacaacagggcaggaccatgctgtcctggcaaaggacctgcctggaaaactccctacaggctccagaaggcaaggcatagttgccaccactgctgttctttcactgtgggccctcagaccacatgctctgcccaaggattgtaggggagggctgtcactgtgaagtgagtgcactgggccctgaagtgagcagagagaggaggcaatgcccttgctcatgatgctggggagaggggtatggagaaggcctgggctgcatgctagagactccttgcccatttggagatgtgtctgttgctctctactttccaaggcaccaagtgctggtccctcagcttctggctgcattgtccccagagtcacaactg

SEQ ID NO: 337416 - DNA, 1000 bp, Homo Sapiens
ttttttttttttttttttggtagctatcaatttattaactggttactgcggcaatatatataattataaaatcaccatcaatcctttcattcatacgttaacacatatcactggtttaattcattgaaggcaaatacaagtttttcccttactttccttccaagattccacttaggctggttaccccaaacgtaatggagaaacattaaatgtcacttttaaaccacttttaaaccagtctttaattttcaattcaggtgtgaggcacatatatacacacaaacatattaatttaaggaagcaagaatgtagaatattaacatgtatggcagacactacttcatgtattttgtttaaaacttaactttgaaataacttcattgtttacatgtaaaagaaaaatatcattcacttatacttccacttccctttaaagtattctcaaattatatttcctgaaactccaatagaaagcattctctcttaatcatggcaacgggtcgggtactcattggtgaccaaaatctggtgacaccatcttttatgttctttgccatattcttaaatgcctggcaaacagtagatatttaccagatgaatatgacattaaaaaaataaatttcaagagattgagattctttagccaagttgagggactacatcattttgaagcactctagaagggggatgtgattaaatgtgactgcatgcctgggctggctgcttctaggtatagagctgtgttaaggcgtgggaataggagagcaatgccctagggaaaagagggcactaggggaaacaatggttgcagtgcactgcagaatgaccaatggcacctacttccagagttttccttcaactaaaaagagatggcattttcttatgattcagtaaccgcattacttacatcaacattatggttgctatagacaagcctaggtagctagcctctatttacatcatcccactaagggtatccaaacccaagtaaccaaatttt

SEQ ID NO: 337417 - DNA, 1000 bp, Homo Sapiens
ttttttttttttttttgtccagaaataacatttattaatcaacagtaaaacacacaatagaaaaggccttataaataaaactatatatttataatgctttatttttttggtccagtactccacaaaacactacagacagtaacaaaataattcaataaatattaaaaactttcaatagaattataggacacttttttatcatatgtgagcatcaacaatgccacagccattagatatactattaaacacagtcatagatatctttcttgaataatggacataataaattttttatcaaggagtcataacatttacacatatccatacacaagataacagctcagaggaaatgaagcagactccccagtgacctggtttcatctgcctgtacatcatttaaagatattacagtgttaacaggatagaagtcaacacactgaagagaaatgttgggatttgcttggggtgggaggaatgaaagtagggtaattaatgaaagcagcttacatattttccattgctctcttagcaatatgctcccttcccttttctgccttttcttggttgaggtattccagcactttcattaacagatcttcatcccagtactgcctatttggggtatcatcattcttcgggggccccacagggaaccttttgctcaccggggccagcttgtcagtctcctgagagctgccttgattcaaatgctctttgatggcctgctcaatttgttcctcttcctgcaggtcatcttcagatgagccttgaccaggaactcgcttcacttggtttgaattaatgatctcagggtatttaactagcatcctggccaagtactcacctaattcttgatccttgtcgttcaggttttcatatgccatctgtctgttttcaacatgtggaatccaggcagctttgggaagctggttcgatctagatcttccagcaccataagggagccttggcagaactttctcctggttatatggattgggaa

SEQ ID NO: 337418 - DNA, 1000 bp, Homo Sapiens; identical to SEQ ID NO: 158186

SEQ ID NO: 337419 - DNA, 1000 bp, Homo Sapiens; identical to SEQ ID NO: 158187

SEQ ID NO: 337420 - DNA, 1000 bp, Homo Sapiens; identical to SEQ ID NO: 246437

SEQ ID NO: 337421 - DNA, 1000 bp, Homo Sapiens
ttttttttttttttttttttttttggcaagagataacacaatttatttaaatatattccgactcaagatgaaggcaagcggtttacctagaaaggtttacatattttagctatagtttttcattgaaccatttttttgaaatgtcattcttttcattcatgcttcttttatcctcttgctttagaagttcacagtgttatataagtgaaaaacaagacagatagaaaccaccctaaacatatggctttatgtacataaaaaattcaataatgttgccataacccctaatacagtgtgatccttatttatttattatccagaataaacttctgtacctattaaattcttcaagtatatctagagcagtgcttgtaaaagtgaggtcccactgctaagttaatggccatctctttgaagatcacttctaccttcaacataattatggtacagttctaatagtttttttaattttacatgtatcatacattctcaaatattccaaaatgctcaaatgagccaaacatatactttgatttacatctagtttaatattccctttatacagcaccagaggttaaaaatggatctgagtaaccaaatattctctttcctttattagttagagtttatcatcatttatttctataacattaaacccaaattgaagatgaagacaccctgggtcaaatgctttcaccttaaataaataaacatttcatccacttcatacttaaataccaagttgttttcctataacatatgtttcttggtaacaactactgaatcaactaagctgaacaccaacttcttatctttgaggactaggcaagtcggataggattctctaggtttgctttaaaacttttaagaaacctggttgccagttcgtcatcaaccactcgactgtcacttgacattgtgactgttatgagctggcgctgctgcagtttggcatttccctcttcatcctcagtgagcttcagcacaggtcggaacctcc

SEQ ID NO: 337422 - DNA, 1000 bp, Homo Sapiens
tttttttttttttttatttttttttatattacatttttattttgcaagaaaataaattatacaacttaaaaaataaaatccaaaaattaagcagttcatcaaaatatttcagcctactgcatacagaaactgctaccacttaaaattgtacagcattatcatctcagtatgtagtggcacacattcaaaatcgtatagaccatatgaggatagattacaacttagaaactaaaataaatttgttcaacactccagacaacatatagtgtagatgacaggaaagctctcatgtaatgtttatttcacaaacatgaccttggaagaattcataagacagcatcccagtcacttacatgagaacagaaaaaccagcttgagtttaagatagcaaatctttctgtaaaactagcaaatctttcacccagactgaagttttaaaatttgccctttgagcagtgctagagacatcttactgcaaataatgcaaaatactttttaactactcaggtcatattttctattaaatttaataaaaagtaaaagaaagaaagctaacatttcatttttggaaggtttaacatttatgcacaaaataagagcaagagacttaaataaaaaagttgacagaactcagggacccctccaataaatgtaaaaattggaagacttcagaatttatttcaagatcctcatttaatcattggaatagtaatattctaatatttatctcattgtgaccatcaaaatttttctatatttttacttcttaaactctgtcttatgtctacttactccggcaacgagatggcaacacaagttaacattttccagatgggatgtctctgtctttaaactagaagatgggtattcagaggttaagatagcctctgaagtgtcttattgccataccactaatttttaaaaattaaattttttttttttttttggagggggaggctggattttcttttcacttaactgcaggttatatccctgctcg

SEQ ID NO: 337423 - DNA, 1000 bp, Homo Sapiens
tttttttttttttttttttttttttttttttttttttttttttttttttttttttttttttttttttgagcgtgtaaaatatgttttattgttctttaaaagggttcagggtttggttttaaatcaggctgcacacctttcaaatcaatctgacatctctctatgtcaaactggcttcagctagcaatacttcattaaatcgaaaagaaaaaaattgctttaaggaaaaaaaatccagttttaagaacaattaacattagtctttaaaataaaaggagggctaatgtttcatgttgctttatacatccttctcctcaatacagaaccaggaatgtaattttcctaactcaggcaggcactgatactgatggacactgcgcgtgcacacacacacacacacaatacacacacacacacacacacacacacacaccccctccccccaaacaacaaaattcagagtatgtcaaaggaaaaaggtttgttattgtattgatcaaaacccagtggaatcaacaccatctatcttagcttagcaggtatgctgttttgatcttgagtctatattaatggaatctattgttgcattctgaaataaagaattttggatataccattatgttttaaagtcctagaaacaatttcgaaaagcattattttgttttgttttctgggatgggagaggagagaatctacagatttgcgtttagttaaaaatcaaaactccagcataggaaataggcagttcacatagccggtcaacatgtgaggtatcatcagtgtgagacaaggtcccggtctgttcctattggcctagctgacgctaacaaaatgggaggcttatggctctgcacagcaaattccagcaggacaagatgactttaagcccgtattcagagccctagaagcagggcactactgagtacgtaatatttagaggtgaaaatagtgcaagagcccctgatggtgcccctctacctgctttgtccatgcagcctga

SEQ ID NO: 337424 - DNA, 1000 bp, Homo Sapiens; identical to SEQ ID NO: 158188

SEQ ID NO: 337425 - DNA, 1000 bp, Homo Sapiens
agccgttgtacttttattcacatcgtgtattttggcatttccagagaaggacaaggaagagacagggtgggggaaagactgaggcaggagggcaagtcggggggtccctatttccctcacatccctccttgaccaaccacacaggggcaaacaaagggggaggggaggcacaggtgatcgctccactgggagaggatgcacaaagctacacccacgcgcacaaacgagacccctccctccacaccagggggctgggcggggcgacacagagaagcagagcactgtggattccggggggaggggaagcaacaaagtctccttacagacaggtggccggcccctcccgtccccgtcctgctccatccccagagtctatcgctgcccctctgctctgcccagccattctcccacggcctccagcttcttccctgctgccggggacaaaaggaaaaagggtacagagcagaggggctgaagtccatccctcagcccctctccctcatgccaggtggtcttcccctgccctcattggtaaggggtgaggcaggctcttagctggccactctctggtagaagtagatgtagcccaggtccttgggcggcttctcggaggcacacactttctggtcattgtagatcacccatctgccttctttcttgatgtggcagacgtagtgaccacacatggtagaggtgcccatgtgactaatgaaggcaaagagctgatactttccaggaccatcccggactttaggtcccactggcacagactcagagatggagtcggcagctgagcggccctctgagatgtccatggcagcttcagcatccaggtcgtcaatgtgactgaagatccagtccacagcccgttctaaactattgttcgtggcccgcagcgctttcaaggcctggtcccgggagaagcccatggagacaatggtggtcacacagtcctcaggaggggggtcggctgctgcgcttgtggagcccggcccactag

SEQ ID NO: 337426 - DNA, 1000 bp, Homo Sapiens
ttagttcatccatttccgacaattccaggctccacagtggcaggggatctcgtgctgatcgtcctcaaaatcaaactgatagtcataggttagctcctctcctttggggattcgccggctggagatgatgatgattttgtcctctttgtcaaatgtcacgacttcggccacacagttaggggcacaggaatggttaatgtacctggcagggccgccggtcaacgtagcatcaatcacatgttcattgtttattcggaacatgtagatgcctcgattctgctcttcgtagattttctcccgccggttggccacctcgttccgaatgatggtgccaatgtactcgataaccattgtgtgcttttctaggtccttggctgcatagagccccaggccctggatacgggagcgagccaggtacacgttgttcttccattcggtgcgcagccgccggtactgagatgacttggagtgcacaaactgcttgctgtagggggtgttggtctcgcctgtgaaggtgctctgatatgccttagacatgctggtgctgttcagggtatggggccgtttgtagtgtgtgaggattttaggctctgatcgggcacagccagtggggttgatcatgagtggcagctccataagggggtggcgcccatagcggaataaatagttttgacagctctccaccccgggcagtgattcagctatgcgaagcacggcatgcaccgtcagcccaaagagctcctcgcccttcagatactcagggaagagtcgcagcatgtcagcctcttttctcatggcagccacaggctcaatgatgcgattccacacggcctggggagaggcgtcagtgaagaccaggtcctccaggccctgctcgatgactttgattacaaactccggccgcccgttgttctcaccaatagaacagcgatagcagcagcgacgattgttggtgcggaggctccaatagatgcgcgtggcctcgtagcccacgggatag

SEQ ID NO: 337427 - DNA, 1000 bp, Homo Sapiens
tttttttttttttttttttttccagttactttgctttatttgcagactgaagtgggctacataaatccattacagagtcaacacatgtagacttggcaaaaaggacaatacaaaaatacaactcttgacagtaaatgagactgccctcagctcatcccagtctgtatcagtgggaagccagtgtttaaggtcaacataggaggaagtgctgtggaatgaggaggcatgaaggcttccaccaatgtcactgacccagtaaaatcctggactgagttgcatgggctcttcttggctgtgtggccatttctgccgccttcaaacttggtcacttcctcctctaggaaggggaagagaacctccccaagtcatcggacaccctccacaaggatctgagcaggggctgtgcagtcaaagccaagtgtagccctgggaccactgtgagcacccttccctggggcacctccagcctgggctgttgcctctgggcatccccgatgaaagggctaagagacacagcacaaaggatcaacctcttcaaggctggggggaagaggggaagggagactgaggaaggggttctgcctgggcctccctttggtagattccagaaatgtttgctgatgccaacttctgcttctagcccctggtcccttcttggaggaagcccagttagcctcttggttctgaagaactcgagtcccaggccatggaaggcatccttagtcagagctggtcccagttcactgaccagaaggtctgaagggctagcatttctgtggaggtgggcaggtcttctggagcagcaggcggctctcccagttcttatggctggagctaggatcctcctctgcctataactccctcaattctcccaacccaacaccccctaccttccttctttcctcctcccttccttctccccttcctcctttccttcccccctctttctttccttccccctctttcttccttccccctcctgccttccttccccctccag

SEQ ID NO: 337428 - DNA, 1000 bp, Homo Sapiens
taggatgattgagtgtttctttaaaaataaaaaccccacaaaaaagccagaacaccctacccaacccagcccagtgtaacaggttagccattaacacagaataaagaaggtcccagccacacacgtcattactcggcagagggtgtccagcctggtcggccgacgtcacagtggatggccctgcgtggctgggacacagacagggagcaggcatggcacctgcgccacgcagagcagcaaggctgagcatgaccactggaaataaataaacatggtgccgacagcatctttaaattagtaagacgttagcacaaaacaaaaaagcacaacgactgaaaatgcacttgcttgttgtggtgggttgtgcttgaaaacacctgaagcccacaagtggaaaccgctggggacgtttgtcagtggagtgtggagaaaaagggacggaaaaatcaagtcttctgagacagtcccctgcggtggccctggtccctgtggaattccagcacagcaggagggggagggggaagcaggcctcagtcagcaccgcgggacacggcccctaccttctgaagtggggtccccaggctggagtggggcacacagcaccaaggatcacagactggaccccccaccaaccttctgcggaggagctcccaccccagctcagacgcccagaagagacctgcgcagtgtgaagacggaccccagcggccccagccatttcactagcagctactttccacaacagacgctggcagcccccatgctcgcccacagccgcagcagccaacaggcaagtgcgtgccgtcgagaggccgccggctccctgtatccttgaggcatgtccacgtcccagagcaggaggttggaacagaacggcatcccgaggacccctagccgaggcgggaaggtaagaggctgacgtcgtgcgtgggccccgccggccccagtgggaagcagtggtgcgtgcctccagggagcacttctcctggacccggggccg

SEQ ID NO: 337429 - DNA, 1000 bp, Homo Sapiens; identical to SEQ ID NO: 158189

SEQ ID NO: 337430 - DNA, 1000 bp, Homo Sapiens
gacaatgcattttttctcatttattcaaattcactgcaggaagtaaacactaaaagattaaaaaacaaaacaaaaaaattcacactgcagtatgtacagtttcatgacatcacatgaagaaattaaatttctaataaaaatggcaaattatattactgagcagatcgcatcaaatttggttgtgtaaacaccagaattcttactatgaatggtaatgtgcctatattccagtattgctaatactgggatactcttggaataatgtttgcaatgggattaaaaaattcatgaaagtagttgtgtgaattctttatgtttaaaagtggttgacgattaaaaaaattctttaagacccttcgaatcaaagcacattctttcacaaagcttaaaccacagacgtcatgtccagaaatggaatactgtcatgttaggatgaacatctgatctgatttgttaagacattttgccaaatgcacagatgcacagggtcccccatgcacttttcatgcagcaggtaatcacaacttaaataaaaggtttattctatacatttgtccagacttgcaactgtatacatacatgcacaacttttaaacctgtctgattatatttacacttatacatggaatatacaggaaccaaagagattaaaaggcttttctgttgcattagaacaatacaaaatatgtatttttcattaaggaaatcactatttacatcacctttaaaaaccgattttaacatcttcatgtaacaagtcaatatatatatatatacatattatatatatatatatatatatatatataaaatatatactctcaccagtttactcttctgtaagatgcagcagagaataaacaggtaatgaatgctaccttactgatgtcaataagctgtagtaccctttcacaaatgactttattagaagaaattgtctagatatctaaaatagtccttgaaaatgtgtatatgtgcatccttgtatctacatatgcat

SEQ ID NO: 337431 - DNA, 1000 bp, Homo Sapiens
tttttttttttttttttttttttttgtggttccaactgttttatactgaaatatgtctgagctgatccaaaaaagcgttgggttgggggagaaggaaatgatggaagtggggtgatctcagagctccatgttagcaactctgggagtgtgggccggtccatctgtctgtctgcccaccctggcaggacaatcaggcctaggaggtctggaggagctcgccgagctgggcggaggaggcaggccagtcccatgctggaggggaccccacggccccttctacagggcaggagagtcctcagctgaagggcttcaccagcttcatggcagcatagttcgggaaggcgtagatgaagatggccaggaacagcagcaggatgaagaggatgatgaagaggatgatggcccaccggaaacgccgccacaggatgaacttcatggtcttgtatggggaggtaaaccacaggaaggaggtgtcggggcgccttgggtcctcaagcttagggttcatgttgggctcatcccggccctggccagcaggccgctcctcatgctcactctctgctacaatctccaaggtcatttccagcttgcccgccagtattttcttctcaccctcttctgctacacagggccaccagcccttcactgttttctgctcaaaaagggacacaaaccattctgggtggaaagcatcatccagctggtccaaggagcacttcttggctgtcttggctggcttgggcatgcggttgagatcgagctgcagggagcccagaaaatcatcaaaggagaacttgtcattgtcccagatctggaacaccactcgtgctgggattttgctctcagtcttgtccagcctccagaaggcatccttcttggcaatggtacagacttgctcagctggcaggtagtcgaaggggaaaatgaacctccagttgaagttgccttcacctcccagggaacgataatgcacgtctgtcttttgcttgtgttcttcaaa

SEQ ID NO: 337432 - DNA, 370 bp, Homo Sapiens
aagcttaggggccctaaaaagggcctttttagagaatgactgggcttcaaaatgccatttagccgccgaagccatagagggtgcggccctggcgcttgagcgcgtagaccacgtccatggcggtgaccgtcttgcgcttggcgtgctccgtgtaggtcacggcgtcccggatcacgttctccaggaacaccttcaacactccgcgggtctcctcatagatgaggccagaaatgcgcttcacgccgccgcggcgagcaaggcgccgaatggctggcttggtgataccctggatgttgtcgcgcagcaccttgcggtggcgcttggcaccccctttccccaggcccttacctcctttgccgcgtcctgacat

SEQ ID NO: 337433 - DNA, 1000 bp, Homo Sapiens; identical to SEQ ID NO: 158190

SEQ ID NO: 337434 - DNA, 1000 bp, Homo Sapiens
ttttttttttttttttttttttttttttttttttttttttttttttttctaatttaaaattttaatgttgcatatatgccatagtaccattatcacatgatggtgctggttgcttcttgaatactgttggttatttcatagcttggatctccaactttgtaaaagtggtcttatatattcctcataggcagggttctcctgagtattggttggtgacttctgagcccactggaacaggcgttcgtagacgtttccatcataacagccaagtgctgaatttaaacactgatcggtgaagtcaaaagcatcagttaacaggatggcatccttccggatcaggcggagcaggtccaggtaggctgttcttgccatgtccacttgggcaccagacaggaaggcgtcatggagaaagtcacccgagttagtcaagattccatgtatggcatggaggtcacagaggcgcttgagcacctgctgaatcgctggttcattttctagtttctccagagcttctgtaaaacccttcacagtgacatagtagcagtgcaccttagcagcctggaggtgtatgacagtggtctggttccaagcctcgtgctggtcagctccggattgcgtcagggtctgtaaatgctgcactgagtcctttatgagccttactgccacatgtgcccaggccgtggtgtagagctccgggcagaggaagtcggctgccctctgggctggacacctggccaggtcaggtgcggtgagatatgcgacagatggagagagagatctctgtggcgtggagccaggggacatctgagtctgcaggtagctcttcaccaggaacctggccacctgcaggtagagcactgtgttctcaccctcgtaggtacaggaggccgacaatttggtgaccagtgatggcaggccactcagctttgagtagccatgtccgccacaggccctgcggcacatctcagctccctgggtgcagaattctgacatcatggcc

SEQ ID NO: 337435 - DNA, 1000 bp, Homo Sapiens
catgatcaatctgcaatttcttttccacggtgcaaatcaccgcgatcccagattaggtccagccggccgggtgcctccctcccgtccgcctgggcaagttgaggccaatcagcagtttaggcgcacaggtgcgggctcagaaagcagcagcaatctccggcgtgttctggaatcagaagttgaggtccacgtctgattagttcccttcgtttcattagacttggctgaatgtgccagtcccactagagcttcgatttcagacttcctatgacaggtttgttcacagaaaactctggccaccaggatgcccgctccaacaccttgctttcctgcaggacagcgccccagaggtttttgtagagctcgccgtcggctctgccaatcggtgagtccagaacaaagtcaggaggagcgatcacgtctaccagggcaactgcatcgtctttcagctgggaacacaaagccaggacggcgctctccaacacttctcccgcctgctcaccggagaagtatcctcctcggtagagcagggccgcgtggcgcttcagggaccacagggcgtacagagcactgagccgccccagcacggcccgcagcgagggcggcacggaaggctggtgcacgtgctcgtggaacctctggaccaccgtgagctccacgaaggccagcgccaacggacggccgtgggacacctggcatttgttccttgcttcaaagtcactgcttcctgatcttttctcttggtttaatttttgataagtctctcggagcaggtagcaaaccagccacttgtatgctgccagggcgactgcagagtccaagcagtcggcaacactggagacctcaaacttctggtcaaggatgccgggataggcgtccagaaagtccactgacttcagcggactgcggaagcaagctccatcgtggacctggtgtgccaggagacccagcaaatagttgcttgtctgctgcagcaggatgttgttgtcaccttcgtatg

SEQ ID NO: 337436 - DNA, 1000 bp, Homo Sapiens
tttttttttataaaaggataactttattgaatatacaaattcaagagcattcaatttttttttaagattatggcataagacagatcaatggtaatggtttatatatcctatacttaccaaacagattaggtagatatactgacctatcaatgctcaaaataacaaaatgaatacatgtccctaaactatttctgtattctatgactactaaatgggaaatctgtcagctgaccacccaccagactttttcccataggaagtttgatatgctgtcattgatatataccatttctgaatataaacctctatcttgggtccttttctctttgcctacttcattatctgtcttcccaacccacctaagacttagtcaaaacaggatacagagatctggatggctctacgcagaggaaaaatctccaataataccgtcaattctgtattcacttttcctttcagcagctacctaattatatctaagatggtgtgaaaaaatatacaactcaaaaaagaaaagcatttggactatcaatcttcaccttggtcctgcagcttccctttatcaaccagtgtatgtattattttaaattcccaactgtaaacacgtacaatatttaataaaacatccagaaactttgtggtcagcaccatgtaatttccgaggagaatgttttaggtaggggcagagaaggaagaaaattgagaagccagtaagaaaaaaatggcaattcacaccagaatgctttcatgaagtgttttttaaaaatggatgaattcaattttaagtgatactttgccccatgaccaacatttcctcattgttttagtgttcataaaaggcctaatatgtacctctagaaaaggaaattatcttctttatttacaaaattgttaagagcaccagcaccaggttgagtttccccaaactatacctagctcataactctaaaagaatctacaaattaagtcttttgattcatttaatcctcatcacatctgt

SEQ ID NO: 337437 - DNA, 1000 bp, Homo Sapiens
tttttttttttttttttttttttttttttggggacggagcctaaaataagcattttatttaataaaaaatggcttctacatctcaaatcatgtccataacttacaatctaaatgaaagccagttacataaataagaaggtcattctggaagaatcaaattcctaggacaggagggaaataagtgcgtccagaaacttgctccgatcctcagctttcagctcaattactgagaggtcaaaatggttgtgcagcatccgggagctggtgctttccgctgccttctcaaacgccctcccaaaaaagttcttcctgtccgagctgtcggtctctggggggatgcccaccacggtcactgtgccatgctccatgctcaggggggcagccatcaccaggggcagcagtttgcagcgccggttctttgtcgaacacacaaaggacttgagcaggtgtttgctgagcaggcttagggatgccggcctagagaacagcatgacatctggagtgccctccatgagagagcagtacaggaaaggcccctgggagatgacgaggttggtgcaaaggcagctggcaatggtctgctgggtggctcgcagctgcttcttggcgagttccaggccatggtacagcttgtccaggttactcctggagaggctgtccagagcctggatgaagtgatctgtccctgagccatccttctcggggctctccatcaaagacatggtggcaaagaccacgtcgctggccagaaacttgtgcttgaacccaaaatgaatgctgaaagtctgcacgcgcatgtccttcatcccaaatttatttgcagactcttcaatcatttcccgcaaattctccttcaaggagatgtccatggcctggaacttctgcttcacctgcttcaggggaagacccatgtctgcaaggaactcctggagccgcttctgtccatgcacagaccacagcttgaacctggctgcggtatagctggtgttgcacaggctgt

SEQ ID NO: 337438 - DNA, 1000 bp, Homo Sapiens
ttttttttttttttttcttatacaaagataattttattaatgaaaagatcacacaaaacaaagtttttgtattcaaagttgtctgtttaaaatgtggaaaaggtaatatttacaacatttcccatacagtacatagtttttgtgccttaacagaatgctaaatagagaaaaaaaccaaaagcaaatgctaaattgagagaaaatcaaaagcatcagaaaatcttgcccaaagaataatacttaataggaaacaaaattaagaaaactccttaatattttaaagtatgttgtataaaaacgttgtgtcttgtttattaagactaccttttttccatttgattggcactaatatcgctatcacactttttaatgttcagcaaaatcctagtgagctgccgaaatgaattctacaaaatgtctgagaaaggtactgtataatacaaaatgtaatattctaaatgttaaaaaacaaaagttaaaacaaaaaatataagcaactgtaagtggttataatacaatcaatgggtggtcatgaaacattaaaaaagggaagtcaattgcacttggcctaatatacaaaagactaacattttgtctactaaccctttaggacattttattttaaatatgcagaaggatcagtgagcagcataatacaatcaatagtggacactctttgagtaagcaccttatttcagttacataatttagatctgtgaaattcctaaaacgagactataaaaatcacacattttagatggtaaggtatcaataagtgggtttttaaagttaaattcctattataagactttttggtatatctttttttacagtataaaagaagactattttacaattttcttagaaattcagtgtaaaagctaccaaagtgctaaaatatcacaatagcatgataaaaatacttgaataggatttcaaaaaagttcaaatacatataagcttattttcaaatatgtataaaaagatacaaggataagat

SEQ ID NO: 337439 - DNA, 438 bp, Homo Sapiens; identical to SEQ ID NO: 158192

SEQ ID NO: 337440 - DNA, 374 bp, Homo Sapiens
tgggcggccctgaaaagggcctttggttgaaaatgaaaataagagtgcagcaagcaggagccttagccaccgaagccgtaaagagtgcgtccctgtcgcttcagcgcgtagaccacatccattgctgtcacggtcttgcgtttggcgtgctctgtgtaagtgacagcgtcacgaatcacgttctccaggaacaccttcagaacaccacgagtctcctcatagataaggccagaaattcgcttgacaccgccgcgacgagcaaggcgccggatagctggcttagtgatgccctggatgttatcgcgcaaaaccttgcgatgacgcttagctcctcccttacccaaaccttttccacctttaccacggccagacat

SEQ ID NO: 337441 - DNA, 1000 bp, Homo Sapiens
gcagtggaaaaaagtgactttatgatgaaagagtgcagacaacagcttagcactttaccgaccttcgccaagattttttggggcccatctgcccgtgcacggcccatctgtgacctctccatgggcttagtgaggtgtaggcacaaagccctaggctggcagccctaactagctggaacctgactctccctggaactgcttccttgccatggaggactcacatgatctcagagggcctctggttttataagcgttttttctggccccttctacccctcagggattccaagggaagcggggtgtgtgcttgggagggttgactgtaaactgaatagagcaagagtgggacagagtagttccaggactggaaaagtggcagcagggaaaagaagaggcagtggcaggggccctggctttatactgcttctttaggcccaggcctgggctcctggcaggtggggccagcccagccccagtaacagtggcagctgaaggacttccaatctccaaggctgccgtctggccacaggtgtagaaaggcttccatctgtcctggatctcgccgggcacagcgcccgtggccatggcaccgctggtgactgcaggccatcgctgccctggtcacattgatcacataggggcccaaggtgtccaccaggtagtcatggagatgccagcactcctcctcagagctggagaggctcaggtccccccagagcaccacgccggctgcccctagtgctgcactcacaccaatggactgcacaaggtcatcctgggacaggaacctcccagatctccggtgtgtgaggcggacataggccaggacaggcaggggatgtcggtgcccaacaagggccacacggaaggcctcctccaggcgatgtcggacaaaggcctggtggtgggcaggtggcagcctgggtgggaggtagatgctggggaagagggcactggaggcggcccagagccaatgcagttgagtgttgcgggcaagggt

SEQ ID NO: 337442 - DNA, 1000 bp, Homo Sapiens
ttttttttttttttttttacttacacctttctattttttattttttacatcaaacaggtaatgtgatgatgctgtaacaaggtttgagggaagcatatctgacacatgagcatgaaaccaaatcaccatgcttatggactacaaaaggacctaagccttttaaactagactgtctcaactgtgcattaattatgtatttagatataggatatgtgcttgggaaaatgtataactaaactttatgtcttacttctcaaacttaagaaaaacaaaaacatctagcaacatcttacatgagttttccattacctagtgttacatcattgttaaaatcatactctaagcctatattttaccttaatgttatctgcttcatagaatagttattcctttaacacttatttttaagaaataaatttattttacttgtagttacttaaaccctagaaataattttttcaaacagtagaagtacagccttttataataagatagttcatgatttgttctttcgaggattttttttttaataaggttcttctacaattggatggtgacaaagtttgggtttgttaggattatttttcagcagccaatcagctagccaaatcaaaggatctgctggtttttgcttacaaagctctgtgagtccttcaagcagagttggcattatatgtaaatttaaatagtccttagcagcttgtccaattggaatgggctcaacaatcacttcaggaaacataaaacgtatttctctttccgcagcagcaaagtcattactcccatgaagtgcattccttaggtcatctgtgccataaattgccctcagactgtctggatgtgtctccttcgctactaagctattatttggtcccaaaagttctaaccaataagagatggctttatgtctagctaatatcatggcgacaagtggtccagaactcatgtaagctgttaagttggggaaaaacatttttccatacttttccacataaaagtt

SEQ ID NO: 337443 - DNA, 1000 bp, Homo Sapiens
taaataactcattaaagtttattacattaaaaccatatatcacttttatattgtatttgccatttctgaacaatacaaagtagaggcaaatagtaacacttaataaaaatgttgcttccccattcctttccctaagacccagccctccctcaaatattccctcccacccctaacagaactctgtccttaataaaacacttaaatacatcataaatagtaaattatgaaaaaaaaatagcaagaattctttccttcttgtaaaaaacatggcagcaaagacaggcagccagaaactggctgggggtgtctaatatagacagttatttggggtatgggctaacatattatcaaggcagggtgggatagagaagggatagaacaggaattcaacaatctgcctgagataccaggcccccttcttcccctgacaagagtggaaggatcagatggaaaaccacaactcttgtagacggggaggagagggcatatgtagcccccatttccaacttccctgcatgaagacaggggggtaggacatatggcacagcaatgacctcaccaaggcaagaatctgctgtctccccatgagtttaagaaaatatttgctggcctcacagatatggactgtctgttaaacagacagaagtgtcccctctttaccttagctccacaaacaggagaacactgttggaaaagatgagaagagcaaaaaaaatctcctctggagaatgatctaaaattcatttggtaagtcttcacatttagaaaaacaaccagaatatatttcaaattgcaaaatagtaataattactatagcctggcagtgaacaggattctgcctaggaagggctatgatctcccagcccatggctgcctcctgttttaacaaaagggataaagattaccccatgtcccactctcttcattccttcagccttaagaaattcatcaagagaggaggagtttaaagaggagctgcttctggcagagcaatcactac

SEQ ID NO: 337444 - DNA, 1000 bp, Homo Sapiens
tttttttttttttttttttttttttcattactgagaggacgctttatttccttgtgcaaaagagcatttcaagtcaaggtagtcagtcacacttgggcgagtccggctcacataggaactgggggtagaagaggtactttaagttgtactcagtttgggctaagcagttagcaatctcctggtcacacttgcacaacagttcttggcatttgttctctgccggtccgcacaggacgctctgattgacgcactgccaggagtagcgctctgtcttggggctgcagccggcctcctcagctcgagtgtaacaacagtcgtggccatggcagcaccagtcaatggcatcgcggggctggccatggcctcccaagccacaaaagcaaccatatttcatataggcgatgggggttcggggaccaacacaacccacagttcctgccagttccaggatcccacgccggtgcacacgtaatatcctggaggcctcgccggacccggggccaggtagaagcagcagcagcagcagcgacggcagtagcaggagcagcatgattggcaggcacacaggtagcggccccatcggagggtggcagaggtgggacggtgctgcagggccaccggaggcaccaagcccggcggacacacaccccggctgtcacgccccggctccgcccccgacctcaccttccctcgcggcccaagcagagccagctaggggcgggcacctggggcggcgcaaaggcgtcctgatctctgtatcttggtcactgaaggggctccagaggccgcggggcgctggggacaggaccgggagtcaggcccagggaagtctcctcggaataagggaggaaaaggcgctcttttgatgttattactcccccagcccctcccccgctcacctgggcgcccaaagggaacagaagacttggaggaggggtagtcctgaatttgctttaacattttattttatttggccgggcgcggtgactcacgcctgtaa

SEQ ID NO: 337445 - DNA, 1000 bp, Homo Sapiens; identical to SEQ ID NO: 158195

SEQ ID NO: 337446 - DNA, 1000 bp, Homo Sapiens; identical to SEQ ID NO: 158196

SEQ ID NO: 337447 - DNA, 1000 bp, Homo Sapiens
tttttttttaacttcacaaagagaatatttaatataattaatgtgctattgtgcaacaaaaacagcaacaagtgataatatcatccatgtacatttttgtacattaaatttaggagaaagaagtaagctatggaattgcattcttcatttgtgaataatgaaattatattaaaaaaatacattgctattttctgtccaaagtttatttacatttcattggctaattctaaacttggcatgaaagctattccaggggctaaatgggaaaaaagtaatgaaagatgataagcccaagtctcacaaaaatagaagagttttacttgatatccataacattccaaaatatactaattcctatttggtctagtattgcaaccagtgtccaaaccaaatagtagtccaagacctctattaagtacatttattaaaaatctaatgttagtgtaatattactctgaagttgtgataacccattatccttgcaagtcattgaaacatgcatcacagacacgaacaggcttcttggaggaaggagttaaggcatttttggctgaacattcagcacagaagatatttccacactgtcggcagtgatgccgtctcactgttactgaaaagcctttcccacaggccatacagttttgtacttcattgtcttcggcccactttctattcaacgcttgtgtatgtttgatctgaagtgattggttttctctgcccagctcctgcactgctgcagttgtattatccagctttctttgcaattctaatactttggtttgaagcttttctatttcaccttctcctttaagacatctttccagtagtgctctcctttcatcttgattattctgaaccgttgcttctaatactgcaatttcaccccgtaagtcatccgtttgtttctcaagctcactaactctccgttgactagattgccactccttcttcacagtgcctaagttttcatttaatgctgtaatctgcatggtaagtttag

SEQ ID NO: 337448 - DNA, 1000 bp, Homo Sapiens
ttttttttttttttttcacaaaaagatgtattttcattcatgagtatttacatttttcatatttgtttaaagaatatcatataactgataccttctgaaatgtttcatgcttttaaactcttctatttacacttatctgacatggaattaaaactaaaatggtcaaataccatgataatagaaagcaaccagccaacatagctaggtcttctcttaaatttgctgatcaacattagcagtagttaccttaataataaattattcattttaaaatcagtagtaactttagacaattcataaataagtgtgctctgtgcaatttacacgtttaatatcctgtggatactaaaagcttgtatattgtcagatttgcacattattactttatcaaaaacagtaagctttcccaaagatgaagctggggaaacttgaaaagatattctaaaggttctctggagagttatcaaagctctgcctgctttacaggaggaggttccaatttacgcgagagggcagttaaaatctggttgaatttctcatatctctctgtctgattgacttgtgcacctttgctgccccatagcaatcgcatttgaaattcagtcttgcagatttcattcatttcttcatctggttgaaaacctgccaggatcctctcagcattcatccggtagctgtctgcagcctcggccatgaatcgcgctgttgccaaatggttcagcatgatttcacagctctggtcgtttttttcccacatgtcggttccttcaaaagtcacagcctggcgctccattaacgtcacaagcggcatcagcagtgggactgatacattgtttgggggaacacatgtggactctctgccttcatgcaggagtttgctgaagggcttcagctgtttctcatagagaatggcagtttgggtgtactggtgccgcagagcagtccacgtcttttctaaccttgtgatctgtggcatttccagggctttcatgagagctga

SEQ ID NO: 337449 - DNA, 1000 bp, Homo Sapiens
tgttcatactcttcttccaaattatgttaaacatttttagtaactacactctcccccgtaaacatcagacttaaatagaccatatgtaaaaacaacctatccttagtaattttactaggcaatctacagcaaaagcttattatatacacagaaagagtatcaaattaactagaaaagtgttcaccgacttcagggtaaaaaagatcttaaaggaaatccaacaaaaaaatgaaagacactttgtgctgttgtgaaccagaaaaatacaacccatgtattggaccttaattattttacattattggagaatattttcccctggtggaagcaaatcaaaaattaaattttggggagttttaacttgaagtaacacacatcttggtgtgttcacgtggcagggagatcccaacagaatacacacaccttaaatttccgaattccccaaactaagtcaagcagggtaaataaattataaatgaaaggcatatgcaatgtggcccaaaacttaacaactattaaattgaagaccaagggagttatgtcagcagtgacatttagaaaatctttcagtattagaaaatatcagatttaatccaaaggaacccgcccaacccccccaataaaaataacaaagtatgggaaccatcctttatacaatagctttaaaataataattaaaaaaacatgattacaggaatcttcctacataatttagacaatgtagtgcgacagtgtgctcctttataacttcagtggttcaatccccatatgatgagactgataatcgcaactccaatgacaaggataagaatgatgatgcacagggtttttctggatttgcgctgataatctgctgcccttgacagctgctgatttgcttgctgaacgtgcacctctgcattttccacattggcttctatgctatctattacatctccttgttcatgaatcatcattcccaaatctttaaatatttcattaatatccataatatcagctt

SEQ ID NO: 337450 - DNA, 1000 bp, Homo Sapiens; identical to SEQ ID NO: 158198

SEQ ID NO: 337451 - DNA, 1000 bp, Homo Sapiens
ataaaaaactcttgctttaatcattaaatcttaaaggaccattagaaaaggccagtcacattctgttctccagtcttgtaggttacataagccatttccataaattctatagccttcttcttagagtaacacacactcttgtttaggaatgttcatgttggttttgttcacggactgagattgttagtgggcaggagtttacttcttctcaattttctgggagataaagggggaaagcagtcttcaaaaatttaagaccaaaaatcttaaagacatttcacaaataatagtactccatgtaaagtggaatcaaaggcatcacaaaattgccatacttactgtttgtgaggagtcaatatttgacttggaccaggacacaaactatgtccttcatatggtagatcactaggatcagaccatctagatcccactttctctgctacttcagctgtgtagacttgagctaattgaacctgtctaaacccgtctcccctattccataggatggagataagtatttcacaagttatcaatgatgatgaaatgagctgacgtaaaactaagtaataagcatgttgaaaacgacattatacttgaaaaccaccttttgctttgagaaatacatgatggacaaaataaatttctcaggtaggtaggtacactgggtgtcagcaaaatggcaattaatactgaagcccacatttctcaaatcgcctttttgcgatgacagctcatttattcacaagtcaaaaatctttagtggtattccagcaatcctaacttgacaagcaaagcttttatgcaattttttttaagcaatacctaacagtgactcctgcagtttaaagaaaaataagtattttaagttcccctgtattgctgaagtcaagtcttaattaaatctacttcatatctgcctttggcatttaaaaacctacataaagcaactgtctggccgatgattggagcttgaaaaaaactaccatgccagatctccacc

SEQ ID NO: 337452 - DNA, 1000 bp, Homo Sapiens; identical to SEQ ID NO: 158200

SEQ ID NO: 337453 - DNA, 1000 bp, Homo Sapiens
tttttttttttttttttttctaaagaaattatctcctaagtagattttaatataaattttgaacagttatagaaaataaagatggcctttgggtcaataacagaacataacaaaaacactaaaaatttctgtacataaacacacgcatatcacaagtctagtcagaaagaaatacatagaaaaacaagatagaattttaaaaataatttgcaagggaagttctcaatgcttcagttctaaaatattgtcttcttttagaaaaatttaagactggaataacagattgtttttcctgcaatgctgtaattactgcaaatttatcagcaaagaggtaaacagcaatgcaatttttccttaagcttgaatacataagggaacaataaagaaacctgattagacctgaactaattaaaagtcacaccagtaattttcaggccagctctggtctccaggtagaattccaggacaggtttgtatcactgggtccattcccaacaggctggataggagagtctggagtaattataaggataccaccttcttctatcctgggctgcccgactggcattgggcttcacattccaagaatacctcctgtgtgaatagtcctctccagggggaccaggaggagggagatggtgtctctggtaaacatgtggattctctgaaaattttctgactgattgttgcaaactttgggtctgggtgtggaaatgtcgaggagctgagtgaccctggatctgatgtagattatacctaggtccttgtttaacaggcttattgtggactggttgcatgagatgtgctgagtcttcaaaatcacttgacctgggtacactggaattccaattctttctgataggaccattctgaaggtcttcaatgtagttttgtctttctaagcaatgtccccggcacctattgaataattcaattgcatcatctggcctcacgccttctacatcaatcaaatatctgcaaatgaggtagccagtcctgt

SEQ ID NO: 337454 - DNA, 1000 bp, Homo Sapiens
cggctgactagatgggaactccctgagggcaggccctgtgtctcattcacccccagggcttgtggaatcattgagtgaagcatgtgccaatttacccatcatcaggagcctccgggaactctggcagactttcggccggcaggcccgcttcttccatctgtccagcagcgaaggagatgagggatgcagttaggctttcttgggctggagcagccagtcttcaaggtcccatcctccacctgtctgtctgctcaccacctccctcctctgttcccactgtccgccaaggcgcccccacactcctgtcctctcagccggggctggccctctagaagggtctttgctcccagatgggcgtgtccccttcccctgggcaggtgctgaggtctctttccaccaccggcctcttgggccccagagagctgagagccccccaccccagctccttgccctccccgtcccagagtggctgagccctccacatcctccgagcggggactgcagtggctctgtgtccaagcaggggttctggatctcccccagtgtgggggccacaggccttggtggctgctggggaagcccggggccggccgtgctgggcgcaggtggcggcaggggtagcagtggcgggtgggcgtcagtcgctgagcacagcccctgggagctcgctggtgagcgtgtgccagcgctcgatgcgcttgtccttgttcttcaggcagtcaaaccagtgcttcaggcgctcccccttggcgtggatgcccagaaccacaccaccaatgaaatcgttggattttccaatgtcgtaatcccaaacggtgacctccagggacttcttggccaggtccccatgcttgatctcgtaacagaactcctcattaaactccgggttcagggtttttttcttcaccgctgtcttatgtttggatttcttgtccacatctggcctcaggtatgttttcacgtaggggtccgagtagccgttggcgtccatggcggccag

SEQ ID NO: 337455 - DNA, 1000 bp, Homo Sapiens
ttttttttttttttttaattacactgcttcatttggtcatcggtagtaaaaaaggagtcaaataatattgaatcaacaggttagtttatccactggctactgcatatgacaccaaatgctgcaaggccaacattctatgcaatatagttgtactggtttggattttctttatctctttccatgtagtcccggtcaattaaagattctattctcttcttaagatcagcaggctttactggaaatttcaactggttgtacacttctgaaacaaggagattgtggctaagtgtctttctcatcttcataattcgaacaattgcagcatcaatttgatactgtctgtcttgaaatactctttctgtagtgcttgcttgttcttcaaccgtttctttcatctggatttgattgatctttatcctgaaaagtttatgtttgaaatcatcattacaaatgaacttgtcaccatcttcaatgtctttgccctttggatttttcgccagaactctagctttgccacaggctaatgactgcagtgttctccttaactctccatcctctattccagttgcctgcttgatctcttctaaactgaactcctctccctcattaaacattagcagcaccagtgtttgaaaaagagagacctggagttcctttttaccctctttaaattctgcttttaacacacagtgtcctatggttgactgccactgaagtttcctgccactatgtttgcctaggtaaaatgtcttgaaaatctcctgaagttttaccatctctggtggtaaatgaacttccataggcacatatgtcggccaatagcccattgtcaggatattcacagttaactcaatatttcccggaacattctgattctgcatatactgtttgaactgaatcatgatgtctttagaaagttccatgtctttaaacattccttcaagtttgctggtgaaagcagctccgcattcatgtttaagtttggacagcattgattttt

SEQ ID NO: 337456 - DNA, 1000 bp, Homo Sapiens
ctgagactgagaattttaattttcccacattgcaataaatcttgtatgcaataaagtttattagttgaactgtcctgttattaaaatcttgaaatttgacaatttcattgttactaaaaaatacacgtttactttgagctgctcatgtataattttaaagctatttttgcatggctcactcgaggtcaacttagaccctaaaactgagcatcaaattacttaaatgacacgcttacaaatttgccatttctaaaattaaatgcacgggtttcaagacatcctagttgtttttctcctgagagctagcgtaatggccaatctctgtatcattacctgttaaatttatctgccattcttaacgtctcttcttccttctggctaatttgacataggaaaggcacacaaaggaaaacattttgtaaaactgtagatttgaatttaaggtacatgcctatctgtggtacccacttaagtatgtaaaactttctctaagattgtaggagacaaagcgcctattttcttttcaatggacacattccagaatagcagcaatcaccttccctgttttccttcctaccaaaagttggtatcagcaaataatgtaaagctaacaaaaatgtgcaaaattccatattgcaatgcttcatgtattaactttagtttgtcacattactattcatgtgaatgaggtacaaaataaatgaaaattttttaatatggaaaatcatgtcaatttgtaacatggaatatggataggattaaacctaggtccaactcctggctctgccatttcctgctagcaaccttggacaacactggtataatgacagttatgtcacataaagccaatatgacaactaaatgaatgaatatacataaaatattcagaatagtatctggcatatgataagcacttaaatgttaacatttctaattatttctgctttgaggactagaaatgacttctaattttgctgacctgaaatgttttaacattcgt

SEQ ID NO: 337457 - DNA, 1000 bp, Homo Sapiens
ttttttttttttttttttaaatttgcacaatcattatatcttttatttacatatagaaattagtaaaacttaaaacaaaacccaatgcgacttgtacagaaatcctttaattttctttattttcacacattaaaaaatgaaacacactatacaaatggttttcatagcaggttacatgtgggtccactcagacttgctctcaaagtgctgccaacgtgacaagtgctgccaagacgacagctgcgaatcggggagcccatgtattgacttagtgcggtagcatgcagccctcggcacggagggtcagtccccgctgttcttaaattagggtaaatggcgttggtgtccgtatttacagacttgaaatgtatcaatcctgagcagttccgatgtaaatccgagaccagctgatgggagtcttggtctcagtttttaaaagggaggtccaatggcggcaggctggctgctatgaacttgagttgttttcattctttccaacatgaactatttgctgcgggtcacacagtcagacccttccagaagggttaagccaagtaactgtaggtgtccttttcaccatccactcgctccaaatattctttctcaattagaatgtcaatgcatttcttgatcacagggactcgaggtttgaacctggaggacagctgagtgaggacctcgccaagtaactgctggtgtttcagaaccttcctcatcttcatgattctcacgatggccgcctgaatcagtagtttgcggtcttcctcgatgtttttgtgtgtggtttcttgttcctgcttctgttcggttttcattggcacattgatgttaacccttaatttcttatttttataaccaagatataattttattaaggtatctggcttcaattccacctcatcaacatttgcattttcatcttccaagaccaatagcttcgactttaataaaatctgtaaaacttgcgccaaaatgtccattttaatttgagtgctgtcgg

SEQ ID NO: 337458 - DNA, 1000 bp, Homo Sapiens
ttttttttctgctacactgtcaaacacattatttattagattgtatcaatactactgttagtattattagtattggattgtaccaatagtattattagtattggattgtaccaatagtattattagtattggattggattagtattggactggattagtatttattagattgtaccaaatactaaatgaaacaatgatactaaatgctacaaatactgcaaatttgtaaaaatacaaatactattaaaaatgacacaaatattatacaaatactacaaatagaaatgttataatagaaatactaaacgatacaatgaaccaaatgatacaaatattaaactgtatggtgataaccaatattaaatgactgagtgatatacaacactaaatggtacagtgatacaaatactaaatgatacactgacactaaacaatacaatgataacagatactcagcatctgttcatgtacaaagcatctccttgatcttcagcctgagaggaagaactgcctgcactgagagaactgcagagatggctggctgcagggtggctgcagggattgactctctgctccacccataaaaagatggttacaggtgcaacatcactggcaagaagagatgaagagataggatggagcctgtgttagagaaggtagtaactggttctcccatcatcagctaagaagagaaaggcaacacagaactttttgagcttttttttcctttttttgagacagggtctcactgtattgcccaggctggaaaacagtggcacaatcacagctcactgcagcctcaacctcctggactcaagggatcctcctgcctcagcctcccaagtagctaggactacaggtgtgcactaccacgcctagctcatttttttattcttcatagagatggggtcttactatgttgcccaggctggtcttgaactactggcttcaagccatcctcctgccttggcctcccaaagtgtcgggattacaggcatga

SEQ ID NO: 337459 - DNA, 1000 bp, Homo Sapiens; identical to SEQ ID NO: 335786

SEQ ID NO: 337460 - DNA, 1000 bp, Homo Sapiens
ttttttttttttttttgcttcacattgaaagcttttattttgaaaaataaaatacaaaagtcattaggttgtaaatgtataatggtaatttcccaacttctcagaaacaatacaatgaattaaataattaggatatttaatattattcacatcaatacacttaaacaggcacacgtgttctacaaaacattagaacatgtacagacaacctatttcaaaaggagactgcccaagtctgcttacaggatcccatttttaaaccctctccttgaaaacaaacgtcataatgtaagaaaagagaacaagaggagttttaacaggaaacacatgttccttctgggctccttactgcagggctgtgcatgaaatcgggatcaagagctctttgctcaggaggcagatccctcacgaggcccaaagctgtgcggacacctccatcctctcagtgggaggaaactggcaaatgcacaggcggcgcagccaaggtgcagacgctccaccaagcttggcaggggacagccaatcctaggaatttcccttctgctgaaaaggcagcaatctttcctcatgtatggaagaggctcctggttctgctactccacttgctcagtctgtggtttttctttaagaaagtcaggtagttggaattctcccttatagacccttcgagtgttttcaataattttgggatcaggttttccgtagttaggtgggttggcatatgggtcatatccaagcttggcaagcataggagcaatcactgccatgtcttgtaaaacatctggcggtatcttcccaacccattttgatagagctcctacattgactggcttgattacttggtctgtagatctctccacttttgacagagacactcccccagctttcccaatcatctcttcatggtgcaatactgagtggttccatggaatctggaggaactttaagagtgttctcatccaccgttcaggatgtaagacaagttgttcatagtgaacca

SEQ ID NO: 337461 - DNA, 1000 bp, Homo Sapiens
tttttttttttttttttttttcaatgtaaaatcaagttttatatgattcaaagagaaaagttacattacacatgctcgtttaaataatgtcaaagtctgttacataaaacataattatgaaacattttaagtcttatcattcaaactacttaaaaggctcaaagtcacaaaagatcaagcaaaactgcccaggcaataaagtgcacgaggggagcccacctctccagcggccgtcagcacccagagccgccagctgagggctccatgccgaatccatacacaaggtttgtggttctcagaagagttttcagacaggaactgtttccaacttaaaatctttcaacagacaaatggaggtggaagggggatggtttacacaaagtatttccaaatgtaatcaggaaatggaagtgtaaattaaaaccgttttcaacatgtatctcctctttagaaatatcactgcttggagaatgttgtgacaagcaaccaaatactcaaaagaccttatccaccagaatactggcaggactcacattactttgcatgtcataattaagaaaaatatccaaatttgatgccatttatagtgtgtacagtcaaaaatgtgtatgctgattttgatgagcaggagaaaggactgggtggtgaggaaacatgaactatgcacaacatgagacaactgtgctgtctcacgaagacacgacactcacctatggagtgtccagactgaaaacctctgaataacacacacatttgtgtcaagtaacagctgatactaaggggcaagttaacaggtatcaagtcacacacaatgaatgaccaggtggagattttatcagactacaaagaacaaaacacaaaacctaattttattcaatattccaccttaccatcatttaaataaaggtaaatgctggtaattaacatagacaaaatttaaatacatactgcacaataaaaaaaattcccaggctaccaaattagtgcaacattctgtatg

SEQ ID NO: 337462 - DNA, 1000 bp, Homo Sapiens
tttttttttttttttttttttttttttttttttttttttttttttttttttttttttttttggtaaaatagctttatcctctgtcagaacacaaacaaacaaactttgagaggggaggaaggaaaccgtctagctcagggctcacttaggagagggatgagattagaaagttcaacacactgcttgtgcagcggagataaagtcaagaccctagcacccacttataaatatctcgttatattaaaaaaaaaaaaaatgtccagggcccacctggctctgctcctgcacagaaagggttcatcttcactttgtgatctcacaggtcatggagtgagggtggtagagaggggcagaaatttcagggggaggggtggctgggaaaaagtaaaggggacaagccaatgtgtaactagcgctctccaagacatgcagaggagtgggggtggcctgtcaggggctgaaaagaaaagccagtgctgtacctggggggttgtctcactcctgtccccacaatccctgatactccggagtgatctgtcctttcagacacccactgtgaggtcccaatatcggggtttatcctttcctcagtcccagcctgttcagctctccaaccaagttttgggggcccctctaatgggggggatggccccagttgcttaggcctctgaggtcaacccctttacatcacagccctctccccaaataagaagcatgaggtgagctggaggaccctccctgggaggagggtgttctggggggtgagccagttttggggtcccccttcagtccctgaccaggcggtaaatgtgatgctgggccccacgctcgctggtggagacctcgaagacataggcggtgcagagcagcagttcctgggtgtctctgtttgtcaccacctggaggatggtgaagttttccaggacgctgttcatcatgtatcgctcaggcagctgccgcaacttgtgcaagaaattcaccaggtactcgcacatgggcg

SEQ ID NO: 337463 - DNA, 1000 bp, Homo Sapiens; identical to SEQ ID NO: 158205

SEQ ID NO: 337464 - DNA, 1000 bp, Homo Sapiens
aaaatcacactcatccaaattaactcgcctcctcttgctttaaaggttgtaatcactgtgcatattacaacatgtatgtgcaggcaaacaatagctaaagtacagttacagttgtcatattgtgtaaaccaagacactaggcaaacttgtgaaaagaatacacactgccaagcgaagaatatgaaaatgcaaaccacagcattccccaataaacaattttctggtcgtcttgggggagaacatcgcctggggggagatgttgaaatggagccacgaggctggacagcctcctggagacactttttttttttttttttgcctcaaatatttgaccatttttaaatatcatgatttttttctttctgatcccacattttgacgtgtcaaagcttagagcaggaagtaggaatccacactttcacggagggggaccagcctgccatgtcgtccccaggctcacagcagcggcggctactctgctggtggtttggtggcaggtggagatggtgacggcgcattggaaaccgtaaggcatgacaacgggaggcccgcggggtgtttcaggcgcgttgacgcaggtgcatggctggcaggcggcctctacagaaggagggagcgcaattcacagcctcttgacgtagtttccggggaaagtaccaaagaatttggttcttcttgaggtccccacaaaccagccgtcatcacacttttccatgacatcaatgacatcactttctctgagctccagctcatcttcattcctgggagtatagttatacagagcctgaaacggttcccccccaccttgaatattttcatgagtaaacacaggacgctgtggcttatttgagctcaagctgtgaatcctatcactagaatagctgtggggtattggagggtcagggtagtcctcagcaccttttgtgttcttcttgacgacctccacataggaaacagggaagatgccttgtctgttggttcctgggattttaccttcata

SEQ ID NO: 337465 - DNA, 1000 bp, Homo Sapiens; identical to SEQ ID NO: 158207

SEQ ID NO: 337466 - DNA, 1000 bp, Homo Sapiens
tttaaatgtcaaagctgttacatgaaaattcccgattataggtgcttacaatggaatccccagcaggatcctttcttccctcactgcatctcagaaccttctccacacagcagcatcacctggaaacagcctcagctccctgcacatgccgcaggccagcatggtggccacctcagtgacacgcaggtcacctcagtgacacagacgtggagtcacagacagcagcagtgaaatgatggccttaaacactgcaactcaggttagcaactgcaggaaaactttcttcattttcactgaattttaaagagagaatcctgtctctatttctcagagaaacttaggtgaaaagtaaaagagaggcaaaatctctttccttcatgagatacttttatttttatctctttctctactcatgtgcttaactggtgaaatgattctgtagaaatagatccttctgattctgcatctcatttccttatggcaactacaacaggaggaatccagctggaaatgccactaaccccacaatccagcacctgagagaggaagccagtcggagcgccgtgctgggctcactcactctggcctgcgcactggggttgtcacatccattttccactggctatggggaataatatttggttaaggctgttgaagcccttgcttttgaggttttacattatttggtaatgaaagccgttttttcttccttccccaggcttatgtgaagaagcccacgcccactctcaacaaaacagactcctccttgggaagcatctccagccctgggacagacacctcgctgtgacttagggagggacaggattagcccaggaataaaagcatttttagaaattgttttctgcaccttcagaagctacaacactccttgtaacctttcagatggaagggatcagaggtgacagaatcgtgtatttctacatttatctgcggaagataaaatacaataaaaagtgagaagtgttcaaattccaccact

SEQ ID NO: 337467 - DNA, 1000 bp, Homo Sapiens
tttttttttgaggtgattaaaaacactcctttattgagtcttaaaaaataaacaccttaaagggacagcgtgaagctgagaagtagcatcccaacagcttgtgtccttgggagctgcagtcttctctgaaggaagctgcttctgttccacagacacagggcaaggggtgctatgtatgctttgtacatgtatcaagggtccctcctgggggtggcagagctcagttactctcgccatcactgctgatgatgccacgcatatgtgaccagtctgggggtgcgggacggggccgctcttcatctgagtccagggtccgtcggtacagctcccctgggggtgctgcttctcctaaagggttccaggctgtacgtctgcgtggccggcccgagccactgatgatgttcgcaacatccaaggaggccacctcagctgcctcctccctctgctccttcagggcccgacacttccctagggaaggggtacccttcatgcctagcgcttccagttctgcccggaggatactcaggcgctccttgtgtgagcaacaggagcccaacagcttcttgtagtttcgatgggcaccacaggcccgaatgtagcgcttcagcctcatcacagccgggtggtcctctccacggcgacctgagccagccttccctcctttggcctctggacttccatctgaggaggaagaggagcttcgtgtcctgcctttcctggagctcttcttggaagagcggttcttcctctccccctgggggcctccccctgcctcgctgtcacttacctccctctccaagtcactttcctcaccactggtgctgcccagtctggccatctttctagagcctttagctgtgggttcccccttcccactgtcttcctcgtcctcgctgcttccactcaacctcttcccacccttaagctgggtcctgtcctcactcttcctctgcactgggggttctctatctctcccactgtcatccccactgctggctgc

SEQ ID NO: 337468 - DNA, 1000 bp, Homo Sapiens; identical to SEQ ID NO: 158208

SEQ ID NO: 337469 - DNA, 1000 bp, Homo Sapiens; identical to SEQ ID NO: 158209

SEQ ID NO: 337470 - DNA, 1000 bp, Homo Sapiens
ggcagtcggaagtagctatacatgaaataagcctaacataaaaatagagctttttccgtccttccgtccggaaagcaaacatccttcaataaacatgcaaggcggctgtcctgtgggacccaggaccagagagggagctgcagaggacagggctggacagagggtagccctgggtcttcaggaacaccagccacccagccatgagagagggaggggaaggaggcaatgtgggtaccaagagtccagaaggactcaggcctcagccccagggtcgagatggagtcccagctctcctatccaaacccactccccgacccatgggctcttgggctgggagcatcgctgcatttagtcaagtttgagggagtctgaaaaatattttccagaagataaagtcttgggtcatcgatgccccagcttcacagtcggtgccctcattctcagcccctcaccatccgtgcgcacctggggcccagcagccgcctgcggctggacgtctccaggcctggcatcctccactgggttattctgtcccctggaagaagtggcaggcaaggagctcccgggccagccggctctgagtgtgagacgttctagtgccctgggctgcagaagcctgaggcatgcccagcctcgggaggccctagtggaccagcaagccaagagtgagtgtgggcagcacccccagccagagggaggcggccagggcacaggcatgacccagcaggtgctcggccatgatgccgtcctcgggcagcagctgccagtgctgagcctcgcggaagtaggagccctcctgggcctcgcagaagtagtggccgtactgctgcgccgtgaggttctcgatgaacaggatgcagttggggctctggtgaccaggttcgcagctctgctccacgttctccttgtggcgccatgagtaggtggcgtggcgggattccatggggcagctcaggtagtagcgagagtttggggccagggaaaccttctgcagtggggc

SEQ ID NO: 337471 - DNA, 1000 bp, Homo Sapiens
ttttttcgaaatacagagtatgcatttattgacatctgccctgggctacactgggtttctagcaagaacaaaagcgaatgcaaagggaaatgtacaaatacagttagcaacctggtgtaattgtggataccaggagatgttctttccagacttggtagaggaactatgatcaccctatatttaatagcttaactttgaatgtgcactagaattccaaatttagcaaagaaataaataagttatttacattcaagtaaaagtattgtgttttatttctttatttcaccaccatttatatgtatgaactatgatcaaggcttgcctatgtcctgtggagcaaggccaagaaatatgctttatattggttatttgatcttcagcatcagattatcactattgcagaggtgggcaaaaccatgcaaaaagaagaggaagtatatttgcattaatggcattaaatgaagtacagttgaagctgcagagttttaccagtggccaatttcttgtgtttcatttaaagaacagtttcacaaaggggctttattgtgccattgtgggggccacgtgccaatcagtagcatgggacaaagtaagtaaaggcatgaagaaacaaacaagcaaattcacgaaaacagaagtgcttaaattaaccaagtgacagtttgtgcatcagtctcacaatggctgtcacatgaaatgagggcagaagagggtgaagtaccacaaaacttagttgatcaggggctgttgagcaactctaggaaatctcagagaggccaccactccaccctggcgctggccacccctgctcgctcgctgctgcctcctcgagggcactcttccttggacagtgcctgcagcaggggactgggctggggtgctttggaggtactggaaggcactctggcggcctacttgcctctctacacagttgaaggtgagggctactcccacattgctcttcatgattctggaggagccatcggatgtgccatcaaag

SEQ ID NO: 337472 - DNA, 1000 bp, Homo Sapiens
ttttttttttttttttttttttttttttaattaagtagacttttattgctcaatcaacttcagtaacatctccaaaaaaatagttttcatctaacaattatgaaacaaatttgaaaggcaggatgattcacaatatagacccagtagaggcttatacttcatataaatgaaaaatatcagttctacaatttaaatgtttactttggattttattatagaagaaaatatcattgtaattataaaagccataaaaattggaactgtattgtgaaattacatcaaggtatcagattttatataaatgaacaataaaattcaatttttatttatttaaacgtagttaaacattggaagacaatctcccccatggggaaagaaaaaaaaaaaccttgaataataaagcaacaaaagccacaacacaaaaactaatcagtgtgcaaaaatctgattaaaaaaacaaaacaaaactggggtttaacaattaagtcaaatgttcaatatgtgctaattaaatttcattttaaaaatgatctttgggatgattacatttccaactatgttttcctataattgacatttaatgttagtttttgaaaagttagaaaagaaaccaatttatatgaagattgccaaattttgcaatttgaacactattttaaactttgaatgtccttaaagtctttaaacttactttctaaaataaataattgttggaataaaccaaaagacatttcacatatttgcactgcatactgataaaaatgatgtgatctacataaataaatttaaaacattaagttatttcatataaacatttttaattacagcgttatatcaatggcttacacagttgaaatctgagcactttaaaacaggattcacatgttaaactgctgagcacatttatagaactgatgtacatcatataatcctttaaacagcaagctctggtgttatacctcagtttcagaaagcatttttctttcaacagaattttgaa

SEQ ID NO: 337473 - DNA, 1000 bp, Homo Sapiens; identical to SEQ ID NO: 158210

SEQ ID NO: 337474 - DNA, 1000 bp, Homo Sapiens
tttttttttttttttttttttttttttttgttaaaaaacatgtttattttacaatatgtacaatcaggaacatattttaaaaccattatcattaaaataaatgaagatcataaatcacaatttagtttgttcttagtgtatatactcacattaaaatataaagaacatataccaaaaagagccaaaagtgtgcattttgctaaaacctggtatatacatattccattggaaaaaagcaatcaaaaatgacttaaaccaaaactaagttcctgtgatgtgtagtaaccattatattgtttgtatgaggtagtaactaaattattttggccatgtattaatactctaagtcaaaagaaatatgaaaaggatcataaaataaggccaacaaaagtaaaaattccaagagaaatttgaaccacttcactctatggaatgttacagttcttcagtgtgatcatatgaaatgtttagtgaggactctttaataatgctaattaattctttgtgcatactgtaattctgaccacaattgcagtattctatcatggtaccgctattctgtgattcaaaaatgttcaaaggtattgtttttaagcaaagacaagcaatcttacaggattctgcttaaatataaaaagaccagttactacaacatgtggttaattataattggtttgcttcacatagaaaacaatccaaatacatttgtggagccaaatgcttatagacaatgtcacagcttacttttgtgacttaatacatcacatatcaatactttgtgcaaatataaacaccagtgtacttgcattaaaattaaaaagattataaaatgattacagcctccattacaattttaaaagttacaagatttatattcatattactaaattacatataataaaaatacaatagtgttaaatgtattgtttcattgccagcatcccattttgtaatatagccacacccaagaatatactaaagaattcttaaaatattaacc

SEQ ID NO: 337475 - DNA, 1000 bp, Homo Sapiens
gcacgctgtaggtagaaagtatttttatcttatggtttctgtagcacttggtactcaacaaggatacttgtttccaaatatcagatcactttgagaatatattgtgacaggcagatgtccttgaggctttactactcctattcaggcctaaaagtttatagtggaattctttaaccactgatttcctcacttgacaaaggctacagagaatatgaagatttcttgtcaagtcttttgaaaagacctaagcataaatatgccactcatgagtgtagtaaagggtaccgcatttatgtcaaatgtgggtatttaatatgatttcagacaccactgattcaattaaaaggggttctcagttcaaatgtaaaaatgatcttttgtaaaatcagcatagaatgattttgagaaataggtaggggatagatgaggcttagaataagtcactccagtgaaattagggtagaaaatgttcatttaaggattatcacttccactacactgaggcctctgaaaatgttcacaaatttctcaaaagcagcagggggtacacaattttttaccacaacacaaagcaaaaacagatcttgccatttgttgtcatctctgctgagtgctaatagtgggggttcaaagttttccatttgtttaaatgctgctttgaagtttccatgaagaattacagtttggtgacactttttatccaaggtacaaaggctgagactttggtataaacaccaggagaatccttgactccacagccatacccccaggaggtcaccccatacaccacccagctctctccgggccgttcacacatgagtggtcctccgctgtctccctggcagctgtccacgcgtttgtgttcatggaggtttccagcacaaagcattctccctgtaaaccgacccttataacgttcttcacaaaaccttttaggaagtaagggaatggctgcttgttgtagtgttcttgaataggctcgtcctgtgtcaccccatcc

SEQ ID NO: 337476 - DNA, 1000 bp, Homo Sapiens; identical to SEQ ID NO: 246438

SEQ ID NO: 337477 - DNA, 1000 bp, Homo Sapiens
ttttttttttttttttgcataaatattgcttttattacaagaaagaagagaccacctctgaagtaaggcacaacacaattccattgtcactgtggcagaagtccctgttgctcatccctttgatctcagccaagactgtggtccacgggcctaaggcacttgagcttttccctcaactgaagtgtagggggtgcctgagagctgagcctcgtgggagtgtccatggtctctggacctgcatcgaagttcatgtgtttccactggtgctgaagatgaacatcaagaattactagacatgtaaaagtgtctttaagtgtctttcctcctgagtccacctttggcaatggtccccaaagcctggccccttagagatgcagctccagatcctggccaccctcagggttcaaagagactggcccaggggtacacaattgctggaatattctctgcgagtcatgcacacgtgcgggggtgaggtgcagttatatggtgacacacacagtgttactgtgagctctcagggtgcacagagggcaggtgacaagggcatcagctaatctgtcccacctggtccagcccatccagttcaggggcatcaagggggctgaggccccggtagccactgtagaccctgtgactatcactgacaccgtcactgggctccattgggcaaatgtagtccgtcgattcatcgaacttcttttttcttatgtttccgaagtgtgaaaatcctagtttccttggccggactttggctgtggtggtcagtggtgtgtaagctggtgaggccattttctctcgcttttcctgttcagcctccggaccaatcaaggcattgaacttggtggtcaggtggcgcctgaggagcgtcttttgtggggggatgttgagaagcatagccagggtgtccccagtgaagcgtggctccaggataatgaggcctccatggactccactccctcgaagattgggtgcatactctgccaggtccacagatcgt

SEQ ID NO: 337478 - DNA, 1000 bp, Homo Sapiens; identical to SEQ ID NO: 158211

SEQ ID NO: 337479 - DNA, 1000 bp, Homo Sapiens; identical to SEQ ID NO: 158212

SEQ ID NO: 337480 - DNA, 1000 bp, Homo Sapiens
ttttttttttttttttttttttttttttctctcacttccctttttatttcctctaagacttgcaagcagcagcaccagagagggaacctgccctcctggccctggaaggggccgacccccaacccctaacccaggacacagctggcacctcaggcccctttccttctgaaaggagggctgtgtctctctcacattcacacatacacagacacatgcatgtgtgcacactcatggcacatgggacctcaggggtagcctgtttgccgatccccccaagaggtaccaggaggcagaccgctagaaggagataagaggcaccctggtctcctccaacccaaggaggaagaaagctcaacccctctaggatagggactgtcttcagtcaatggagcgttgacttagggggcgtttttgaaggttttttttcctcctttttgcagtctttacaaaaatagaacttctcttggtatttataaatctacggccatggctctatgtgcatgttacaggtagaaaagccatatggggcactccttttggttgctcaggccttgattgcctgtcatccaggtcccttggtctgagaagtctatgcggtcacctcagagccgctaagcaccttcagtgggcccatcccattggcggcgtactcctgctggagccgggcacggtaatagaagaggtaggaaggcaacaggaatcccaggagtgagaatagcaggaggcccagattcacccagaagggctctcctttcaggggtcccaccatcgccatgaaaagtggctgctgaagcaaggcgaacacagcactgatgagggactgcaggcctgtcagcgtcccaaagtggttggatgggaacactgcagcatagagactcccacaggctgagtggaagaaacctcgaacaatggtgtgcaggacaaaggtcacaaactggaggtgtaagttgttgatgagacaggtgatgccaaaacccacaagcagcaggttggtcagggt

SEQ ID NO: 337481 - DNA, 1000 bp, Homo Sapiens; identical to SEQ ID NO: 335669

SEQ ID NO: 337482 - DNA, 1000 bp, Homo Sapiens; identical to SEQ ID NO: 158213

SEQ ID NO: 337483 - DNA, 1000 bp, Homo Sapiens
tttttttttttttttttttttttttgtttcccaccagtccaattttatttagattttatgtgctcacatatagacacacttaaagagcatacgtttatatatacatatataaaatatagatgatatgggagtttctgacaaagtgatttattaatgaaaattcattcactatataacctttgaataccagagaaacttcaatatgtacaaatcagcatgaagttcccagttctcaaactttggttatatgaatatgcctcaagcaccacaaaagaaacattagtcctaatttaaaaagaaaaaagtaccaagaaacaaaaaaaatcttcaattctcttgaatctgttttctttacaccacatcaggaaaacctccttttattccacatttcctttcatctcagccagtctccaaaactggtataaaaaaatactgatcagaggaaaaaagacagacaaaccattacagataaaaatgatacctcaaaagtacaatttctggaaattattctatcttaaataaagaaactattttaacctaggaggtttgcattatgcaacacatatgaaaaaaaccctaattattaattttcagaatttaaaaacttaaacaatgcaagcatattaagagttgagtggaaggctcacagggagatttttagcaaaatcagttaaagagattcctggatttcaacttgtttcctggcatcgctggcatctgcgggctgcagaagcaactggtataatatatgggcaggaagaaagagacccgacaggctgagcacaaccttccatgggatttcacaagagatctgatggacaaaagaaataaacatcaaagaatgaaaaactgaaatagaagaaaatagaaacaaaacatatctaagtccacgtgagtcaggatggagggagtttagatgtaccaactgacaactgcacatgtgtggaagagattgcgtccttgactacaaatgtggattatgtacacatttatattaact

SEQ ID NO: 337484 - DNA, 1000 bp, Homo Sapiens
ttttttttttttttttttgccaattgagcttttcttttatatataaacaaataatttaaaaattcgaataatatatagagtttctctagagagacactttgcaacaaaaaatatatataaagaatatgacctcctgggtaaatgaagcagcatctctgagcggaggaaagagggttcctcatgcactggaggggcgaagcctttgggcaggcacaaaggccattgcatatcttggaaaaggttggaggagtagagggctggctagtcagggtatctgcattattttctctacgttgcaggttttttatggctttggctaaagcaagtgaagcagcggaggtactaaggtgctaaactgaggcctcttggtctctgtgtacaaaacaaaaggaggggggcaggggacagccatcaagccctcttgagcctccagctgagtggaagcaaatggaagatcttcagggcaggggggaggctgggggatagggtttagcagcctcctccccccataccctctgcagccctgcactcccacacatctgtccctgctgatagtgtctattggaagggaggcagttaatctcccctacactctgttgttaatccctgacagcagctggaacagagatggcagaaaggacctatgtcaaccccatgaggcttctcctttggggcagataaacagccaggagcctggggaaacagggatgagaagggcattggtttaggcagtgaggctcggccactcccttgggtcccatctgtagctctgcccaccaaacttgatgggggggggatgggggaatatcctctggatgagcagagccagctaagaggagccaaatgtccctgataggatgggggagaggcaggactgggggaatgtcaggagctggaattggtcccagaagcccttctgactcattcagacctggactcctccaggatctggggtaggttctgatcccgggggccaggggctggggctggagttggggct

SEQ ID NO: 337485 - DNA, 1000 bp, Homo Sapiens; identical to SEQ ID NO: 158214

SEQ ID NO: 337486 - DNA, 1000 bp, Homo Sapiens; identical to SEQ ID NO: 158215

SEQ ID NO: 337487 - DNA, 1000 bp, Homo Sapiens
ttttttttttttttttttaatgcacaaggatttttactatgccattatttatggtaacaaaaagatgggaaacaacccaaatgtccatcaatagtgactggttaaatacacatcggtctggctgcaaaatggaatagcatgcagcccaaaaggagagcacccgtgtgcatggtaagagggcagcactcccagggcacagcagcgggcgggtcggtgtccggtgggaggaagagctgccacccagctctgccaggggaagcagttctccctgagagccccaggccccattcttgacttccccagtgccgggtggaggaagagggagggattagcccgaggcaagtggttcgagcagacagaagggaacaaaaagagcagcgagtcaggcctgatcggggccgcatctaccccaaaagaggggaccagcggatcaacagctgaagcgtaaggtgccgcggccagctcctgggtggggctccaggtggcatcccagttgtggccacccagcccttcatcctgggctaggcaggcgggagaggaaagcgcagactgcacggtcccgggcacgtcctcggcaggcagtggccttgcactggccggccctactcaatgcactccatgacatgtatctgcagggtgtccatatcaggggcctgatactggcacttgggacagcagaagtcaggtggctcctcgggggggctcctcctctggctgggcagggccaggggagaggagaggtaggcaggggcggggggcaagggggcctgggagacctcgacatgccgcttcctcatgtcctcgatcctggccgactcctgacagctggccttcagtttgctgtactccctctgcagctgctccagctgctcctgcaggagctccttcttctcggccagcttctcccgggcctgcctctcagcctggaagtccgccttgtagatatccgcctgggccttcagcaccggaacggtctccatcacaatcttgtgctgctcgg

SEQ ID NO: 337488 - DNA, 1000 bp, Homo Sapiens
ttttttttttttttttcaataaacacatttacttctatttccagtctatcagcatgggtccctttacagttatccaaagcaagagcactatatttcaatataagttaccatgcttatttacccatgccaaagagtgattacaaagtacttgcagcctttcaatattgggcacttaattacagcaaacccatgtaagtcaaaaagtagatttctccaaagcaaagtatatcttctttctcttctttttaaaaactcctatgagattgtgaaaatgttcaaacatacagaaaagttgaattttacagtgaatactcctagattgattctatagttaacatcttgctatactgacaaaggcttcttaaattacaattttggctatatcacttctttgaggatcaaaagcagcatttcctgttagtttatgtacagtgctgtagtttaggcatttgtttccctaaacctcatgttgaaatgtgatcaccagtgttggaagtggggcccaatgggaggtgttttggtcacaggggcagatcctacgtgaatcgcttgtgccatcctcgtggtaatgagtgagttttcactctattagttcctttgaaagctggttgttgttatagagacacaaatgggctaagatacacagtaagaaaggtctggttctgatatttaaaacatggaagaatttttaatcagaatgaagtgggcgttttctagactcaccatgaaaataaaatattctcattttgagacagttttttttggtgagggcgtggagaattgaataaagagaagtcagtaaagtaccatgacgaaaaataaatgaagtggcctagacactaacaaaaatatctgagttaaagaaacagtatttggagaacagagaataattcacaaccatgcatgccatacaatgcacactgatcactcacaccaactgtgcatgatactgtttagaaattctaatctgttctagctctaacattgctaactctctagc

SEQ ID NO: 337489 - DNA, 1000 bp, Homo Sapiens
atttcaaaaatacttgtttattgcatggttctctccagattttatgtctaggcttacttttatcataaagtacttcagcaaagaagagaaactggcattcaaacatggccggccaatcattgccaggctaattgcacaagagcttctccaagcaaatatttctcacctattacaaaccccacattgatataggtgccacaaataataaatgggataaaacagaagcccctgtgcaaggggaagtcagtgaggaagagggaaggaaacaagaggcaaggagaccacgcacatcactagtgtttctcttcatatggcaatttaacattgctgttctttgtctttatgaaaaatggggttaggtcaggttccttgtcatcacaagtctcagaaatcatctagaaaacatatattttacacactagtctcacaactagacaacatattcagtacttcagtggtagaatcttcagcttttcacaccttaggcagttcttccaccatctatttctgtttcttcattctcagttcccaagaaggcatagatcaggtcctagataggttagcatttcacatgtctactccatttcatttgcaacaatgacaatgaaaacccagcatgcaatgtggctgaggtgctgggaaccccaaacaatgtgggggaaaaagcagagggcacttcacaccccagacgggacaggtttccattccttactgagggtggaaatactagagtggaggagaagaagccaaaaaaattactcatgtgaagaaaaaagccttgtcagccgggcacaatggctcacgcctgtaatcccagcactttgggatggtgaggtgggcagatcacttgagatcaggagtttgagagcagcctgaccaacatggcaaaaccctgtctctactaaaaatagaaaaattagccaggcgcagtggcaggtgcctgtaatcccagctactcgggaggctgacgcaggagaatcactcaaacccgggaggcaga

SEQ ID NO: 337490 - DNA, 1000 bp, Homo Sapiens; identical to SEQ ID NO: 158216

SEQ ID NO: 337491 - DNA, 1000 bp, Homo Sapiens
gttcatttaatttactaagtattttaaaaaataatgccttccctccaacaagctcagtttgcaaatacaaacagtaggtgcacactgaaaaataataatctctaaatctttttacttgcaaagactcaactgttatttaaaaaagtctccctttacgggtatgcaaatttcctacaaaatttcctcacaatcttcaatcaaattaaagttggattatatcaagtggctgtccattcagtttctttctggaaatgttgagttatcctcctgggaatattcagagtttcagggttttagcacttatggcattatagatgtcctcagtcataggcacatacatttttgctgtgtcatccaagaaatacaaggcatctttgatgacagcagggttaaagccctcctccaccagggtcattttgcggtgtttaaaagttccagtgatctcaatggtgtcctgtattcttagaaaccggggccttgcataactaggtaggtaatcagcaatgtgctgaaagagtttctttccatcaaattcatggttttctttcattttgatggaggccatgccaatgcgaccctcatgatctggcacatgcactccataaacatttacttcttggacaaaatcaaccagtccaactgtatcagcaacttcagtggtggccacattttcccctttccaccggaatgtatctccaactctgtcgtggaaatagatgaaattttcatggtcaaccattaagagatctccactgttgaaatagaggtctcctttcttaaagacatctctcagttttttcttctctgtctgagcctttgctccagcatagccattaaatggtgtaagttgtgtgattttgcaaaccagaagtccaacttcacctttgggaactctgacgcaatatccattttcatcacggacaggttcatctttctccacatcatatttaatcaggtcataagttatgatttttttctgtaggtagtttactcttccaac

SEQ ID NO: 337492 - DNA, 1000 bp, Homo Sapiens
tttttttttttttttttttttttttgtgagcacaatgtaattttatttagaggaattatgttgctgacttggctataacctaagaagatcacaggcagctctgcaattgacagtgatttaaatgttttccatacattatctcctcctgtggatttataagccaaatgatatcaaaatctctatagcttccaacattcatataaatctgcataggtccttggacatcagttctaaataaattttactctataagaagtatttttaacaaaaaatagagctttatgccctatgccattaatgctggacttcctaagtaagcctacatgttgcatcatttcttttgttgttggtgttttttttagaggtgggaactggcacctctaaaaaatgttacccagattgcactcaaactcctgggctcaacaatcctcctgcctcagcctctcaagtagctgggactataggcatgccaccgtgctcagcttacatgttacaccacttctaatgttgaaaacaaagaaatgtctaattaaactttcatgcagtggaaaagttatttgaacctgttctgtgctttgatcaacagtctctcagtctctttgctgtcattttatgtcatctacaggtttgacttgggaatgggggtcctgagggcatggacacactcgctcaccagcctggcggcctccagagcagtgccccagtgcactgagatgcccccactcccatggccatagtggtggactacaggcagcctctgtccatctcgcgcaaggagctctgtctgcagtcgcacgcctggcctgtagggcctcaagcccaccttctccctgatgttgcaggctccgtggagggagggctccagagcacagcatcgggaaagaatctctctgctattttctgcatccggggacagattccagtcccctttttgcctagttccacctagggttacatgggatgtaccaggataaatatatgtcagcccactgccatctcg

SEQ ID NO: 337493 - DNA, 1000 bp, Homo Sapiens
ttccagtggaaagtggatcaaaacactttaataaaatggcagcggctttgtgggatgtctgtggcagacaaaatcaagagccaggagcccgggatgcggagatgggcctcggtctccacatcctggcgggtgctggggccggggctagtacttgagcagccagcgtggcctgtgggtgctcagcgatgtgaagtaggaccaccaccagggcttactcccgtcggccgagggctgcctgcgcgcccggagcgggtcgggctccgtggcctcccccaaagagctggcacctcccagcgggtcgtggggcccagtcctccgcagcccatgaataaagttcttgggtcccatccccagaggttgcagaatgaagtccacacggccagccctcttcatccgggcggggatgatgactttcttgatgactttggcgtagccaggggcttgggcaatgacaatgtggatacctgggggcagcagtctccagtagtcaccatctggggctgtggtgatgtcgtggcgaatgcctttgactgagatccgggcgtttttgactggcttgccgaatttatctgtcaccacacctttgatgccccggtgcaccgtctccacgaaattcaggagtgactccttgttgtgctgccagagtgtgtacagggcctcctcgggggggaacttcacacagcccagctctaccgtgatctcaaagcagttggtgtgcaggtagttgaaatcggacatgcctcccgtgaagctgtaccagtccgccccgttgatgatgctccccctcttcaggaaattgcctccacacctattctccgacctgtccatcatcatggggtggacgtcagcgtaggctctggacagcagcttgaacatcttctcgtcgggcgtgggagaaaacatcttctcctcctgggggtgcttggagaagtcgaaggggtaggacaccaccaggtcgcccccatgaaggctggctgagagcacaaagggtatggtctgc

SEQ ID NO: 337494 - DNA, 1000 bp, Homo Sapiens; identical to SEQ ID NO: 158217

SEQ ID NO: 337495 - DNA, 1000 bp, Homo Sapiens
tttttttgcaccttcaacatctccatttaatatttacattcaagcaggtaatagttggaagcttatagtttagacatttctagtagcagcagtttctagagagctcgtgtagccttttaacaaacttttttttttttttttttttgcacatagaaacaagacatccatgtgtacagtatcaaaaaatatataccaaggttactggtattgcagttcgtggaaggggaagagaggggagaaaatgaaatcaaccgaaatactggatggaggggaagaaaggtcaaaagaaaatagtttgtctgatatagaatataacatgatctagaggaaactccataaatctaggtttttatatttcaatatataaatacctacaaataaatatatatatagcagcccgaaggggggtggtcgggccttttgagctcaaacaatacatttcaataataacaccacgtacaaacgggagtagagtcagcacttgacaagttagcacggttaaaatataatactagaactctgaggccgggcgcagagctgccctgtccgttccgggggtccatctccagcggggaagggcaggagagggcgagccccgccggcaccgcgtggaaggggcctccgcccaggtctgacagccgccgcagggggaacatggttacctccgctccgggcgtcctcaccctgggggccagcctgggtctctcgcggttggcgggttggcgagaggggagcccgccccgaggccccaggtgctcagctccccgcccccccgcgggaatggcgcttccccttccgacgccctccggctacaccgtcacgtactccttgaaagtaacggtgaggcagttcgcggtgacgtcggtgataattatattcccaaagaagggcttgaactcgctcagcgactctgcaggttcgtcctgggcctcggctggaggcttctccgccgtcgtggtgggtgccgctgccgccgccaccgccaccgccgccgacgccg

SEQ ID NO: 337496 - DNA, 1000 bp, Homo Sapiens
tttttttttttttttttttggttttatcttccctttattacaagaaggaacaataaaatagaaacatttgtatggaaaatgcagtgaggagtggtagggaagcaggtgaggaggggacagggcagagaaactcccggttcagggagggaaggggagcaggctgcccccaagccctcccacgcagaggatcatgacccgaggtccagggccctagagctggtggggcagtgtgggggacagttctgtgcccggctccacgcagcagtctcgacagcaacagccagctgccggccccccagccactggtgtcagcagctccccatggctcgccgtctgcccctgcccctcctggctggtgcccagctgcagtttcctcatgtgccgcaccacagccgtggcattgaaggcttgcttccacttgctcttggcaaagttcttcttgatctgctcactcaccgactggtggatattcttatctagagctgtatctcctgcaatccatgggtgctgcaaggcctgctcacaggtgaatcttttctctgggtccttctccatcaagtgccggatgaaatctttggcagagtcagagatgtcgtcccagtaaggagagtcaaactcgtactcggccttcaaaatctgttcaaagagtttggcatcattctcgtcatagaagggagggtaaccgcagagcaagatgtaggcgatgacacctatggaccagcaatccacagccttgctgtagggcttctgggccaggacttcaggggccacgtatcccggagttccacaggcggtggagagcacactgcccgggtcctccatcttggagaggccaaagtcggagatcatgattttggagtcttcatccaggctgtagtacagcagattctctggcttgagatcccggtgtacaatgcccaggtcatgcaggtatttcacagcatccagcacctggaagatgaggcggctggcgtcccgctccgtgtagaagcctttttcc

SEQ ID NO: 337497 - DNA, 1000 bp, Homo Sapiens
aagttgtaatctttgccgttgtcactgagcctcaaaagcaattgttttcccaaatcattttaagccctccccagtcaatcttttccctctcatcaataacttacaaggaccctatttgaaaaacaacgcttattcattcctttttctataccccacacattccgttctaggaaattggcaaccacccaacacagcccgggttctccctccttgagatgtgaatttaaacaaatggattttcgtctcccttcttcaagcttagaggatgagcacgcgtttactacaacgcttaattccttctagcagcatttctcttctataacttacttgccactgccttttttttttgatagaatcttgctctgtcgcccagggtggagtgcaatggtgcaacttcggctcactgcaacctccacctcctgggtacaagcggttctcgtgcgttgggctcccgagtagctgggactacaggtgtgtgccaccatgcctggctaatttttgtatttttagtagagacggggtttcatgatgttggccaggctagtcttgaactcctgacctcaggtgatccacctgcctcggcctcccaaagtgctgagattacaggcgagagccaccacgcccggccaccactgccattttcatcacttaacccgaacacattcctctattccctccctttcctgcttggtgatcatcgactcttctgacccaactaggtgacctgctaaaccatctttactgttatttgccagaaaagactggaccagagacgtaaataatacacctcaatatacaacagctcgggcttaatttctaggcagaatttcatttgctggccatcagaagaatatatacatggagcgtgtttggggaggagatggagtaaggagaacacatcttggtggcaggagaacctggtgggaaccgtgctgatttgtttacttgggtttgccaactggtccgatggatactgggtctgtttgcacttgagcatcca

SEQ ID NO: 337498 - DNA, 1000 bp, Homo Sapiens
tttttttttttttttttgaaacagttctctttacccgtgatcactgagtgacgcctggggcggggaggccgaccgagagtcgggggcgagggctcccccaccgtccccctgcccccacgccacgtcgcccagcggcatcgtggaaagaggattctcccatgcaaaccccggagccagaggagaaggggaagcgccattctgcgccccctacccccggggcacggacacggccacagcacggggggcggtgaggccccggggacacgagacacgggggagggagaggggaacccgcccgcagatgacccgggggaccggcgaccggacgcggcggggcggagctgagtggcacagggggcgaggcttgtagcagcgagtcccccctcccctcctttcggacgaagaaggaagacttgggccccgcgactgggcaggaaaaaggggagggagcagcctctccccgcatgcggcccgggagggaagccccgcccccttcccgcgggtaaaggacacccgtctcccaacagaaactgatcaataaattacaaagtagagaaaaggaaagcggacgtttggggcgggatttcttcctccccgcttcttccccctctcagtccagttcatgtggtttggtccaggccccggccctgtgcgaggcgggcgcgcgcactcccgctggtctgtacagatggtccagtcctcggcgcgagctcccccgcccgctctccccggcgaggccacagtccgggcaggagagggaacagcccagcctcgggaagattcttccgtccgagtgaggtcacctggaggcctgcactagcaggaataggtccggaccgaaacgccgtctgcccgggaactcccagaagtctggccttctggctgcagcttgcggagagggagccccggagagcccagggctcccgctgcagccgaacgaaagttggggggcaacatctcagctgagtcgggagttacgcctcggaggtccttctcccgg

SEQ ID NO: 337499 - DNA, 1000 bp, Homo Sapiens; identical to SEQ ID NO: 158219

SEQ ID NO: 337500 - DNA, 1000 bp, Homo Sapiens
ttttttttttttttttttttttttttttttcctgtcacccaggctggagtgcagtggcatgatctcagctcactgcaacctcaccctcccaggttcaagtgattttcccacctcagcctcccaagtagctgggaccacaggtgtgcaccaccacacctggctaatttttatattttttttgtagagatggggtctcaccatgttgctcaggctggtctcaaactccagacctcaagtgatccgcccaccttggcctcccaaagtgctgagattagaggcatgagccaccatgcccagcctcctttttgtttttctaacatacccttttattataacagaaacagtaaatgtgcattgtagaaatggagcggtttcaagttacattttcatcacccagaaattgtgactgttaacaccagtatgcatactgtctaagtatttgtctgtacatgtatttacaatttcaaaatactgagatcatactgtatttctgcaatctgcttttcattaatgatattaccgaatatccagcccatatccatttattccccaactaacccataaatgacttacagtttatttgcttaaactagtagccaattcaggaccacatatcatcagattatgatatttagtaagtttcttttttttctaatacagttatttagttgtttattcttagcatgcctccaacatattgactgttaaagggcaatcagttctccccggcagtgattgcagcaattgaaagttatattttcatatctagtatagggatgaaatcgtccaatatttttctttgtagcaagtaaggtggttggtgaagactcaaaaaatggattatcaggtgaactctctttgcaggtaactggatctaaaattcttagaaccgtttcagccattttctcagctggggtgctgcagaattcaactgttgatggaatctttttttgattgttaatgccaacatttcccagaagatgagaatttactgcttttg

SEQ ID NO: 337501 - DNA, 1000 bp, Homo Sapiens
tttaaaccgagtttcacctcagctcttcttattaattactgctctgatatactcaatctcacattttcaggttctcaacctttgaaaacattttccttcacatattaattagagacatgggacaaatgccacagaggaaagatggcagctctcagtcactggataagctggtgatggcacggaactgggaggcaggtcataagtgatgctggagctggtaaaggttaccaaggcttgagttgagtcacaggactgtttttcgacatcatcagagttaattgacatcaagcttgggtgttttgatcttgtccagacgtaggtttgctttctcaggctcaccagatcctccttaaagtgaggattgaacaagatgtagagaaggggattgagacatgcaggaagtgggactaccaccagaaggataaacttaattacttcaggactgataaatgtaaggtttattaaagaggagaaggacaagaaagccacagggcagtttaggatgcagttggtgaagagcaacagggcaatgtgttttaccatagagcagtcccaaatattctccaggtctcccttgtccaaattgcagtagagcttggtgtaggcaatggtcatcatgaggaagcaaagggaattgagcaagatgagagcgaccatgtagcccatggtgctgggctccccaaaaggcaaaggcaggcagagaggggaggcgccatacttgctgccacccagcaggggaactgcggccatggtcaaggccagcagggcacagagcaaaatgattactttcaggctagaaaatggagctttcgtttcaaattttgcagaatatttcacagagaacccacgctccagggctgccagagtaagcaggaaaacagatgattctgaagcaaaaatggacaaaaaaccaatgacatggcaaccaaccccattctcccaccaggcaccatgtcgtgcaaagctgccaaaagtgaacgcatccacaccagccagcacg

SEQ ID NO: 337502 - DNA, 946 bp, Homo Sapiens
ttttttttttttttgagacagggtctctctccatcacacaggctggaatgcagtggcatgatcacggctcactgcagcctcaacttcccaggctccagcgatcctcccacctcagcctcccgagtagctgggaccacaggtgtgtgccaccatgcgtggctaatttttgtatttttggtagagacagggttttgtcatgctgcccaggctggtcttgaactcctgagctcaaagacctcggccccacaaagagctgggattacaggcgtgagccaccgcacctggcccaaacacctataaagggctgtctgcctgagactgatttacttaatgctggggaagacccaggccctgagttaggaggctagcaggagagacggtctgtgacaatgccacatggccaggatgatgatgcatgtggcaggggctcagcataaagggaagctgtggacaggaacagactggaaacaatgggccagacatctgttctttcgtctaacacctgctattttttcaggtaacagcacccaggattgatgcagactcccccaaccaccaccaggatgctggcacacagacaagcaggatcctttcaaagcccaaattgggccacgtccctcctctgctcagaatcctcccctggatcccacctccacttaccgtaaaatgagttggctccctgacccctcccacctcaggatctttgcgcaggctcttccacagcagaaggcactctagtccctcatatccttgaggtctttgcaaactcaggccttccttaaccattgtcatcaatactacaaaccattctccctgacaccccgacttcccttgtctggttttagttgtttcctttgaggagcactcatcaccaacattaactatatacctcacgatcgtattgtgtctattgtttgctgtccgttcccctctccctccaagaatc

SEQ ID NO: 337503 - DNA, 1000 bp, Homo Sapiens; identical to SEQ ID NO: 158221

SEQ ID NO: 337504 - DNA, 1000 bp, Homo Sapiens
ttttttttttttttttttaaattgaataaaacttttattatttattagcagtgtattcttctacactttaaaatagagcaaaatatcttttggaagataaactattcataacaaaatacatgtcaaacaatttttattatcagagtaaaattactttgctatatactttctatattatatacatccacttcttggtgtgtctatgtaggcacatgtgtaaagtaatttttagacatatacatgtacatacatatgacacatatacacacataattatgggaaatttacagtagtcaactttacaatcattttaatagcttcacacaaattagtgttcacagaactaaaactgtcaacatgattccctttcccctacttctcaaatgtcatctgaattactttttatgataacttgaaaaaaatactgtcatcttcctatacaattaaccaatttttataataactcataataaaatattttacttttttaactttagaaaagatacataattccacttattttagtttttgattcctaaatcatacaattcgtttttttcatcagttgagtgtaatttttggtactgcagttactgaagttaatttaacaaacctgagtcaaacattcattcaaatgccttttttaaaaacataaaacatgaacaagatgttttgatgaagcatatataatagactcaaggtaccctcccctaataaatacattataaataactcaatggttgggagtaaagcacttcatatgaatccatttaactagcactttcagtgtcgaagcagtccattcttaagcagcctggaaggatatcaggatgtaacgctcctcgattcctcatagaaatgaaacctacaggcttctgaagacctaaatatcagatcatacttacatgaaagggctgtgagtacctataagggtcctttcattttcatagtaggttccagatatgctagcgtgtgcagcagggggttgtaccctgtttta

SEQ ID NO: 337505 - DNA, 963 bp, Homo Sapiens
tctggcacatgattgagcatttattgcggcactaacagagggtgctgggggccccaccatccttgcctctgcccttttcacctccccctccctcccagcttcttctgcctagagcgttccagattcccctcacattttcctggatcagggccactcctcccaggcacctcttgccctcaccagtaccttttgtcccttctcctggggctgagggtcctcagctgtgctggcccccaactctccacccttagtgcccactgtctctgccaccctccctttgggaactcagggggctcaggcatcctggcctctggctcccccctcccctagcccccaactctgggcaaactacaaagcagccatggccagcagctcccctccacagtcctagccaggaagggcccagcccagggcgggcacagcggagcccaagtcacagtccctctcagcctctctgtgcttcctgggacatggagcgggacagggagcgacgaagggcaccgggcttgctgacaggcaccacagggggcagctgctttgtgatctcagccacctcctggcggtccacacactggccacccagggctgtctccagcgccagcagctcctgaagctggatgggggtgtcctcacgctcctccttggtggcgcccatcttggcaggggtgaagatgggcagcggcagtacccgctggtagggcagctggtactcctgcagcccacggccgaggatgcccatccgcatcatcagccagggcgagcgctgcaccagcacctggcactgcccctgctggtggtaggtctcatgtctctgggtgtcctcctcatgcagggagcagccctcctcgggccgtgtggacagtgtcagatccttccattctgcccagaaggcctcccggcgctcacagttctcctccgacacctcgcagctcagctctgaggtagccatgatcactcctcatt

SEQ ID NO: 337506 - DNA, 1000 bp, Homo Sapiens; identical to SEQ ID NO: 158222

SEQ ID NO: 337507 - DNA, 1000 bp, Homo Sapiens
tttttttttttttttgaatggtggaaattcagtaagtactttatttatgagtaaggctgtacaggattcagcagtgtctaattcgggtcccatatagaagttaaaatttttaaatgagtaattcagcttacagggaaatatattttcatctcaatcttttatgctatatcatacctcaggctttttaaaaattatttttgagatgaaattttaaagttcccccggtacccaagttaccatattatatagtataaagatagtgaaatacaaaaatgtaacaaatactaatacactgtgattaatagctgtttattagctttttaataaagcaaaactttatagtgaaataaactagaaatagctttttattttttatatatatttatttatttttgagatggggtcttgctctgttgcccagggtggagtgcagtggcacaatcttgggtcactgcagcctctgcctccgcctcctgggttcaagcaattctcccacctcagcctcccatgtagctgggattacaggcatgtgccgccacgcccggctaatttttgcatttttagtagagatggggtttcaccgtgttggccaggctggtctcgaactcctgacctcaggtgatccacccaccttggcctcccaaagtgctgggattataggcatgagccaccgtgcctggcgaaatagctttttagaagctttttaaatgatatgcttataaaatgacagacatgagtgaaacatcctcaatgacgataatacacaagtcacaagtttcctgtgagtgaaactgagcagtacagagtcaggctgactgtttaaaagccagattcacttcttggtatcaccgagctcttactctgaaattgtgccaggggagcttctgagcatcactggtctcaagtttaataatgcaaaaattccattttatcatctaaagttttggagaagaatccctttggcactaatgatatttactccagcaccatctctcctttt

SEQ ID NO: 337508 - DNA, 1000 bp, Homo Sapiens; identical to SEQ ID NO: 158223

SEQ ID NO: 337509 - DNA, 1000 bp, Homo Sapiens
agctatttattatatttttaattggtatttcctaatctgagaaagtccatatattcaacatttatttcgctctaaataatgggataacaattacattaacttttgatttatgttttactggtcatgatggaccgactactataacaagcaaccccaacatttcagtgaattaatacagagtttattgctcatttcaggtcacagttcagtctaataatgtattgggtggaggagatgggatctgtcctatgcagtcatttaggaatctaggttccttccattgtgatattatgatctttaggcgttggcctcccaggttcttgtagagaggaacagcagagaggagaagcggaaaggaggccaagaaatattattcgatgttgtacccaggacacggagaagaacaatgtttgttgatgacattagtgctgtctgctatagtatttttttccccaactgattagtaatttcgatagaaaaaaaaaattcttcacctaattaaagagacattagcaagtacaccaggctgtaaactctgccaggaagagccttatctgtttttgatgcttatagtaaaaagtctctaattatagcacagtggctgtcacctagtagatgcccactgaatatttgtggactaacttaatgttcaaaatctcttaatagttgtacctgccctcatagaaagtgtgtgcagattgaagcttggaggattacaaggtattgaaatggtcctacatattccggttaataagatttagaatgaataaaagacataaagctctggggtgatttaggtagatctgagcatgaccacataaccccacatccacacctgctaacaaacaaaaaacaacttaaatcagctcaactgatttcctcgaatgttaatccagattagtgcccaacttttacttaatattccactttattttttctctgcccagtttcgaagatcccttttgcagcttctgtgcctccgactgctgaggtgccagag

SEQ ID NO: 337510 - DNA, 1000 bp, Homo Sapiens; identical to SEQ ID NO: 158224

SEQ ID NO: 337511 - DNA, 1000 bp, Homo Sapiens; identical to SEQ ID NO: 158225

SEQ ID NO: 337512 - DNA, 1000 bp, Homo Sapiens
ttttttttttttttttttagaatttcagttttattaaaataagcacaatgtataaaagcaccgtggtgttgtataaacgtctgcctgacaaatgcaaatctattttctttatgtaactcaatagttccacttatctgaatggctgtaccttcatgcacacgggcagcaggcactgcattgctcaaacagggaagtgaggcttcaccctagtgtggcttcaccttaggcacagagcactatctaactgcccagatctgtgccacccacacaagacctggggacacagcagcagacaccgatgctgtctctaagttcatcacaggaacagcttaaaatcagaataatagggaactgctgattaaaacccaagtgcatggacattctagaaagaagagcaagccgttccactctctgggaagttcatgggcttgcagtgggagtttaaggtatcatctttgctggaacagcatggttaaaaacaccaaactttttttttaaaaaaacgatactactgactttagcagcaatcacaaacaaaggggatgataaacgagggatacatttcagtcacagcaaagaaagattatgtgcttttccgtgctgcagaccggaagactgatttgatttcctgaatgaggaaggctccttgcccttccctgaattgaggggatggctttgctcagccaagggagaagacgggcaaagaggacatccggaggacagaggaaggtggaaggaccgccagaggagggtgacagagaagagagggaagaggcacgtgtcggcagcctctgtcaactgatgcttcttgcttctccctgcaggctgcagccccagccgccacagctacagcggtgagagcaggctggatcccagatctgcaggcgggtgagcaggtggagcccagtgaagagatgttcctgctgcaggcaattatgcaaagtgagaagtgattgctttccttttcaaagacaacccctttggaaaaagctttttcctc

SEQ ID NO: 337513 - DNA, 1000 bp, Homo Sapiens
ttttttttttttttttttgaggttttgttatcatttatttgtgaagttaaaaacgagcgataaaaagtaaaaactgccatacaattttttttgttgttctcattttgttttcagtttcaatctcctcttgaacagatgaaaagacaacagaccagtcctgggaggggggacgggcggggccgcgggagctgagccagggcgggagggagagaagagggggcttggctgctgggggaaggggtcctgcaatacaacacctggtccaaggaatgttccacctctaactaaaaaaaagaaatagcaagagtgacttttttttttcctttttaaaagtttattttaaaaacaagagggccgagggtgggagaaaatgaattgctttatcctcagagaggcaggttcaggaaggctggggggtgaagaatagagactttttaatatatatatatataattttataagttctgctttgctctttgtgtttttaatttttaagttttttttttttttggcagagatttagatctcgctatcttctctggctggctcaacatggaaggatcccaattttgaaagaaaaagcatgtgagacacagaacaggcgagagagtgagggcccggcatgcccccaagtcccccccaccctgcttgccgcgagggctccccagtactccccacggcaccatcgctctctcgccaaacaaaacagaagcccccaaacagaacaaaatggaaaaaaaaaagatttttcacagatgaagaagttcacattcattcgattcattgagcctgctgctgtccctgctgcgtgggcggcggctgggggccgccaggacctggggtctgtccgtagtaagcggcctgctgtctgtaatattccgcccaggcggcactgtagtctggctgggagcctgggggagctcctggaccccctccggtggccacttgcgcttgcttcttgtagtactcctcccaagccttcgtgtagtcctgctgtggg

SEQ ID NO: 337514 - DNA, 1000 bp, Homo Sapiens
tctattttgtgcagttttaggggccttggaaataaaaagctatgatttccaaaaatataacattccaaaggattgaataatacatacatttaaagatacattttattaaagtttaggagaactgattaaaaaagatactgtctctttaaattagtgtgtaattgtttttctcctcctatctattcggacatgacaataattataaatgtaggtcacactacaactaggtagtctctagggaccatgacctgctgacacaaggccgataacaaagaggcttttccacaaatgaggtgctcccagttatgctcagatatctggggagaggcctaatagacccaggagacagggacccactgtggggctgtgcacacgagctcaacagcttcctccagatgtctgattgtctcatcaatttcattgttgataattgtgagatcgaagtagtgtgcatatgttctctgtaagatgtcagactccttctgcagacgctgaagagattcatcctcatttaaacctggagtaatagttggtgcagcaatgaaaacaacaaaaggagcaaactctgcagttctcaggaccttcagtgcctgaggctccacgtccagtattgcaatcagcccctgctcgtggatcttccggatggtctccagttttgtcccatacatcgcatcctcgtggctgccgtactccaagtactcgttattagagatgtcttgcatcatttggtcatgagatacaaagtaataattctttccattttcttcgtctctctttggaggtctggttgtatgtggaatagggtacgcaaaccggtctgggtgctttgtgatgagagtgttttttatgtgtcttctcccaacaccatgtgcgcctaataagactagtgttttcctcttgaatgctggcagttttactacttcttcatatgtgacaagatctgcattgtgctttgccaaatatttatctttgtactgcttctttttcttgccaaaccaag

SEQ ID NO: 337515 - DNA, 1000 bp, Homo Sapiens
ttttttttttttttttttttggggttcactcaagacctaggctacagccaggtcaagtgcctgctttattcaacaggaagcgctcaagtgggactcaccccccacctttcacagtgtaaagtgaatagggagcaaggcaggaagctagaaaaataatgcatggatctagacaattcagaaaaacccttctaagtcagcttaaggccaagactggtcagtgtgagagaacaaaagaggtgacagaaaagccttgggcagcctgagccatgatgggcctagcggaagtagttgggacattcgtgagcaaccaaatgccaggcttgattaaaggcatccacgacagccggctccaggggcccttcctctgttgctgccaagttctgctccagctgctccaggctggacatgcccaggatgaccgcgtccccgtgggcaccctgcagctgtgagtggtggtacatccaccggagggcagccgaggtcacactgggggcgctggcgccatatgcggcctgcagggccttctccaccaacgcaatggcctcgaagtggtgctccttccagaagcgattcctgtaggtctcagcccagctattcccaaagaagcggcccacaggctgtttcccgtccttgtcctcatacttgtacttgccagtcagcaggcccccagccagagggttgtaggcatagaacctcagtccaaagtgcctgaggcaggggaagagctccgtttccacctgccgggtggtggcgttgtacatgccctggtacacagtgggcaggatccagccattgctcttgcagagggtacagatctcggccacttcccagctagcatagttggagaggccaagctccacgaacttgccctcctggtgcagccgctggcaggcatgcagcgtctcttccaccggggtgccgtggtcaggtgcgtgtaggtagaagaggtccacttggggacactgcagcctcttcaatgacgtctccagctgggaccgga

SEQ ID NO: 337516 - DNA, 1000 bp, Homo Sapiens
ttttttttttttttttttttttttttttttttttttttttttttttttttttttttttttttttttttttttttttttttttttttttttttttttttttttttttttttttaaattttacttaggccatcattttttattttcacctttgaatttcaaagtaaattagagatatgtaaataacagaattatcaacattaaaatcttattcacaatggctaacaagaacaggatgacagtcaagtcagtagctttttaataaaatgagcagaatcccatcgtaacagttctttgttacatgaattcaaatacacagcagaccaatcatgttccctgaaatttaacaatcaatcatacttaataaaggcctgttagtgctgtccctcaagactctaattctaaagggcttcctttgaattccctttataaagctttgtgcaaagaagagcttaagcaccagtaagaaagactgtcgctagcatttttatttcatcatcaacaacaaacatgcagtttctttctctgatgtgcatggcactgtaaaatgggtgctacactctctcttgtggtacaaagtttataaatacagtatactgatacaaagttgaagccattaaaaagagcttaataacaactatgaggagataattaaatctggagtgttgatggaatctatgaagagatttagaaacaagacataaacactacggtaaaagttttacttgggaaggggccagaggggaactttttatgtgctactgaaagattttttaagttgctccagatttactttctttctgctattatctttaaatactgcaaagcattgtgagctgcatcactttgtgcattgccacaggagataccggagccatgacagactgtgatggggctggtggacagttcagcaagacattgatattgtccattggcgctcagttcatctatatccaaatatgttatattaaaaccttgttccttggcaatttcactaagcagc

SEQ ID NO: 337517 - DNA, 1000 bp, Homo Sapiens
ttttttttttttttttgtgaaaacattatattataacatgcttttccaaacaaaatattaagattaataatttttaacatattctttaaattctacatgcatacttttgaatatctaaactacatgttaaacagctgaatacattctactcacacttcagatctttaaacaccaacaatctatgaatattaatctattactacaggacaaatttggatatacgtcttggataaattttaagctcactttaagagcaccaatcattaacaatcatttttgtattttattcacaaacactgatacgatttgtttatttatgttaaaacaaacattttctttaaaaatgaatgtgtattaaagtagtttaactggtagaataggctttattccaatctgtttgttaaacagcctattttcacaatatctatatctacttttcattgatctgttccatcattactaacatatttgttcaaattattaggactattttttcaaagggaggaataatcaaattccccagtccatatatcttataaatattttacacctaatacacacagctttacagttcatgcgataggcagtgtctaaaaaatcagttactaaatctcaaaaacatttaaatatctatttaaacacagtgtcttctagatttttttgtaagaaaagtaatctgtaaacatctttacctttagttcatgcttggtcatttgctgtggtcattgtggaagaagtggatatgactttataaccatttgtgaagtagtccatctttgcaaaaatattacattccatgggtaaagaacaagtcttagaattaccatgtggtacaaatttgtgaaagcaatttctgtatttaaaaacataaaacaaagactactaaacagtccaaaactgtcgtagctgaatattctaaatacgagccaacagtactacactaaaaatgtccaaaaataaggcctctgaaataaatatttccattctttaaaaaaagaca

SEQ ID NO: 337518 - DNA, 1000 bp, Homo Sapiens
ctgtcctgcagaaatccattttctagcttgcaacctattcctctctctcctcttggactagttaaagaaagtattcctagttccatagtgatgcctttgaaactctggcccccaatttaggccctaagaactccactggacttcatagaacacattgatcccaagtttaatagcattttatcagatttcacacatcccttctatacatttctgctagctttcttggggtcaggatcctggtgctggtacaggtgcagagtacagcatagggctctcttgacctcttgattgcgcaggcagtaaatgatgggattgagcaatggtacaatgacagcatacagtacagagaccaacttgttggtgtcaaaagctgagagtgcctttggccgagcatagatgaagatactggctgcatagaagattatcacaacagtgagatgagaggcacaggtggaaaaggccttatagcgtccagcagccgaaggaatgtgcatcacagcaccagtaatggccacataggaggccccagtgacagagagtggccctagaagaataaaaatggccaggatgaaatctgtaagctctgctgtggacatatcagtgcatgagaggttgagcaatggagagacatcacagaaaaagtggttgatgatgttggggccacagtaagagaggccagaaataagaaaaactttgaccatggagatgccaaaacctccagcccaagagccagcagccatctgcacacacagccggccactgacaatgactgggtagtggagaggatagcagatggccatatagcgatcataggccataacagcgagaaggacacactcagtgcagcccaagccaaggaaaaagtagagctgtgtcatgcatccctcaaaggagattagctgtccatgatcctgtttggatccaacaaagccagcaagcatcttgggaatagtgacagtgacataccagatctccagaaaggacatattagctagaaaaa

SEQ ID NO: 337519 - DNA, 1000 bp, Homo Sapiens
tttttttttttgttttttttttcaggttttcatataaatttatttttgtaccaaaaaattaacattcaaaggcaatgtttttattgtacagtataagataacatttactaaattaaaattggacttttttgctgataaaccactaataacttttctattttgaaaaaaaaaaaaaggtacaatttgcggcacttgtggaaaaacacctgttcaacaattatataactactcttgacagatttcagtggcccattatgtatcctttttggcaatgtcagctttctaaagtcaattagtttctaaatttgaaaggcacctggtggccaacatcctgcttattattcaaggcatccattttaatttttttgcacaggcttgacaagtctgaaaaaatctattaacttaaaaagaacgaagaaatatactgcatttgatattaggaaacaacatttttttcccctccttagctgcaagttttccccagggaatttacaaagtgcaccagttaaatatgtctgtacatttaaaacattaaatatgtcaacagcaagacatttttaaatattttgaatcaaatactatagcacaaatataatttacaatactttgcaaagaaaacattacatctgaaatataactttagatattatataaaaatacatatattttctctcctcattagaaaaagtattttttgcaggttccagcatgatgtaacaattcaaaagaatttgccccttcagatgatccttcaattgcgctagatgacaccctctccacttcagctgcgaaggggcacatgaccagggaccaacccctcccatagcccacatgcagtttctcataaggtcaacccgtaattgctccaatctggtttaattctaggaattcattacaaaatttaaaaaccattgtgtaacacaccatgagtctaacatctcccactggctgtaaatacgcgtgttctctacaaggtcaagagcatggatactgagtcgtg

SEQ ID NO: 337520 - DNA, 1000 bp, Homo Sapiens
ttttttttttttttttttgagataaaattcttgtgctttatttctttaaagaatgaaaatgcccatatttctttcagtaataaaaatggaaatatgcttatttgacagttttgttgtgaacatgaccaagttatgaatttaaaaattcattctttaggttggcaaattctgataataacagtaactcttttcaacaaaagaattttctaagcattgctgctgttaccagacacttgagactgatccacttcagagcacagtgctttccattaaccatgtagacatccacacgcacacatatgtctccatacatacatacatacatactgtaagatcaagtagaatgctatttttacatgtagtggtcacatcttttatgaactgtgaatttgggtcctgcaatggcactggtaagtgacgtattcaaaccgagcttgctggacagaagatgtcgttgagaaacacctgaatgtcttttctttgaggggagagtaatcagttaccaaactcatgcaaaataaaagtggttccctttgctctgtggatgtacctgctccgggcagcagggagccttctgtgtagccttggccactgacaacatgctactgttattgtaaatgcaaatacgctatctttctacaacagccatatccctttatttttttttttaaaagtatcactaaaggtggctgcagtttacatggtgaatatatagcagtctgttgaaggaatcatctgttattagaatagcctgagtattactccagcagaagatgctacaacctctaaattccctgtgctagttgtagcccatgaattcttttattattttattaataataaatatatttgaaaaatcctatgcttcaatagatttctccgataaggactgaagcaagtccttatagacagcagagttcatgaatcgaggatatgagtctctgtgcatcagggtgtaaatctgaagttgagcatcatcgaatatgtgttgggatggctc

SEQ ID NO: 337521 - DNA, 1000 bp, Homo Sapiens; identical to SEQ ID NO: 158228

SEQ ID NO: 337522 - DNA, 1000 bp, Homo Sapiens
tttttttttttttttacattttggtgtgcattttatttttgactggaatcatatccatatgaagggaaattgtgaaagtatcctttactcttttgaaagcttggcctttgccttactgtgtcaaaggaaagcaaaactaagccagtaatgatggagatgtccctgtttccatatgcacactgacaggcgaggagctgcctaggaaatgctttttgattgatgaacagaggagggtctacacacattaaatacaaatggaaacacatcagcacacacaagtcattagcctggtcctctggcatccactggcatgcatctttccaaagtatcacttattcagtggtagcagcactatgtctcgttatgccttttatcagcaaatacctttttattccagaatggaaaacaaactaggaattaaatacatccaatattgatgctttatttccataagtcaccaataagagaatgaatttaattttaatacatttatttttgtgtgattcttaataaaacactttcaaaacattctgtacatttcaagccactcagaaccgcattacatttctacaaatgtgatttgttgggatgaggtgccaagatgtctctgtacaaagatgtacaatatgtacaatcactgtaagtgcaagctgtgcaaagcagagtctagaacactaattcatgccaaggcttacaaaaacatttcaacacataagactaaagcttgaaacagcgttgtggttttttccctgggcaaatgattattttataaacaagtatatgtatatgtcatacagaaagaagagtttgactcctcagctcagtcagtaccatgcagctgactggatacattacagggctgctctcctaggcctctttcttcaaggcgccattttgccacactcaacagttgtctcatcactgagtggctgccactgctgcctttggctgaaccacagcaacactaggagacttaaatttcgggagataaaggccaaat

SEQ ID NO: 337523 - DNA, 1000 bp, Homo Sapiens
ttttttttttttttttttttttttttttttttttttttttttttttttttttttttttttttttcatcagtcaatcagcaagcatttattgagcacttgttgtattctcagagctccacttggctgtggagagatagcccatgatttaagcccaagttcttacttctacagagctaacttgtgcagagctactggctagaagtgcagtcataaaggagcagtggaaggcattggtctgaactatcacattcattctggccatctggacattggacatgatgcttctgattgtcagacactcatgctccagctccaggatctcccgagggacctgcaggacaaatttcaccaccttcagctccttggacaccttcttctgaatgacgctatcaaaatcacagtctagctggtcactggtgattggccctgttaggacagccaaggtgaactcaaggccatgaagcgtgtggctgaagggagtgaagaacaggaaggccaggtggacttcagggccctagtagaccaacaggcccacagtgccctggaagctgaggctcatctatgccaagcagcaacttcgggcactatccttcgggtagtagagcccggccacgttcatcaactctctaaggatcttcttcttgttttccctgacattcttcttggctaatgccaagagtagcaccaccacatctagagtgtaggtgtcagcaagcttgaatgtgtcgtatgtgtcactccatgcctcaatatcacctccacaggcatctatgttgaacaggggaaaatgtatcaccactggtccagtttctcctttcaggatgtagcagctggcgggggccttggaccacaaatccagctcagcctcttctacttggggaaaggggatcttgtggcggcggcagtagtcagtggtagcccggatggtctcgaaaggatctccggcactgaagtcgaaggagaggatgaggtgaacctcccgcgtcgggggcagcacgag

SEQ ID NO: 337524 - DNA, 1000 bp, Homo Sapiens
tttttttttttttttttttttttttttttttaagacaaatcaaaaactgatttatttgtcctctgcacagatccttacttaggacaccacctcccagccactgcttctgggatgactcctgaggcctatggggccgcataatggttccagtcccaacaccacgtgtacagggatcttcagaggaggggtgccctcacatcctccaggccatttccaccccgtgggagggtgtagactggcccagaattaacacacagcctgataaggaagcaggaggtaatggcatgggctgaggctccttccacctgctcacacccaccccagttgttagcccaaggatggccctagaggcttggacccttgagtggccacccacggtgacaatgcacccaggagcactatttggtccctgtttttcagctgcgtaacttgaaactttcctaccaacatctccagagagcagaattattcccaggagattcatggccaggagtaatgaaggagtgggattggtgcctactgaccggacggtccttccttccactttatattttcccaaggataacaccaccctcatagcacaccccaaatccatgcaaccatgcatccaaccttagcttcatagagccttggccgggcttggagagacccagtacataatggcatccaccaggaaggtgggcatgtagctcatggggaggtagagaagcttggcatcccagccagctgagtagcgagtacgggggtggcaggcaatcagcgcatgctccatgcagttggtcaccaacgacagatcctgtgtgcacttctgctccatttgttcagctgatttcttatagtctgcaacaaacttctcgccataggcctccttgacctctggactggaccggtcccaaatctccaggaagctctttaagaatctctccttactggtcacagcagtcttgaaatagccaggttcaatcatagccaccttcaccccaaagtaggagagttccct

SEQ ID NO: 337525 - DNA, 1000 bp, Homo Sapiens
gtgaaataagcccctcggactgccgtccacctgcacagacgtcacatccattttctttgatttccattggcaacagcgggaaataattccaatagtgctgaagtaagcagccagtctgccttgctgagttcacctggtttccttcttcatcttcttccatctggctagggcaaggcataaagaatagacgtatatattttaaatatagttgagtgcatgacagtgtgtatgtgtgtgggtctgtgagtgtgtgtatatgtgtgtgtgtgtgtgtgtgtgtacagaggtttataagtgagagctttcttctgcgaggcaatgggtccccgcctgaagtccagccccctgcctcatggcgtttcctttagacactagccgatgccatggcaactctggcctttcggttttttagatatgtctcttcatgtggagggcaagatggtcagacctggaaaaacacctgtcgcagtggttgcatttgaagggctttgcacctgtgtgtttcctgtagtgcctcgtgagctcatcgcttcgtgcaaaacgccactcacatccctcccatgagcacttataaggcttctcacctgtgtgagtcctctggtgggcctttaagtgggagctttttgtataaactttccggcacccgttaaactgacagcggtgaaccctcttcttgttttcgggacatgcttcagcccctagccctccttggtcactgtcgctctgtccactcttaacggcccccgcagccgtcacggctgctgcagctgttgcgacccctcccacctttacggagctgagagcagccttcttggccaccagtttcaacgtcaccgtgccatccacggcagagagagtttgtgaggttttgaccagatggcggctgagctcaggggacgatgggggcgttaatgaggtcactgcgttgagctgggcctggttgacggctgtgtagctgtctagagaagagctggccggctggaggctgaggcaggtctca

SEQ ID NO: 337526 - DNA, 1000 bp, Homo Sapiens
ttttttttttttttttttagttgtgttacgagcttttatttaaaaagcacatttaatacaagtatagtttcgcagatacaagttttcactttgtatgctacaaaagtctttgaatattattctctttacaaaatggaaccttacaaaaatactgacaatttaatgtttttatacagttttctctagttgcagttatttcattataaaacaatgtctaccacagaactatgatattttagttgatatttaaaaaaattaactcaatgcttttttaagcagctaatgtaaataacacaggtcgagacacagtttataatcatagtggatatagctaaattgtttcagaaataatatcttacatagttaacttttaatgttttatacattatttatataatatttatatataaaaatcatagcttgctataagttgaaatgaaaggacggattctgtagtaaggatgtgcatgtggttgatccatatggttacatttaaccctttgaaaggtctgcatccaagatctaaacgcatttcttccttcctcctttcctcaaaggttcagtagaaggggtccctgtctatcacctagagtgggaccttgcatggaaggacacttacggatagaggatgagggaaactctctaccgagatttaacccatatgttctgcccagcagaacctaccaagaactgccctagggctcaaccccaagacaatagtgctttacacagcaagagcaactcctacaaagaccctcagctctgtcatcctgaagggtaacctctcatgcatgagactgcctgcttctctggctccttctgatttgcaacagctaaaaggttggttcgattttcattctgcccccttcaccctcccatctgttgtacagaaggctgctttccgtcagctggtggcagaccatgccttgctcattcctgggccctcacaggaaatcctggtgggcacgcagcaaggatttcaagggagaaggcagtaacc

SEQ ID NO: 337527 - DNA, 1000 bp, Homo Sapiens
ttttttttttttttttttgccatttatttaaaacttttattaacgcttgaagaaaaataatgcaatgtgacaatgtacaggtcctgttgcctaaatccgtagtagaaacagatattatcacttagcaagctcacgtggtgccaattctgagatcagacggggttgttcctccttaggaagtggccactggaagcattgtttttccatgctatttccgtgaagccttttgcttggttcgagtttaaatttctccctttgtgtgagtatgactatagttctggcctggtgttttctatttatttagttttagatgtcagcattttactatacttggtcctctcacttcagaataacagggctatttattgatacaaaggagaggtgttcagatcatcttgttaagatgcagagctcaaaataaacactaaatctttatttggagatccacatccttcctcaaaggaaggctcatgagtaaatttgtatgcagtataaagcccaagtagagggtgtatttttaatgactactttgcttacattttagattgtgcaaatgtctcaatcaatgcttgcaggaatgtggaccttcctcagttttaagcagaagaccctgagcaataaatactgttgcatgcttccaataacgtgagggatgggatagaaatgctatctacccgacttctgaggagaaaacaaagcagtggcatgaaaaatatacaacagagatcagtaaatgggttcaaatgaacacagtaaaccattttatgccttagggggaaaacacagagataataaatacaaatgacaaatatttacaatagaagcaacgaatgggatcagtaggcgaacacataaaacatttacacggaggaaaatggaaatgtgatgcctttcacacatccagtccaggagctggcggacaaatgaacagctgactcagcaacgcaggagaatgttattgctttagcttttgagtgatgtcagtaaaacagtcaacgtg

SEQ ID NO: 337528 - DNA, 1000 bp, Homo Sapiens
aagtcaacgtatctatttttattatgaaacattaaatttggacacattgcctcatttgcttttttaaaatctattatctgacttaaacctattcagcaaaaatgccaataaattatattaatcatactttgggtctttttaaaactaggaacataatatgttttatgataaacaataatactaaatctgagttgtatgaactgttaacttgaaatttgttttagatgtttagcttaaaacaaaaagaaaaccaatcacattaatacactgttgcaaaagtttctccggaatgccctccacatcactgtgtgtcagcatccttcggcttcttcactgaggtatggaatgcagccatatgtaggtgtcaaggcactcattctaagctgtcctatcctgcacatcttagcaatcacattagatggagggctgatgatatgcactaactcccaacccaggctatcttgcttttaaataaactaatttctttaaaagaaaatcatcaactaaggactcaaatgctgaatttagaaataataattccaattcaatacacattcaatcaaatgtgttagtacttaaaagtcacaaattttgcaaagtaaacaacgaatgaactaaggcaaatagcattgtcaccacatgccttaaaatggtatatttttggtgtttgaagctctttgcaaattacattttgggacagttcagatggatttaaataaaagatgtgtgttctacataaattcagttttaaggttttcaacatgggtggcaacattacaaaaatatatcaatagtcttaatagtgaatgttttccacctggtttctaaatctttattttccatggaggtaaaccaaagtttagagtccatcttcagagttatgatataatctctattgttcctagagatttgaaaactagatatgatctagatccttgccaggatcttcactttcatcatcctcatcctcttggtctccagattcaagttcatcctcttc

SEQ ID NO: 337529 - DNA, 1000 bp, Homo Sapiens
ttttttttttttttttttatattcttaggacatctgaatatttattgagaagccacagttttccacacttccataactgtaggctttatataaggcaaaagcaagatggatccactactttacatggaaagaaatagctctgcagcaaaccccagggttgtgcagttacagatcaaaatgcaatgtacatgacagatataaaaaacagtgtggaacaaaataatttaaattatggttacaatctactgaaggaaatatccacatcttattataaacacatttttagtctagggttgtaatttaaatattcgttttttttacatacacagttgagacgtaaaagcaaaataacatttaagaggagaaaactttgacagaagacagtagttttgaactgcgcgcttgatgttaagtcatgataggatcgcccccttgccgtggcaattaagagaatcaatccattggtatgtagccatccttttttttttggctaattatatgagtaaatgaaaggatgggttaacaacgacacaaggggttcattttttggttttaggggaacagaaagcatcaaaagttaattgttggagacttgccttttgtttttcaaaaaataaaaataaaaacacaaagcagatctatgtgttttaattaatttatttacgtactcatttaattaactggcatccacatacgtgaaacagagtgaatgtacttgatgtacttgccctcacatccatttaccaccaatgcatacatagtacatgaatgaagcatcattgatctttgctgataacagggacacgcctagtggttagactatgtattctccatgaacagtatttaaagaatggtgctccatattgcttgtaaacatatagacatggacatcaggaaatcagtggatatgaaggtcatttgctaatcttggtaccacatagctaaaatggcagttgtattgataaacatctcatgggcatggtagttgacagaaaattcc

SEQ ID NO: 337530 - DNA, 1000 bp, Homo Sapiens
tttttttttttttttttttttttttttttcttaattagtttttatttattttttaaattttattgcatgtcctggcaaacaaaaagagattgtagattggcttctggctccccaaaagcccataacagaaagtaccagaagacaagcaactgaagcttaaaaaatgtatcacatgtataataccttttgaaaacattaataaagcatataaaacttttaacatttgcttaattttgtacaattataaaaataatagaaaaaaatatccctttaacattcaatatcccacatactgttattttaggggattaccaagaaaaaaaaaaggtaaaaggatttaatgaaaactctgctttccatttctgtttataaacgtctccaaacaaaaacttttcaattcttcagctaactgcattgagctgaggccacaagaactccattaagcccactttctaatggtttctatgcttactatccttttaccccttaccctggctactcatacactcaaggagagtaggctgccatgaggaggtaagccagtaagggtgcctcgctttggctagtgccaaatccatgagacacagtacaggaatttccaaggccctagtgttacctgaatagtactgacatagctcggaagtcctaggtttattcaaaccctcagcaaagtaagggaagcagtttgtcttcttactaggaccaaggaacagctttcattcttccccttaatgggtttgcaaagctgcatgcttgttgcagaagtttacagtgcttattaccatttaagtacaacaaaactttgaaatcaaggactcattctctttaacatacaaaattttaaaaaaataataaaaaaaaactttcccttccctcccctcttaaaattgtagcattatttcttatttgatgtggtattcttactaaatggtattttcatgaaaatacaaaaacgataaaaaaaggtttcaagtgtggttctggaaatcccactatccca

SEQ ID NO: 337531 - DNA, 1000 bp, Homo Sapiens
acaaatgggaactgggactgtcgttcagcaccgagatctttaaaaactatttggcttttataatcttcacacatgcattcaaagcaagaaacacacacttccaggacatagatagggctctgtcagcaatgacttttgcccctgtatctacagagatgtgaaagtacgagaaaccacagcgagccaaatcctctccttcatgagaacagaggtttcagtggaatcaacagcagacgctggaatgcaaactacgtgctgactcggccaaatgatatgaatttaagagaggaaaagaattcaagggcaaagcactgaaaataacatagcaagaaaaacctatttaggccgagtgctgtggctcacacctgtaatcccagcactttagaaggatgaggaaggaggatcgcttgaggccaagagttcaagaccagcctgggcaacacagtgagaccctgtctctacaaaaaaaataaaaaggcgcggtggtgcgtgcctctagtcccagctactcaggaggctggggcgggaggatcactcaagccagggaggtcgaggctgcagtgagctgggatcacaccacttcactccagcctggtcaacagagtgagaccctgcctcaagaaaagaaaaggacaatgcacctattttatgctcgctgaaagacgaggctaatcactgtggacacagggcgttctggaatctcagctgcaggcagtgagtgttgcccgtgaaatggagatgccgcaaagcaactacagacatggagaaaataaccacatcctcttacaaccgcctctgtgaaaactgaccaggacagacaactcctccccaaaagtattactaacgtgctaacagctggggataagagcacacatactgctagaaatctaagcagcctgttttactgttttcagtgacttacgtgcaaacctaagactaatctctgaatgtctgatcaagacgtattcatgtaaaggccataagtatgaaattctgggca

SEQ ID NO: 337532 - DNA, 1000 bp, Homo Sapiens; identical to SEQ ID NO: 158230

SEQ ID NO: 337533 - DNA, 865 bp, Homo Sapiens; identical to SEQ ID NO: 158231

SEQ ID NO: 337534 - DNA, 1000 bp, Homo Sapiens; identical to SEQ ID NO: 158233

SEQ ID NO: 337535 - DNA, 1000 bp, Homo Sapiens; identical to SEQ ID NO: 158234

SEQ ID NO: 337536 - DNA, 1000 bp, Homo Sapiens
agcatcaccacccctacactcactctgaagttaaagcataaatcaacagccctaactggaaagctcatgctaatactttccctttctgcctccctcagcctgagagcatccaccctttccctatccttagccttagagatgaaggaagctggtttcacttgaaagacaaatttagttaagaaacacagctggtcttcagtccttctgttcttttcaaatctgaccttggtctagctcaagaaacgtttgttgattgcctgttatagacccgcctctgtgtacaccgagggttcaaaaatgaaagacagttctctgcccttgaggagttcaaagtgtcacttactccctgatgtctcactaattcccacatattaatcaggactggctcctgcacagagaagcactgagtggtggctgagctgccacttgacattgggttttccctcatatggaccctagtttctttcattttctgtatacacatctaaagcagaattattatggaaggccattagaaattagcttggattccgatgtaggaaaatgactgtaaaagtaaaatattaacattcttctttaaagaaaaaacaatcccagcaatccctcctgctgggattgtttttttctttaaaaacaacccctgtaactggtgcgtcatgtgtgtctgagattcttgcattgggtcaactgatgggggatccagtggtgactagtttgtagtaggctcctttttgggccatcagttcttcatgggtccccttttcaatcaccaccccctgtgccatgacagcaatgatatccgcgttctggatggtggacaagcgatgggcaatgacaatgcaggtccgaccctctctggctttgtctagagcaacctgcaccgtcttttcactttctgtgtctaaggcagaagtggcttcatctagtagcaagattttaggatctcgtacaatggcccgagcaatagcaatgcgttgtttctcccctctagagagttgag

SEQ ID NO: 337537 - DNA, 1000 bp, Homo Sapiens
aaaaaaaaaactttcataataaagtttattacctaaactgactttaaaaaatataaaataggattctgcacagcagaaaaataaagccagagaccctcccccaacccctggtttgtgcaaagatactgggtatatgtaaacatgaagaggtaggaggtgcgagttcaggtcctggctccagatacagttaagctgctacaacaaccagggggacccagagggagcaccaggagggggaggaccccctcaagaggtgagaaggggtctgcggcctcgtctccagccgagggcgggaggcgcctcgcccctacacccatccgctccctccaacccaggccggggagggtacccacatggttccaggcaagtaataacaaaataacacggcatcccagttaatgctgcgtgcacggcgggcgctgccggtcaaatctggaaggggaaggagctcaggtagtcgcggaggacggggttgagggggatgcgagccaggttctcgcggcccacggtggccacgatgcgctggcggcacagctcctgcagcggccgcacgcggcgctggcgcagcggggcccccagcatgcggcgcggcgccgccacgtagtgctccagcagctcgaagaggcagtcgaagctctcgcggctgccatccaggtgaaagcggccggcctgaaagtgcacgcggatgctcgtgggtcccgaggccatcttcacgctaagggcgaaaaagcagttccgctggcggctgtcgcgcaccaggaaggtgcccacgggctcggcgcgcagccgctcgtgcgccccgtgcacgctcaggggcccccagtagaatccgcaggcgtccaggagcgcgctggcgcgcgtgatgcgccggtaatcggcgtgcgaacggaatgtgcggaagtgcgtgtcgccgggggccggggccgggaccgcggggcacggccgcgggcgcgcgggggccgcgggcgaggaggaggaagaggaggaaggttctggccgc

SEQ ID NO: 337538 - DNA, 1000 bp, Homo Sapiens; identical to SEQ ID NO: 158235

SEQ ID NO: 337539 - DNA, 1000 bp, Homo Sapiens; identical to SEQ ID NO: 158237

SEQ ID NO: 337540 - DNA, 1000 bp, Homo Sapiens
tttctgtaagtattttatttatcactgaagaaaaaacacagcagcaagttctgtgttggcttcaatgagaccaaatagttcatctttaacatagctactgcgctccaaaattgaagtcaacacagtcattactacaaattacttgttgaaagaatctatcttcaaaagaaagaaaattaggaaagagaatttaaacgattcctccaaaccatacatttataaatattgtcatatttaaaatgcttgaaaggcatgaattctccattaatggaaaagcagtttgctattggcaacagaaaaaaactcagcgataatttaccaaatgctttaaaatttaaaagctatactgtttggattcacacttgcgcagtaatcttgtcattacaacaactgcaaattgctttgtactcaccttctctcaagtaaaatctaaagaaaaccccaccgtatccaatgtttgtaatgtttacttcaagtgaatctaaaaaatttctaaatttagtttatggtaaatacctcaaaatacctaaaataggtacgtatcaaccacttaagggtgtgaaaattgtttcagattcactgctttaaagggtcttcaaatatattttaacagaaccttacttcattccaaattattatcagatatttcaaaatcaaaaaatggtatcagttctataccaagataaaggtgttactcaatacctgaaggttcacattttaaatttattttttagtttttcttttttgtcaacaaatgattgatgaaataatgcaacacccttaaattccagaaaatggcatggtttttccaacctcctgtggatatggtgcatgatcaatctattatataggattaatacaagttcatgctttttgtgttatggtgaaacaacattaaagaatccaatttagattggttgaagcacaagtataataatccttgaatgtgatcaaacctatttaagacaccagtttaaatccattatcttgagacttaacg

SEQ ID NO: 337541 - DNA, 1000 bp, Homo Sapiens
gcataaagttactttatttttaagtatacatataattttgaaaaatataaatgctaaaatatctcatcttcttcatctcttaattccataaaagtcacaatagaaagcttcataaaactgtaaaatactatgttataggaattttaggatttatattggaaaaagttattagtaatatattgaaatgttttctgttctttatcattttgttccaccatgttgatctacttcatttaaaataaaaagatgcatcatttctctctccaaagttaataaagacttaagagaataaaaataagaatatctgaaagtgcgtattgattctgaaaagtaatgcgtacgaatatgtaccagccatgaaaatggctaaaaagaggcaactattcactcttttcacattgtaggactgggacaaagttacttctggctctaaaagtttcactggatgactttagccctgagttgcaatgtttgcctaggaaacagaattcttgctttttatacgtacccatagagcacaatgaaatgagccaggaaattggacatatctaaatctctggccaaaacacaacttgactggttggcgtattacacaacttttttaaaatttcaggctgcaatgaagctcaatgaaatcatctgaaaactcatggcctttcagatagtgaggtgctacaaaatatcacttgattgtacccagccatttggtgccactgggcttcatgctcatgctgtgaagagcaaatgtgaaatatcatgaaatataaatcagaaaatctcaggttcctgcaccaaaatcattaagtagtatgaaaaggattgaagaaggctttgtcccatccctgaacaatgtcaacctctgtaatacaactcaaattatttcattttgtttttaaaatatagtcagcagtcaatacatttcaagtactttaacacagttaaaaaaggaaccaaaaaactcggaagacaatcattctctattaaacaccagtatatagtt

SEQ ID NO: 337542 - DNA, 1000 bp, Homo Sapiens; identical to SEQ ID NO: 158239

SEQ ID NO: 337543 - DNA, 750 bp, Homo Sapiens; identical to SEQ ID NO: 158240

SEQ ID NO: 337544 - DNA, 1000 bp, Homo Sapiens; identical to SEQ ID NO: 158242

SEQ ID NO: 337545 - DNA, 1000 bp, Homo Sapiens
ttttttttttttttttttttttttttttttttttttttttttcaattactaaacatttaaaatatatttctaaacagaatgggccgactcagtcacagtaactgttgatctccatagtagagcaacccacaaagacagaactgatttttttcccataatcaggggtgaaaaatatacaacttgtttctgaaccaaaaccacaatttctgcagtttaaaatgtttcactgctaatatggccctggtagaaattatgtagttttttttcttctttaaaaaaaaaaaattaaaaaaatttcctaagacactaaatcctcaatctggaatgtagattctgagcacaaagcagctcagttaacctaaaaaataaagaaaaaattcccatcacctgtctcagtagggcctgaaaggagagaagtagtgtggggaacccctgctttggtatggagagtcacggccccttgacccagaccgagaccgtgagtagccatagctggtgcttctctcaggataaactcggatgtaggaagtttcaccctcatgagagcggaatttggtgtcatccagtttacgcagggcatattccatgtcttcttttctgagatactcgaccatccccactccatccttctgcacatcagcataacagacatccccagcttctcgcatgtgatccttcaggtcctgccagctgcctgacggaggaagtcctgaaacaagaactcggaaatcagatcttcttgtaggaggcccattcctcccaccacggggccacccaccccgacctccataagtcctggggaactccacacgaagccgacactggccataatcataaccatttcttccataaatagcatcctctgcatctcgggggtcctcgaagcgcacgaaggcgaagggcacgaggccgtgccggttcttgagctcgatctcgcggatgcggccgtacttgtagaacaggtcctccaagtccttctcgcgcacgtcggtcggaaggt

SEQ ID NO: 337546 - DNA, 1000 bp, Homo Sapiens
tttttttttttttttttactaatagagaacaattgtaatttattttttaaaaatttttggccaaaacatgaaatagcatggaaacactttacttttaaattacaagttacattaatattcatatgtgcaaagtagtttcaatgtcttgaataaacatacttagtttacaaaaaaaatttatcaaaattctgatttagattacattttagcagattaatccctttttatatgtattaaaataataaacaataatattccttagtgtctggcactttcagtaattatttctgctttcttcataaaacaggatacaaacatatgacttatttaaaatcataaaactttattattgtaatttccttttctcatcaaagggccagatatgacaatatttttcaaattatagacaacatttgtgagtatgcagtaaaaacactaaaaaaaaaaaaaaaaaaacttattaaatctcaaattcccaagatgttcccccatataaggtgggagctcatatcatcacatgtaacattacaaaacctgtactataaaattagatgaataaataataaacctatactattaccaaattcataataaaaagatcaacttaccaaattaaaatcagcctatttattcccttgtataaataacctaaagttccccaggtttttatttcccagtttcctacaaatgaattgatcagaatgcctctttatagatcagctttcccatagtttctctctcatttggcaataacttcccatatttacttcatttccagaataatctccccctcttgcaacccacacaaatgtaagagaatgaaggcataatttctataattcataattatttccccattattgaatttcatttttgaattattataaatcatcctgaaatctaataatataaatctttctcatcctatcagtctattaaaatatacaaaacatcatttaagatggttaacacaagaaaagataactatggcagccttcat

SEQ ID NO: 337547 - DNA, 1000 bp, Homo Sapiens
ttttttttttttttttgcaaaaataatcaggcacactttttattttacatcttaatcaacattacaaatacaaaaggaaaaaagtcagaaacaactcatcacagaggaaaaaaacatcattcagaagagattaatctgaacttcaacgttctttgtgctcattttaaaattattaaaacaggaattcaaaaggacaagcaaataaaaaccaagtattttattaattaaaattgagaccctaaaccaactaagactatacaacttaaaaataagctgtcttcatcctagaaaagtttgatttgccatcttataatgaatatgcaggaacttactaatgggtaagtaaacaaattttcttttacaaacaagttattttgagttatagggatcctcctggtgactagattttttttaatgactaaaaatgcctatttagatagtcaacctatccgtaaagttggacactaaatgacatagtgaacatttaaagttgaaactctttgtctaccaaatattttcctaaaactgtttttaagcatatacattaacttaaaaggtcaactcttaattgtctatagccaaagagagctttggtaccaataaattcgaattagggaatcggtttttttagatgtagaattacagagtatttttggaattaaattggaacgtgcctaaatatgaaaatgtgaaagtcccacttttctgttatgtactctattatgaggaatgaacagcctaactatactggattattgatataaataaagcaccactgtaaaatctcttcctaaaagattgctgggtcacacctagcaatttagggcaaaaagtcaataaagaattaaggtactttatttttaaaagcctcatttcccttttgacaggagcatcaagatactaaaataaaaataatgtaataagtactttcaaaatataacaattttcgttctcccatataacaggtggctaacaagaaaaccaaaaataaataaaaaga

SEQ ID NO: 337548 - DNA, 787 bp, Homo Sapiens; identical to SEQ ID NO: 158243

SEQ ID NO: 337549 - DNA, 1000 bp, Homo Sapiens
ttttttgcaattaactgtagaacagttttatttttattaaaacttgactgaacaaaaggggaccatcaacattgtagacactggacactggaggccttacagagtgctagcctcttccttcaggactcacctggggcctgctgcttttatattttgaaagagtttaagggctaataatttaatttgttgtttgttaaaaattaaaatctccgttctttccggctgcattgcttttgcatgttcacatatgatgtacttttatgatgtacttttttttttttgagatggagtcttgttctgttgcccaggagggagtgcagtggtgcaacctcggctcactgcaacctttgcctcctaggttcaagtgattctcctacctcctgagtaactgggattacagtcgtgtgccaccacgctcagccctgagttagtttctagtatttttttctgactttcactctaaggatagcgttgaaaaaagaatgcacgtgtgagttactaaaaagttagaataatgtgcatgggaacagtgcagcaacatgctagaaaatcctcactgcactccagcagaggctagaggaatgccagtgttaccttacgcttctagaagcagagccactccagccagaacccattttgcagtcttctcttcgctcttcagcctgaaggtccagatgtagctggggcctctcagtttggttctatacacagggcactcgtaggtctgtttggtttcttgtctgtccacgggggtggcttttgcaaagatgaccggcatagggcatgccagctccttgagacgggcttcaacaatggttcctgcttgggtgtcccagcgggcgccctccatgaagagtccgtggaggtatgcaccttcccttggcgggtgtccataatcttcctttgtttttttggtaacatcagcagtcaagcgcgttttatccaggggccactcattttttcgagccatcgtctgcatgattgcagttaagaaggactg

SEQ ID NO: 337550 - DNA, 1000 bp, Homo Sapiens
gcgagacaaagtcctttattagaaaatatatcaaaatcccagccccctgagccaggaccagaagagggagctattccagcataggcagaaaatgcccagggaggggcttccttcaccaaacaacttcccgggaaccataaatagaataaatattcacagaggtccgaggagaagccagatcactcttctctccatggaagagggaggggcttggggtccagccctgctcctactctaggggcagggactcctaggaatcgtcacataaaatcatgacatcaaggattcacagtcataagccctacaggagaccctagagagagggacccctcaggtctacaggagcccagctccagtccagcagtgagggagaggcccctaccccctagcacggcaccagagttcagttccctcacatccctctgagaacagtgaggagctgagggtggggagaatacaaccccatgaattcggtttcatgattaaggtagacaggaaggaggagtcagtgtgaacctcggagggctgtgtggttggcagtagatagaggcccaggcctggctgggggccggcgttgcagcatctcttgacggaaggcttgggaggaaccaggtgggtaacgtggcccagaaggagcccgaggaccccgagggtcagtcccaatgtctgctgtgatgttggtataaagaggccccagctctcgagccagcaactggtatgtcagtgagttcatcccatcttgcgtccaggaattctgggtacggaccaggaggtcaaatctgtggggattttcctcattgcccttatctcctcggtgcttcaccatcttatagtgtcctacagatgtggggggccgagagatcttcatcccagccaggcgcaccctggtagcaatgtcgtcatcctcaccaccccagccccagtattcattggggaagccattcatcttcaggtactggtcaggagtaagtgctgagactcctccgaagtactgggggta

SEQ ID NO: 337551 - DNA, 1000 bp, Homo Sapiens
aaagttttttgttttcctttatttttaaaaacttcataaaagtgcattgtatacattgttcatcctagaattgtgtttgtcaaacgtttgtagttttccccatccctcccaaaaaggtttttaattggtgattcagaatatttgtcatctaccaaattaaaaactgcaggtttgcaaacttggcactccaagaaagaaataggtgccataaaatgattaagtgttggcatgtgtacacctgctgtcaggaaataaacttcccgtatgttgcattttggcagacatgcatcttaaaaatgtgttgaatgaaactgcacctgcactctttatctttttcaacagtacatcctatttgtgcctttaagtgattacttttgcttcgattatcctttacagatatattcgaagttagatattacatgaaattaaatggtggtgctgtttaagagtgcagtaattggtctaatccaataactcattgaaataggagtttggttcttaacatcaatgaggaaacaaaacttgtctattttgaaacatttaataactataaaaacttgagcctgagacacattagtttttcacattttaccacgtcatgtcaaaataattttcccccatatattaataaaagaaagtattaataaaagaaatttaaaataatatctcagttatttttaaaaagtaaatactttcgtgagaactgcattgatgaaacatctgaactttataatgtgtttgtggaataactcaactaaatcttattgcatttagaaccctaaaataggtcaaaaaatttatcctttgcacaattaaaaagtttccttaaaattgatagtgatgttttatttacattaaattatatattaaaatgaaaagcttaatctaaaatgaaggatcttttgactgtcatttcttgaattaaaatttatgtggaaaacatatgcagatacattttattggccccctaacagaagacttgaaccattgatttatgcat

SEQ ID NO: 337552 - DNA, 1000 bp, Homo Sapiens
tttacaggtatgttgtatttctttattctgataaatagaggaaaaacttataaactacacagcatatgaaatatgattctgtagataacaactgccaacagttaaaagatctttaatatttgaaaaaacatgtacatattgtcttatcaaagaaaggccaaaatttgtcaattgaaagcattaatgaaatattttggtaggtccctaatcccaatttcacattttttaccatctagattatacactgatttaaaatcaaacatatgaaggtaaactctaaaatcttcataggtcaacaaagaaaatttatccttcacacttatttctagaaagcagcagggcttatttcctagattgcttacaatgaagctagaatatctgcgataactgtagagtttcaaaaaggatccctagggctacttctacgttctccttaccagttgagcacyctccataatttccagacgggtcatgggggagaatgatagaaatgagcgtgggaagaaagacaatgaaattagaaatgggtgagacacatggtggtagaatgctaagagcagggatcaggacaatcaaccaggtgtctaggaagggtcaagtcaccagtgtcatctgctgaccaatgttaggaagaaataaactcaaaggaaacaccacatttttccaattaaacycaratctattgacttgtggtggtyctttgatgttgtggggactgctataacagaaaccaattggattttcaagggcaagaaactttgccactgaataagatgatgtcatccttcctgataacaaataggaatgggtggtcagctctaaacagcgtggactgagggagttgcttttctacaatattacttcctgtggcagcagtagcctcggtgccctcctcagtgacctctatgtaagatttgtgcatcatccttgatatatacagacgaccccccgaagcaatcccagagagatctgctttggattcatcaaagatatctttcag

SEQ ID NO: 337553 - DNA, 680 bp, Homo Sapiens
ttttttttttttttttttgcagaaggctgtaaagctttattgggagaattttaatggtcaaatttccaacacaggagcagcctgaaccatttcagcgtgtcttcttttaaggctgtgattgcccttcatcttcctcaggtgttttcacctcctctggatttggcaggcccaactcctggacatcaggaccatctccgcgctcacacccagtcttcgggtgaacctgttcctggctatccgcttcaggctctggcccttctgcgggcagtttcatctgctcttcatttcgcaggcacaccctcttggtatcaggaccatctccaagctcacacccagtctttggctgaaccagttcctggctatcagcttcaggctcctgcccttgagctgcagatgctccctcatcctctctctcttcagcaggtgtagaatcctgactttgagttggtgattccacttcgtcaggttgctcatcactggactcctcagaagattctacatagatcattggtctacgccgatagattaatcttcttagaaaacccatatttcacaacttcagcccctgggaggactggcctgcggatctaccagatgagtctcagtagaggaaaaaagtgtccggacagcaggaacgcgactgcacactctcacagctccctggcgttctccacgtgggc

SEQ ID NO: 337554 - DNA, 1000 bp, Homo Sapiens; identical to SEQ ID NO: 159878

SEQ ID NO: 337555 - DNA, 1000 bp, Homo Sapiens
ttttttttttttttttttttttttttttttacaaggacacctctttattgctgttagaaaagggtggttacaagtttcctggacatggagagggacactatccctaaatccaagggaaccagaaaatttatagtatcaaacagaggaaagcgggggcagaacagagctgggcttaagatcagaaaattttcttcctgctcattacccaagcccagagttcttgccccagcttcaactgccaagataccacccttcaccccgacatcctcctaagctaccacaattcaacaaaggtgcaggtgcagaacttcagggtgggaatggggtgcagggaagcaggggctgtgccccagcccagtgccctctgctcaccctgaggtacccagtgcctttccctctgccagctgtacctcccggggaggggcctggacacatgtcaggctggggcagcagccactctgatcagcaccaggtcccgagctgggggcccctcttcagtccaccaccgccgagctggccatggtgttcacgccacaggccccggacccgcgatgcaagtagtagtaacccttctcaccccagtcagtgccccagctgttcttgatggcccaaaagggaacgtcagagcggttgccgtagcccacaagcaacaccgcatggtcaatgagccaagggctgcagaggggccggagagggcgggagatcccgtggcggtaaaactgcatgccaaaggcattgatggccacggagattgggcctctcttggccagccaggctgccagcttctgctcgttctggctcagctccacggagtcattgatgtagaccttggccttctctgctgagaagttgcaggactgcatgtgaccctggtagctgtagtcatcctctgtctccagccctcccaaattctttatggccgagtaggcattggagggcaagccgcccatgcaggccttgtccatcttgtcacagtccaagagctcctgttcagagaggg

SEQ ID NO: 337556 - DNA, 1000 bp, Homo Sapiens
ttttttttttttttttttttttttttttttttttttttttttttcagcacaatatttcatttatttattgtataagtttggcaaacagcacaaaaatccagcaacatttaaaacatataaaaaagtcaaatgctaaacaggactagggatttttttttacatcattagaaataacgagtacacattttaagattctgcaaagctagcaaaatgaagatgcttgccttctgaacatatactacaaacacacatacaaaaaaacaatataatttatctttacaaaaattacagccaagcaatagaaaagaaggatgttaatgatgaagatagcaacacatatgtttagtacatatatcttacacattgaaatgctacatcttataccctgaaatgccatgtgtagagagccaagcagagtaaatttaggctcattactgaggttaagaattatttgagaagaatttaattcttatatgtaacatattcagttaaaactttctatataggagttgctagaggatgacaatgtatcccattatagatctgagaagttgagtcttctttgttggcagtataaaatttctgaccagtatcaaaattctggtaaaacacaaattgaaggcattttctagtgtatgcaaacattacaaggggcatcaatgaatgtagaagaaaatcgtagatttttcacatcaagtttctgctgagctttgtcaaaccaaatagctcaactataaggcaagagaaaacaactccctataacagattagtggatcttaccaagtaaatataggaattcaatcttagggaaaaattccctacattaatagatctgaaacagctggtcttgaaacaaacatctagaaattaacgaacatcttgacattcagtcattggttcagaagcgtgacaaacaatctgttggtatatattattaaattaactttttggaatcagcaccagtccccaaaacctcaaattataatatttaatcttcatt

SEQ ID NO: 337557 - DNA, 1000 bp, Homo Sapiens
ttttttttttttttttttttttttttttttttttgcatatcagaaatgcattttaatttttatttgaaaacaacttaaatttttagacaaatgattttagtatataaatttgcttttgtttttatacagaatataaagatttccctcattaatcttccatgtgaagggtattacaagcctggaggaagatactttctgcacacaagtatgtatcttatgtgtgcagtattggaaaccaatggtgtagtgctcctacacataaatggggtcaagtgacatcacaaattaaaagggggaaagagaaatattctagttaatcagatgcaagaagcaaacaagacgcaaaaactgtgcaaataagaccaagccagtaactttagttacgacactgcagattacactggaataacaggtttgtgaggctatagtgtgcaccacattaaaacagcaagaaagagctatttatatagaaaggctggaatgagggatttttactaaagcaaattaacttcttgtcaactgccaaaacaaaacaaaactgagcatatgagtgttagtatactgaaggcatgttataccagtttctgtgcagcatgctaaaagttagaacttcttcactggtgcttatcaatcattaatagtcacgtttttgccccttcttgccaaatttcaggcatgtcttattttagatggagtatagcttttatctattatttcatcttgtaaaaacatgtgaagacaacgttcgttctgtgccagaggatgaccagcgaccttgtttataaactgctccagcccttgttttctttcctcaataaaattgtcatcaaatattccatcatctcctctaaaaggaagctgacgcaaaaacgctttcccagggagcgggggaactacgaccttgctctctctttctaattcacttcgcagccattcaaagtcactgtatcttcttctaacagtagattctttcagcttgaaaataggaagatttgtcttg

SEQ ID NO: 337558 - DNA, 1000 bp, Homo Sapiens
cagataaacagtatgtggtttattcacacaatgaaatattatacaaccatgagaatgaaaatccatgtacaaatacatgcaacaaaaatctcacaaacataatattggtgaaaagaaaccagatacgaagaatgcataattccatttatatatctccccaaaccagacagaactaatctatgcgcttagaactcaggatagtggtttcccttggagaggtagttaactggaagggaatctgacggggggcttctggggtgccgattgtatgcacgtgctccacttgtgaaaaatcattgatgtgtttctatagttacactttaataaaaagttaaacaaaatgatttgcctctgtctggatactcgactcaaaactgaaaaaaatgtctcctttgctctcagcctctcactttggctacactctcgtactggcattctcagctcctgccacttgcaaatggtgagggtgggaagagaatccctctccctgccatgcaggctaaactagatttgctacaggttgggctgctaaagaaggtggtctaccaaactgaaattcaagtcttatctctgcttcctgccagtgcactcaagtgctgtcttgctctctctaaccccctctttcaacaaagccccttactcagaaataaacactcctctcagggaacatctaagtaagtatcaacgttttgaaccaaaagaatggagctctaatagttaacatctcaagctgcaggtggtggatgggtgaggagtcatctgggctgacacccgtggaggtatataacaagcacttggagggcaggcccagcttgaggagggggtgtgaaaatcctggctctcctttgggcaagtctgtatcctctatgactcagtttcctcatcattaaaatgggaataatggtgctgagatgttataacaatcaaaatgagttaccacaggtgaagaatttagcaaagtgactgacttaggtaggaggctaataaacattagctgtca

SEQ ID NO: 337559 - DNA, 1000 bp, Homo Sapiens
ttttttttttttttccggaattccatcagtagttttattacaatacgcactgacacacaattggaaaaggaatgtcctgacattttctgagcatttcacggaaagcaaatgtaaccatccacgcagtagagtcatccacaccttttcctaacaaaaagcaaaagctttcacatgtgataactgaagaaagcaaagttttcttattcttgtctaaaaaacttcagtctcagaaaatagttattgaagtgagctgagaaggagcacatttccttcacaatgtccaaaatcctgcctctagattatccccctgaccttctaaatgacttttataatactgcagatggtattatgttcaggggctaaatgggatctacttataaggccaactactctatgtcactataattgaaaggaaagaataaatttaggaaaattaagtcctgctaaaaatgcgcaaagacttgaagaaaatatctgggtgtattaaaagtgagatgctcttttcacgtaactcatttgaaaggttacaattaccataaacattttaactccattaaagatcattggcaaaagcttgctttcgtatctgcaaaagggctctgcctttccacaggctcggagggaaagcagcacaccgtggaagagtcactcgtcctggggaagcaggcatcagactatttgaagttgcataggcatttttttttaatccattttgtaaagatactatggaaccttgagaattttccctccttcaatagtcattgtggcatcagttgttttaatccctttagcgcccaaatgtgcaaaaacactctagtaaaaaacgttacaatggcgttttggataaattcactatacattacatgacttgggaacaacgaagaaaaaagcccaagcttgactcaactatttcatatagaaaagcactgcaggagaaaactttgtttaaaaacattaaaactcaggtgaatataaatacatttttggttcatctgtgcta

SEQ ID NO: 337560 - DNA, 1000 bp, Homo Sapiens
ttttttttttttttttttttttttttcggggaagaggacagacgtgaaaactgtttattcatacagaggaggttccaagccacgaggcgcccgtcgaaaagcacatcacctctgtaacaacacacgagacacggccatggcttcacagctgcagcaaatcccaattcgccccacgacacattcgtctgccctctgaccatcattcaatgtccctccaacttcattcaagtcttctccttaaaactgtttcctaatcttcatgctatgaatggtattttcttaacacataattttgtagataaagaaaaacaattaaagtgtcattagttggtgcttttttatatgagtgaaagacctgacattattttcccctcaagccagaaaataatagggaggagaaagcatgaagacgtctcatccttaacccaaaccattcacacccaagtcacacaggccggctggctctcctcgcacctccggtcacttggccttcttgccacctttcagggactccaaggcggccatcctcgcctcctcctctgggatgaacacgctgacggtgaagtcgctggtctccgagccatacttgttcttcacaaccagcccgtatttgcccgagtcagcggtgctcacgccgttgatggtgaagtacgcggtcctcccagcctcgaacttgaggttgcagtggtcgtctgaggccagggccttctcgttcttcaaccacgacacctccggaggcgggtctccccacacgttgcaagtgagattaagggccttcccctcctggatggtgaccacgtctgggagacctcccaacacccgggcacgatttttctcggcaatggcagcttgtttcaacctctggaattcagcataggcctcatcgtatgcttgtccagagagatccactgtcttctgatgtccagttttgccatcaaagagctccatgacatacttccctttgtcattcggggtgggctcgttgatttgtagccagatc

SEQ ID NO: 337561 - DNA, 1000 bp, Homo Sapiens
ttgtggtataaatttttattttaaaaagtgttaaaaaatgccttgccctcttgcctttgaacattaattattcaacctctttggaatctaagagatttgataacaccatttggatggtggtacaaggagcaaacagaactcacccaggcccctccagcaaagcctggagcctccctccattctcccttttgggctgtaggagccaaggctgcgtggtggccaagtagtaaccggacaggtgcagacaggagagccgaggctcattactttacagcagtgctcttctcaaccggggcaattttcccctttccttggaccatttgacaatgtttagagactattgtcacaactggggcggggggctggggagaacagtgcccctggcatctagtaggtgggggcagggatgctactaaacatcctacaaggaacaggacagtccccacaacagaattacccaggccgagatgccgacagtggcaaggctgagacagcctgctctgcagccccatttcaggggtgtgtatgtgtctgctagagttgaggggattcacaatcagaatcaacaacactgttatcagcccaagacaccagaatctgttccgacagccagattgaccatcaccacacccttctcgccctccctctggggagagctaagcacacagccttccttgtcggtttagcaaaatgccagtggacactgagcggcctacccagcttcagtcttctattctagttctttcatccacccccaggtttcaggtgggctttgaaaggctgggtgctagaggcacaattaccacactcagaagctgtcctttttcactctggcacacagaaaaaatatgaaaatactttcacagtacacagagtaaaccgaggaagccactcaacagtatcagccctgaggttctggtctcacccaggggtagagatcagcatttcctgttccctctccagggcactcaggctgggtgaaggtaccagaatgccagga

SEQ ID NO: 337562 - DNA, 1000 bp, Homo Sapiens; identical to SEQ ID NO: 158248

SEQ ID NO: 337563 - DNA, 1000 bp, Homo Sapiens
ttttttttttttttttgaggaaaaatgagtgtttattataaattgtactggcatgtaaacaaccttggcaacatagcaataccgtctccgcaaaaaaattaaaaagttagccaagtgtggtggcacacaactgtggtcccagctactcgagaggctgagatgggaggatcacctgagcctcgggaggtcgaggctggaggctgcattgactcatgattgcaccgctgcattctagcctggttgacagaacaagaccatctcaaaaaaaagaaagaaagaaaaaagctagcccccaagtatcacacaggaggtggaggctggggatgagtctttaaattcctcacgtattaccataactcagattttctttcagtctatttctagatgtttctatagccccctagcctgggcacaatgctggcacattacagatgctcaatacacacaaataggcaaataagtacaatgaattaatagaaaggatgaatcccagttgcttgggaggctgaggcaggaggatcgtctaagtccaggagttcaagaccagcctcggcaatgtcgaagaccccccccccaaaacaactcctctaaaaaagtccattcacaaactcaggatcctctttaaatagaaatatatatatatatataatatatataatatattatctgagctcaggctcagaataaatatcaaggtccaacttggggaaggagtgggtgaggagggtcctcaaggggaggtcagcagcagggacccctgccaagccccttgaggtagagaaagcagcagggacccagcaccaggggtctccatgaaggatggagtaggattcggactctgtccaggtgggctgcacccaggctgggcgttattccgacctcggtgaagggagtccggctgggatttcgggggtcacccggaagagtcccaagactgtggcgccctgggtaagctgccaggcatggcgtgccctggcctcagtgtgaagatggacgccca

SEQ ID NO: 337564 - DNA, 1000 bp, Homo Sapiens
tttttttttttaatgattcctttattgcatttaatttttgtgtgtgtgttgttccttcgtccattagggaaaaaaaagattctggaacagttctttttatagcatggtcttttgccccctcccccgtttactgacaggtggtgaaaggtgttctttgacattatttccaaaagagacagttttcttttaccccatccttgtcaccccaactttagctccgtagtcattaccacccaaaggttttgtttacaaacttaatagttccagtaacactgctgcgagtatgtcatacccagaatccaacagtgcaaggcggtgtccatccagcgcagctgattcagatggggccttgctgagtaggatcgaaccttctcttcttgacatttttaaatccccagcctgtgcccccaaggacaatagctgctaccaggatggcaccagcgatggagcctattatgagattggtggcactaggacccttgggtccttcatccttgggggggtgaaggttcctaactggatcccggatactgcaatctgtccctgcccaggtgaaatcacaaatgcaggtggcttcattactacacaccccatggcccgaacagactttacccttggaatcgagtggacagctgctcatatttagggcttgaatttgtaggcacttccgatctaaacacatcatagacgggccacatggcgttccatcttctacatagcccacatccgtatcatcatctaaaactacatgggcaccactgcagtcaatcacccggccttgatggtagaaggaagttggaatgatctcaccctgaagttgaccaatacgtggagctcgagtaagattggtacagagtaagaatccacagaacacatcatgtttgctgcactgaatccaccggtctccatccttcccgcagtttcccttctcagtgccttctgtattcagcttttcatagcagaacttgtcagaccctgcagcctttgttccccagatgta

SEQ ID NO: 337565 - DNA, 1000 bp, Homo Sapiens; identical to SEQ ID NO: 158249

SEQ ID NO: 337566 - DNA, 1000 bp, Homo Sapiens
tttttttttatataaaaagtgtgcatttaatcttcaaaatagtcaaggctctaatcaggttaggttttccatagttttaagcaggactttgtggttttagtgaagaagtcatggtgcaattgaaatcactgtaagaaataagtgacttttaaaacaaacacagacacacacactcctcttaagagtaatatatacacaacacagcagctacatgggtgttcaggcaaagggtgcatgaacgagaagccctctgctccctgcccgatgagaaagtccccagaaaggattcagcagcagcaagtctacagcacaaacatggatggcattgtccctgaaaacacacagttaggtggacctacaggagacattggagcctagacatgtgggaaagggctcagttacagtacattctactgcatacacttgaaatattacagtgtgttttttctccagactattataaataatttttcgtgctttctgaaaaaaataaaaactgaaactttcagtctgcgatgaaggtgaacccatcttataaagcagagcttacttacattctgcaggattttggtgtggatgcatagaaggcttacctggttagtaagcctccattcctccgacctacagaaggcaacccttctgcagctccaagcagggatttctagaaaagaccaggtgtacaaaacatctaagctgtgcctcccaccacaggtggggaagtcccctgatttggtcagacacagatgaatgtctgtgtctgactgagcccagaaacagttcaattgatgggggctggaaccaccaagaaaacactcctgacctgggcaacactgtcttccagattattaatacttttgttttaaaaaaatccaaatggttttacaacccgtgacttctttccaactcaaagctgtagtttacttacaacacaaattctaaacacatagactgtatatacagattttttgaacccacaaataaaaaataccctccaaaaaaa

SEQ ID NO: 337567 - DNA, 1000 bp, Homo Sapiens; identical to SEQ ID NO: 158250

SEQ ID NO: 337568 - DNA, 1000 bp, Homo Sapiens
ttttttttttttttttttttttttttgaggagaaacaagatatttacatcctcccacagcatctccccaaatacactgtttcatgacaaatagaaaacaggagccgaattcaaatccaatttagaaaatcacttccgatgtggtatccactaaacaccacactgcagccaacccagtccagccttggctgtgaggcagtgcccggggcctgtcctgctgaggccacaagagtcagacgcgcagacagctggggtctgaagggccctctgggctggcccaggagggctgggtgtgtggtctgtgagcgaggggcaactggcgctcctcctcaggactctggggagctcaggccacagcagaacagaggccccaggccctcactggcccatgggaatggcacgtggcgtccccagctctaccccagcaggggccccacctctccctccactggaggagacggaagccagcccagggcggagcccccaagcctccgggctccggtggttccgccaggtggacagcctctttcagcagccgtcgctccaggtatctctggcgtcggggtgcagagtctgtgggtcagtggtttgggctcctccccgtgaatgagggtattgtctcctccacggccaccgtggtgacgtccggaggggcctgcagggcctcaatgactgtggcctcaccttctgcctcctgtcttttccgctggacggagacgatcaccttgactacatcaccccttggctttcttcttttcacacatatgattaggccaactgtggagcaaacaatgacgatgacgaggctccctgagagaaaccaccatacccagtgggagctgctggtcccagctccggccttcgtcaccagccagctgcacttggtctggtgctgacattcctccagggtcccattgggagagaaggtccccggggggcagttctgacacagggtgtcctgactctcggtgcctcccttctgcaccctctggcccgggctg

SEQ ID NO: 337569 - DNA, 1000 bp, Homo Sapiens; identical to SEQ ID NO: 158251

SEQ ID NO: 337570 - DNA, 1000 bp, Homo Sapiens
gttagttaaaaaatttaattgtaaggatcaagcagtggttattggtgaaaccaatacacactgacagctttgaagtgttcagatgctaattttaaaataaatgtgacaaataccaatcagatgttcataacacttttcaggatccacatcaacttgattatggacatagttcaatacacaagggtaagagaaagagtgtgtaatcaccaataattaaaccagaggcataattttttcaaataatttttagttacagaataaattctaactttttaaagtctaaagctacataaaactcaaagcaatctatttttctacctgaggtcaaaatgactttcctttttcctaactaaacataattcttagcattgaggtaaatctgaattcatgtggtatgctttgtcaaacttttccaaaaaattttaagccctgctttagagagaaattctcatgttacacatatatatttacatattttttcttcaaagactaatgacaatgtatgatgttaataggcctgtaatggaaccatgatactactaataatatgaaataaaaagccactcatttatataaagtgttcctgaatggtgcaataagaaatgggatcacagatttatgtacatatatgaatcactaagagttcagaaattaagctcactttaagaaaactcagccaggcacagtggctcacgcctgtaatcccagtactttgggaggccaaggcgggtggatcacgacgtcaggagtccaagaccagcttgacatggtgaaaccctgtctctactaaaaatacaaaaattagccgagcgtggtgacacacgcctgtaatcccagctactcaggaggcaaggcaggagaattgcttgaaccagggaggcggaggttgcagtgagcccagatcgcgctattgcactccagcctggacaagagagcgagactctgactccaaaaaaaaaaaaaagaaagaaaactcattctatttttctctttggagcag

SEQ ID NO: 337571 - DNA, 1000 bp, Homo Sapiens; identical to SEQ ID NO: 158253

SEQ ID NO: 337572 - DNA, 1000 bp, Homo Sapiens
acaatttactgaatgaattaaatcacataaagttagttactttacatcatcatatattaactgtgcttgacgcacagtaaacattcaatccatgttattttattaccgattttcctcaaaggaaaaatctactaagatacttacttacttacttaaaaaagaccagggagcaaacatatgatcattttaattacagatgattgaaatacagtgcaacagatgagacaaatacaatactgtaccagtttttaaaaacctgaaccataacggcttcgcattctagtacacttacttacttaaaacaaaaattgcttagataacaaaactatacttcaagttgttttagaaacagttctgcgctaggaacatacaaaggaaaatgacccgttgtgcttctttaaaatcgaatgagagtctcctctagggtcctgctgacagagccccccccagcctccgccaggtgaggtgcacagggcccactccaggcaccagctccccccaacttggcttctctggtttgtcgaaggcatcatccagtccacactatgtttaacagtcctagtcagccaggggattacatatttctcgcccatcagaccgaggtgtggacggaggtggcggagtgggagggcgaggagccccgctcagatgaggatgagacggcgcgcgtggccacctcccgctgtaggccctccacacgcttctgcagctccgccctgacggccagcagctccttgagattctggtgaatgggcatctgaggtctcatccgtggattccatcgtacataataatttacccacaattccaaatgactcagactagcaacaggatataacacgtggttttcataattcacaaagaagggattagaaaactcgtctagctggctattgatatacgaccataaagatatcgtctttgtatatacatcctctttgaatcgctgctgttcacagttgcacaaaaaggtcccaaaaagacagctataaaggtgatc

SEQ ID NO: 337573 - DNA, 1000 bp, Homo Sapiens
tttttttttttttttttttatattttcatttttcatcctaacttactgaagccattttctttggttagctttagaattatctttctttatactaaccagcttagcatgtaataattcttgcccatgtgactacaaaacattagatatctccacaaataaaaacgagattcacctacacaaatattccttctctttaagttcacaaaatgcaagaagaaaagaaaaatgatgttaggttgtcagtaaggaaagcatttctagatgagaaaaagaaacttaagtgttatttcccccctacagttttgaagacccggctgaacacagcataaaaattgtcaggaccagtgcattctctttacagtaggaggtgagctaggggttgggttggttcaattctggcagccaattcaagagagaaccatcaaagtgacagtgccttttgtccgtttaaggatggcaacagcttcttcatgggtgactccttctagactctgcccattgacagcaatgatctgatcgccccttttcagacgtccgtcttcagaggctgctccctttgcaaacactgttttaacataaatgggtaagtctccatgagggctgccatatcctccaactatactgaagcctaagccatctggtcctcgctctagtgtaatagacttacattgaggaggtcctaaatcatcctgaaatatactgcttgacgtcagcccagtgaaagaaagactggaacttgcaggctcctgctgatgacctgtgaccacactcacgtctcctccagcaaccacctgcatttcaatggagccagatgcatttttcagtaggttaactgcttgggtgtgagtcatgccctcagtggatgtgccacagatggtgacaatcctatccccaactctgagtttttgggtctgtgctgcaactccagttgggtgcatcattgcaataaatataggcacatcaccaagtgggctgcctactcctccagcgatgctgattc

SEQ ID NO: 337574 - DNA, 1000 bp, Homo Sapiens
tttttttttttttttttccgtggaaatcagttttttttatttttttaagaacacaaacaagaaatccaacaaagaactgagcgcagcacgcggcgagggcgtgccggtctagcacgtgccccttccctcaccacccgctatccccctgacgccgcagtccgcctaatggtccgggcgaggccaactcagctcaatgccggaagcccgccagcgcctccgccccgacagcccaagccggacgggcccaggttctgcctggccccggcgcaccgatggcgcgcaaggggcaccgtccgtggtgccgcgccccagcccgggtctgggccgtccgtggccctcacttctggttggccagctggttctccagatcctccaggcgcgccgtcagctgggccaggttcagcgtcaggctctcgagcgcccccagcgtgcggccctggaactccacgaggctttcgcattcgcatgggctccgaagctctgtccctgcgctgatgccctcctctggacagatgctgcctctgaggttctccagcaggtgcgtcatggtgccgaagtccggggcataggacacgtgcagttccgctggctccgaggcgatctcgcgcagctccgcctccaccgccttgcccacgcccacggcgtacatgacgatgccttcctccttggcgcgcgctgcccacaccgagatgtcatcctgggagcggccatccgtgaagaccaggccaacacgaggcacgttaagggcacggggccgtgcaccctgcgcctcggagaagctgtgctccaccatgtgccgcaacgccagccctgtcatggtgccgcgttccatgtactccacggccaggaccgcctgcttcacctcggctgcggtgccgtagcgacccagagggaactcggtgcgcacgcggctcgagaactgcaccagccccacccgcgtgccctcgggggacacatctaggaagtccacaatctggttcacgaagcgcttcactagctc

SEQ ID NO: 337575 - DNA, 1000 bp, Homo Sapiens
tttttttttttttttttttttcaatttaaccttttattggttttaaggcagcagggaaagtcttctggtccacatgcgtttcttctgcccaggggagggagggtcaggaagaggagaaggagttggcccctggtaaccagccagagcattctttgccacaatctaccccatcttgtctccccaatcttcaaatgtcacccaaatgcactttggttctcgagcaagtgtgtcctgtggcccataccatggcatctgtcagaacatcttcctggtccagagcccccaactcagcctgcctctttccttacaggctctcccaggggcagatgacctccttttctgtggcccggtcacccgactctcctgttccagcatcctccgagtccatcaagcaggtcccgctccccgtgggcacatccattttgatctggaaaaagtttgctactctcttggatttcaatcgtggcagctgctggcccacgtcccccaggggctgcaccctcccgtgggacacagcagggcacttgggtgacaccctggcaaagacaggtgaagccagacagcctcgtctcagaaacctgctgaaggacagagccatgcgggccttgagaggggccctgggccggctgcgagtccaggaggtgtcgcgggaggcctcgctgctgtcggtgacagagggcccagggttggcaccagaccagctgcactcccctttctgctccaagcccgatgagctatccaagaccactaggatcggtgaggggcagatggttggtcgccggatgaagcggctgggtgaggcgaaaggcttcctgggggagcggcaggaggaggagaaggggctagaaggagacgggggcatgcaggtcccggtgtacacggtcagatgggggctgggagccatgtgctggcccggctgggtgatgtccacagtgttggctgcttctcgggccttggcttcctcttccagctgtctcaggatgacagggcttgggctgga

SEQ ID NO: 337576 - DNA, 1000 bp, Homo Sapiens
agaagatggtactaggtggacatatgcatatcaatagctctgaaagtgctgaagagtttgaatgtgaagctgtagaaatttcttgatgatatctcaatattttatttttttgttattttatatgtatatgcaagagggttaaataaaaatctgtatttaaaaacatctaaaagagctctccaataaatatgaaaatttcaagtaacaaaaaaagcagtgtcatgttttattgtgtttttcttaatggaacataaaataatggtgattcttataactgatggcacttcagatttggtaaaactacaattttgaacatttaatgaatgacaaagacataacatcctctgaaaaatctgcaagtaaatcaatcatttttaaacaatagctaccatatatttgtatcttctccttgggaaaaactttggaaaaaaaaacacgcacataagtatcataactgagggttgtggacaagttacttctagtttaccaatttttatattgacataaagtagcacagactagttatttcatttaaaaaaacacactgacaaatcttttctctattacacttataagacttttcacttatatgcttataccaatatagaaacacataacttgagattctagccaatttttattttctcgaaactgtttatcacctgtgtattatctcagtttttccattttcctgcctgcttcttgatgtctgcatttgggccaattattgtttctcagcatcaccagcatgtggacaaaaaataagatgaaaactaaagtcagttcatctggtaattgaagttttgttagaaggactgataggagataatgcaagtaatgtctatagtgaaattatatgattattgatgaatctcaattattactaccactttccccacagataactgagttttgtgtgcatatgtgtgttttcctatggaatggaacataaaggaaaattttaaagatatacaaacacatgttcaagtgtataatacat

SEQ ID NO: 337577 - DNA, 1000 bp, Homo Sapiens
tttttttttttttttttttttttttttttttaatatgaggtttcatatttattttggtcataaacatatgagtatttcatatataaccaggtgttatgtgctatttggcccgggtataaagcaaaacctaaacaaatcaaccaacgccaaaaaaccccaacaatttcatgttgtcaggaagcttatgttaaaggaataagcttaaacactgataaggctggtagtctagatgcatcttcaaggaaggcctctgaggaagggacaaaggagctgggaccggactggctctctctgagctttgagaccaagtctcctgcacagaaggcccagcaaaggcaaagactaggaggcagcagcaccctgtgtcatccagaagtgcaggggacaaggtgtgggacgccagatggaagtgggagaggatggaagtgcgaagaccggaaaggccatcccctcctaaaactccatggacacaacaatctgaatgtgcgaacttcaggcagttctaactttgtcccagccaaaccagtcccggaacaaaacacacaatgccttgagatggaaaagactgaaacccctagaatgactatatccgtaatttatcctaccacgactgggctactgtggagaagagtttgctggaaagaagctaaaacgattactgaggtttttaaataaaataatggaacgtgacacaaggacaaatgtgtcagccattttagatcctgttgtcacagtgtttaagaattgatatctctgagatgagtcagatgcttacagaggggccaagctcctcaaacagggaatctgtaccctaaaacgcagctcaggaatctctgccctaaaaggcatcccagggactcagttcacagaccaccagaagcgagaggggcccatccatgcctgagtcggcaaccatttcacaccattcccaagcaccgtccactcttccctcttgatgccatggcagatgccggggcagataaacacctgctctgccctg

SEQ ID NO: 337578 - DNA, 1000 bp, Homo Sapiens
tttttttttttttttcatattgggagatttttattaacttaaattgacattcttaattttgtctgtaagtccttggtatatatgcctttatttgaagcaaacctacaggtgtttcttaatatgacagaatcatgaagacttgcagttaatcagtgtttcctaatgattaaaacaatgttcaaataattacaaagttacttcatcaaaatacttagaagaatattctgaggagtgtttgaaagctctgtttataaatagtgattgatacatttatcatgtatttggtgctgaagataaacactttttacataaaacattgttttaatatactgctctactaatgaggctagttattagatatactgtattttaacactaaagaataaagctttatcttcgtatttatcttatttataggactcttatcaatgaagaactttgtatccaacaataataaactggcaaattgcaagttacgttttgtaggagaagcaaaaaagactggctgcgacgaaagaaagaagataactgcattatacatgcttcgtacaaacagtccattctgaatggtacaattaaatgcagtccaaatccttttaaatgtttgtgtgcctagatggcaattacaatctccacacactaaaaagaaaaagaacaataacacagaacacagtattcttaatgattatagcacatttaacaccttcagccatccactgggttttcagatcatattggcaactgaaatttcacatccacatgtgcttgcttcgctaaggtcactatttcagagagctttacaaccattctagcagcttcatccaagtcatcacaagcaagtattttaagtccactgtccgctatcagtgccttagcatcatcgactcgtgtaccttgtaaccgtaccacaacaggtattttaatttccaagtcttttactgccatgactataccctgtgcaataacatcacagcgcatgattcctccaaaaatgttgacc

SEQ ID NO: 337579 - DNA, 1000 bp, Homo Sapiens
tttttttttttttttttttttttttcattaaaataattcttttaattattgatgctttgaataagaagtccattttactaaatttagtataaattatttttcttaaacagaacctgtttgctggatctcagttaagttcactttgcagttttcagacacaatgactcatattcaacttttctctttaaggattcagtggcttgattcctgacatttcctctttaagaggaatcttatgtcatcttctgaaatcatgtatatgggtaataatattagtgtcttctcttctgaagatgtgattcttttaatgccatgttctcttccctctggtgacctgacttagattgtagcagcactagaagctattaagagatttggggcagttgaggaagccttaggtaattgttaagagtagaagtatttttaaaaagctgtggagagtggtttgggaggggattttgtccctggctgaagctggtccatgcctgggtaaactttacttataaaagaataccaggaacacacaaaatattcttctcctctttcttttgcaatccagttttggagccaaaaaataatctgtgtgcacatgtgttttgataatactgtttcgacttaggtggggaaattaaattcaggagttttatgactttcttttgttctgagtatcactttagagtataaaaagtttttcaaaagttctttatcagaaatagtttcaccctatgttgaattaacaatacccaggattgtgagacataaatcaacgtgagtaggaagctccatctgagtttcatcattgtttgtctatcttggcaagatttattcagaagcaccataatgggggccaatccttttgcaccaggctcaggcagctcaggaggcagctgtggtgagtgatgcactctaccaagcacagtggcttctaggaataaagaacacatactcaactaccttcaaatgccaatgggcaatttaaaactggtactcattcctcttc

SEQ ID NO: 337580 - DNA, 1000 bp, Homo Sapiens
tttctaataaaataatatttatttgattgcaagtatacataaagtcatatgtacaatacatggtagacatgacagttccctagccataaggcagaagtagctgtattttctgattctgctcggaccactgggaaatcttaggggtgttgtgtactgaaagtacccaaggtctagagaattcactcgccgtcagtccagtccaggaaatcaaaggctctaaaccacagtctcaatcccactccattgtccatcaagcttgcttggtgctggcaggagactctttgaatttcctatcagcctgaacacacacacacagagctgtgagttctgtccagcaacatctctatcccagggactggactggagggggctccagggctcatttcaccattccttaggctgggagctcctcccagtggtttctgttctactgagtcctttccactgaaaaatcctagaggtaattctgagctggttccacgtgaatccctgagagtttttcacaggcatgtggtagcgcattttggcccagaacctagaattgggaggaactgattttaagcctctccaagtaactgtgggcaaaaccctgagagcttttttcacgagatgaggtagagactctggctcttggaagtaacagaacttaattaaaatgagtttcagtgtttgatcatccaaggcaagattcactgctgcttgtagttcaaagatactgggtccattgacatagttggggctcaagataaatattcctcttctgcttctcttaataatgctcacaatgtcttctgcatacactcctcctggagccacatctctttcaagcaaacacaggctatatccatatttgttttctaaaacatcaggaaataggctcagggccaagtgttcttcactcagagatgaagtggcctcacttggaaaagagctccattttgcataggatacgaaagcatcaaaatcctttttatccccaagcgtctgatccttgctctgg

SEQ ID NO: 337581 - DNA, 1000 bp, Homo Sapiens
ttttttttttttttttagtttcagaactgcttttatttggataactgactgaaggagtctcatttgtaaccaagatggaattcacagtatgttgttacattcacacttaaaaaatatatctctatgtacaggaatttgcaaagagatgtaaacatacattaatttccaagtacatttctccccttctccctggaggaaaaaaaaagccatccaatgaggcaaccccttcaaaataattttaatacaaaggatgcaaacatctataaatgaaaaatgtggttcttctgccccttctgggtgtcatgggagagaatgtcaccgaatgaaaatgacaacagcttggcttcagatggaattggactatttaaaattgagtttccaggaaaaataggcactgatttctagaaggaaattaactccttaccgaagctatttattgagccaatatggctggttaacgtcctcactagtataaagtaacccagtgcaggactctcagacattagctgaaccaagtgtacacagtcagactgcaagggcactgatgaggctactctgaaagctggttgtccccgtcctctaggtgtgaggaccactctgattttatcccaggggcccggtccattcttcccatactgcaactgtcgtgcattatacaaggtaccctgctgcttacccacttcaactactctgcaagtcgattagaaaatcttgttaaaaaaacaaagagggaaaaaaggctcacgttatctcatccaggctgcccgccccagccccccaactggaggcatgccgggtgggggaatgggcgggggcacaggaggctgtcctccaggggggacggcaggaggtgggtagctggctggcggcaggcccaaccctggaggaggatgagggggtccttctgctggggctgggatggttcggagctttgagacggctgtgactgctgtacttgcggcacttgtggtgtaggctgaagagatgggggctgttgcag

SEQ ID NO: 337582 - DNA, 1000 bp, Homo Sapiens
actttatgcaaaaaaaaatatacatttatttataggtctcaatacagcaaaatgaaaacgaaaattgagaacattgctcattaggccagcaactttaaaattatttaatttgaaatataaaataggtggtcttcataaaaagatgcatgaaatttaccttaccttatattttatactttaagagtacattttatacaaatcagtaaccaggcttctttcatgtttaacctgaaatgaacgtaactataaatgagtatctttcttttatgtagtagcaaaaagagtcaataatcctttcaagaaagatactatttcatttcctcccaacttggattcaccataaacacgatccacaaatgatattggaacctcgccaatagtataattcaactgtcttgcccgaacaatcatctccatctggaagacgtagcctttagaaacacatttttctattaatttctctagaacttcttttcggtataatctgaaacttcctgttaaatcagatgctcctggtctcagcaagatctgagttaaaaaattggccccacggctgattatttttcttttcaaatcccagccatatacacctccatttcctttgtagcgagttccagagacaatatcaaaattaccctccttttgcttcctaataaattcaggaataaattttggatggtgtgagagatcagcatccataataatgatgtagtttcctgtggcatgtttcattccatgaatatatgcagttcctagtcccaactttttctctcgtggtcttagaagaattctgtctgacccatagatcttctccaactgttcagcaacatcccttgttccatctgggcttccatcatctatgattataatttcatagttgattccactctcggagaagcttttcaccagcagccacacgatgagcggcaggttctcgcgctcgttgtaggtaggtaaaagcaccgaatatttgttctgtcgtggactgcgcacttccagc

SEQ ID NO: 337583 - DNA, 1000 bp, Homo Sapiens
ttttttttttttttttttttttttttttttttttttttttttgaaagccactgactttattgatctaaaaaactttacaaggacagtgactgttctgccaaaaaaggagccaaatggtatcaaacggattgaaagtgagggtgggggtgagggatggggccgggaatccattcaggaaagctggtaactgtcaccagggaactggcaagggaaaaaggacgggggaggcatgcaagagcgagaatccaaaaaaaagttgaaatggttaggggagaaaactcccaaaagaccccggagtacgtcggaggtgagtacgacaatagcaatcttttccttcgtagaggacaggggaggagtccctactcggctgcaaactctggatgagggctggggattgagagcttcccagagagcatcacaagaaggcgtcgcaccactctcgaaggcatccgaagcagtcccgggactgcttggcattggcgccacaagtgtctttcagccattcccggaagaggtcttcatctttctttagcaccagaaactggccaaggacaacataggccttgtcaaaacccctttcctccagcttcttgcccaggacttcaccaatcccagccaggctccccactggcttctcccccatgggctctgccacgaagtctcggtgcttttgggaggttgtcatcttgatcaggcttaatccgcaacttcagttcccgtaacggttcctcccgccacccggccgctctgcggatacctcaagccactagaactttcttccacttccgcttccgggtcgcttcaagagccgcctttaaaaaagaaacattccacgttgggcacttctagccagttagagctatagagttgaggcgccccggacctcgacggcgtccttagtaggcgctcctttccggtccttcgcgggaagcgctgccttctaaggtctcgcttctcgcgccgttctgagggagataggcctccagggagaggacttcct

SEQ ID NO: 337584 - DNA, 1000 bp, Homo Sapiens; identical to SEQ ID NO: 158254

SEQ ID NO: 337585 - DNA, 1000 bp, Homo Sapiens
tttttttttaacatgaacaaatgaccttttatttcatacagagatacaaaggcaactatgtgcagcaacaatctgacgggcagtccaaactcttgggaggaagtaaattcatggtaaatgtcatgatggctggtcgaggagaaggtcaaaggaggagagagaggagacagagaatgctacagctaataaataacagtaatgagaactgtgtggtttcaacgccatgagtttgttggggcatcctctgtgctactaaagccacaattctatatcatcatcatcaacattcttgaagcgcattttacactattctgcattagcaattgtgttgagggaactataaaccttaaaattactgacacattttattaaaggagctgtaaactctgctcattattgcctgtcttggatgtggcctttgggattcatagcctcttttaaggaaacagggttgacacactttggttggtcccagtttttgaggcaatgctagttgtaatagcatcatcttttaatctgaggaaaatgtttctttaaaaaacctgtcttccaaaatacaacaaaaaacaaggtctgggtagtggcgaatccttccatggcactccatgcctccctgtgggctgtaaccatgcacctgagtaaagagtctcataaaaatacttctccaatgcatttataatagggacacactacatagtttgttattcattaaagcagtttattggcttaatgtacatcagtgaatttttaaatgctaaaaatttatgataaaagaatactgaatcaaaacatcaaagaaagaaaatagaggctcagcagcatgatttcaatatattttcctggaaaaagttttttttttttttaaagtgtatgactttttatccaagaacaaaagctttctaaatgcaatgtttagacttgattttttttttaaactaagcccagaaaactggggctcataaaataaaggcacaatgtgggcagcaagagaaaaaaggag

SEQ ID NO: 337586 - DNA, 1000 bp, Homo Sapiens; identical to SEQ ID NO: 158255

SEQ ID NO: 337587 - DNA, 1000 bp, Homo Sapiens
tttttttttttttttttgagatggagactcactctctctctcccaggctggagtgcagtggtgtgatctcagctcactgcaacctccacttcctgggttcaagcgattctcctgtctcagcctccagagtagctgggactacagatgtgtgccaccacacctggctaatttcgtatttttagtagagatggggtttcaccatgttggccagactaatctcgaactcctgacctcaggtgatccgcctgccttggcctcccaaagtgttggggttacaggcgtgagccaccaccccagccggcttccgtttatctgtaattcccacatgtacaatgtagtgaggaaaacaaataattagttatgctgtaaggctgaatgagatgagttttagtgatagaaggaccaaagaggaaaaaacagcagtgtgaaaagatccctgattaattttgattcctgataccagggaaagctttacagaagaggtaccttttgaggtgggcattgaaggacatgtaaatggacatggggtgggggcacacatctggctgggacactctgccacacataggcaagggactgtgagcatgcatggtgcatctggagaggtgctctgaatacaccccactgatccaggcccctgctcatttttcatgcttctctcacttggaggccctctgtcttcctcattctctatccaaatttcatccatccttcaaggcccagcttcagccctgccccctcataaggtatttttctgactgttcatgctattacttgcagctgcagttcagcgttaactgtagtgtctgtgctggaattgtctcctgagctacacaagagcagacattatgcacatcttctactttggggccttgcagctcctaacatagtgctaatggtagttggtgctagatgagtctatggattcatttactgggactgatgtctttatctgcctaattgcagcccattgctgtccagcctaggactattcattggg

SEQ ID NO: 337588 - DNA, 1000 bp, Homo Sapiens
tttaaactgcacacggtactttaatagaacaagaagtttattactcccactcagtagttcctgggggctttgatgttaagtcatacataattcgagaaataccaggaatcttcttaatctcagtgaccatctttaataccacctctacagggatctcattgccaggtgttgcaggtataccagtcatgaagtcactagtaataaaggttcgaataaccacagatctctggcatgaaggctgcttttgaagtgggtcccgatcaaaatgtaatggtgtcaaaatcaccggcatctggctgattttcccagcatacccagactccctgagaatgttatgggcctcaaaatcagcttggcgtaaagtactgagcacccctgttgtcaagaaagtgggagtaacatctgtaggaggttctttaactggtgggccaaatatataaacaactctgttaacgttgtgacacatgcgaggtataagcctagccagaaaaataagtgattcccagtcaggttcatctttactggagattccacacacgtaactgtaggaacgacagtcaccctgcacacctacagttttaattggcagcaagaaggcattcagtgaatgcagactggtaatttgcatcagcttctcctgatcctcttctgttgtgcaggctttgactctctgtaatagggtatgtggctttttaacacttgcagaaaaatcagctactattttcaaaatattgttggtttcaggaaagtccttacaaatataaggttcttcagcacatattactctgattgccaggccaggacctggaaatggatgcctggaaactaactcttctggaagtccaagttctctgcccaaaattctcacttcatctttatgaaaatctttcagaggttctattacttttccctcctctctcaactttctgatgagctctgtgtcattgtgatgggttttgatgagttcagctttgccacttgcaacaagggatgcactttc

SEQ ID NO: 337589 - DNA, 1000 bp, Homo Sapiens
ggagttgaaattctcataattttaatgatcaatagcttctggtgggctctggatggtacagttaaacaatagacttaaagacctcccccaaagcacgtccacaccccctcggcagcgtctgcctccatcagcattccactgcccagtcggacttccacagcctcagacccccctcttgggttatggaaatccacatcttagtgtaatgagctgaaaaaccctgggtacacccgtgatctgttattttttaaaaataacaaatactaagccaaacacctgcccaggctctgctgcctcacagagtgtggcgatctgaatactctgttgtctcttgtgggccgggtggttttgcttcgctccctgttctactgaaatcatacggcatagagttcgtaaatcttctttacacagtacaccagggcggccagtgctatcgtgttgtgcagtctctttctgtgcaggtcgtccttccggaccagcaccaccggggtggaggaggtgagtgtgtgcagaggcaggcgcgacagtttataggcgtcgtactccacttggtacttgcagcaagggtcaaactgccaggagatcccatagagggtgcagcaggccaggctcagcacaccagcgggcagggaaatgtagtgggaataatctaagggcagcgccaacggggtgaagaggcaggcggtgcccgccagcacggccgtcttgtgcaggcagttgcccacggtgatccagcgggctgtctcgtcgccaatgcgagtgggctcaatcacaatgtacttgtactgggcttccagggcctgctccagctcgtactcaaactggtcttgggcattctccccattgtagatctcatgcacaatgtagcagtctgtggccgacaagctcaccctctctcgggcgctgccgccactgctgcccgggccaagacgcctccttccccaagcggccatcttggagacactctgcttgccaacgtctcgcgccaaggcggcatcgg

SEQ ID NO: 337590 - DNA, 1000 bp, Homo Sapiens
agaaatcaggttttttttatttaatacattctaatcaaatagtaacagcagtaaataaacactttgaaaaacaggcaggtatccccctgtatctggaagaaaattaagtcaaagtattctacacagtagaagggagacaactgtttatgtccatggttagacaattcaaggacaacttggatatttctaaagccatttccaaaaaatcaatggcaacaggttgggacacagctatttcaaagggtagaatgcctatacctacattggtttttattaacggggattgagttgcacctgtatagcatgatattcttgtctttagctttaaaggaaaagagaaagtcttttccatttgcaccagtttgaaatatttctgaaataaggctcccatagaatggattactacagtactcattcacatgagagttcctacatgtagtaaaaagacaaatacaggacttcatggtcactttttttggttgatttggttaattgcataaaatgggataaatactcacatacatcatctgtttaacaaaactcctaggtacatcagaatgcaaaatataaaatgcccaagagactctgatcagcaggcatatcaaattgcagtgaggcctgtgtcagcttggttccttcccacttcttcagtattcctatgaggagttctttctctcctactggagcctggacctttgacataatggaaaagaacctaagaaggcaaggcattctgataaaacgcgacttcagcctttacatgcgacattttatttttaatctaaaaggatcaacaggtcttggtcagccttaggaagggaagcatcactcaggtaaaagtatctggaggaactttaaacacctagctacctcttcaagctgttaaatttaaattagattagcttcagctgttcttagaaagcattccatatagttatccagagcactcaagttttggttctcttttacatagctgcattcggagatactctatgtgaga

SEQ ID NO: 337591 - DNA, 1000 bp, Homo Sapiens; identical to SEQ ID NO: 158256

SEQ ID NO: 337592 - DNA, 1000 bp, Homo Sapiens
ttttttttttttttttttttttttttttttcacgcataggcttgtattcaggaacaattttacaaactccagaaaaggcagcaggagatccagaatctctgtgtgccttctcttcatcctacccccagaaaaatggccagtccagcccagcacctgctgcagcctcaatattaagggactgcttgtcccatctcttgcccaggggaagtcggagagaaagctcgcccgtgtgcatgtttgatataggctgtgtgtgtaggcagggagtgggctagaggaccctggacaccttggccagcctcctaggcagtgagttagaggaaaggggactaggtcttgcacctctgccatacctcgggatccagacagaccaggcagcgtgttaatattggtgttctgcatggtggacccaagctaaagtgttgcctgcagccaagggcctgggcacggaccatcttccatcagcccagggcccaggcacagggccaccagctggggatggtggacaccgtgtccccattcccagcccggctctagaaggcactgttttgtggactgcgacccctggagggtgggcagggcctggacaggcacaggcggcgctgggtctccagtcggcagaagcggttctggttggacacccgggtggccatgcccagcccacaggtggtcgagcagggtccccaggccgtgctccattctgggcaggggacaccagggggcagggaagagacaaggccagaaaactggggtccttgggctggaaggggctgggtccccagtccccctccttggccgcacacccactcagggcagcacttgcccaggacctcgaccctcctggggtgggggcagtcccagctgggcagccgcacatcctcgctgcacagcggcacgcaggtgaagccgccgtcctcgcagcggcagcggatgctgcagtggggctggaaggtctccccttcccgatacaggcggccgttcacctcacagctgctgtcgt

SEQ ID NO: 337593 - DNA, 1000 bp, Homo Sapiens
ttttttttttttttttttttaaaggtacaaaaaataccgacttagtttattggataaaaacagtggtaaaatggacataaagccaaaagtgagaacagaacattttcatatcctccccacacttgaaaacatacttcccatcatctgggattcaggtgttagggagccagagccccttccaaatctctctctcttcatcttccctggaagcaaggggaggaagaagtcagaacccaggggaggaggaagtcagaggcaatctcagtccttgtctacccgttcatccctcaaaaatctctgggttcgagggaagcagggaagaaataaggggcaaggggggctagggactggcctccagggcccactgccaataatgtcccagatagctatccttgtctgtatctccatccctaataggtaccattgtcaggccttgggagagagaggaaaagcaggtagatggttcgagaaccaaatgtggtctccagactctttcccagagtcagcaaaagccctggggtgacccccaggactctaggagccactccttttccctccagcccaaccaagaggtgaaaagaaattccttgggacacagcatcccaagccactcttaaatctccacatcgctttccttgtcattgtcatggtctccatcatagaactcattgggtgcctctggcctgctatagttctcctcaggacccctctcctctgcatcagcctcatcagtcctgtcataggtcaggaggtctgcaggcacgtcatgaatctggacactaggtgcatggttcagcatcttcaggttttcaaagattgtctggcggatctggtccagatactggcgtgagttctgattctcgatgcgggtgctgacatctggatgaagtgtgaagtctggggcaaagtactcgaagtattcactatagggaagctcctcactaatggcctcttctaccagcagcgatgtctcatatgtccagcagcgggcaacatttcg

SEQ ID NO: 337594 - DNA, 1000 bp, Homo Sapiens; identical to SEQ ID NO: 158257

SEQ ID NO: 337595 - DNA, 1000 bp, Homo Sapiens
tttttttttttttttttggatggtcagtgcattttattgaatcagcacagtacaaaaataaataaaaataagggaaggggaattaaattacagccaaactgagcttcatgactttgtcagattataaaccacacatactcacaaacacactacacatacatacaaaatgagacaaatataaattaatattaacaatacccacagtttggtcaaagaatagctacagaagaaattgcactaaaaaaccaacatacatcacacgtgtgtaattagcagtttcaaatatacagctatgaataattctgagtgaaaaaaatggcacattttcttttcattgcaagtttaactgttggaacaaaactaagttctaataactgcatggaaagaatatatcaaccctccaggtttacaagaaaaagagaaaaaccaaatcctgaactattattcctgtggcttgttctgtgcatgggtgtaattttcacagccatctgttctaagattatttttcttaagacacaaaatgctcctggtttgcatgcacaatatcaccgtaaaagcaacaattaaagaataaaggtttttttgtaggtttttttttattgttgatctaaaagtagtcttcatagcagcatggcaaatgggttctttgcttgcacactcaagtatatcagttgttcctttacacaatactgatgaccagtgcaaggggagagaacacgacaggcttcacactgagggaactagagagttcttcccttagtccccaccacttccgaaatgtccacctcctccgaagaataaaaaaataaatacggagaaagagaaggaaacagacacgcaactggaatcctgtggatgcaacgtaactgcacagttcgcagccaggttccgccagctgagggtgatacacacatgcgccctcctcctgagacttggcactgaccctccctcttccatgccaccaggggcctcccacctctggtcgcacgcggcagcagga

SEQ ID NO: 337596 - DNA, 1000 bp, Homo Sapiens
acacatttattattatttttttttattttatttcccagtttgttgacacctcttacattcacaggcaactgctcaagtgtattgggaaatacagttgtgtattgtgcagttgactggcctgatggtgggggtgctctggctgggatggaatgctgctaggggggctaagatgaagaggagtcaaggatcagctcacaggttagcgagcagccagtccagcaactgtttcctggccacctttcccacagcttcatctggttgccgttccttggcaaacttcatgacctcttgaagaagacctcctacactgtaccccttctctgctgctttagctgaaacctgaggaagcttttccagttgtccatccttatctcccatgaagtagagcatgggcacgttaaactgggaggctgcaatccactgcaggacagcctggagctgcttctgcaagctatttgtagagcactgattattgacaattacttcatgtccaagagagtcttgatagttctgtggcattgcaccactgtgaatgcatctggtgcccctgaaattgggcttatttgccgaggctgcttgttcttccaactcagcaagggctgccccatcgttgctatacttagccatgataaggcagagcttcatcacagattctactagtttatctataaattgcccgttcgcttgcttcatcccactggtacagtcaagttcttgatgctcctggcattgttcttccgctttgtcagatctgttggacatggaagctgctttgcttgccctgggctcagaacacttgttctcaccttcgcatggatcctcacatttgaaggggttctcattaagcagtttctgaatcagcattagaacgatgtttgacatatccattttctgggagtccaggtgttggttctccttttgacaggtggatggtccaggggctctgtgagattctagttgtttcactgaaagtgctttggcactttggccacctccacac

SEQ ID NO: 337597 - DNA, 1000 bp, Homo Sapiens; identical to SEQ ID NO: 158258

SEQ ID NO: 337598 - DNA, 1000 bp, Homo Sapiens
ttttttttttttttttacacaatataaatgctttattgctagcacagaggtttctttttaagtaaattaaaagaaataaatcttcattttcacattttttgttgcagtccaaaggtaactagttggttagtggctatgtccacttggacacatgctacaggagggcagcattcacatggaagcactcagaaatacggcatctgtcagggctcacggcactgggctgctgaatgcactgtcgtttgtaaataacagcaagtggagactttaaaacatcatggatagataagagttataaatagaaaactggtacggttaagaagcagaagatcgttaaatacagaaggctatatatatgttgcccatattccacatactctgggttatgtttggtacttttaaataaatgatctgcatttaggttagagactggattggatttgacagctggaaagatggaagaagggatggaagaaggaaaggaagctaacacttcccacatcaaactggtggagtcactggaaagcagaagaggagtatgtggatgggaagaaagggaggcgggcctgctttactccctgcaagctgtaggccatggcctgcccagtgaggggcaagaatggggtgtgacagaggagctcagtggagcacggcagtcctggcacaatggaacttggcaaatggaaaaggaaacccctaggcttggccagattttccaaggtcactgccaatagatacagggcacattatgatagatgtacagtgtgacagaccaaaatcacacctgcagcagttattggtgtagaggttcagaaggtacagattccaactacagaaataattcatttaataataattgttgcccaatattagaaactgaatgatgtctgcaaggcatccagcattatcaaattcttgggcctactcggattgttttttggttggttctaagaaaaactttggaaaagatcttatctagctatgaaaaacaacccactcc

SEQ ID NO: 337599 - DNA, 1000 bp, Homo Sapiens
ttttttttttttttttttttttttttttttagccaaaagtacattatttaattccttttgccttgatttgacattaaacccagggctacatttcccaaaactagttcttaggtgtggaatgccttatataaagtataatttgtgaaaatgcaaaaaaatttttactcacaagtggctataaacaaggcaggcactttcataccctttagctttgagaatagatgtgtacacagaaatataaggtgcatgtaaatggttcttctccggtgtgtttaactgattgtcagcgtagccttgtcacagagcatacccagcattccagccccaggaacaaacccaggccccatcaagtggcaaacagacctacctacaccaaatcacacacacgcactcacagctgcagtttgtgcccttgctcctacagactcatgtcctcgggaaccttcacttgggtacccagtgcccgccatcacagctcagcatccacacagggaaattccttgtgctgcttttgtcacttatcatttctccttttgatccaaattgtttgtgtttctgtttgtttttttaactataaactctgtgagctcaggatctatatctgagtcaatgctgtataccccacagcaggctacctattatcggtgcttaataatgtgttcaaatggatgcagagacacagaatgatgtggccggaatgaggtcatgccaagcttctgacatttggtgcaggcctcctggcttctcatctctctagaggactcccacagatactcatgcacctgccgatgagtacaggcctggagcccacaaagcagctcggaagaggaggggaacgagtgggaagtgggagacaggactattagaggtagcaatgaaaagactcaggaagcgaacaaacgtgggtatgtgggcatagaccccagatggcctatccttggtcgcttggtcccttccacaccttgacactttagtgggatctgagggatttctccccaga

SEQ ID NO: 337600 - DNA, 1000 bp, Homo Sapiens
agcttaagatatttattcaatgctctcacatttggcctctgtgacccagaaaagcggtagagcagggtaggagcacatgatgcatccttcagccaccgcaacctccagagggaccaggtcttcttcaggaaatcttcgttcctggtggatgactgatcagccataacatggggagaagtcctgcgctctccatttctccatcgctggcttctcctgggagtcatgccaatcattggtctggtccccgtcaaagtttccacaggccccacacagtttcccagcatggtcattgctgacaatcacagccaccttcccattggctccaagccacacctggacccctgccttctggcggactagcagggagccatcaggtgtacgactcacggacacagatgctaacttctcagctgggagatccactcggagaccattcacccacacacccttgtttggagtcaacgtcaccatcccatcctggaagaagatgtggacctggcccacagcctccgttttgccatggcagatctggacttcggcaactacacggtaccaggggatggtattctgtagtcctgggcagcgggaagagagctcatagacaccaggagaggtggtggcaccacgggccccatcaaaggtggtgaggttggcacccacagacaggacacagagaccacgggtggcccagcagttccgggcttcagccttgacctcacatacacggcctggtgggcagccagcggcctggcatgtcaggccagagcttgaggaacaggaacagcgctcgctgcagtctgaggtcagcagggaggagtttaccggcaagtatcggccattatgggtgcagccacaatcttggacagggatgcagacaccctgggaaagcaggaagcggtcgtcgcactcacagccctcaaaacagcgggtggtgcagcccgtgaggccggagagagccgcacaggatccctggcaggtgcgagtgcagatggagtagtgg

SEQ ID NO: 337601 - DNA, 1000 bp, Homo Sapiens
atgactgacagattatcttattttattatttaacgtatctcatgttttcttttaaggtctctattgagataaagagttccagggaaagaaaggtcacagtgctcggtaaacaacccagcaaacggcggctctgctgctgcgtgggccaagcgggtggtctggggctgtgacggcctctcagtgtgtgatgaagtttcagcgccctccacagtggcagtgccagcttggaatcccgcttccggttgtgttgttcattctggctagctgagtttcagttagttcatgatctgtttaaaccagagtgagtacctggagaccttggtgacaaggaccatgtgagcctgccctcctactggctgcgagcccaggacccccgtgagaaaccaggagcctctgtgttctctggtgaccacacttccatccatccagtgcatggccgccacgctgcttctctcacagtaggtcctggtggtgacagtcacattcaggacctgcccgcactcctccccctccacaagtgtgacaggccgcgtggtcagcgagttgcccaggtcagtgccattgcgtgcccagccgctgaggaggcccctggtgcgtgggatgaggaggtgctcagcgaagtctttctcaggggtgcacacggggagccccgcacctgggcactggatgggccactccagctccagcagtgacaggtcattctcccccgcgtccgcgtcataccgcatgtgcacatggacgtgcgttatcttgatcatcagcgggtcttggctcgttctgttaaaatatgtttttacagtaatattcctgtgtaacagtgaacattttgctgttgtcagtacaaaattttcccgtattataacaccaccacagaagtcttttccttcggaatttgttaactttacctgccacgggaggtcctgtagatccggtgcacgcttctcagaggtcagcaccccgcaggcacactggtcgtggggcacacactgtttgtggtcct

SEQ ID NO: 337602 - DNA, 1000 bp, Homo Sapiens; identical to SEQ ID NO: 158259

SEQ ID NO: 337603 - DNA, 1000 bp, Homo Sapiens
aagagaattctggtatgagaaccatacttactaccaactccaaatccaatctatgttgttcactaaatttgacagccacgatcaaataatatttaactcttaaactcctcgtaacttttttgtgattcacctcccccagtcaacacaattctgtgtgtttttacttacggtcagactctgaagagctacttaggagatgagcacatattttaacaaaaattttattctctgtcccatttatttggtatctggaacgaagagaaaacctaaaaatgagatctatttccagcactgcaagcaactttggaggagcttacttttcccctgcttctttgactggttgttacatttatctgttttcaaatttatctcctttttggtgagaaaagaggttatagggaaaagagcatttgaatgaattcttcaatttcatttcatttatgactctggctgttaatagcgatgtgcatcttggcaaatcagcttctccaaggaacccatcttgctctctcccccaaactctgttaaggaccattctgtttatttcttgtgtttgttacagaggtaaaaatcatataaagcacgtaaatgccaccaacggcatcctgatcacttaaacaccgccttttatgactggtcaactatgcatcttatctgtctagctctgtgggtcacggattcctttttttttttatccttttccaggtattagttttcagatgaaaagagatacgtgttgtaacttttgttttgatggccatatttaagtaatctgcaatatatcttgacagtgacaatgaaaactaattatgaaattccagatgtctaattggtaacaagacagtggcatagcccaggcaagatgatccttactatcctagcagtcagcttttaggacagacatcccccagtcacgtaagggatgacacttgatcactgctgtgcgagcctctgtacgaggctcccagatacaacaggcggtacagtaagatttcactac

SEQ ID NO: 337604 - DNA, 1000 bp, Homo Sapiens; identical to SEQ ID NO: 158260

SEQ ID NO: 337605 - DNA, 1000 bp, Homo Sapiens; identical to SEQ ID NO: 158261

SEQ ID NO: 337606 - DNA, 1000 bp, Homo Sapiens
tttttttttttttttacaattagggtcatttaactatttaattgctttttgagattattgctgaaattaggaagggagcattgaaatgggaagggggaggttagagaagacagagatttaaaagaagcaagtaccattttccaagtataaaactcgtaatattaaaagtgacatagcagtatattcacatgactacttaagtctaatgcagaaacaagacagtacagtttttgcagaggccgatgtgacatctgcatgcgacatgatactattaagtgtctctacccacctctgctacagagtagctgctatatgcacacatacacaaaaatacacaatgaaaagcctacaaaagtgttaagtcaaactaaggctcttaattgtaaattaaagtggctacagtaggtccctttgaaaaacaccatctcccctggcaccaatgttgtcacagcacagaggaagcgagtggctcggggtctggttctggggagacgctctacaggggcacatgcttctccatcttggcagctggcaagccacagtggtgtctgctgggtggctctgggttcctggacctcattcaacataatgcactgaccaaacagctctgaccacagctactctcaaagaggtgcctgccaggtctccctctgacacacacacatacacacactacccactcttggaacccacaatgcactgctgggcaaacaggaaaaacacacacacacacacacacacataaatgccacaccagccctgaatggcgtggccagctagtcacagttgttgggtcagtagtacagtgctcaagaacaattcagactaacatgccaaggagcctgaggaaaagtctggtagtcatggctctcccagccagcattcccagtgggggaaactagaagacaccagcctggagaggctgaatattcaggagtccctgagatggggaatggaacagaggaaagtgtcttttgactcatcttaagtactcccctcc

SEQ ID NO: 337607 - DNA, 1000 bp, Homo Sapiens; identical to SEQ ID NO: 158262

SEQ ID NO: 337608 - DNA, 1000 bp, Homo Sapiens
gacatttaaatggtttatctgcatgattaaattaatcacatttccaacagtgcatcaagcatctgagaataacattattttgagtaaaaacagaaactcttcgggagagaccccctccccacaggtcaggctgctcaaatgtccaccatgtctagcagcgcagagagatggagctcagaggcaacttcctcttcccttgaactccggatcagcctttccaggtgctttagtcgttcgcctagacacgttcctgtcgcctctgacagctgcagttgctccctcatcatgtcactctgtgggctagtagttacagatgttttcatcacaggttcaatagtgtgagaaagagacactagagtctgaggaagatagaggggaagggaagttaaatccgtaaatgctcctgagtcttcagacaaccattgctgaagctgatcttcaaacctcttgttctcttctttctccagcagcagactgctcgacaaacactgcgccaagagctcctcagcagaagctcctcgcatcagatcctctgtgctgggaatcctcccctcttgagcacactctgtgctcctcttccagttacggtgcatgtgaagcaatggtatgggaaaattgtttgcagaaggatgaaaaggctttattgccaaacgtccctctctcagctgtagctccttctgcgtctgcaacctggcttgttcccacgacaaaggaacatcatattttttcaaatcgtttttaaaaaaatacacacatatctgaccatcttcactcagcgcctctgatgtaacaggaagccgggggggcgtccagtctctcagcttgtggttgatacacaaggcgataagatcatcccatgggatctccatgaccgaggggcctgccccatggactggggagggactcttgctcttccacctacagtaggttctgtggagcaggttctccacctgggactggaggacaggctgtgtctggcgtgagctggggatctgggagg

SEQ ID NO: 337609 - DNA, 1000 bp, Homo Sapiens; identical to SEQ ID NO: 158264

SEQ ID NO: 337610 - DNA, 1000 bp, Homo Sapiens
ttttttttttttttttttcgagagatttaaagattttatttttacaaatcacagctgatagacagcgaagccttccccatagagaccgtgctccaactcgggcctggggcactgctcgctgctcccaggaagggggtggcgtgacaggcaggaacctgcgaagtccagagtccagggtggagcgcgccagcctcagccagagcagccacgacagccacagtgtgtgcactcgatgatgcggcccacttccagcttgcttttgggcacgcggcagatgcagttcgtcccgaagttggtgtcccgtgtctgaatgcaccgcaggcagcacaagttctcatatccttgctttttccattttgcaatcaggtttttgtctgcatagccttctttaatacaatattcatagagttctctgctgatggctttccgcttgtaaaagaggtcgaagatgtagcgggttttctggtggtggatcctgaagatgggccacagagattccactttcctctttccctcatgcggttctgtttcagcttctctcatcttttgatctaattcatccagtgttggctcaatcaactcccagccatctgggggtgctttccggcttcttttgactttaggcattttccttccacaggataatctgcaaagatcttaggatgtgctttccaagagtatagacagcagaaagatctctcgtctctgcagttgcaggcttggattcttgttcagctctaaaaaattattctgtgactttcaggtcaccttccctctctggtcctgtttcttcagaggaaacggcgcgagaatcctagaggaaaacccccaaatctaccgtcccctcagaagaacgaacgtggcgccgcctcctctcgggagctctctccggcctcagggtccaaagcccgaacacatcccagtggctggctgagagtccagccactcatatctccctccaggacggtgcagaccaccggtctcccgcctcagccgttgc

SEQ ID NO: 337611 - DNA, 1000 bp, Homo Sapiens
tgataataagaggcatattttattcagtttcccagtaagtcaattagaaacatgcactgctaaaatgcaagttacaattcaaatggtaccataaataattagagtacacactgagcattttcagaaatcagcttccatatcttgatcactaaatggaaaggttcttcagaacagtcccttaccctatatacagaaggagaagaaaaattaaggatgccataatgacatctatcagaataactggaaaacattttaatttagcatacattattgacatgtaaaaaacacaaatgaatttgtcgtgaacatttctataaggaagacattccattaggaggagaatgataaaattcatgttgaatatatgctggaactaggatactattaagaaagaaacacatttatgaagcccaattggtaaagatgtcattataactaaatgaggaaaattacatatttgaatatatggctttctttcctatcttcaacattcaaaagggccatttcttaactacttcgcctaaattttatcatgttgattcctttgtttcatctcagagattttatttctaccccatatagctagagttctgcttacaaatgataaaatacaggtaaagcataagaggaatgcaaatatggaacaaaactgagaacattacattttacttactctaccacataccataaaacagtacataaatatttcattttgaaaaaaaagtcctgagtacttatttttgttaggaataaagtggtacttaataatggcaaaacatttctattattttaaaacaaaattttgagacagtagagtgaaatgagatagctatcagggaatgaagaaaacaggatgtattaataacgatttaagggtgaatataagatgctccccctgctcaaaacctcgaaattccaacctcatttctgatgatcttcaagaataaagtctatccagagtgtaaaaaatgtctatgctttccagatctcaactattctc

SEQ ID NO: 337612 - DNA, 1000 bp, Homo Sapiens; identical to SEQ ID NO: 158265

SEQ ID NO: 337613 - DNA, 1000 bp, Homo Sapiens
tcaaggttttaaaagcagcatttattgattgaaaataaatgtgtagataggctctcagtatggaatccatgttattttttaatgaagtacatgaagactccttagatcttccaccatgtatcttgtgtgtgcttataacaaccaccatattcaaatggaggggaattttcaacattttactgaaaaaaaaatgagaaattcttccttcagcagctctgcatagtttgacaaacttttggaaagagataaaaacacactccagtgtttgtacgttgaacgtttattacaactaattggcgatgtgataagacagtgctcacgtggcctgaatgttggtcacaatcacaacaaagcttaatccagcccagcatatataagtgaaaatataaaccatgaagacatgtttagatatgtataagtacttagaaaagtgacgctgaacaattacatagctttaaaaaatatagagccatctaatgccattttacctcattcaactcttttttgtaagaaatgtgtctttttaaatttttataagacttctgttaactaggcagtgccatggaaagaaaggaagctgctgtaaagtgtgcagcacttctaagtggagggaagcaaaataaatttagctttaacaagtaccccagagggaacattcgtgctttaaacaatgactttacacataatactgtgaagagagcaacacgttttttgtaagatactgttatgaagaattcctggcaaattaccattctcactttattttggggcatcaaaaacaactaagtatttgattatgaccacaaaaaattcatctcaggagtcaaatgtgccttggccttaaaaattatgtgcttactattgtgaaacaatcctgtttctcatcccagattcagaatgcctaagaaataatttttagtgtaagaagtatcactccaatttagtcattaaaaataatctgtagtcctttaaaaaaaaaaaaaaaaggtatgtaatttcc

SEQ ID NO: 337614 - DNA, 1000 bp, Homo Sapiens; identical to SEQ ID NO: 158266

SEQ ID NO: 337615 - DNA, 1000 bp, Homo Sapiens
gaattctggtcctcagagaagctgacattgtttccctgaacattcccgtggtctccctctgaaagccgatgaccatccaaccctgactcacctgaaatatcctacgagcatcgccctccgagactgacgattattaaccacccacacggaaaaagaaacagcccctccatcacccacatcttgtacacaaaaaaatgccaccactaatgccataaattcaggcaggttcctctatccaaaggctaaactgcttcaggtgacctaaaaagtggccacgcctctccacgtaaacacatccagctgacacaggctaggatcgagttctcccacggccttcctatcccgtctctaatttactctctgcttttccctggaatgtgcatgagaaataaaccttccaaacatttcaaaagtcgcactttcctcctttattacaacgatgcccatttttaacgacactctcggtggcccctgacagctacctggtgagatacacagcatattgtgcccattgaatgaagatacttctgacaatgaggctttctcgtgaaataaagtttcccgtctcataaaactgagaattctctggaaagagctgagtggaaatggctttgaggagggcagtgattcactaagttattgagaactgaggtagtgagggtagagaccaagccaagagcagtcaagggtggaccgactgcaccctgacttttgttgtcaagcagagagcatctctagatcctgttatcctctaaacgatttagagcaagccctcgttgcttctcaaccaggaagtgaatcggtttagatcctctaagccacccacattccccaagccacctacaatctttcttcccaacgtccacgagtagaatttctgtcaacgctctaggaagtcctgttaggatttaaagcagagagaccacagccgaggtgtttctcagatacacttcgccaagtccaaatgaaagtcagtcaccacgtctaaatgtttccttag

SEQ ID NO: 337616 - DNA, 1000 bp, Homo Sapiens
cttttttttcattaataatatttattttaaagatcaacttttattgtaacaaatataaagtcatcaatgttttacaaattgtcaaaaatgctttaagtacaaaaaaatacattagtaaaatgaaagttatgttgtattatttggtatacacttaatactgccaacatgcataacatatgccagaaaagctcatgcattattggaagagaaaagaaatgtgatgtaactgctatattgtctgattataaattcattgcttcagtcagttttctttcttcagggataccatttacctgtagtctgctgttggggaatctgagtctgatgtggcaagttctgctgcgtttgcatcaatggcatgtttgtgctatcatagttgtctgtgtgtaaaggaggtatgatttccccagtcacagggtggaacacaggaagcgttgacaggggccatgctatctctctattcttggacatgtctcgaagctccttggtagatttctgaatagcactgtgatggaccagttggatgtctggtgtttgcatgtttctcttttccacgccttcccgtcggcagcacatgatataagcaagtattagaaaaaggaccagtgccactgccgagggcacagccagtgtaattaggaaatccgtgtaatagtctctgcttttcaaagaatcagaagggggtttgtattctccaccatcaggtaaaatcccctctccacgaatcacttcctgataggtggacacttgctttgttttatcaaccaatgaaattttgcaccagtcaatgtaaaattgagtacgaaattttttatcacatgttattacaggctccatttcttgactacatctcaattgattctgtggattttcaacttctcgtaaacaagaagaaaacgggacatctgcaccaaccatgacataaacgccctccttcaggtcattaatgggaagtggcaccctgccacccctgtctagggccgatgtgatgtttatggcg

SEQ ID NO: 337617 - DNA, 1000 bp, Homo Sapiens
ttttttttttttttttttttttttttttttttttttttttttttttttttttttttgagaacttctaatcttacatgtttaataccaaacacaaagcaaacacattcatcatctagagtactatattccaaccctatctcaaatgcaggaatgggcctctatctggtatctagaggatgatcataggaaacaaaatgaggacagaggcatctggtatcttctaaaagtggtacaaaactcccgcctgtcatgtcataaagctccccatctggtgctgcgacccacctccaagagaaagccaaaggaacagaccaataaaaggggtccggggtgctttctctatttcactcactcctcttatttgctaaggagctccaataaccaaaagaaatggttcctagaagaagagaactaaatctccagagagctgctggggcataccgataaaaactgggagaaacaaagactgacagcagagaagtccaatactgctgctgaagtttctcagcctaaatccgtgaaagagcctgggattctactgctctgtccagtaagaggagcttctgggtcctgtatgacccttccaactctgacttgaatgcaccatctaaaaacgtgtctatctctacccctaggcttcttagctcttcagtcatcctcatcatcctcaatctggtatcgtttcttcttttggattcctggagctcccaactctggtgctctgttcctgccctcatcttcttcctgttcctcgtcgctgtccagcaattgtcgtttcttgggtgctgccttcagcggctctttaccaacagcgtcttcctcctctggggatgccaggcccgctttcttcttgtgggctagcaagagggccctcagggcttgtgctcggtgctctttacagtgctcctcatcagagccttgctctccagggactttaggctgcagctctggctgcagcttctgttcctcctctggttgactcaaagaagctgctgccctc

SEQ ID NO: 337618 - DNA, 1000 bp, Homo Sapiens
ttttttttttttttttttttttttttttttttactttaaaaaaattttattgttgatagcaaaatttccatttctatgtttttgcaattaataatagaaatatataggagacaatgtcaggaaacagataaaattgtaatttaaataaaaacaaacagtgagagcataagatttataaacatgtaaaattagtcaaattttgttttacaacaaaaagacaaatctggctaatggcccacttgttcaaatagcattaaaaacagaattgtcacacacaccaaaaataatttgttccagttatttcaactgtacattggtcctcattaaaagagaatgaaaagtacagagaaaatattttttaaaaatctcatcaggctaggtgaggtggctcgtgtctgtaatcccagcactttgggaggccacgctgggtaggttgcttgagtccaggagttcaagaccagcctggccaacatggcaaaacaccgtctctacaaaaataatacaaaaattagtgaggcatggtggcacacacttgtagtctcagctatattacttgagaggctgaggtgagaggatcacgtaagcatgggaggcagaagttgcagtgagcctagaatgcgccactgcactccagcctgggcgatagagcaagactgtctcaaaaaaaaaaaaaagaaaaaaggaaaaaatacctcatcaaattacatgtaataactgaggtttaggccaagatatttttctttaggaatgaaaatgattaagccaagaatgtgaaaatcctaacaaagtagtataattagtaaggttaattagaaatgaattttggcaaaccgagatcttaggtggctcacactccatcaagtgttcctccagtatcaaaaagaggctgtttacatgcctatacgacaatggagtggaaaagagatttttatttttctatattggcagttttcccatcagtgaccggttttattactgaacaggaacagcttaatgctga

SEQ ID NO: 337619 - DNA, 1000 bp, Homo Sapiens
ttttttttttttttttttttccaattcctgaatctgctttatttctctgcataaggaaccctgaacaggcaattcaaattaaaacaaaataaatatatgaatattcatgtaaaactgtcctttctaatgaacaattatacacaatgtacaatttcatgttcactgggtggatttacaaaaatgtaccattcccaactaaaaatgcaccaaaatggtttcatgcaaacttatcaaaagtgaccaaaaatatggagggaaaaacctgactgagagcacttcgtttttgttgtttttgtacaatcacagaaaaataaaaacatctaatttctttgttacatttagagtaactaaatgtggccattgtttataatgttggtttatgttcttataacatctatgtagttaccataaaagtatatcaacatcaaatcagaagtgagcattattgagggagagaagggagggtgagagcacccgcacggtcagtagtcagtgtcggagccctcggcgttgtccacgtttctcgagagcatgtagttgtccatgtcgattgagcggcagttgttgatggcatagcgcaggcgctcggccatgaccagctggctggagtacgggggcagcctcagctggaagaagcaggtctgtgaggtaggcagactgtcgtaaggcctatcaaccttcatgatttgaaatctctgagaaatgtcagcagtgttggctggtagtcgagatcttcctgacacaaacctcatgaaaagcacccgctcctcattggagaactcttccagcgtgtgccagaaccactgcaccagctgatgctgctcatccacctcacggtaccgcaccactttcttcaagacttccacagagatctcgggcatcccacacaccatctgctccagttgttttgctgtgaggagggacagcagcggcacaggaacaatccaggacatcccttctcggactgcagccacctgtctgtccatctcatgaagtcgat

SEQ ID NO: 337620 - DNA, 1000 bp, Homo Sapiens; identical to SEQ ID NO: 158268

SEQ ID NO: 337621 - DNA, 1000 bp, Homo Sapiens; identical to SEQ ID NO: 158270

SEQ ID NO: 337622 - DNA, 1000 bp, Homo Sapiens; identical to SEQ ID NO: 158271

SEQ ID NO: 337623 - DNA, 1000 bp, Homo Sapiens; identical to SEQ ID NO: 158272

SEQ ID NO: 337624 - DNA, 1000 bp, Homo Sapiens
ttttttttttttttttttaagataaaatgcattttaatagtttgaagtgccatgaggtgtctgcatggcactgcagcctgggtgagggaggacagggtcatcatacaaagtaggcggccagggctgacatcttgtccttgggccgtctggggttgggcttcccagggggcctcctggcccggccccgccctcgaccctgccttctccctggtccaccgcggtgcatggggtggcaggaggccgcatgcttcagctccaccagctcctggaagacggggtcacaaaagacgcagcccatgtgctgcgtctcatcgcccgggagtggggacttggccttgttgaagtccacatcaagcaaggcggcctcacagacactgcaggtgtcggcggacacccgcacgcggtgggcgttctcgaagcagtgcgctaccacgttgcacttgttgcaggccaccttccacttggggcccgaggtggggtccagcaccagcaccccgctctcacattccacgcactggccgatgcccagcatgctcagcgagtgctggcaggaggggtgcgtacactcgttgcagcccatgcctttcttcatgtctcggaagggtgggtggttgtagcagtaggggcacagcgggtagctcttgccccgagagcctgatgaccacaggaccagctcgaagtcatccagagggcagcggagctccttgtagagcttgatggtgccgttctgggggagcgtgtaggtctcatcgcagtgggagcagtgcaggcggcttggcttggcctggatgtacttcatgaagcggtggcacttcccacagcgtgagaggggcttgcctgtggccgccaggggcgagaaagacacctccatcaactcatccatgccagcaatggagtcgacaaagtagtggaacttcctcttgaacacgtccagggtgtggcccaggacctggcggtagtcggccttgccctgggcgatcaggttcagctgcttctccac

SEQ ID NO: 337625 - DNA, 1000 bp, Homo Sapiens; identical to SEQ ID NO: 158273

SEQ ID NO: 337626 - DNA, 1000 bp, Homo Sapiens
tttttttttttttttttttttttttttcactttaatcttatatttgtaatttactttttttctgaacagttaaaaaaaacccaaaacacactccattatcatgatcctaggttgtgaacatattggtacactgactacacatcaccataacataatcacaaaagtcaaagcagtcagtacttaagagtctagagaacaaagaggtgaaccagctgaaagctctcggggaagcttacatgtgttgttaggcctgtcccatcattggagtgcactggccatccctcagatttgtctgggctggcctgagtggtcaccgctttgagaaagctgttagtttccttggtgcccagagggctaacaccctagttggccttttccttcagtgtccaagaaggggaagggttaggaggggaggtaacactttaaaatacgacttaactgcactgatccttaataaaacacacaaccaatcaggagctaagagcgccagctgtgctggttggaaagcacatattttagatgtcatctgcctccaggacattttagatcacaggtactcaacttccaacagaaggagcttctaaagatcaatgcattaagttccacctgaaaccaggcagccatcatcatgctcttttgatttctctcttcagctccaaggattctgacaccacagatgagctaaagaagcgaaactgttttattcccctaagaaatggctctctttccgatactatgttgacactgtggttaaaggaggtctggtctgttggtgaacaactgtgtggaggaagaccagggaggctgcaccctaagcctccgggctgcactaatctgggttggactgctctgctacagactggagggtgttgccatctaaggcaaaagggagatgctgagaaggtcaacagtaccaaggtatctagtccaattatgggaaagaaaaaaattgccctgattatttccagtattccccacccctcccacctttgtttcccca

SEQ ID NO: 337627 - DNA, 1000 bp, Homo Sapiens
ggcaaattaaaaaggcgtatggcttcttttcgccaatttttatatttgaggtttagcttggtatcctgcggtaaaagtacatgtagcccaggtctttagggggcctttctgaggcacaaactttgtggtcattgtaaatcacccatcttccttcctttttgatatggcaaatgtaatgaccactcattgtggatgttcccatgtgactgatgaatgcaaatagctcatatgttccagatccatccttgactctaggtccttcgggcttggcctcagaaataatgtttgcattggcattattctccatctcaatcacaaaatcactgtcttcttcaaactcagggtggctaaagatccaatccagtgctctttccaggttattattcgttgctcgtagtgcctgaatagcctgatttcgctgaaatcccatggaggtgatgatagctacgatttcctctggaggttggttatccagtccagaagcaccaaaaacagaggctccagcagaagctgcccctccataaccaggcatggtcagcggctcagcaaaatctggctcttccatgtgaacaatgatccagttgaaggccacctcggcgcccatatttccagtgaagtacacagccttgcgacatgcttccagcgggaaacccatctcggccagctgcatcactgatgactcatcgatgtctgatgggtctatcaattggttcatcaggcgatcttttgagtcatcaggaatgactatgggggggctgatgtctggaagttcttcctctcctggctgtaaccccctggctcggagatggttgatatcaagtaggtctggcatatcaatagaaacatcaaattttttgggaacccagtcaagaccaaaagtgaacttctttatctgcactaccaagtattcagggaatgaagcaaagcgagatgttttcacacccgcagactttgcttgtagggcactgctccagaaatcatcaacattttctggttcaga

SEQ ID NO: 337628 - DNA, 1000 bp, Homo Sapiens
ttttttttttctatttgggtcaaattaattttattatgctccatgatgaattgccaccagtgcaacatcctattcactatacatttcaaaaaaagaattcacatactaaacaaaatttcagttgtctgaaaatgaaatgattgaaagtctttatgaatctcatacatacaatatgtggctagctgaaattgtctatcacgtagcatttagatataaaaagcctcatgctagtttgttaaatgcaaaggctaccagacgaccatttagctggagaatatacggaaggctttcagacaacgcacaggtatagtgctgctcacagtgcaggatggtagaggactgaaacatgcaaccttacaccttacttggtaaagcagatttagtcttcatgcctggactgaactccacagctgctgtgtttcaaccaacagtaatttagactttttgtaacaacaaccaatgtctttttcttctttaagaaaaaaagaataaattaattacctttggcaaattatatatccattttacatgtttaaaattgtgctttgaactcgaagaatgggtactctctgctgagagaagttcctgataaatatatattataccaaagtcagctggaaaatctagaatttcttggccacaagttaagagagatcttaaattggcattaccctgaagacatttctaggaaatttaaaatgttttttatattgtcaaaaagaaaaaattttttcaattaacattacttaaaataattataatgttccatttaacttttgtacaaactcctgattttattggttagtagttgtccagcctcatctgcaccagattgactgagctcaagccacaataaaaatgatagtaagtagaaaaaggtttctagcagcagagggcactgttgttgcaagaaacaaaaagtctagaatctttcccatgtgcttaaattactcttgcaagaaagataacattctttgaataacttaagtattttactgca

SEQ ID NO: 337629 - DNA, 1000 bp, Homo Sapiens
tttttttgaagatattaaaattcaggttttattatttgttcagttataataatttaagttaatatttgctgtattctcagagcaaagatgtatttctgtaccactgtcctgtataaatttgttacccaagatagtgactggtatgaaaggagagggaagagggtgacagatggaaacgattgctgtaggacagtccatctggccagatgcggtgggggaggggagaagaagtgggagagagatggtcctacagatgctcccatgggtaaatgatgggtgcatccctccctgcagtcgggctgtgcctgtacttcacagtcctctaagaggtgtcattcaggccacctcactcagcctatgcccaaccccactcactttccctttccttatgggctgcccccgcaactgacttccatgatgattggttctcattaggccctttgtttctacaccagccttagatcattaagacaaagacgtacttgctaccctcatagcacataacaacgcctggcagatgaaaatcaaacaaaaagcattaggcagtcttagaacattatcttgtatccttactaatcacatccagaccagatattttctaatcacagtttcgtatcatgttaactttttaagcataaaatgtgtatgtagtaaaaagtgcttttcaagctgtaccaataggaagtcagctatgtttgagtgaggcttattttactaccatagtttaaagatcacctaaaggctcaagcttgaaccctgggcagctggttaatgtttttgctccgtgaccacagtttacacctgaagcttagccaagtcactccccaagagaatcaagccctaaagtaataatggatcagcacaagtctgtcaatcagtgccacagggaaaagaagttcacattcactggaagcattatctgtgtgtgtgtgcatatatatacacacatacacacatatatatttctgcacattagacatatatatttctgcacagtaga

SEQ ID NO: 337630 - DNA, 1000 bp, Homo Sapiens
ctgctttagaatcattttattagaacacattcaagaaagtgacatacggaaaaaagacagcagcaattctcagtcatgcaaatgcccgtgttaaagttctccattggatttaaattcaagtacaaagacagtcctttcctgagccaggtgcaattccagagaatgacactttgcattgagagcacgattccttcgaaaagttcagaacactgaacaagtcacatcctcacaataagattgtgagatacatagaagtgtaaacttttttaaggatccctttaccctgccctcccccataacccagccagggaaataagcccaacttcaggacctctcagaaatcaggtttaatctattgaaaataaagcagtgggcctttaaaaaaagttagaaaatgagtgtatatatgaaatggaatcatcatctctgcctcttgccttggtgtggggtttccatgaaactctgtgtttggggttggggctctctcttgagtgtgttggaaactggaggacttttaaaacttttttattatgaaaaattgcaaacaaatacagaagtggggagaatggtataatgaatgtccacgtaccatcatctagtttcaacaattatcaacatgtggccagtttttcatttatatcttctcactcttcccacccaccctcaacaggataacctgaagcaaataggggctggtagggtggtctttgaaccagagacctcgggagggagtgaggttatggaggagctagaaaaacctgaaaaaatctgagtaggctgaagcaaatagaaaaattgttgaggaagtggttgttgccagtgtttgggaaaggctaaagttaaccctcatcttctctaccacacatcatcccttcttcttcttccctctttctcatgatgtggggatacaagctagattagaatgatgggtttttccagattaggggccactgataatagaaatgttcagcctggagaaaaacttcagagataagtgtgt

SEQ ID NO: 337631 - DNA, 1000 bp, Homo Sapiens
caggagggtatagatcctttatttcctgcaccacacgcacacaggctgacaagcaataggagattgagaggtgctgtgtgaaggggggcaggtacctgcaggaggcctcagtcccagcccccagctattgaggaacaaaggtgtgggaaagggcagaacatggaagaggaagccaggggcagggagggggggatcaagacagaggggagaggggctgggccatggatgggagcctggacacccccaggccactggcagaagagggagggagggagaggagacacaccactgggcagaggggccctcacccacccacacacagagacacttgtggttacaaacagtaggtagggactgagaagaaaggatgaagaacagggaagacagccaggtccctcaagtcaacaagaaccagggtggctaccattagcatgggcatcaaggggtgaggggcacattgttgggaaggcgctcacaactccctgccggtggaagctgggccctgttccctgctcagggctgagtctggtagccagtgggcctctcccgggcttctcctgccccctgggctgccatgtggcccagacctggcagccacagcttttgcaccagctgcagagcgagggccggggttcctaccgcctgtccctgaagacgttggaaaagcctccaacatgtgggaaagggcagaacatggaagaggaagccaggggcagggaggggtccccaagctccagcccaggttcatgaacacagagggtgggctggtgacagacacagggtcccatttcagaggatgggaaggagggtctgcgggtgtggggcttggccaggcagcaggaggggcctcaagctgtctgtggggcctctgcaggctgctggggaacagcaaagcctggaagagaagcaggtggatgtgaactggggcattgatgaccacaggcctggcctgggcggtgggcaggggtctgatcaactgtatcagaaggacacggaaagt

SEQ ID NO: 337632 - DNA, 1000 bp, Homo Sapiens
tttttttttttttttttttttttttttttttttttttttttttttttttttttttttcacagagtacatgattccattgacatgaaatgcccagaacaggcaaatccgtagagttggaaagatttgtggttgccaggggctgggggagtggggagtgagtgctgatggcgatggggtttctttgggggagaaagaaaccgtcctgtaactagacagaggtgatgattgcacagtatcgtgaatgtgctgactcccacccacacatgctcagccatgcgtgcacacacacaaaaaggagtggtgtttcagaggccacctgagacgttttcccagtgggatggaaggacccaaagaataaaaaatgggaccgaggcggatcacttgagggcaggagttggagaccagcctggccaacatggtgaaactccgtcttgatcaaaaatacaaaaaattagcagggtgcggtggtgggcgcctgttatcccagctacttgggaggctgaggcaggagaatcatttgaacccaggaggccgagcttgcagtgagccgagatcacgccactgcactccagcctgggcaacagcgcgagactctgtctcaggaaaaaaaaaaaaaaagaaaagtaaaagaaaaaaagaaaatgggatcacgtttcttctgtgtttcacgcgtcctgggtatccctgaaatcagccagttctgggcctgagctcagcgccccgggcctcctggcccgggtcgagcctgcgcccgccgctgccccacagatccccagccggtgcctgacgtgcgtgcggttccgtgctctccgggagtgcgtggtgggcaggacgtcggcgctgccagtctccgtgtacgactactacgaacccggtaggcccgcgcgcccgcacccccggcccggcccggtccctgacccgtcgcgcctgcacttggtcacccgccaccctcgtcccgtagccttcgaggccactcgcttctacaacgtcagcacgcaca

SEQ ID NO: 337633 - DNA, 1000 bp, Homo Sapiens
ttttttgtgattctgccaataaatactttaatgagaaccgaggtctgtaacacatatagcaataaccaccctggcctatgccttctgctctagcccaagtctggggctaaccaattacatttaaccacatttggaaagcaggccgttttcaatgtcacccatcagtatccatcttcatagaagataccaatctggggccagagtctcaatgttaacactttctctcggggaaaagttaacatggtaacacaaacatagaaataactttgaaccaccccactgttcttccatcaggaggcccttaggagaccaacggcttggtaaacacttacaacattgtcaaaatacattagaacacgggaaaagggcaaaggagtagaaaggctggcagggctgggctcacatataattcagttcttagatttgaagcctctttagctgctcgtatgtaataaaaaaaatgatgttccagggtccaagccgaagccagtttggccaaaatcctttatagagtgcaaaaaagccctcatgtttccacatctttaaaataccatcaacagtgcccttatagagatccacatgtcccacgattgccctctggttcatcatgcgagttcgaaccacatcaaccgggttggaggccagagccccagccaaaccacatgtaaagctggaaacgaagtgagttaaaattgtatcgcccatcattcctgacaatattaaatgcttcttagtaatatcatagactggtagctctactcctacaacgatggcagcacgctgagcagttggaaccacacccctccacagacccctggtgccttcttgttggtatatatcgataaagcttccaatcatgctcccttggaacaagcttccttgagcctgcattcgaatctttagaacatcggtgggattggctatagtggaagatatcactcctgacactaccccacagatcatattaattaaaagagtttcatcttctaaacgttctacg

SEQ ID NO: 337634 - DNA, 1000 bp, Homo Sapiens
ttttttaacatttgtcatcaccccaaactttattgcttacaaagagttctctacaacccagactctgcagtaccaaggctgcagttctttatgtgctgggggccggggctctctccccgggagcagtctgactcaatgtggacagctggacaaaggctgtcttggcaagatgtgggaatgagcttctcccacggagtctcggcgtcccctgccccaggaggttgaggctagcagacaccccctgacgattcacagctgatttaatgctacgtgagtcctgagtagctcccctgggagaagaggctaagctggggcaatggggaagggggtgctattcttagagaaatctggaagaggtttgaggagtcacatgcatgtggacagctcaagactgtgtcccttcaccccatctcctggcttgctatgctcctacagtgtcactgccctgccctgccctgccagagggcagccatgaaagtgctttgaggtcatcagagtgcaaagtgccgtcggcagtaccctctggccaggggcagggcagggtgagtgtcagtgtgatgctgagctgtgctctggggaaccagcacgctggacactgatagtggggctggggcgccggacgtctctctctgctgctttccttagcactgatcatgtccatccacagactgttcctgtcaggcatatcctgcatcacccttcacctttacagatgagggaactgagtgccagcgagtctggggcagtgctgggcctgaaggggctcggggcctgctgctctggggaagagtggtagccagcagcaaaggggcacatgtctggggactgagaaccacttcacttacacaccttctttggtccttggctgaaccagaggtcaactcaggacctgtgttgcaacaacctgaaaagtgtggtgtattctaccagggagccttcccagggtcaggcattcttttcccctacacccaaaaggggtgagctggccaggtgaggccag

SEQ ID NO: 337635 - DNA, 1000 bp, Homo Sapiens; identical to SEQ ID NO: 158276

SEQ ID NO: 337636 - DNA, 1000 bp, Homo Sapiens
tttttttttttttttttcattttaataagaaaagcctcacagtgcccctgccgtcctgtgtgtggggagggccagctgagggccctcctcctaccccctcacctttggacacaaaaccaagattgccccagcctgacagaggggcgctggcgctgccgcccgctacgagacaccgcccctctgccccgagcccccccagaggtggagctgcttctccacagagagacggaacccatgacagagcgagccgcaccgtctttagatgtgtgtgtagaaagaagcaggagcaagggactaaaacacaaaacctggccctgccccagcggcgcccccacccccacacccttttccaaaaaccaccaagaaaaaaagtttataaaaatatcttgcaggaattctttaaagtttacagtagctcgccagcccccccgcgccccaccagctctgtcctcagagagcgccctggccccagcccccccactgcctgagacacgcagacggcaggggatgtggccgccgcccttccctgaacagaggtgcggagaatccataaattaaaacggcaaataaataacactgatcccagcccagcggcctggcctgctgggaaggctctggtgccgcagggtgtctctgtttccacctcagccagagaggagcgccagagcccacagccgccccagatgaggcaagggaggcgcgggtgagacgagaggacgggaggcagcctgaggaggccaagactacacggaggcggcgcggccagggaggcggggcacgggcctgcgaggaggcctccaggtgcggcgtggaggcggtggacggggcctgttcctgtggctacgttgcccaccaggggtcctggccccagaaggccaccaggcaggctgttcttgctgaggggtcaggtgaccgggagtccgggtcggccgggctggaggaggctcccccgagcctggccttcctcccacgggccgtgcggagctgaggcgaggagctg

SEQ ID NO: 337637 - DNA, 1000 bp, Homo Sapiens
gacaacaaacagtcaaagtgcattttattgccaacagaacacttcaggaggaaatgctaacacaaagccaaggcgctggtgctggctcatttttgctcctcctgaccttggccagtatttggtagcctttccagagcacagggtgaaaggctaaagggctagggctggggtggggggagcaggagggcatggcagctgctggctctgtcctcccagcctggtcccacccctcctgccgctctccttgggctcaagggacacacattcgttcaaatctgacgggcaaagccagggcctagcccactctagccgcagggtcccctccctgagggccctggtccagcacctgggtttctgggctttttctggctgagctggagggcctagggccaagcccactctccggagggctggaaaccaccccttcaggtgggcagtggggcgcggccagaacgggggaatggaaaacaggaaatgggggtggctgcagattccagctggaaatggaaactcactccaggagtgaaggcagcgcccgggccgctatgtctcacctcactccccagaaagcggccccttccagcatctgacccctcctggggggctcccatcacggaggcccgagggccaggcctgaggagtaatgggcgacattcctctagcccacacagagcctggtctgcggagaccacgcagctggagggcctggtagaatcggtgccccagaaggccacagacaggatgcctgaccctcgtcccatcagccggcacgggctgtgtgccttccatccatccacgaccttcaggagtccagaaggcagggagccccacgctggcccggtttcccagtgtgctgactacaaacgtaggaagaagagctctagctcggaatattaaaaacactattttctgaagaggaatattaaaaacactattttctgaagagttgaggctcaggcctaccgggtcctggctgcaccccaaagttccttctgcagat

SEQ ID NO: 337638 - DNA, 972 bp, Homo Sapiens
tttttttttttttttttttgaatggacaataagcttttattgcattgaaaggtcattgcagtgaaaggttggggattgcttgctgctacagctgaatggattctattctgaccaatacacacagaaagagatcacagactccctaccttagaagaagggaggtggtagatgaaatgaactgtatgaagagccactagcctggcccacacacagaagaaggactggcccgtcttcttgaagcccatgctctggtagagggccatagcagagagctggatggtgccggtgtccaggataacttcactgtagccctggtcccgggcaaactggaggacagtcctgaccagggcttttgctatcccctgacgacggtgctcactgtccacagagagatgaaacagctgcaaccgcttctccctcaaggtgggatcatcaacaggcagagctcctaccatgcccaccaccttctcttcagactcagccacccagaagcaggagccacgctcactcaggtaggatttggtaatgtcagacatgtctgtgcacaatgtcatgtccacatactccgtccagggttttttggcaaggaaccacagggcagggaagaggctgatgctgaacacgagggctagaagccaggatccagagaccaggagtagggcgaggggccccccaagtaagagtatgagggttcgaggcagcttcagcaattgccggaaggtggctggggcatgctcggccatcccccgggagagcaagcccacaacccactggcggtcgctctcctggtatttgcggatgtgacaaggagccatggacagacttctgtgtctgaaatctctaagtccaggagacagagctaggcctccctgcacgcctttacgtcagactgtcaccacaagagccttgagtgtccagggagcttcagctctcagccgctcactggcatccaggagataccgtctggggctt

SEQ ID NO: 337639 - DNA, 708 bp, Homo Sapiens
gagagcgcaaagcagtttattctagcgagcaagggagtgagcgtccaggaaggagcaggtgtaacccggcggtcagtggagcctcagtgaggtgtgtcctgttttttcctgcaatcgccgcagaagacaccaatggtcgcgttcaccagctggatcccacacagtactatctccaggcaggaggcggccaccagcagcgagaagagcgtcacattccaggggaccacgcgagggggcgcctcgcaccgatcccatagagtgcggttgagcaagtaagctcccgcggtgtcttcgaagtggtagccccactcgccgttcattaagcatctgggtccatttcggagcccagctccagacaccgagaggcagtagatggcaccaagcaccccgaacgccgaggagaagaccgagcgcagcatcctgcagcggtttccacagcacccagcaccacagcagcccttgccccctgcccgaacggctgcaatccccggacacagtaccattaggcccccgccaatgaagccgcccatgagccagacttgcaagctgagatggttggtgttggtccaggaggtctccccattaggtaccagcaggagggcgttggccacaatgcagacgaggcagagggtaatgagggagagccccacacagcgggcacattttcccgtacacatggtgaggtgtcaggaaggacaggcggtgagt

SEQ ID NO: 337640 - DNA, 1000 bp, Homo Sapiens
tttttttttgagacagggtctctctctgtcacccaggatggagtgcagtgatgtgatctcagctcactgcaacctcaacctcctggctcaaatgatactcccgcctcagcctcccaagaaactgggaccacaggcacgcaccacgatggctggctaatattttgtatattttgtagagatggagtttccccatgttgcccaggctggtcttaaactcctgagctcaggtgatccgcccaccttggcctcccaaagtgctgggattataggcatgagccactgcacccagcctttgtccatgattttgacagcatgacctgctaattctacagaggatccagtgggaacactcagcaaaataggctttgactcccacagtttccatccttttggagataaataaggaagtaagtacacctttggctaaaactctggcactctgggcagttgatcctggcagagtccaagggtcagacccatggacctgtgaagtgggcaaccgtttccgggaactgtccatagcacttgctggggtgaccaggtcctgcctttcacgtcacctacttatccgactatttcctccatttgcttcttttctatttggcatcacctgtgacccgatgggggcagacccctggttcatcccaaaccacatgacatgaacggactcttcctaggggacagaggtttctccccagcagggatgccctcaccctcattcaatgtttatcgtctcttttcaattcctttagaacctcagccccacacatacatttaataaatgttcttttcttctcaaatatgaatggtaactctagtgagagcctacttgaacaggcttagggaaccatccctacaaacatgaagaagctgagatgcctcatgtaagtcacaagaagcagcagcatagaaatatgctcagaggggaatggggagttctggagggaacgccatgagtctggagactgtggctcttctgtgcggtggagcctgaccacgt

SEQ ID NO: 337641 - DNA, 1000 bp, Homo Sapiens
tttttttttttttttttgatttttaaacttttatttgcctaaagcaagagaaaacaagcttaaccaggtaacacatgcttcaaagcctcgacagccaggatttcagagatgctagatctcgcggccccccaaagagaagcacggtggcttcacacagagaccgccacatgctgcacacgtccaggtgccacacccatgtgcccacacccgtgaaaatgctagtgtgttgtctgccaacccactctctgtcaggcatctgccgtctaccctcgtgtaaatacacgttgttcagtcttgtggaaaacattagctttctcccttagacgggtataaaatattcatcaccaaatgcaaaaatcaaaagcacaatgtgtgatcaactatcagcccacacaggacaccactcggatgccagctgctcatttggaacaagcacacagcattcctgtctctgccaagcatattttcccatctccaggctaggaaaacgccttcactggcctgccgctgaggcagacgcggggatgagcttgggcttggcttgctggggcggggccatgtccgggatcttctccccgtgtttgtacacgctcaccgtcacgtcgatcttctccccgccatacttattcttgatgttgatgctgtacttgcccgagtcctcggaggtcacgcctttgatggtcatgctgacgtacttggcctgctccaccttcaccgagaagtgctcgctgagctggatgtcctggtcgttcttgaaccaaatcacttcggggtcagggtttccaaacaccgtgcaggtcagattcaaggtcttcccttccatgatggtcaccacgtcaggcaagccgccgatcaacctgccacgattcttctctgcaaaagcagcagctttgaattgctggaattctgcaaatgcttcatcaaaagcttgtccggacaggtcaagggagcgttgatggttgtctttgccatcgaaaatctcaaaagtgtattttccttt

SEQ ID NO: 337642 - DNA, 1000 bp, Homo Sapiens; identical to SEQ ID NO: 158278

SEQ ID NO: 337643 - DNA, 1000 bp, Homo Sapiens; identical to SEQ ID NO: 158279

SEQ ID NO: 337644 - DNA, 1000 bp, Homo Sapiens
ttttttttttttttttttttttttttttttttttttttttttttttccctgtaggagaaggcagttggtgatgatttattagccagacaagaatcaacaaacaagttctaacatctgttctcaccaaaccattcctcagacaacagcagcattggaccagggcccagactcaaaaggctcagagggccaaggaaattagactccaggaggagaaaccaggacagtgggagctaacagggccctccttgcacacttctttgctgtcttagatcaccaaggactgagccattggattcttgggatcttcttaggagggagcaggctccgcatttgcttctctgacctccaggcttctttgttgggggtcaggccagaccgcctactgaggaggcccaaggggaagccatgcctgtcctctgtcctgaagcacctgtctagaaagattgtgggggagggtgtgtctccaggcgggtgggggctggtggggcaggggagggccttgcccaatcacagagttctcagaatgcagctgggagccacctgtattctggcctcctgggacaggcctggaccagctcttccgtaggacagggtgcccaagggtggcgggtaggccctcatcttccacttccacatagatgttgctgggggcttccccagggctgccccggcccatggcatagaaagctatgggttcatcaggctcattgtagataggattggagggcttggggcgtggggccgggcggtgtcgtggaacagggattgtgtagacttctgggggcagctgaggtttggcggggatgggaggcttgggcctgagcagctgggagggctccttctccccggccccctctttctgcatcgggactggggcttgcccctgtttgatgattgggctgtactgggggtttgggtcctggcttttgcttccaaagtttgattcttcggtcctcagggaaagtcctgcaggctcaggagtctgtcgggcgaggggctc

SEQ ID NO: 337645 - DNA, 1000 bp, Homo Sapiens; identical to SEQ ID NO: 158280

SEQ ID NO: 337646 - DNA, 1000 bp, Homo Sapiens
ttttttttttttttttctttttgaaatgtaagtatacagattttaatttatttttaagaataattgtatattttaaaaacaggacacgtactgtatgagtaaacagcgtggctaacaccaagtccacactggtaagcttttgagaaccatttacactatgttgacagtagtactgctgcaggcagacagcggaagaataaataatagtgcttcaagaagagtagtgattgagaggataggtaaagagggcgcctcatcgtggaagctagagcaggaacacctccccagtagtgacatgtgcaaagttccagatctccacgacaaagacagctcaacccattggaacaaacagactcccaatgtggctggcaactgcgggggtagaagaactcaggcaaagtaggcacaggaatgggggagatgagagccaagggacaaacgccgagaaagcgttccgacaagcatgtgtgttcatacatgcatacccccaacaaagggcaatgcactgtgtaacagaactgaacacaatttaacaaagctgctcccagccttcctgtcacctctttggcagtagggcaggccatctcaacttcggacacacaaagacattctcttcaggaggaaggctgtcctgtgtggtggggacaaggcttcaggtaagagcaaagctatgatagctacagcattaattgaacatgcctaaacaaaaaagatgttaattactagttacaggtatacatgccaaaattacccccagggatgggcatagtcaatcattttcctacagtggtgaaataaaacaagctttgatcatgcttcagcaagtagaattatgtggtagagaagtcaggccccatatgctaaaatttgcacttcttgccataaacttttcatgtatataagtcaaaaccaagtctcctaggaccactaaacctatgatgggctttcaactgtaacactcattcacatctttaagttaggcccatggtcatggaacctg

SEQ ID NO: 337647 - DNA, 1000 bp, Homo Sapiens; identical to SEQ ID NO: 158282

SEQ ID NO: 337648 - DNA, 1000 bp, Homo Sapiens
tttttttttttttttttttctttttttttttttttttttttttttttttttttttttttttttttttttttttttttcccaacaaaaagaatttattggtgtctgataacagagaaatgaatcaaacaattgcatattcttttggggaggtttgtcaataacacgttaaaaggagaaaggtacaaaaatatttacaatatgactacaactcttacaacaacaaaaaatcctatacggaggggagaagtgacaaaatactccacggaggggagaagtgacaaaatactccagtgtgaaggaacttggtttagatgataggaaagtgattccttctttaaaaaaaaaagaattctatattcttttttatttattgagcaaggattttgcattacaatcgggaacaaaaacagacctttctgagaagagaaggggctcctgcagtagcctaggaaaatcacatttagaatccactcccgggatgtcattctaggctctgctgactacaacagcctgagtgaggaggaaagaggcagcagcagacagcggatgtggagcaagtaccctctggatgtgcagaaggagttcggctatgacagcccccacgacctggattcagactgatggtcttgtgatgtccatgaggttctgccacatgcccttgagggctctgagtccagagttaactgccctgctgacatcctgttaggtttcctagcttaacatgtggaaggaaaagcatatcaagcatatcgggcggcaccatcccaccacagtgaaaacttatgttaggggagtgagtcttttccacttacagtaggacccctttgcctcaatcaaaagtgaccctacagtttgaaagaaaaaaaaacgttgaaaaaaggaaggtttctttagctttagcttcttggcccaggaatttttcctggcattcaggttctgtgctgaaaccacaagggggggggaggttcccatttcattagcagtaagcttctgctgtgcc

SEQ ID NO: 337649 - DNA, 1000 bp, Homo Sapiens
gtgatttataaatagaatccatatggtgtgtgaattaattattattgctctttctttctggccacattgttgggttttggtttactgtaccatcacattcaatattgacagaaaacaacattactagcttatttccaacatgtggcccagccttaaagcagtttttgaatcttttgctcaccaaatacagagcaattgggttaatgcaggaattcagtgaagccatgttgataccaatatagtccaataccaacagaaagctcaaaagttcacatctattgggatcattctgattataaagagtgagcttcagaatcctgctgaggtgaaggggaagccagcagagggcaaagacaaggaccaggcaaaagacggttttggccacttcccgtctctgctttaggtgatcatttaaagcaatctgcatgccacttttctttctcaacatttcacaggtcattagtgtataaaaaaatgcagtgatggccaatggcaagcagaaatagaaactgaacagccaccaatcttttgctgtcttgtaaaactgcatgaaagctgtcttctgaacgggatgaagcaagcagattcgcagataacttcctttgtagtccatcgtaattatatcaaaacctatggcttcagggacagccagaaccacagagaccacccaaatcaaaacaatttctactgctgtccattttggaaccccaattcctttaattctactccaagaagcaacagctcgatatctgtcaatactcagagcacatagactcagcacagtgattcccacggaggctttctgtatgaaaggcaccagcttacacatctcagctccaaatggccagtcctctgccagcagcttgtagacattgatagggatgtcaatgacgatgtgcagcaggtctcccagagccaagctggcgatcaagatattgggaccgtttcgcatgcacttgttcttgtagataattctcagaagtgtggagttcccgatgat

SEQ ID NO: 337650 - DNA, 1000 bp, Homo Sapiens
tacaaacagtaagaaacactttattataactttataacatataaatagcttgggtcaaatctgtgctttctggcagctgggcaccaagtctgctcccctgcaggctcctgccttccttcacattgcactgttcattgggtggctctggcctggggctggcggtcgaggctggagtcaaggggctgggcggcccagtcccgccctccatctcctcatgcggtggcctgtgcctgtcatctgcttgggttgcggctggtgtggaaggaccgctcctcaggggtcaggccagcaaagaaggggtgcagcagggcctcggccagtgtgatgcgctgggcagggtcaaattctaacatcctcctcatcaggtcaaacagctgcacgtgctccagggagtcttggagcatgtaactcttcagaggtttgcagttctccttcacataccggccgtcagagctgttctcatcccaaactaggccccctttgtagaaatatttctgcttcctggtacggtggatcatgtgtgatgggatgggccctaggatcttctccatcatcaccaggtgctctcggttttcgtgggtctggaagagtgtgaagccccggtagtactcaaagagaatgcagccaatgctccagacgtcacagggctgtgcccagcccagctcaaggatcacctcaggcgggcgatagtgacgggtggccacaatggtggtgtggtgctcatggtcaaatgtggcactgccaaagtcagccactcggatgctggtgttcttcactgacttctcctcacagctcttgtgctcattgtagagggtttcaaactcagaattcacaaacaggatgttctcaggtttcaagtctgtatgggtcagctgattctcatgcagaaatctaagggcgtggcagagctggtaggccatgtgccggacatgtggtagggggtaaggctggaagttattctccttcaggaactcaaaggtgttcttgcccaggagctcaa

SEQ ID NO: 337651 - DNA, 1000 bp, Homo Sapiens
tttatgagagtgcataaaattctttatttagaacaataaagtatatgtatatatcatgtaattttaaattcaaacctgtataaaaaagggttgggacatacacctattttaaaaagtacacatacagtatatacacatacacatcacattttacaaccttttttatttaattaaatttcagtcataatagaactatttagaatagtgtcgacatacatttacattattatatgcaaactccaatctatgactgaactgagggtatatctgcgcatccatctaaattaatacttttcaagtccattgatttaaaaaaatggtggcaagtggacactataatcacatattaacccttagaatatagaatagaatattttgattggaaaattatatttagtgagtattgtagctcagagatcaagtactggaaaacggtgtggtttttagtttaacagttgttttaattttattgttaaaaacatcataaggatgtagttggagatggcagttataaataaatttacaatgcttagtaaacatttcaggatcacaaatatccattttagcatggattatttcttgaaaaaaacaccttgttataaaatgaaagtaccattattttatttttacaaacaaaggcatttcaagactagttaatggaaagcagcaacattatgaattgtgtgatcaaactccacaaatgagctaattagaatttcaatctgaatggttttattttaaagccaatttcaaaataatattgtttcaaagataagctggtttactttagatttcttatcccactttccaattttaaagtgtaattaatgaattacccctttataaattgattctaaaatatcttttggcattcaaaaccttcatgagcattttacattttctgctcttagttttcaataaaatgagaagatttaaacgctcactttggtgcatttccaaatgttacacacatcttatagtttctcatcctgactaatat

SEQ ID NO: 337652 - DNA, 1000 bp, Homo Sapiens; identical to SEQ ID NO: 158283

SEQ ID NO: 337653 - DNA, 1000 bp, Homo Sapiens
ttttttttttttttttttgaggtcatcaatttgcttttccttttattataaaagtaaaataaaaaatagcatttataaatccaacattttttcctttaaagtatttgatctaaaaaacatatttacaatagcaaaatgcagaaaagggggaaaataccattttcagcaatgattgtaaccatgtttaaatattgacaagtattttttttttttttttttttttgcaaatcagagaaataaccacattagaaaaagcaatatgcctttttttttaaaatggcacatcaagtgactctcattttaaaatatctcttttcttaacccttaatttgaatgcaaaatgatgctgtggtcagaaggaatgccaggtggcgaccgtgatacctttaatgacaataggaacgtagcagagggacaacagcaatgacaacagaaagcagctgtgatccagcagcagctggcaaagcttagtaagcaacctcatccccagatgcatccgctcagccagtgttgtgattgctagatactatctgtaagtgaaccaaactaaaattcatttatgaaccaagaaaggaagccaagttgaaaaggtctcgagttaaatcgagaatgattcaggcgggccggctctctgagcacctttggatgcacttcagcttctgtcttgtggacaacgcagtggaattttagggctttggtttacacggtgtgggaaattgtcagcaggctaaattttgccttctagaggtccttcctgcccataatcatggggcattttgttgagagttagcagtgaggcaccactggtcagagactcggtaaagctgagtttgcggaaggatgtctccacgccgctgtcgcagacactgtcactgtctcggagctcgtctatttgctgccttgtggaggcaggcgagagaggcagcgagtgggcctgagaggtggtcttcactgggctggaggctgcctggatcacttcaattgcttcggtgtagcccat

SEQ ID NO: 337654 - DNA, 1000 bp, Homo Sapiens; identical to SEQ ID NO: 158284

SEQ ID NO: 337655 - DNA, 1000 bp, Homo Sapiens; identical to SEQ ID NO: 336172

SEQ ID NO: 337656 - DNA, 1000 bp, Homo Sapiens
tttttttttttttttattatagagattatattttaatgttttaaatgtatttgatacattacaaaattattttagttacaagcatatcattaaagctattctttattattacaaaatgcttttacaatgctattcttgacaacaggaaaatacttaccctcactgaagtatgtggagtaccattttttggaaaccatgtcaagcataatggcaatattcaggttcaatcttcctatagatctgctcaatatttatctaaaccttagcttctattcttttcacatgttattagttatattttcacttaaaaaattggaggctgaaggggtaagcaaacaaacttttgaagtagacaaagctcatctttaatcaacagaatttagagtccagtctttccaaatctgtttttaacgacagaaacttctccctcccctgccccattttgtcctccccattaaatggtactgtgtcaataaaattcccaagcgacctctttaaatcagcgttctttccgatgctggctaccacagtcatggaaaagggagatgtgttggacaggcctgtcattacaggtagtagttggtggtacatccagtctgtatttcttacacaaaattacatctaaatatttgacatgaggccatttgctatcataagccatcactaggaacttctagtctgtctcactcgattgaggctacaatgttgttaggtgctatgaccacaatgaatacaacagacagcctctcagctgtgctgcaaagtattcataaccaaaagaccatatttcaaattaaatcatagtagcgaatgacataccatttacatattacaatctgagcctctgaaacagggggaacatataatggtatccagaacatctttacatcaaaataacctatcatactacaaagttttcacttccaaaaagtgtaacagagtttaaggcactggtaactttgtccactgttagagattaaaacttccaaagcaaatgaaa

SEQ ID NO: 337657 - DNA, 1000 bp, Homo Sapiens
ttttttttttttttttaccttttaaaacatccaaatgtttattttcacaagcttagtagtacaagatgcaacataattcaagaaaatcaaccacagtgctaatactttaatatattattccaaatattagacgttacagtttaaatctttttaacattagctctaatgttggaataacatttaagttaataaataactgtgaatataaccatatgttcagtctattctccccagtttatcctaaatgacaattttattgtgatttgggtcataaaagtgataaataattgtttatatgttttcataaattgcatgtttatttaattaatcctgaagagaacctagaaatacattccaatgggttacataaattagacgtattttttagctcttcgattttttttaaacatgagtgagtcacactgtaactgctcttaaatttagtgttcattgcacataacattttttgaaatgtattttcacaggctataggtagtcatttgcaaagatggccacaatttttgatccttgaattaaatgtctttcatttatttcagagaattatgagtttcaaaagctactgctcttatggggcaatctgtagagtactaaactcacaaaatttgtggtaacaaaagagagttttgttacattacactttccaaatagtaaccacatcttcctactaattttcatgttaaaaacactttaggaaagacagaattacttttaggtataaaatgttctgaatttgcaaattctatagtgcttatgagaatttatattggcttttatattgtttgataaggttgtctgtgccccccagacttccatcttcagttgccacaaaggcaaattctctgtgaattgttcgtaacgtgaggttggtgtcaacatgctgcaatcagaggccttctaggattcatcttaccatttgaatttactgctctagtttggaattttcctgtcattatcgagtttaaaccaatacatgtgttgt

SEQ ID NO: 337658 - DNA, 1000 bp, Homo Sapiens
caagttgaataaagcttttaataaaacagtcttgttctttatcaatacctgtaaattctcttaaagcagtagcaaaggcgactgtagcaagagctcaaaaggcaaggcaatatcggaaagtgtatttaacagaagattaaaaatataaatgtagaagatctgtttatatatttttctttcagaaataaatcccccctcccctgccaggtgaaaggaaatattgcactttctgttctcatgactaaggggacaggagttccagaagaacctttcaagatgatcaggaacaccaggacgagggccgtctcacctcactcggaccacatggagacctcccttcaaaatgggagccatgtcctgccccaccaagccctgtctgaagtggagcttccccgcctgtgctccctccacagtcccggaaagcccagcggcaaaggcagctttgtcccagctctgccaccctcctgctcacagtggtcagggcccctcaggggcaaggacggcagggattggaacgagggctctggaaggactgttcagccctatgcctaagacccctatgctggggacactacaggcacgcagaggaatagcagggccaccctcagagctcacacatccacgaacaaatgaaggctgaggaggtttctaaacctaaagtccatgagtgtgcacttcaatccaggaaggtcgggacttccttcagtttcaaaaaataaattctcccttccggtttggactgtttcaggctcgaggccattcaggagttgtccaccacctggtggggcagtgtgacagaggggccattggggaaggtggctagcttatcccgccccttcaagaagaaggtcagcagctcccccttccccttcacaaagatggggcctcgcctcacaaagcggaagccgtactctcggaggatgacttgggtttcttctaccacctgaatgttgcccatgacccccgtggactccatcctgctggctacattgactgtatt

SEQ ID NO: 337659 - DNA, 1000 bp, Homo Sapiens; identical to SEQ ID NO: 158285

SEQ ID NO: 337660 - DNA, 1000 bp, Homo Sapiens
gctaagatgtcacagcctgacagtactgaaatatacttgggtgagtccacacagcttgcctcagtctaggtaactgctggtaagaaagtcagtccagttgcttttctctactcctggggtctacgaactttcaccaacatcactatcagacacagagggacatcaggtggggaggagggtgaaggcagaaggtctttggtgggtcagaacttcaaaaaggcattgagaatctgtccacagttctgcccctcccagccagaaggaggtggccttcaacgcggtcatcttttagctgccagaactttgttaaccacctgggaccgtggacatcttctctcgtgtcttgagccctcatccccacccctccaagccctcatgcccaccacaccgtgtcccacattccccatcctcccctgtctgctccccatctcaagtccaattccaaggccagagccctggcagcttttctgggagacagcatgaaaaggaggggagtggagatggcagagatggggtggagccagtgcgctgtggtcctgttggcgtggtgatgtggggccaatcctgaggccagaggttcatcaccgtgatctggaagcccacggggccccctggtagaaactggaagaacaaaggggaaaagaaaccagaacaggaagaagacgagtaagcatccgagtgcacgagagtggagccggagccacgtggaggcagggccggcccgtctatctgttgttgagctgtggagagccggtaccatcctcctcttcctccttgtcatccttcatgcctttcagtctctggcgagcaaagtcctcaaatacaatgtcgtcatcatttgtgtcaagttctatgagattggtatctactggcgtctcgttctctggaacttcccgatgcgggggttcctctttgggcttggggtgcattagggtgaagggcagttccacggccacgtcgctggatgcaagatctcccaacaggccgccccgagacacca

SEQ ID NO: 337661 - DNA, 1000 bp, Homo Sapiens; identical to SEQ ID NO: 158286

SEQ ID NO: 337662 - DNA, 1000 bp, Homo Sapiens; identical to SEQ ID NO: 158288

SEQ ID NO: 337663 - DNA, 987 bp, Homo Sapiens; identical to SEQ ID NO: 158289

SEQ ID NO: 337664 - DNA, 1000 bp, Homo Sapiens
ctcattaaacttctgggctttatttattgtttttaatacgatcattacatattacacaaaaataaaagtcaaatgaacttggtatttataaattattaaataaaaatacaggaatatagatttatatttatagagctttcttttcttctaaactaaccaaatctgttctgccgttttatgattttaaaaaagtaaaatagtgtttgtgtgccctagaataagtggggagtgggattaataatcgcaggaccgagttgccctacttccgctccttccttggcctaaacaaagtccctatttgtccctttgggctctggagagcaagaaacccctctcctcctacttaatctttgaaaaatggcaattacatttatttcccttattttttaaaaaatgaaatggatttaaaaattgggaaccatactcagccttcttggccaagagctaatcccaaggaactatatggctctagaagagagtccctagttttccctgacagaagagtctctggggtttcccttcaagctaagaagggcaggacaggtcaaaattgcccactgtggtcccatctaagctatgcttctgggaatccagaccaagccctttaccctttcagaaaacagcctctctttccacccaggtgtcaaggcttcagagcagggcattttggtaacctggccatggtccctgcagctcctcttggctaaaggtcccggggaatgctaacagggatatgtgtcctgtggtagagggtagggtgaagagtgtgctccatacctggggaaggaagcacagactccaatttggagccgatggtctagtcagtggttttccaactttttttcagcagcaaaccccttaatgcaaataaaatcttaccctgaaccccaatatgtaagacagctacaaggggagctgttctgtttgagggcaaattgcccagcctgctcagctccccacccccttcatctccccaaggactcctgaggcaacccctagg

SEQ ID NO: 337665 - DNA, 1000 bp, Homo Sapiens; identical to SEQ ID NO: 158290

SEQ ID NO: 337666 - DNA, 1000 bp, Homo Sapiens; identical to SEQ ID NO: 158291

SEQ ID NO: 337667 - DNA, 1000 bp, Homo Sapiens
ttttttttttttttttttttttttttttttacaatgctaaggaaaaatttaatgatggaaatatcgacaaatattcaacatcatttaaaaacaaagtagcttctcttatttcacatagcttagtttgggatagaaatagaactaatgtttacaatgattcttacatttagcattaatcagaaacgagggtttgttaagtgcccttgctgggtcccaacccccagagattccgattcagcaagtctgggatgcggcttgagaatttgcatttctaacaagtttctaggtgatgctgatgtcaatagtctgtgtaccgtttgagaaccgctggattgattctttgacagtttttgaagtccgctgctcaccatatcacttcatcctcttataaactttcactatgtgattgcctaagagcccctgcttgttggctgctccacattttcacacagttgtactatttctttctgaaatgacattgtttgagggacagtgggtggaacgtgtgagctcctcactgaaggctgcctccagaattccctgaatggactgccttgctttcttcctaaaatctttccccaagagggcataaaggaagggattaaagcaactattggcagatgctagagcaatgcatacatgatcccaggacatcagagttttccccaagggagtttctgggtcagtaagcaatgacaggactccaaaaatgtggtatggagtccagcagacaagaaagacagccaccaccaccacggccactcgaaaggttttgctctgagacttggcgaagcggcccctttgcattcggaagacaatgaagctgtaacaggctatcatgataacagagggcagcaggaaacccaccactagcctagtgatcgttattgccacgaggggtgttggcacttgatcgtcatctgtgaattggcctaaattgtaataatcctggaaaccttgtggtagctcagactcgtagaaggaattgctagaagcgcta

SEQ ID NO: 337668 - DNA, 1000 bp, Homo Sapiens
ttttttttttttttttttttttttttttttttttttttttttttttttaatagtgaggaattcatttgagggccttgggtgctaggcctggttgtgccactatgtgactacagtaaccatttgtacaaagttgtgggggtgtctgaggttcttctgggcattcttcacaagttagatcagccatcagcatgagtgtgaagcagagagaagccgtcaataaggatcttaataacttaaacattttattatggacgaaaaggagaggcttgaggactcaagcctaaaggcaactccccaaggccaagatgagccagggaaggtgaggttatacctgagccttagcaggggccatgcagagctgggatgtgatcggtacatggtggaagtctaccgtccgtctcagccaagcctggagagaccagaagcaacacaagaccctacaaacccacctatggaggggcagggagaggcccaggtcaggccaccctcacctttcagacaggaggcacttggttctctaagatgaagaagggcggctcccacccagaacattctgtgtcacggagaagaggtttcccaatagcatcttccccaacctagaaatgtctgaaacctggacaaagacagacactcaaagaggatctctgcgggcatgtggggatgtcagggccaaggcgtgacttcagggctagagttccaccttccacttccgcagcttctcgtccatggcctggagcgtggcttcatccttcacaaaacagaagcggatatagtggtcaaagtgcttctgatgtggcacactatagaagatggagacagggatggccaccaagcccttgttcttgatcatccacttgacgaagcgtctgtcatagggctcatccacagctccaggcaagtcaggcatcttcctcttgaagtctgagatgtctgtgatgaggaagtagctgccctgagggatgatgggcttcaggcccactgactgtaggctacgtatcat

SEQ ID NO: 337669 - DNA, 1000 bp, Homo Sapiens
ttttttttttttttttttgaatttcattaactttattgaaaggtatatcccttagtactaaaacataatggtagttggttagtttacctctgccaactcaaaattaacaatgatgtattcaaaatattgaaatttatcagccttttgggaaaactaaaaagttacccataaaacatggtttacaaaagttaagaataagatatactgtggttctttggtttttcattgtgtactgatccataacgtgatgtcaaattggatatagccatcatggatagactcaggctatacattgcactgagtaactgtttacaacactttaacactgtacttcttacattcactaactgccatggaggatcctaaacactacttcagcagcttcattcatagttatgaaggtgtctacttgcttttcttaagatttttgttttggcacagtaagggcatcagtggaagtatattctctatttataaaattgccatcacttctaacttaaaaacagtctgtagtaaaaaattctggagtgttcaatctagtctgaacttaccttagtgtgggaaagcaagttttcgaagtgataatttattttgagttactaatacaatagaaactagttttcttgatgggattcagtttgaggcagtaggttctgtataaaaatttttatcgtagatacaaatgtcacctgttttctagaaaaaaatattaaaagataacttaatgaatatgccaaactttataggtctgtatttttctttatataaaatgccctcaaatttaaatgtaattcccatatagcaataaagtccacatctctagattacctattacttgcattatggggtgtgtttatactgcctagaatgttaacccttattatgccttaaaagtacatttgtgaaatgttgcttttgacataaacctcataacttaaaatttaagtaggagtaggattagaataatgacagtgattgaagctgtgggaagactgatagt

SEQ ID NO: 337670 - DNA, 1000 bp, Homo Sapiens
gggacttacatattgaacttgatattttcatatttatttcaattttctgaaaggataggataaacaaatacgttttagcatacagtttaaaaaagaaaaagaaaaccttttgaattagaagaaggtggagatcagaaagtgttcttcttttgttctcaaaaggaatgaggagagtcagagtgtcgctattgcttcttgacataaagacggtgtctgttttatgtctttatctctgaatcccgcaataccatcacagcagagtgtactgtacaccactttaaatgataagagtttcaataggcactttagtggaattaagaaaaatctaacactcttccaccgtgatgccacatagctatcttcgttctaggttgtcatgtcagtaaattgtattgaataggcctgagcttgtctcagtgtgattgtgaaaaaacaaaacaacaaaacaaagcaagtacacattataggatgtatctcttgttggcagaataaaccaaaactgacaatatgattaatttagtaacttactagaaaccaggtaatcaaaggaatcttgtcccagaaagagtgtgtgtgtgtgtgtgtgtttgtgtgtgtgtgtgtgtgtgagagagatttctattaatatttgtgtttctttttcttttttaaaaatctcccctctcggttgtattttagcctccacgactcccttaagtgactttatcagggttataactctcttcttcgccaaacatgtctgccaagactttaaagcggggtccccagtctgtcagatagtcatagtcctggtcggcttctgtggtgagagagtctatagagctgagggactctgccacggacccactcccttcgtaggcatatgtggccagtgaatcgtatggtggggcagttgggtccacgtcattttcctgtagcctttgatgaatgaaatcccttatgtctgtgttatcttccatgggtggtctctgacgaggtaaacagagagagtctggtttta

SEQ ID NO: 337671 - DNA, 1000 bp, Homo Sapiens
ttaacaaacaaaactgactacaaccagtgtttattcttgatttgtcaccactcttttcatgtcttgttttcttccacatgttaaatatataataaccaaaactttactaacatacgaatgaagaaaacatgcgcagcatgtatgcatggcaggtagtgaggaaatctggccagctgactggttcctttaccaaggtttgcagagtaggttgtgtttgaacaccttctgtgggtctgtgtcatttccaagttgaagaatttcagccaaagagcaacatgtcacattgattaaagatggttaatgacacagaaacatttctgttaatactaagggaaaaggctgttcttttatttatttatttttcctgagtcctcacgtttttcttctctgacaaatgtttgaaattcagtgaaataccaaaggagtcaaggatgaaggggacacaggatggaatcagaaaaaacataaatggaatccaggcagttctatgagacaacactgatatatctccttgataaagaaaaaatgtacagaatatttaatgagtctgtcttgccccaaaagggaaaaacacaagtagctaagccatttgcagagaggaaaaatgtcatggaaaaatgaaaaatctctctaatgtctatagcacatgaaatatctaagtaggtgggtgcagtggttcatgcctgtattgggagaccaaggcaggcagatcacttgacgtcaggagttcaagaccagcctggccaaatggcgaaaccccgtctctattaaaaatacaaaaattagctgggcatggtggtgggtgcctgtaaacccagctacttaggaagctgaggcaggagaatcatgtgaacccaggaggcggaggttgcagtgagctgggatcacaccactgtactccagcctgggcgacagagcaagactccacctcaaaaaagaaatatttagcaaatattaaaggacaagagggaatatctgtttaaaaaattataatgcacgt

SEQ ID NO: 337672 - DNA, 1000 bp, Homo Sapiens; identical to SEQ ID NO: 246439

SEQ ID NO: 337673 - DNA, 1000 bp, Homo Sapiens
gggcatttgcaggtataaagccagtgaatagtcaaaattgcacaacgtactaccacccaagcaagtctattctttataagaatatctgtcctgagctccgtaagtttgtaagtggccaccctgttttccttcaaactggtattcagctaagtggacaggctaggcaaatctactggcagattccatctcattatgctggaacaatgactggaatttaaggaatgatatatgaagcaagataatttaagaccaccaaagaagtgacaaagggaaccacatttttgtgtgtcccagaagctgtcctgcctccagatcaacagatgaacagcaagttcagcacagggcaaatggagggcgcactcaaacttcagggccctttgtttaacctcatgtgctccaggttggctcttgagaattaaaacccaaaactcacattacaagcatctttcaaattctattattgaactagagatatggaaatagatctagacaaattatgggggtgagggggtgaagaagggacaggcagccgctgtcctctaaggtttcacaaaatggaagcaggcaacccagagagtcactttagcttctgaaccgacttcagtaaaggctggtcttcttcatgatccgaaggaactcctcctcgttcacttcgccgtccccatcccgatcagcttcgtcgatcatctcctgcagctcctcatccgtgaggttctcccccagctcgttggccacacgcttcaggtttttgaacgagatcttcccggtctcatcgtcatcaaagagcctgaaggccttcaggatttcttctttggtgtccttctcggacatcttctgcgtcatcacggccaggaagtcattgaagctgatcttccccgtgccttccctgtccacctcggagatcattttcttcatctcttccttcctgggttcgaagcccagcgctctcatggccaccttcagctccttcgcgtcgatggtcccacttccgtccacgtcg

SEQ ID NO: 337674 - DNA, 1000 bp, Homo Sapiens
ttttttttttttccaattctgcaaaattgtttattatcctaggaggaggcccccctggggctcacatcccaataaataagtgtctgacaataaataaaagtggtccataaataacgccccctagctgggagctaaggctcaggcttatcttggagatggggtaggagccagcgaagacaagccgcccccaactccagtaaagctggtccctgattccctgggggattcggcccaaagcccccagtgaggcaccaaaggaagggggaaggccacaaaggcaagggccagagcctgacaggcacaggcctcaggcctcagggcttgggtcctaggctgggctgcggtcccggagcaggcgcagagcatagcggagtcgctgccgcaggtctggagagcagcccagctgccgaaggtgggaagcgaggtaagtacaagcactacgatttcgggccacaaaagtcacaaggaggggctcccagccactgagaatcagcttggtgtggtccccgtagaagttcacctggacagtgccatcactaaacagcatgaggagagcctgatccgtcttgacccactgcagcagcaagggcggagcaggtacctctacctcttccacactgggcagatctccacccttcatgaggtgctgctccatgtaggaggcgaagtaccgcaggatacccagctgaggctgcagggcccggggcacagcacccacggagaaggagaagtgctttgtgctggtgggattgtagtgcacagtctttctgttggccgacagggccatatgtgtgccatcgttgaagagcacagccacacggcggctggacagttgatacccaaagccgaacttattggagtagtcaacccacttgctgacccacaccagaggctctggctgggccaggggggccgggttctgttccgctgggggcatgaaggctatacaatttctcagagcacaaagggctgactccactactgtggccacagtcagacc

SEQ ID NO: 337675 - DNA, 521 bp, Homo Sapiens
tttttttttttttttaaagtttaaatagattttattgttacaagggggaccccaccaagcagggtcagtgacccccaaggaggtcaccatggagacatcaagaggtcatgattgcagaagaggtgactggaattgaatgacatgatccaggggaggccggccacaaatgcagtaacatgaccaggatgggccggtggggctggtcaggtcacagtgtgagggacagaacggaccccttcactctggcctcctgtaggtctccaggtgtgacaggatccagcccgctggcaggaggaaggtcacgaagcaggaggtaagcccaacggccaattccatgatcccaagcttcccctccggcggcaacgaatggatcttggcgcgcggcactgggagccgccgggccgagcctgtcaagccccgcagcagcagcggcgtcaggacggacatgatggcacggagtacaccacaaaaaacggtcagccgtagcccaaggtcaggaagccaaaatggctgcgctggcc

SEQ ID NO: 337676 - DNA, 1000 bp, Homo Sapiens
ttttttttttttttttttcatatttgcatatactttaataacaagttcattttagtaataaatgaacaaagaaacagagacagagaacttaacacatgatacttccacaagtttgggtctaaaaaggtttacatcaaagtttaaaacatatactgtctgtgttaacagaggctacaataccaatttggattacgacattatctaaaacattattatcaaagagtgcaaagttagattaaacaacatcaagaaaattctgtcctaaaattttaacgtcttttaagaaagtctaaaaacctccttttttcccactgacttcaaactttgagttttatatcagaatatcaatttgtcattttaactttaccatacatgaaaaattatcaaaaatatatcgatgggtctatactaattgtgactgtttatatttacattaagcaaattctcttgccaagttctttatatacaaattaccaattgtcctctgtgaaattcattaaaaagttaaaaaccacagaaatgtcattagaaacaacatatttcaatatgtaactgctttccatcaatgaagaatatttttaaataacttaattgaaaagctattgaactccccaccaatttcagctgcaacagtattcctcctgaatgttttctaattagtgctctgtctctggactttaggaccaatactctgtgtgtcctcttcctgactaggacgtttcccaccactgagaccagtgcccatggagcttcttccttgcttcaacaggtgagtttgctgactgtcgccatgagcatagtgtaaaataccactcccttgagagcaacttccactgctgctacaacctgggatattttctgcagaatatcccatgaagcctccattcccattaggattagaaggtactgatgccagaagacctagtcctctatatcgtgaaagctgctgatagatctgtttcatcctttcgatattcaaacggcttgcctcagcatggtt

SEQ ID NO: 337677 - DNA, 1000 bp, Homo Sapiens
tttttttttttttttttttttcattgttaataaaaacatttattttgcattttatacagaacaacctgaagtctccatcatgacttgacagttacccaggggtttacagtgtgtccaactcaacagtgtggttctgggactgggtatccacacaaacacaggcaggagtttggaggaaagatgggggcacagcaggagtgtatcttaatcctttctcaaagaaaaagaagtagagcattctgagttgctgaaaacctgtgcaaatggggcttctgaaacattgtactgtgagctctcagggaaagggaggaaaaagatgttgataaataaggaggcaatttcttgaggcaggggacgaggagggaggcttactatttttaatgccctcagccccagtacctgataatcagaggagaccatgtccaatcttgaatcaattccctgttcaaaaagaggtgctaataccccggggacaagactctgaaaatatcatgctggtcattccggagttctatgccccacagcatattaaaagatgggggttggtggggggtggggaggtcagaaggtagtggcttgtattctgtggaagtaaaaaacttagttcacattaagcactgataaaacccaatgactgggcccacagatctgttgagaggtctctagtagggaccaagagggggaggtccagaacatcctctgcctgaggtgcaacaggtgtagaaagtctgggaggaggtgagtattaaagtaatgggaaacagaacactcccagaccttaattttaattggatagttttaaaaaaaaaatcaaacattgggtgccagtcacaacaaatgccatgcctttatggtcacttggtagtataaaaaaattgccaaagcatgtccagctaaccaacaggtcttgctaggaggtgtttgtgtgcatgggagagggccaaggggcttggtacagctgactatccaacatgattcctatggaaacagaaggggcaga

SEQ ID NO: 337678 - DNA, 1000 bp, Homo Sapiens; identical to SEQ ID NO: 120120

SEQ ID NO: 337679 - DNA, 1000 bp, Homo Sapiens
tttgtatgggtaaaaaattccatttttatttttactaatgtaggggagaacatatgtttccttctatccatcctaggtttagggctgagatctctataacaaaagagagattagcaagagaaaagcatgcacatttatttaatataagttttacacgacacgaggggctccataaggaaataaaggcccaaagaaacagttgaacttgaatgttttttatagtaggtttgatgaagagcagccagtgatgtagaaatgtcatagggcaaagtgtgaacaagctaaatgtaataaactgggggaaactgagaggcctgtttgtttagattcctctttgtgtccctgtgcttttggaggtaaggatgctccttttctctgggtgccaggagagcacctcttacatgacagtcttatgatctacttcaggggaaggtcagaaaatccttcccaggttttatggctgcttctggggagaacagcaggcagaaggtcagagtcaccttcctgcttctgcaatttcctcaaatgccttcagcttaaaatattcaatatgtcaaagtgctgtattttgtgtagggtgtcctgaaccccgtcactaacctctaactgaaagttaggattttcttcaattctgaacatagttcataaaccacggtaatattagcaatacttcatcatcaaaagaaaaacccagatattttcatatcacattagttttttgcatctattttcattatgcttatcactatttcaaatttaggatagctattaactcttatttaatgcatttataaagaagcatgcatattaatatataacaaacttatcttttaacattttaataactgtatttcgatataattagattcctttgtaatcctatatattttatgcatttaaaaacatgattttaagaaggcattcataggctttaacagatagctaaagactaagaacccatgtttttattctactttcaatacttgaaaagttgtggata

SEQ ID NO: 337680 - DNA, 1000 bp, Homo Sapiens; identical to SEQ ID NO: 160129

SEQ ID NO: 337681 - DNA, 1000 bp, Homo Sapiens
tatgaatcttatatagcttttatttcagtgatcagaagaatgcagtaaatggaatctacactaactaacattaggcatgcacctctacctgaaactgctgttagcttctgattggcctaaatctttataacttatttaggcacatcactgaattttttgtaccctgatatacagggtaagttaatttcttccttgtggcagtctagtaataagaattatgttcactggctagattcctttataactaaaggcctctagactctcaggctgcctaccctaccttgagacttacttaatatggatatttaagcaaatcatcatataggaaagggagatcaagataactgaagtgtactgtataaacactcttacagatatttttctccagcattgacaatcaaacactagataaggataccaaattattcttcccctacttctgccctttctgataaacacaaggatctcccctgaaatcagaaatgactccacacaaatgagagatttttacgtatgtggtcccactatcaaaattataggaagcagttaatggggctttgagaaaagcatagtcccatgtacagtaatatgcatctaaatagagttttctttcgcctgtcaattattttcacaagattagcattaaaaaatacaagcaaacatatgacccttaagcttcacacacaaaaaattggtctttgttcattctcagatgacaggatgtcccaagagtaacaaaagatgggagccaatcctctcatagctgtttcttcaatcatcccatcaacagctcttcatttcttgaactaccttccttttccaaagaggtaatgctgagatcagtcagaaaggctttctgagaaaactggcttggatttctgggtctgttccagtcgattcaagatgaactggcttgtatcaatgaagcgctcaacgcagttcacaaaacaggcctcagcccgactgtccaactttggcccaggcttgtccatgcacttct

SEQ ID NO: 337682 - DNA, 1000 bp, Homo Sapiens
ttttttccagaggaaagggcaaagagatgccaaagaaaatggaattgtggaaaagagaaacagagaaacatgagttttcatagcttttcttttgccggaacccagatgtaagaaccagattgttcttctatgatctgtttcacttggttgtaaatgtcttccagcgtatccccctgtacaatagctgtgaaatgttcagtaaactcctgttccagtttcatggctctctcaaatgtttttctggcttgttcttctgttagacgcttattcatttccatgatattttccatggatttgggtttaataaaaatggagatagggtaaagctgtgcaatctgtaatctctttatggcatttccagacacatcaaggatacagtgtttgccctttcctgctacttctcgtacagactgaacacttgttccatatagatgattgttatactggccagcttcaatgaatttatgttcctggatatctttttccatctgctctcttgaagtcacaaaatgataatctcttccatctacctcataatctcgttttggtctagttgtatgaggaacacaggatccaaatttgtcaggaaattctgagatcaagtcatcatttatcctgtctttcataggtcccaatatgatcactggtcgagtataattaacttcttgttgattcactggttcataagataagacgtattcttcttgaccacggtaactactttcactatcgctggcattagaagttacatgctggtcagcatcacttgtttcctgctcactctggtccttgttcttgtagaaggggaattttcgggaaaagaggttctttttacgcttgtcattgaatgactgccctttatctctcgttttagaattgaatttcactgtttttaatcgggctcgttctttcttctcaactctgcgtttactgggaatcactccgacctcatcgctctcaccatctggtgtaacctgcctggcttgccaccattcatcat

SEQ ID NO: 337683 - DNA, 1000 bp, Homo Sapiens; identical to SEQ ID NO: 158294

SEQ ID NO: 337684 - DNA, 1000 bp, Homo Sapiens
ttttttttttttttttttccataggaaaaaaatattttatttttttaagaacaaattcagtttgaaacagatgtggaatgtgacttcacggatttcattttctggggctaactgcaatgtgaaactaaagcagatttaaaacctatgacaggctattaaaataaaacaaagaaagaaaaaaatatttataactcaggcataatactgtgttacttacaaattggacaacgaaattttaaataaatattcatggtacataattacggcacaaatatgcagcaatttggcaaccttttataccattttttcctcattacagtgcaaaggggaatgacactgccgttaaacaagctgtagctaaatacattgcaaaattcagattttatacaaaacatcttgcttagactttataaaaaaccaacattgctctatgtacacaatctgggtaagaaaagccatttctttcttgttttcatgtgtatttttattaaaaaggtgaataaggctactgtaacaccccaaatccatagacagtaaaatctgaacctatttacagcatcttcactgaaacatgatggtgcaaattccaaagtcgggtgaccagggacgatcatacaagcaaggcatttacagtaactttccaaagctaaaccaacttcaaacaaagggacagttggtagattgtcatattctgcaccagacacaaaacagacgcacagaacacttttcaattggttgcagggaactcttttatcaattcatctgatttttcacagtttagcatagaaccaaaacgtagccaactgatgatacatacatttgatttcattaaaatcagactatttcccatttttccccttctcgcccctctcccccatcctaaaagtaacttctgatggcttacaagaaactcttgcatgaatgcacagaaaggagaggttggggtgatggaaagaattacatatgtactgtggctggttaccatggcaaccctccacag

SEQ ID NO: 337685 - DNA, 1000 bp, Homo Sapiens; identical to SEQ ID NO: 158295

SEQ ID NO: 337686 - DNA, 1000 bp, Homo Sapiens
tttttttttttttttttaaaatgagacttggagtttaattaaaaacagaacagggatacattaaacaaacaaacaaaaattacttttctgattatcaattttttttgagactcaaagcatccccaaaacattggagatccagcttattcctgagacatcaaccatcacaaaaggttttcactctgaactattcacatttttgtggcagaaaacagaacaaagttctgcagacatccttcctctctttctaaaatatattcacaaacagggtcttttcatagttcaaaagaaaaacaaacaggtttctttcttggccaaatggcctgttactctcaccctgggatctgatttcttaataaaaaagttcagggcaccaaatccaaccagaaattcccaggacaccagtggctacttaactatgaggggatggatgcttttgtctttctatgaggggaatcattctcccgggattattatgctgctcaacagccccaggacaggtaggtgggaaggagggtgaatgcaaaagcgaaagggtcacagaaaagaatgaggctttcttgaacaacccatagcaaggcagaatggtccagttttacaaaccacccactacaaactccaaacatgcacacccaaaactagaggggaaaggaaagagctcctgggggactaggggagacaaaagatggtgacatagaacagcagacttgcctatgaacgtttctcaacttcctaacactggaagatgtttaattaaaaagttgctgttcaaaattgtactgaaaacatatctaaaaataggtctgtagtcatcttaaaaataaaaggtcacttctcagataagaggagtgacagatattctcagataccaacacttcaggtatctttgatgtaaatttgaaaaatggcctggtagagaaaaaggaaggaaaggaaggagagaggaagaaagtgagggaggtagggagagaaattcagagtacaacaggaaaggcaagaa

SEQ ID NO: 337687 - DNA, 1000 bp, Homo Sapiens
tttttttttttttttggcatattgataaatctttattgacaaaatattgacattgacatacttcttggaagtatatagtgtgttagaattctaacaaattaacacaaaacacaaaaatatttacattctggtatagaagacattaaggaagcatttgtcactctctttagtaagtctatgatcttggaatagaaactcagtgcttgaaaacttgccgccgtgcgcttggccacacttaacatcatccccgctaactacagtccttcaggttttgcaatagatagatttaaagtttggaataggcattgcagtgaatggttgaactcggccaatttctccaaccactgaaaggagaagtttgcatcagggttttaagcctcaggatgttaggaaagggaatgtccaagaaatataattaatttaggggtttttttcccagtacaagtcctgattctttttgtgggcaccctcccccgccacccccagcccccccgtcgtcctgctccccgtttctctgtaagaggaccactatcgctgagcctacttcatttagcttgcacaatcactttgacatcagaaggtatcaaaaagtgtttacagactgcacatttcttgggaaaaaaaatcaaaataaaaagcacacagaacctgtctttaaaaggaaaagaaaattacaattcattttcggtctttaaacaccattcgcccaacaactgctacatgcatttcaaggatttgaaacaggtgtgggatggggctagatatggaatttttgttttttattactaattatttttaaagatgggggggaaacacagcgaagtgcaaaaaacaaaaaagtcctgtgcctggttgggtcgtggtttttatcatcatcatcattttttaagtggactgtgataaacggaatacctgccaatcatcttgtctccccggtttggtgtttgattgacagctccccttgtcagagtgcacgttcagctttctctctctctctctc

SEQ ID NO: 337688 - DNA, 1000 bp, Homo Sapiens
tttttttttttttttttttttttttttttttttttattagtgaaagtgcatacactttattatgtacattgttggaaagggaggccacctggagaaacttctgcactggcactgtgttcctagagctccttctatgcgtccctcccaagtgatttaatttcagctgattggactacgaattcacaaggcagaaaagtcaaggtcatttggtatctggagacaggagaactcaaggaaccaaaagcactgttactctaagtctcagaaaaggttttcagtcaggatatggaggctcctggtcctcaagggtgaaccacttcacacaacagataaaaccatcattttaaaattcaaaatgtaagtgcaacttgagtttaagttgcactgctccatacctctaataaactcagctaggagccaggatacatggtagttcaaggcttcctaaaataagcttgaaattggggtacaggggaagggacatccattggctggatggacagagtggttgagctaaagagagctataaaggctcgtgctgggaaagaaagctgttatgcttagacttctctaggtgaactcagagtctcaaagaggaaatgttacaaatgtcacccgccagctttctggccagtaagcagaatgccaggttgctcagattcacagacatttgcaaaacagaagatgtctcctaatattatagactaagaatttgttgtccagaggagctgaccagttcctctttcagcatcaatatacatgatagaagaatgactaggtaaatttaaaaagacctacatctatatagatattgtaagtttgacagtatctgcccaagatcattagacactatatagtcaatatactgtgaattccttatactatgtaatgaatgggtttgtaatcaacatatttcacagtgtaccacagttaacagcatgcagatagtaaaatataatggtttcctgaagttatctcttaaaaaagtattttagtcctt

SEQ ID NO: 337689 - DNA, 1000 bp, Homo Sapiens
cattatctacagagattttaaccaaagttacattgtaacacacaaatgctgtcttgtctttaaggcacaacacatcagtatgaacattctgtttgccaaacttaaaaaagagacaatattatattcccatttcccctcccattcccctccccaacaaaagaaagaaaaattgcatccactttgaaagtcagctgctaataaagtcacagtaaattattttcatcaataatttacacaaattacatgtctaaataggactgtccttatacagtctgagtgcattccaattcagattttctgggttaggtaggctaaagtcagattcaaacctcagggctgagaagatctcccattttgaggaatgttgttgaccaccttgtcagacggagcatgtgtgttgctgctttgccagggtaagagttctttgctaaagctgctcattccagtttggactcatttggtgtgtaccagcaacctccacagatttttaaaaaacccattaaagtgttgtaaatataagaccatagagtttcttttctgtagcactaaagtttaactccattcagcaatctgaattcttcattctggaatttttattccaaatatgatttcatccattaagacaatttatatgtgtagagccagaggcattgaatcacacataaaaattcagtgtacttgaaatataaaaaatggatctccggctaaagaacacagttacaaatactctaattccagtgcttggtggagagccaggaggtctgagtgactggatatcctccagaagggcatgttgtgcttttttgctgcctgttcttcttctacaccatccccaattacaacatacactacttttctgccaaacctttgcattattcgttcaaagcaactttcttttcctattttagttgcactgtaaatattctcaatggggaaagcacctcctaaactatagagtagaaccttcgcaagtgctgggatcagttgagttgtcgttacc

SEQ ID NO: 337690 - DNA, 1000 bp, Homo Sapiens
ttttttttttttttttttgcatttaaaattgttttttattgttttgttgggcagtatgaaatatacagtcaaggcagattcgtacagacttgtaaagtcatctcaggaatcttttatgcttaaagtttcctcagccccatttatattcactactatcattcactctttaccactaatatcttccctgctgtctaatcactaatatcttccctcctgtctaatcactaatgtcttccttcctgtctaatcactgagttaagggaaaaatagtcatttacttacaggaatataatgggtattaataacaaaattccatttccccattaaaagctatgtctaagaaaaaaaatagtggaggcattatttaaaacttctaaatggcctggtgagtatagtcttagtttagcttccttacttttttgtatgcccaacctgaaatgatgtcatcccgtatcatcacagtatgttgctttttcagtacgaagttaatgggctttcctgctgtttaactgctttgagattttaaaaattcattcagccacatagtattcaaagcatggagctgggtgccacaaagacttgggcctggcatcacccagaagctcaaggaaggcagaggatgagcaccttctccattatacttggtacttgattgttcatggaattaaaatttaaatataaatgaactatatataaatgccataataaaaatatacgaaagtgctttggaagtacagataagaaaagtgacacttctagcctgagaatcagggaagaatggtccttcaaggacttgaaaaaatgaacagaattaaggcaaagacgttaggactagcttttcagtctgaggcagagtggagatatagcagagcaagaggtttggttggtgcctatatcataagcaaggtttaatgggaagtgtgattagcaagttagccttgaatgccaggctaaagatttatgatttattatagaaacagtggagttagtggaaatgttt

SEQ ID NO: 337691 - DNA, 1000 bp, Homo Sapiens; identical to SEQ ID NO: 158296

SEQ ID NO: 337692 - DNA, 1000 bp, Homo Sapiens
gcaaatgggacaattttaattcaaccacaagtcaaatagaaagaagttaaaagaatgtttatgcaaacacatgagaaaagaagggtgcagatgagaatgggggttggggagagaaagaggaggagtaagaaaagagggaaaagcaagggaaagtaaaggaagaaagagaaagaggggcaggaagagagcggatttggcccaaggtcctatcttggccgcatctctctgcttcttccccctgatgcttggtttgttgacaacacagcatcctgtgcctggactcccaattagcttgttcctggactgtgccccaggtcctccctcaggagggcacatgctgtcagtccagaccaaactcacattaaataaatttcaatatacactgtacaagaatgccaggcccatccctcatctcactggctgcctgacccccaaaacaaagctcctccccagcttctctgtgcatcaagggacatctgagggccgaagaggaagggaaaggaatagcttggttcccaaatcggcctgccatgtccatatataaagctaggggcaccatgtgacacctccccacccccaggagccccctgcatggaccaggctggcttagggagcagtggccaggcagcagcagtccccctctgagccatctttgtcaccgtcaccctgtgtccatagcccagagtcccctctgtccagctgcagcctgagcagtacagccaggggtaggggtggggagagggcgtcgtgcaaagtggcaagggaaggtgactccccttggccttccccctggaagacccacatgaccaacagcaaggcaggggaggtacatggcaggcaggggcggaagacgcaggcaggtggcccccaccctccgtcactctgcaggtgggtgggccagattggccagaaccttggcctggtccacagcgtcgagcaggttcttggcgtccacagccagggtgtgtgaagccgtcagcatctgcctcttgcactcctc

SEQ ID NO: 337693 - DNA, 1000 bp, Homo Sapiens
ttttttttttttttttttttttttggagatcacatgcggtttaattgtgggaggctgagagcagcatttttaccaaattggtgtaaaaatgaaacggggtccagacgtgtacactgacagttacagtaaatttcaaaatccaagcagcaatttgaatcatttcttgaaaaacaaacacagacaaacaccaaacatggagttggtgcccggcgccgggcataagggcagcaccccacgggtggctgtgcggggggccgctgggtgtggccgggccctgtgtgcctgtgcaggggcccagctcctcggggactggcccacgaccccccactcagcgggctgagccaatgcctggccgagagggggccgcagccagcaggcttgggtggctgcccgcgcccgcaggggacatcggggaaatgggggcagagtgcgggacccacacgctgcctgaggagtcttggcagggtggacaggcctgggggtctctaccagcaatgcaataaatatgcaaatccaagcacagaaagaccaagcgcagaccccacgggcgcacgaggcccagcccagttcctgcgggcacgggcaccaccggctcttcacagaccaggagtctccaagtcggcagctctggtgtccccgaggtgccgtgggaggcggcgggtgggtgggacatgcctaacacctacatctagcagcctcggggggcagtggcactgggccggacagggtcccaccggcaggacccttcaatcccgttgcatggcgggggtggggtggggtggggtggggatggtggagtgacctccggtggcaggcgggggcacgggcctagccctcccgcacgctcacgcgtggctcagccagggagctgtggatgatgctgatgatggactccaggccgctgccctccagcagcgtgcggtggtcaccctcgatgacgtggacggatactttcccgtcgcatacctgggagaggttgtagtccgcgcccaggtcctcg

SEQ ID NO: 337694 - DNA, 1000 bp, Homo Sapiens
ttttttttttttttttttttttttttttttttttcgggcccaaactcgtgttatattatcgaggtggaaaacagccatatgtattaggaggggaaactgaggcagaccacaggacggggctccagagggaggacaactaggcccagaaccccttctggaggctcagagatgccagtgttccaggaggtctcacagcatgaaaggggcctgactacattcgcttttagcagtcggaatggcggatggtcaggcggtggctggaatcacatttacatccttcaaatcagcatcctgggcctcccctggggtgggcaggaggaccccggtgtcgtctccacgaagggagatccaaggggctggcagcccactcctcatccttctccacaacagagctcctcctacagccgctgccgtgagtagcaagacaccgatgacgattcccaccacgagcacggaggacttggctggagattccagctccaccctgaggggctgcgccagccccgcgtgctgcacaatgcagcagtagtggtgctcatcgccacttttgactgttagtgacgacgaggcgtggaaggatccgtcactgttggggccgaagtcaccctggccggtgccagcggccagcccattccgcaggaaccgaagttgcagctccggagggtagaaggagaaggcgctgcaggtaagcacggaaaagccagggctgctgggtcgggccttcaggcgcatggaggggggctccttccactccaggtttccgcggcccctctccaggtgctcccgcaggcggtgcgggcaggagaatagcaggaaggtgagctccttgttggccgccttgtcctgctgctgccaccgctgactgatagccagggcctcgggccagtccccaccccaggtgccctgcttgaggtcgaaattcatgaactcctcgccgttcagggcgaacttggcggtgggcaccgaggtgttgtcagggcccagttcacagcccagcagg

SEQ ID NO: 337695 - DNA, 1000 bp, Homo Sapiens
ttttttttttttttttttagattatatcctccatttaataattttagaaggttttataaaataacacaattaaacttcatttgaacttttctaatttgaaatataagacaatttatactctaaattttagagtgctttggttgaatataatcattaaagtagctctggaaggagagtttaggtaatccacacacaaagacaagaataatgaagctaattaagagaataaattggctttgaagtactttaaaattatagcactgctatggtttgaatgtcccctccaaaactcatcttgaaattaaattgccagtgtaatggcattgaaaggtgggtcctttaagaggtgatctcctttaagagcagagacctcatgaatggattaatgccgttatctcaggtgtgggttagttatgtcagaagtgggctcctgataaaaggataatcattttgccctcttgctctcactcgcattctcttgcccttccaccatgtaatgatgcagcaagaaagctgtcaccagatgccaagcagatgctggtaccatgctcttggacctcccagcctccagaaccatgatccaaataaatctcttttctttataaattacccagtctgtgttattctattatagcaacagaaaattaagacaagcactctccacatagaaagcattcaatagttatggccaagcacggtggctcacatctgtaatcccagcattttgggaggctgaggtgggtggatcactcgagctcaaaagttcaagaccagcctgggcaacgtggtaaaaccctgtccctagaaaaaatacaaaaattagccaggcgtggtggtccgtgcctgtagtaccagctacctgggaggctgaggcacgagaatcccttgaaactgggaggcagaagttgcagtgagccgagatcatactattgtactctggcctgagtgacagagtaagaccctgtcccccgctccccccaccaaaaaaaaaaaaaaaaaa

SEQ ID NO: 337696 - DNA, 1000 bp, Homo Sapiens
ttttttttttttttttttacttttagaattttattgacttttttcttcataactttaaaacaaaaacagcgcatgaaaaccagtgtcttattccaaagtctcaactcagctgattgccaggtgaacatcaccatcttactcctctgaataactagacacaaattacatagcaagttcgagtttctgcccacccaagacacagccagtaatcagtcacaaacacagacacagccaactccaggggctccagctttctgcccatcttctctcagcagttcctcccatctgctaagatgcgccttcctggtggctctctctcaaggtgggtcaaggctgaacaagacagaaaagcacagtctaggtccaccatcacctcccactggccaccagttggccagccaggaaatcatttctgtacatcttttgtctcccccttttatctccctctctcttctccaaaacttgttgctatctatcactttcatgtaacaatggacttagtgtccattaaactgcctgagaagtggtttgagcctgacatattttcctgagctaaaaaaggaaaagtacctctgtggccttcttgccattaagatcaagtaaaaaagggactagcactactgaaaagggtcacgctagaaaagccttagaatcctctctccaccccgtgaaggtttctctagctgtagctcttaagggtacaagacggcaaatattctggggtgaaggaggtataatggggaaacacatttattttccccttttaaacttccctgctgccccagtctttgccttcttcttagtggatcccttgggttctggctccttgcgcttagctgaagagagtgagccggtcaccttgaagaaatcatccaggcggccctgggtgctgccttggcggctcttactcagcctcttgaccccactgcggattcgctcctcagagaactgcttttcaccacacatgaacttgatcagctcttcttcatttggctcgctc

SEQ ID NO: 337697 - DNA, 1000 bp, Homo Sapiens
ttttttttttttttttttggttctggtagtgacaggtgtatttataatcaagttgaatcaagagtgacaagaagaaatacagctagagttatatttttgccccaggggtattcttttcctagaagagcaagtccatttttagaaaatttaaatgtctttatttgttactttccaaatattttggttaaacaaatatctcttgcaaatgtatcttcaaaatctttgcctacatgcatacaatttgttcttcccaactgcttagggaaattccttcatttcattttctgctaacctctagataacagaaataggatacctggtgaaggatatggtccactattgaagaataatgattgtgtaaagtgagggaaactatattgaccttgaaatacggcaaccaatggcaaggtttgaggtgagggcctagagcttctgcaaagtgtatatattttagggagtcatatttggaacaatacatgctggacagtagagatataggagaagttacatgctatgtcttctcattgataatatccataaatctgcatacatttttaacattctgttttgtgtttttttttctttaaatttggatgtctctacaccactcctgatttgtaggactaaatagatctatttattccaatgcaaattgtgtaacatttatttcttccttgatttttaaaaatactttagtattcttaactatgtatgtgccttctcttacactgagttcttttttgctcctttcagctgctcacacaatcctgtctgttggagtcatagctgctaattccatattatttctctacacaccttgaacatttagtgtattactggtacccttctgtgttctaggaaacaaatgaattgcaaactggacttgtaacaggatcatacatagagcaacaaattagctactggctttgtaagatagtaagttaggaatttcacagtcatgtctccaaatttcatggcagagtttaaaaaacaatataag

SEQ ID NO: 337698 - DNA, 1000 bp, Homo Sapiens
tttttttttttttttttttttttttttttttttttccctcatcatcacatggctttattggccctgagagccacagagtaaatcccaagaggccctgcttcccctcacccccaagtttgtccggaggccccaggggcctggctgagcaccgcttcaatcctggctttctgtgtggttgtccttggctcaccagggctgggtccttcgagagttcttcaggtcctagagccaggctcagcccggagggtgagggacctgcagggactgcccgaggtgaggctgcctttactcaaagaagaacattcctggcgtccggtataggcagggggtcagccccaatgggtagccggagcctccctggacagggaagccacctgcaacccagggttccttgtggtcagttggcaggggcagtggggcccggagtgagcctggaggggtgggtggtgcaggggagggggctgctgaggccaagaggtgctcaaggcctgggtcagcccccatgcaaaaattcagtgcctgcagccgacactggtagctgctcccgatgcctgattccggggacaagacgggcgtaggggccttattaaaactctcagcctctgagaagccggcaggaaagccaaacgctgggcatgaggaagatgaggtggccacggggagctcccctgggcatgcaggcttgggcgtggaaatctctttgggctccatgggtggccgaggcctgccatcagtggttgctgggcacatactggctggcatggcccccaccagacccccaaagcttaggcccttgggatctggcagctctggtgggaatgagcactgcctgccggtcgtggcgttggggactcctgggtcctggctggtcgccctgaggggtccacggcgtgccttggcggggccccgggtgccctcagcacctgtctgccgggtgaagcggcggcggcggcgtaggaagctgccgtgctcaaacatgtcgtggcagtcagggtccagc

SEQ ID NO: 337699 - DNA, 1000 bp, Homo Sapiens
acagtccgcctcttctttaatcttggactggaggatatacagatcgagagggtgggagagtggccccaggtaagaggcctgcggagggatagaggggccggttcaggaccaccaggggctctgggaaagggggttagggatgaggctcagcctctcatctgcccagctggtccccgccacctcttccactctcagctggactcccctgccaggggtccagatcctgccagagtagttggtcccccagccatgtccggcctggacacaggactcatggtggggccagacttcagctctgggcagagcagtgtcttagtagcctgcggcctccccactcttcctcaggtccgagacggcgtacacacaggccccctcctgggacacagcctggaccacgttcaggaagaagggcctctgggtctggttctggccacggtcttggagtcccctctgcacctcctggctgaagttgggctcgtactccacacagcccttgctgttgacatgcaggatgggggctgcaatggccgctctcaggtcaaagccaagccacagcttgctcatgatggcctgggccacagcagagatgatgagctccccgccagccccgccaatcactagcttcgacccctgggctttgttgatcaagatggagggcaccatggaggatggggaacgctcgcctggaactgggggccagcaccttccgggagctccacccaccctgtctccactcacaggtgagggggtggtgccggaaccccaggggcatcgctcgcataagtccaggagctcgttgttgaggatgatgcctgtccgtggtgaatacaccatcgctccaaagggtgtgttgatggtgctggtggcagccacggcgctgccatcctcccccagcacagacacatgggacgtgcctgtcccgtggccccaggcctcggccaagctgtagtggctgagctggtggtccccccggccatcgatctgttggcggatgagctgg

SEQ ID NO: 337700 - DNA, 1000 bp, Homo Sapiens; identical to SEQ ID NO: 158299

SEQ ID NO: 337701 - DNA, 1000 bp, Homo Sapiens
tttttttttttttttttttttttgattaattaagcagaaattttatttccaagctcttcaaagaccgttgcaaacacgaataatgtatccttctaaaaaagtgtcccaaattaaatcaaaggcacatcgtcgaagtaaaacacttgtgaagttaagaattcttttaggttgtaatattttcatgttagtttttaatcatttacaatgttctgtgggtcacattttaaacatttttaaatatatgaaattctgtatttctttaagtacagccacaactacaaagcagagaaacgtaagaatacaaaaatcaaatctgcttcatttatatacacgatggggcagcctaatgcacatcataacattaacttttccaaagaagtttgctaagaatctgctcccataattagtgttaaaaataaagcaatcttcccatttagaaaaatcaagacatcagttgattaataaagcctattcttcctcccagcaatttgtactttctggtcttcatttaggaattataaattcatgacaaaagaacaaattttttatggaataaataacttccaggaacaacagtttataagtattcagttgtttaaataaacaaaactattttccttcctaaaatgtaaacatccagtaaatgaaacatacatgatattccaggtatagaaatcttagtaactcacttatgaaagaggtgcattttggtatgtttggtggtaaggtttttgtttatcttatgtataaaagtacttgcacaaaaaaaacaagcagttattactatttaaaattctattccttcacccagttttctcactcaagtagaaactcatgaatatctgtgattttggctataggaccaggccacaggaaagggctgaaatatctctaaaagttagggaaaagtgttttcttgagacttgaaggcagtcattcatcactttgtgcttgaaggcattcctcagcaaacttctctcgagtcttcagagtaaagcac

SEQ ID NO: 337702 - DNA, 884 bp, Homo Sapiens
ttttttttttttttttcccaagacaaaactttatttgaagcatcaagcaatatactgaaagaagtgtcatgctcaagtaatgttcttatttccataattgtacatctgatactctctgctctcttaaaaaagactgcatagtgagcaaagatgagtagcacatatgcttttatacataaccctatctatatggtgcttaagaaagtctccttttaatttcattcttccttccttaaaaagcatgttggttttatctgggaaaactaaaacaactagttcttccacttaggatgcagtttctcccaagttatttatgaaataacacagctgcctttttctttaaaggggttcttgtcttctggaattccctttactagaggatcctctccagaacgttcttcaatatagttctttatttcttcagaacatttagacacttgttgtctctgcaacttcacttctttgcgaagctgctcaacttccattttcagtttttccttctctggcaaatcttcgatgtgaagggcaggcattttcgccccagaaccgggctcaggctagctctggcagcggagccgctggaagagcggcgaagctcggcgcgtcccgaaacaactgaaggcctggcccgccgcccacccgcgcaggatgtgactgcagccctgctgcggtccccagctccccgagggcttggctttctccgggacgcttgtcacgccagcgtgccccagcttcctaggacctgagaactctgccttttctcaagtccctgcaacccaggaggcctgcccgggtgctagatgagggttaagtttgagactgggtccaagcagcttcccgctgctcaatcgcccagcagggatgctggccacggacaggccctg

SEQ ID NO: 337703 - DNA, 1000 bp, Homo Sapiens
tttttgtgtttcatttctagacttttattctcaaagggatgatgaggaagagacacggcttaagaagttttgagctgagaaatgaaaagaagtcacttttctttgctgccacagaactaagtagggggaaaattaagcccaggggttcatttaacctgttacaacaaaacacagaaaccagacggcaaagtgtcatttgcaaggtgatgtgtctttgtcggagctgaaggctgtcgccggtcggctgtctccatggagtccccatctggccctgcactccccacagggatgatttcatcaggagcgtctgcatctgctgcgtttctgtcggggatcagctgctgactgtcggcatagctcatgacggcagcagttctcctgtcttcatttccctgagcacttgcttctgcaaaaaaccgtgagaggaaggaaaagtgaggacggttgcatgagtgggcttcatggctgccgaagtgggagactttttttggatgcctctgaacatcggctgcccctggcaggtttcccacaggtgcccatcatgtgaaggactggatggaagttccagctgttggatgtcgtggtagggaggctgaaggacatttaacgtgtttcatgtactcattacaaatcattccccagctaccagagagctgcatgggaaacgcccagagaagaaccttgaagactaatgtatgtagaactcttcagctggatctatcggcccagctcaaagaacgtcataataaccaggatgcaagagaagagtgttcagggcaagatggttgaactgagccctggagcttggtggtgggcaaggatgctttctgtgttgaccccttgtgatcaactggggttttagatctccccatgatctcatcctctgtggcattcaagttctggatcaaaaagtatgtggtcattctccctttacctttcacttcaatttcacccctctcaatgattttaaacccttgatttttcaaggctctgtaggctg

SEQ ID NO: 337704 - DNA, 1000 bp, Homo Sapiens
tgtttttttttttttttttttctttttttttttttttttttttttttttttttttttttttttctcagtttttatttagaaagtttagtgaaacaaacatagcatcacagtttagtaatactttaatctcactataatttaacatggtaaaaaatctactaatttttgatttccaacaataaaatttataaaaataattatacatttataaaatgaattatttcacaataaattattcacttctattacctgaaaaaggttgaatactatataaaagtaataacttcccttatcaatattttgaaaatatgctgaaaacatcagttccttttttccagcatctatggcagttcagtatataaaaatataatattataaattccctgaccatagttattgaagcagaatcattactaacaatttcaaagatacagctgtttagtaaatatacacgaataaattacagggttcactaaaaatgaattttatcttttatacttcaaaggtatttgctatgttctgaatttttgtgttttccaaaattcacatgctgacacctagtccccagagtgatggtattaggaggtggggcctttggagggtgattcagtcatgagaattagtatctttattaaagagactcgagagagctacctttttccttttatgtataaggacacagctagaaaatgccatgtatgatccagaggcctaatttgttgatcccttaatcttggacttcccaccattgagaacagcgagaaataaatttctgttgtttataagctgccaagttcatagtatttcattacagcagcctgcacagaccaaggcagtatttttttttaatgtcttctaagggaacccccccaaaagtaaacaaaaatctacaaaagttatttgtatgatcaaaatcaaaacattcttattcacgaaatagaagctacagtaaattttcaaaaaataagagttaaaaagctccccccatatgatatatttt

SEQ ID NO: 337705 - DNA, 1000 bp, Homo Sapiens; identical to SEQ ID NO: 158303

SEQ ID NO: 337706 - DNA, 1000 bp, Homo Sapiens
atcatttaataaatatttattgaggacctactaagtgccagcactctgctaggcatggggatcagatggcgaataaaaaaatacagtgcctgcttgtaaagatatcccaggccagtcagggagggtggtccctcctggaggggaagcaaagtccagactcagagagggcatgcatgcacctggtgaagaggaggagggtggaggcagaggccaggcacacctcacccccggagctgagagcagaaatgtcttcattcttcaagaatctctgagacgtgctgcacagctggaaatgcaacaagcagatccagctgtgacctccaagcttcatctttcttgtcctcaaactctcatgtattggacattggcacccaagaacaggaagtccttatggatctgcagcccaaggtcgtagagctgaacacgcttcagcagaggaagggggaagccttcggccaacttatcattgaacttggggtagaaggtgttaaggatgtaatagttgaggagcgcttccaacagctctgcattgaatagtccaactttggattctttcagttccacttttacctttcctggcttcaggaacccagtgatcttgctggtattgaaggtcaaggtggcggacacattagtggccacactgagccggaagacaggctccttgctggagctgggcaggagcacaaaggcatctatctccatataggggtccacagacagattcccagggctgaagttcaggagcggagcagagggcactgatccctggagttccaggttcatgttggggtagagcctggctaaccgtgggacgaagggtcggaaggacttggtggtcagtcggatattagagtcaggcggtatcatgtcatctgtgatggagaagttcagatatccttcctcatgataaaccaggctggccgtgttgaagacataatccgagatggcaaagtagaccattttgttgtgttcctcaggaaggctcatgactgcagca

SEQ ID NO: 337707 - DNA, 1000 bp, Homo Sapiens
tttaagagatattaaatgcttttattttcaatattaaaaatcagtatttttaatattaaaatggcgctaattttaacaaaacgacagaaaaaaaccccaaggtacaatctacagggaaactcatcttgacccccccccctgccccccccccccgccggacacacacacctgactaggccccagatgtgggtgcccagcagagctcccagtcacatccatgcccgcacacacacactcatgacaggctggggactggcccagaagcaggtaccaaaatagtttagttttagaaacaactgtccagcccaggcgctagaaaaatactctttgcagggctgggcatggtggctcacgcctgtaatcccagcactttgggaggctgaggtgggtggatcacgaggtcaggagatcgagaccatcctggctaacatggtgaaaccccatctctactaaaaatacagaaaaaattagctgggcgtggtggtgggcgcctgtagtcccagctacttgggaggctgaggcagaagaatggcgggaacccagaaggcggggcttgcagtgagcagagatggggccactgcactccagcctgggcgacagagcaagactccgtctttaagaaaaaaaaaaaaaaggaaaaatactctgcaaagtgagggggaaggatggtgtgtggagggggggaggtggcacaggtgctgggccccacctgtcctcttccctaggcagtgggcccccagggcagccaaatgcctgcaggagggctcagttctggcccaggtcccaggcccacaccctggggctggtgctgctccagggcccagggtcaggcgggacaggacagcaggtcccagtggagcctacaggttagcaggcgtggttctatgttaaggggccaggcaggtgccagggatccagcactccagctccgagcagggcaggtggaggtcgggatagttctggccttcctcatttgatcaggatggcacaggcgtgggcc

SEQ ID NO: 337708 - DNA, 1000 bp, Homo Sapiens
ggggcgccttccctgtgaggaaagagtcaggcaggtgtgcgtcccctggccttgctgcagaggacactggatggggcaatgatggtttcgcggcaggtccctctccccctaccatagagttgctgcaggccatcgcggtcatcctgagacaggcggtacttgtcagggtcgcccaccggaccctggtagaagggcctcataatggagttgggggctgaggagtggcccaggcccagggcgtggccaaactcatggacagccacggcaaacaggtcggtcccctcgccgtctgcaggagaaagtgggtgagagctgcggccgcccctgcttggggaaaggggccacaggaaggccctgcgagtgcagctggggccaacaggaacagcaggacacctccagaggtggccccagctctctgcccagcccttcatgaactctccatcatccctgtctccagtcactcagtcagcatggctgtgatggacactggaccacagggctgaaaagatccagagaacacacagaggaataggccaccttacacaccgatggggcccctcctctgggaagggagcactttgtgcacagaagtttgagggggaggagctgggtgtggtggctcatgcctgtaaacccagcacttttggagtcccaggtgggaggatcgcttgagcccaagagttcaagactggcctggacaacataaggagatccccatctctacaaaaaaattttaaaaattggccaggagtggtggcgcatgcctgtggtcccagctactcaggtcccaggctgaggcagggaggcaggagaatcgctggagcccgggaggtggaggctgcagtgacgcatgaccatgtcattgcactccagcctggaggacagaataaggccccgtctcaaaaaaagtaaaaagaaaaaaaaagaaaaagaaaataaaagaaacttaagagggcggtggggtgagggcaggagcctacaaggtgcgtgccattctctt

SEQ ID NO: 337709 - DNA, 1000 bp, Homo Sapiens
ttttttttttttttttttttttttttttttgcacacacttctcaggcactttttatttcatgctgtgcgggggccccttgtcccagatttgtggccacgtgtccaggtgtctgggggagtgggccaagcctgagagaggagggccctgctccagagatccccaggttgtccctgttgacctatagggaggtctgacttcaggcgttgccctcctgacccgtgagcagtcctgagtcgctggctcctattctgtcacacggggtgggtagtgccaaaagcagcctcctgcagcccttggcgtccggaagagtgacagccacattcaagtctccctggcacgtgaggtccatggtgcccctgactcatgtcctggctccagccaatagcccagacccccatggaaggttccagcatgtgcaaaaatgcacattggccaggtggctgccccccggagacatgtgtcagagaggcacgggtcaggtgacccaagtgtccaaaactctcatggagggtcccagcccattggccaccccaagccaaccacagcagggtctgagcctcagacgcgcagtggcctagtggcttctgctctgacagctcacgtccaggttataagggagacgggcagcgttaatagaaaactttgtacatacacatataaaaaaccatttggtcttccattaaggctgttacagtttaaagttacgtaaaccacgtacaaagaaacagttaaacgtacaaaaaggggagtggggagatgtgaggccgcaggtggagatgtggtgctccccacaggtgcgtccatgatttgggggctgcgtgcgagggggcctggctccagccggcctctccctgccttgactctgcacttggggccggtgcccacctcacgtcactcttgagcttttgattctggatccttctctgagggccgaacactagctctgcagctctggcgcccagctccagtgcaggggccgtcctcggacatgcagacttt

SEQ ID NO: 337710 - DNA, 570 bp, Homo Sapiens
tttttttttttttttttttttttttttttgaggggcctgaaggcttttatttgactggtccatagggtggggggtgcaccccctacagggccaccttggggtccacttccccgggtccctggcctttggccaactctgccgccttcttctcccgccgcttcttccgctggagcagcctccgctcccgctcaaactccttcatgcgcatcacatagtcgcggtgctcgcagtagtcccagtcgtgccgctcctgcttgcaggccaggaagttggggaagctgtcacgcttgcacttgagcagccggatgaggtggtgggcgcagtagtcccgcagctggagcctcagctgcgcgtccatcatctcctgctgtgtggccaccatctcgcgctccttgcgttcggggaagccgtagtctggcgggaaggttggcatctgcagggggtcgggctccaccgaggcatcgcccaggtagcgccggaccaggtgggcccccatggctgcagtcgctgcagatccctgcagcagccgagggtcacctagctcctacccggaaccactgacccctcagt

SEQ ID NO: 337711 - DNA, 1000 bp, Homo Sapiens
tttttttttttttttttttttttttttttttttttttgagcctgacaaagagcgtgggctttattgttcattcatgattagaaaagtgggtgctgggacccccgtggagggggttgggctctgcccggtcactgctggtgcagggtatatacaaggtctacggccctcacaggcctgactggctccctcttgatggccaccaagcccaggcactttagaccagagccagtggccatccgtagggccaaaggcagttctggctgtgcagggtccctgggttaggaagtggacagaggctggggtcaccagggcaacccggacagggcccacgggaggcagggacgctggtgctttgggagagggagagacatctccttgtccttctggaatgtcctgagacagaggctggccctggtcactcatccagcccatccacggacctgctgtgtgtccttgagtgggtcgagacccttctctgggcacaggtctctgcagctgtccagttctgaccctctgggctattgtggccagcccccatgtgccaggagggagctgcctcctgggaacagctgctgagagacaagagtggcctcctgcgtggtgcttggccgcagtcagagcaagggctggtccggggacatggtgcagatgaggccagcctgggctctggcagtctgggtagtgccatgtgcagggaggtggacacctcacaggtatggcgactcctggggtcgggcagctgagttgcagggcaggcagcatccagggtcctgggtgtcctactgctggggtgccatgtccatcaagggcttctggaccccgaaggccgtgatgaagatgttgactaccacgatgatgaacaccaggcccgtggccaggttgttgaggaagtccagcttggcgtgcttgtccgggttgttaaggtcgtacttgacaaggaagatgagcagcacccccacgccgatctgcagcacaagggagatggagatgaggaccacca

SEQ ID NO: 337712 - DNA, 1000 bp, Homo Sapiens
ttttttttttttttttttttttttcaggaaaaagcaaattatttaatggaaaattccaaaatacatgagagccatttccattcaatatactttgttacaacaattccatgtacttccaaaatcagatgctttgtagactagcttggcaacatggtgaagccctgtctctacaaaaaatcagctgggcatggtggcatgtgcctgtagtttcagccacctgggaggatgaggttggggggtcacctaagcctgagaagtcaaggctgcagtgagccatgatcgtgccactgcactccagcctgggcgacagagcaagaccctgtctcaaaaaacaaaacccagcaagaccccagtcttttaacttgtgaagcccctttactcgtctttcagcgcatacagcacatcatcctggctgacgttgagccgcacccgaaggagcagatcgttcctgctgggctccacaagcaggaggcgacaggagcccaggtgagaacacacggccatggtctctgacatggtggggtacggcagtccctccattctgcacagtgccacatgttgactatatatctgttgaaacgtggcttcctccagtcctgatcgacggaactctgcgaggatggctctcaggaagctctgttccagaacagaggaatttttgatggccgtgatgtatgatgatgaaaacatctcatccacagcttccattgagtgggctatggtgaccaggccaggggagtcaggcttctgctgggagaactcacagatctctgtggcacgcctgcagatgtccaggcaccgtcgtgcatctccagacagtgctgctaccttcctggctaccagctggatggcatcatcttcaaaggcctttagatgcttgagccgggaccttaggatctgctgcagctggctatatgtatagggctggaagcacatcctggtaagacccagtcggctggacacccggttcatcatgattcgctctggcaggtccattgtg

SEQ ID NO: 337713 - DNA, 1000 bp, Homo Sapiens; identical to SEQ ID NO: 158307

SEQ ID NO: 337714 - DNA, 1000 bp, Homo Sapiens
aggcaactgcaaacaaatggtaggagttgcccaggaaggtatttgggctggacaaagtgatagcaaccctccagaccctggctccttataaatgtatagcaattcattcatacaaactgcacagaggttaaacaaaacctactaaaaaaattaaaaaatcccacaaaatccccaacccagaaaacgtttcctggctctctactaacagtaaaatgtgctgagcccaaattttctgctctaacatgggtcccacggacctatcagtctgctctggggtgctgacctgctgggtcctgagcagggtctttccctaagcatcactgtgggtttggagacagctgtaatgtgtgcagctgtcagcagaaagtacaatgccactgggctacatatgtccatatcatccaccaccatttcccactgtaaaaccaaaggctgcaactgtgaacaaatgtggacttcctcaaaggacaaatgaggagactgaaggctacatttcctcctttgagaaccattagagagtgtctacagttatacaacaggtttctgcagaccctgtggtaacttccaaaagcaagagtagcagcaagagaggaaaggagcatgtttatactttggactttgtatcaggcacttaaattgttggagagacatgccgttttgaaccaaagatataaaaactgggttggagtaatctttacaagtggtctaatgaatgggccttcagaagcaaagtggaggtgtgggttgaacctctgcccatcctttagtgctgactttcaagttttctaaatgcccataaccacagcaatggcagcagtggcggcaacggcaggaacagttctgtcatgtctgttttctgtatgtgttctgtggctgaccagaaggttttggtgtcacactaagaaggctctggggtgtggcacacctactgcccgaggttgcccagatccacgctggagccaaacatcttcaccagctgttcctcatagtgtgagatgtt

SEQ ID NO: 337715 - DNA, 1000 bp, Homo Sapiens
ttttttttgaaagaatgagggaagtgtttattgagactgaaatggaacactcttctcttttatgagttaacagcagtgtgttaagaggctggtttcaaactgactccaaaatgataactggcagctcatgaacagctctgccaactagtgccactaattggggcaacctagtaaggggtagaaccatttagcccaagataaattactgattcaatttcatttatatttagatttatttcctataaacaatagcaatatttgcattttaaaattcacattgaatcattatttactatttatgatgtttacataacaattcagtatcattatgttgtagatttcagatgtaggtcgtcaatactgagcacttatctactcttctgctatctttggcacaatttctcatttcttaaacatgaaagcacaggtttaagttggctacagaatactgcagaaacatgactattttggatttcagtgtaagtacaagtttatgttaagcattatttacaagatgagaactgaagtacagactataataaactatcttcataaattagcagaatgacaagcagaggatgtaatgaatagggccaagattactagttagaacagtcctcctggaggaggagacaagagtcatagaatggaactatttcccccgaaccactgataccagcttatgtcgtgggatttactctgcaacaacccaggttaggggaagctctttttctgcaacgtggcttgttcaacccatggaatctttattaaaatacaacttagttggtagcttgccactgttatttgggccctgataacagaagtgcaaggatggcaaagtactggcctctttgagtatgaatgaacttggaagaataaagccttccagttggatgaaagcacatccagccttttgtgagtgacagctttgtatataatcttatgcagagctgatatggattccctccaggcagctcaaatctggaagttgtaaatgaat

SEQ ID NO: 337716 - DNA, 1000 bp, Homo Sapiens
aaattgaaatccacatttattgatgagagatatatacacaaaagttaaaacacttagtgaaatattggattcacaggttatttccagtatataaagaatatccagttattttacacgtgaaatgttacagtaatcagtccacattgtaagaaagcttagaaagctaaaggcgaaaacaaaagacctcaactacccaaaatgtgcttcatcaacaaggcattttctagtagcatatatgagaaacaattcaaaaattagttgaagattttatctttttgcattcattagtctttaaacactatgtgctatagatgctctgtgctacgtgacttcagaccaatggggattgtgaatgtgaggaatacaattagttttatcttttgttctggacatacaagaattttcaaagagaatcctgcataaagcccagttttatttcaggaagtattccatcctaaatttgaaaggagttgaagaagccacattttcaaggaaaaattagcctgtccaccatatctcctcatatgaagcagccactgcaaattaatgtgcttcatgccccctgatgatattgtaggctttacccttcttgggaaaagagtagggcactcagggttccctatagcacatggctagttcttctctgtccttggggaggagaaaggggttacaggaactatagacctcacagcattgtattagcgataattatacagaatgtgtgttttaggaggcaactgtaaacttgcattagttaatcccatcttcaatcattcaaaacatgcacacagaacatattaggtagagaacgtcatactccctcatatatgtgggacctgtgttcatcagttgcccctctacaaccgcataagctgtacactcactattcctgtgcttctagtgctctaagttttttacagagaactctgaagtttatagccagaactgtgctttcgtagggtttcacctgcagatgcatttgcagttagttagtcggcaa

SEQ ID NO: 337717 - DNA, 1000 bp, Homo Sapiens
ttttttttttttttttctttttttttttttttttttttttttttttttaatgtaaaactatttttttctttattgaaaatacatctacaaagtaatgcttcccagtccacactgagtgcatgtgtatgcagagcctgtgatggcttggcgagatgatgggctccccacaggacctttccataagaaatggttagtatattaaaaaaacacatattgtgtaacagaattaagttgatatgattaagtctttgctctactagtgtcttaagaggacagccacgtactttaacatttgtagtgtatttccgaaatagagcctcgacattaaatggttactgcaccacagcctaatgttaacttttatgcacagaatgcttggggtctatataaaaatatctctaattgtatatcagaggatctatgtctagatttttcagtttgttagcatgattaagtccattcttcaccattttcagccagaaactcaaacacagctgctactgcctgacagctcccactcagcgtctttgactggatattccttagggggtaaaaattaatctctaaacctgggagctgccttgcctgaaactaatgcccctgctgtttttctcataacctcattgacagtgtcttcatactgattcatcttctaccatttctcttatggacacaaacaaaacaaaagcaaaccccactccagctgaaagttttgaatgatttgataagtgggattccaaaacaaataaatattttgtttccctcattctaaggacttttgattaaagaaaaacactttcaaataagaaatacccactcaactcatggacttctattagagagctcattcatttgacttctttcaaatatataagtcgtcttatgttttggtaagcagacttcacggggggaatgattttggactcgagaaaaagtgtttcaggtgaaaaaaaaagccagaaaaatgaacctcttcttttttattcttccttaaagaaga

SEQ ID NO: 337718 - DNA, 1000 bp, Homo Sapiens
ttaaaaatccacaaagcagcatatttattccaggctctagtagacagccccctgatttcattcccattcatcatcaccaataaaatgaggacggatcctgggctggctgaggctctgtggtccttggctccttgccctgtgccttctcagcttcaaggcaggcagtctgtgtcagaggtagagatggcacccacagagggtaccagagctgcgcagatacatgagcccagaggcagaaagagcagggagcaaagggtgcacatccatgagtccagctggggcttcacttgctgcctgccatgatcttgaggtactgcagggcacggcgggcagcctcaccacgggctgcctccctggtggttgcagagccatgacacacagtggccggctgggtggacagttccaccaggcactggcagagtccactcaggctcagctcctcaatatccaggtagctgacgtgaaaggcctgctcctcagagagctcactgaggacacggcagcaggcagggcccagggcacccagggagcccagggagcaactgcggagggacaggatcttctctcctactgaatttcgtagagaatcccaggtgcaacctgggccccggtttcgaagaccatccaggcgggagcccacaccaatggagaagtggtcatcatcaggctccacctcattgccatcccgggcatccagaggcaccgtgtgcactcgaagcagcattttggccgccgcattccgctttgccaattttttggaagtgccactcccaatctcaatgaaacgctccactcgacaggtcatggtgaattctttgcggtgggctggcccagactcctgggtcactgtgtactccggcaaccgccagcctttctgcaccaccagctcctgcagagcaccaacggggttgcactcagactgctgaggggagacagggggctgcagttccatgggggggctcctggttaggactacagatggaactggggtagcagctgc

SEQ ID NO: 337719 - DNA, 1000 bp, Homo Sapiens
acctcttaatatttaattaatttcatcatgtagctatacacacagtaaaaattaaagccatgtatattatttaaaaatctaaagtgtttaaataattctaccagttgttttatcactggacaagaaatgtattaggtttgatatttacaaagatgtttatgttgtctgctattttctattataggtttattcaaagagaatatcacctatagcataaataattaaatttttcaataaaaacaaactaaaaaaaccctagaaacatttgacatcaccaaattcaacagctctcactagaaatccaagcaataaacttagatatttgaaataaacataaattatgattatataactctaagtcacatacataattttgaattatagtaatagcactgtaaacatgaatacaaaggattacagttttatacagaattttttttgtttttcttcttttaggcttatttctccttgaaagaacagaatgatcttttaaaaaataagagttatatagtaaatccagaaaaaaattcaaatagctgtgaaactagattttcctataaatgatcttgaatttagtttacaatcaagtatttatagtattaaaaacccaaaatcatcacatagaacttgatatgtctgttttcaaatgtgtcttaagtctctccattgaagtgtgaattaagatgccgaaggaaatcccccctggatgtaatggatggtgggaaaactgcttgacagaattcacatactcgaggtatatgcagttctgagtctgtgccacttagtaccaccgagtcactgtcttgattaggaaagggcttccaaatgggctgctgtggtcctcggattgcttttcccggggaatcgagtgagggaaaaggtgcatcagatgggtccagaagtgggaagctatttacatataatgcattatggtctccaggtggcaaacacgcagctctatccagagttgtcctgatacaagtgtttacgagatttgagg

SEQ ID NO: 337720 - DNA, 1000 bp, Homo Sapiens
ttttttttttttttttttatcttatcagcagaaaagttttattccttttgaggacaaacaattaaaccacatccaaggtcttaacttacagacagaaaccaaagtagccatttaaagcgttagatatcggatacaagacatacactggggagaatgcttcaccatctgaagctcacaccacaatggcccagtggacagctgtgcactctgcttgtgcttaagtgcctgggtgtggctgaggggaaggcgtgtctgcagaacagaagaacagctgtgtttcacaagtactgaagcattttagactgcatgggggggtatatattttcatgttgaagggaagaggggaaatcagcaaagtccctcccacagagcattaggctgccttgcagagagccacggcagagaagcggacttctccttgctcacgctcggtgaattctctgcagaccttggcagcgtccttcagcagggtgtcctctgaactggcgccatggttcaccggaaaaggcattcgtccatcaagttcatagaggtggccatccacgttgttaaacagaataaaatggaaattcaccttgtcatctacccgacattggccttcctgtgccacggcatcatgggctgcctgtatggcctcattcttttcaaagcattttgctctgtcttcaggggacattttctctgtttcagaaagaaactgtttcagaactgatccatcctcaaatcccagtttgtcttgattattggccactgcgtgaataagtccgattgtgccacaggaattcccaatggtctgcttcatgaagtacactttaggactaacttcttgtcccttcagctcttcaatctgctttttcctgaagttctcatgctgggccgtgaggggaaacagcagcagcagcgcgcaggcaggcgctggcaccgagcccagagactcctcttccagccccagcacgtccacgaagcgccactggccggcgacccccagccgggacagcac

SEQ ID NO: 337721 - DNA, 1000 bp, Homo Sapiens
tttttttttttttttttttttctagtcccagagccagtgtttattagcaagatggaacccaaaggcggctgtggcctgggcagcagaaggccaccaggagcccccacccatctacccaactgccccccagagctaattacatccacacccatcccctgaagtggtggacataagggagccctggggagcctctaccggccccaggcctctaccacggaccccctcccctcagagctggggcctcccgtcagctctgcctgggcctggcccctctgctatgctcccagcctctgagtcaaagtggcacagggaaagctaaggaggtagagtggggtggccctgccctggccaggcggggaggggagaaggggctgaaggggctgtcccacccaggcaggatgcctcttctcctatccccaataaatagagaataaatacccaggaaggggctggtcgtggctgagtgcccccaacccaggcaggggctggcatcctgtgatggccccttcttcccttctctgtgtgctcttgaggccaccccagtctccaaagtggtcctcgcatccatgtctatgccacagcacaggctgacaacacacatcagaaaaggtggacagtccgtgccccatccgagtagggcttgctccctccctttgtcctgtagatcttggcggaggctgtccagcaggtagacttccagctgagtctggggactgtgtggtcctggcctggccccaccaactggctgggcctggttaggcaggctctgttttctgccgtctctgaccagcatgggtctaagttttggaggatgctgccactgaggcaggctatattcaacccaccaataaatactgtctttgcaggggcagggtgtgtatagaatatagatattttatatatatatatatatatatatatatatcttttatattaaaagggacaagggctaggctggcccatggcaggcacaggcagctggcctcatgtgtccggaggg

SEQ ID NO: 337722 - DNA, 1000 bp, Homo Sapiens
tgaacaaattaattacacaccaacaatcttcttttattacaacatgaacccaggaggaggaaaggagacaggggaggacagggagggaggactgaggtggttgtgaggacaagcaccaaaagctttcttcagatcacagggagccctgttcagctccccagccaaattcctttaaaataaaaaactgtgagcacggctatgtgaagtttcctcctcctgggtggaacagtcaggggaagggagagggagaagggggtaggaaggaaggaaaagaggggaggagagtgggggcaggggttagtgtagcatggcctggccaggaccagaactggggagagaagggaggagagtcccccagtttgcatatacactggccttgtctctggaatggtgatggcccagccccagccacccccctgcccaccagcccatccatctatctgcctcaggtgtctgggaatgctggttagaggctaccagggagggaagactccaggggccggcccccaggagctgaggtctgaacaataccttggagtcagaatacaaaagtcaagggactcaggggtgggcgggtagcagggatggccaccccccctacccgcccaccccccaagaagcaggcttgatggtcagaaagaggatccttgaggccgaggggggtctctgtcagggtctgtgctaggctcagccactgtcacaactgttgctgaggcggctgctgtgggcagggcagatgcagccggggagtcagagtggagaaaggggccgaggggcctgaagtggtcccttccgccggttccaagccattctggttctcctgggtgctggggctgccagtggtggggatgggtgcaggggggccctcacccccagtctcctcctccagctcttcctcctcctggacctcctcagcctctggccctgagctccgtaccctctttggctctagctcctctcgggctgggtcatcgccctccccaccccgatccaccttccg

SEQ ID NO: 337723 - DNA, 1000 bp, Homo Sapiens
tttttttttttttttttttttttttttagcagcaaatctgtatctttaattttattgacagcagttgagagaacaggcttttgacagcaataactgccagtttctccagcctcacggcctggttgtggagctagaatccccagaggccagctgagtgctggtcggaagtcagagtcagccagcacatctggccgaagcagagggggtgccaggcttctgactggggtgggaggcagctccgactctgcctgttatagccagaaagaggccggctaaaatccaaggtgaccaggtcccagctcagtgggcagcaggcaggtggaggttctgtctgtgggtcccagctctggtctactcttggcatccctgtctccctgggggtattctagctttctgtgctctgctagaggaaggcacttgagcacacctggaaacaacttctgctgagaaagacccagccaggctcccacacttggcagcaggagaaatgttgatccagacagggtaagtgacttgcccaaggtcacacagcaatttcatgagtctcaaaacaagctggtagactcctgtccagtcccacctccaggagactggagatttgggcatgtgaggctggcctccaggtgacaggaccgcagggcaggctggccaggagctgggagccggcgcagcctcacttgagattgtgttgactctcgcggtgccgccgcaggtccaccttgcgctggaagcctttggtgcacagctcacagctgaagggcttgaagcctgtgtgcttgcggctgtgggtgatgaggttggagctctggctgaaggcctttccgcacacctggcacttgtgcggcttctcacctgtgtggatgtaggtgtgcttcttcatgtcggacttctggtggaaacgcttgccgcagaactggcaggggtagggccgcgtgtctgagtggatgagcaggtgggtggacagcgtggacgagcgcttgaaggccttgccgcacatgcg

SEQ ID NO: 337724 - DNA, 1000 bp, Homo Sapiens; identical to SEQ ID NO: 158313

SEQ ID NO: 337725 - DNA, 1000 bp, Homo Sapiens
tttttttttttttttcactggacaagtgtttattgaaggtcccctgcagccgggtcccgtgctgggcactgcacacccacggacacagcctcccgtcctaagaccccaccccatcagggccagcaagggaggaagggggccatgactgtgtctctctctccctcctgcagggcccagccgcggccgccgaactgcatggtccagggcgctggtcactgccaccttcctgcacccacttctgctgccaggggagcagggcccggcccagagcagaacgcagagcccctgcggcctggggagctcctggggaggggctggctgcggtcggtggccccggaggacggccaggctcacacccacaggtctcccagccgccccttctcctctgccgatcgctcgccccgctcttcctcggggaactggcagcttctggcgtcttcggtcgacggcggcacctccagcagcagctgggtctctcggggccacatgcactgactcctcagctgccagatgtgcagtccaagctgggccgaggtcaggaggaggacgcaggcggccacggccaggaggacgacggtcagccacccaagcggctctgccggcggggaccctgggacgcacacagcgttgtgggtcttgttcccagggaacacagtgagaaacccgaactgggtgcagtctgtccaaggtttgcagtggccttcgtggcccccggagaaggtccccgaggcacagtcgatacactggaagccaaaactgaatttcccctgggactgtaccccctggcctgggggacaagggtggtgccggcaggtcgtgcagcaagggtctccgcagtggaattcaggctggacacacatgcagtcccactcggaacagcactcctcgcccgggtaatcgcggcagcagcgcgtcgtgtgaacccggcagcagcgcgcgtccgttcccgtcccaagcaggaggcgcccagggccgcacccgggacccccggtggggcgct

SEQ ID NO: 337726 - DNA, 1000 bp, Homo Sapiens
tcaactgtataagttttattttcttcaaagcatctattgattccttttttaaaatcatgtctcctagctcctttaaatgtttggaaaacggtagttaagtttcttggtatcacagtagtacttcttattatccaaagctggaaggatgctgctgccagttagctggggtaggtactgcaacttggatgtttctgtaaagcagtggtgctttcggctctttcttagggtcttccttgttggtttgttgtgttcttttgccaaatcctctatttctctgatgttttcaaaatatgggtgatgcaacagctgttcacatgtcagcctttgagtagggtccatgtggagacagccctttaggagccccagggcaggataagagatgtttgggaattttaattcaagtggttccatatcttcagggtctggaattttcactccactgaagtactgattcgtgctaaacacttgctggtgcctaggaatgagatcccccaaggtcttcctaatcagatacagctgatccacatccgattttcctggccacagaggcactcctgacagcagctcagcaaagacacagccaattgcccaaacatccaccggggggccgtactgcgtgtcccccaccagcagctcaggggagcggtaccacctggtagccacgtagtctgtatagtagtcactcggtccagtcaaaagccgagcaaatccaaagtcacaaagcttaatcacggaatgtttcgtgatgaggatattttctggcttcacgtctctatgtatgcaattgtgtttatggcaaaaatttacagcttgcagtgtctgccaagttatgctcttcacgagatgttctggtacccctctttggtatctgtccaactcatggagaactgtgtggtcacaatattcaaacaccaggtgaagcctccgtttcctcctgaagacttccaggaggttaacaaggttgggatgcttgagttgcttgagcattcggatttcccga

SEQ ID NO: 337727 - DNA, 1000 bp, Homo Sapiens
ttttttttttttttttttttttttttttttttttttttttttttttttttttttttttttttttttttttttttttttactttttcacgatcctttattaatcagaacaggccttgccacaaaaagcagggcccattcccacaaaaatatgattttgcaaagaggaaatcttgctggcttagagggtatgtgtggtggaaaaattttgtatggttctttttttcctgttttttttttttcttcagtttttcttcatttctcttcgctgcaaaatttttttttttgtgatggtgggtttttgttttattttttataaaacacttgcactcaagaacatacaaacagtggccaccaatccccacccctggggctccggggagcccccctggcttgtttgtggctgttttcctctgtcccttccctggcatctggtgccagagggcaggtgcgggggtcctggggcgggtggaatttgtacagcactttcatggggagatggtcacaagaaaggaaaccaggacaagataaggactaagtctagggcacccacaaagatggcagacgaagcccatgaaagggcctgcgacagagtgaagagacggatgggcctgcgttggcctcagctagctctggaggctctgtgggggaggggcaggtgggccttgcagtcaggattcggtaattacactttgctcacgggtagcaccttcggagtcctcctgccttgacccccaggtcaggtgatggtggcctcacaacctcccctatgaggtaggtgaagtattattaccatcattttacagatggggaaaccgaggcccagggagtgcgggtgacttgcccaaagtcctgggatggtggcaaggctccggtgccctccccccaccctcaagttcccccattctctgctctcctattgccctagaccgcccccgccccatcccataccacccttacctcccgtgctagcctacccggccctcggcccaccgcttgccgc

SEQ ID NO: 337728 - DNA, 1000 bp, Homo Sapiens
ccagtctgaacactttagttatggaaattaaaaaaaaaagttgggctttttaaaaaccaaaaccagcgttttccaaagatgtcccttcgtctgtcccctggagttagcagcgtgaagagggctcttggctcatggctctggaccggcgagccgtgcgggtggagatgggcgccggctcctccgcggcgcgggcgtccaggcggtgatgctcccagcgagctccagagggcgctgtcccctcggaggcgcgggcgctgcggcgggaagcggcgcagcgagggtcttcccccccaagacacagttgtttctgacacataggaagaccacaagtttacaaatgcaaacgccgagggcacggggcgatgctggctccacgtccaggcgatcttccctgccgggccacagctcaggaaagcccggctccttgctccagaccctgatcaggctgcatccactcctgctcggcagcttcaggtttgtttttctcttgtcaggtttgtgtgttgttgttgttgttttgtttttgtctttttaaaaaatttagggagcggggccaccacggggaagggagaagggacgtggctcctggcgctacattcgggagggcgggctggccagttcgtagaagagcaggtaggcgtcgctggtgcgcacttggctggaggacatgggagtgacgctggagtcgttgaaagtgtgccattctcctgtccctggactgcgacagtaggctgtatagtggccacccatggtggttccggagtgattggacacagcgtacaggttgtaaacagcatggttggtgttttctgaggcaaattctcttaagtccaggtctcttagggggaagttcacaaatgttgtgagcttgctggttcggatcctggattctgagaaccgcttcagacggagcaccaagatctttgggaacctctggatggagaacttctttatacaccgttttctgcctcggcagcgacagcatgttggcttttcatct

SEQ ID NO: 337729 - DNA, 1000 bp, Homo Sapiens
aagctttttgaattcggcacgagaacactccacccacacgcaggtttatttccatcttccaggggtggaaagagctgtccccaagacactcaagaggggtgggcacaggccccatgtgagcccagggtaggacgggctggagagggccccacgcagcacctgccctgccagcctgtctgcggcccacccaccctcccattaaagtcacgttgtctcgaagcatgggtttccaggtccttgagcatagcagtggccgcaggccacctgggagcagcaggcggggcccctggtgaggatgccttgtaaccttgcggcttggcttcaccgcagatccactctggaatgacacggttcccaccccgccaccttccccctcaaaacactgatcgggcgacgatccgctgggccggcagctggagcccagccgtggccctgcctgagccagtccagtttgtaaaataaatagcaagcgttgccggcttctgtacctcctccctgtgcctgccggccccgcccagccactcagacacttgtttccggggtgtgaaccacctccccgtttttctcaggctcagccttcaggaaatgctccacctcccgcaagtccacccccgagtctgcaggaggcttgtggagcttctcctcctccgcggccgccacctcaggctgtggctctttgggcttcttcctaatgcagaagaagttgcccagcagcaaaatcagggaggaggtgagcacctcggcccccgccaggatgaacacgtacatgtagacgtgggtcgcatccaggagtttgcctcccgaagggggcccgacgagcacggccaccgcctccatcagcagcaccaggccaatggcactggagaacttgtgggtgcccacgatggccatgagcacctcgaactgcagggcccccaccatgccgtaggagatgccaaagaagatgcagaagaccacgaggccgccgtagtcgcccgccgtagagcccgccaggtccgcg

SEQ ID NO: 337730 - DNA, 1000 bp, Homo Sapiens
tttaatttagaagaatcagaatttatttcactatgtgaacattaagaatttacctacatagttgaaaatattcacaaaggacttgatcattcacactcatacacagagaaagtctgctgaataaaaaaatgctcctttacccattcgacctcctctcaggggctgcagtgggtttgccaattccactgtggggcttcagtcttcatgaatgttgaatagtttggctacttcattgagatcttcatgctgctcaccgtccttaatgatcttccttgctattggcattcggttaaagatgttccatagcacaatccccacgaccactttgtccctgaggtagaagatgacacctttgccgtagtcctccccctggacgggagcctgtggaactgccggggtgctgggaggaatagtaatttctgaggcctcggactctgtctcactctctgatcggataccagttcctgactgctctgtggcagatttggggttgtcttgtgcagttgcttttgcaaaaacaccaactgtgggcaaactactgtccacaagaccaatagcttcatagccaacatcggggcccaaatcactccagaacattgactgatgccagtacggcttagcagctccagtcatattttctccagccaatcttccactcacaacagcgtgatcatggtgctctacccgcctccttcccaactttatatcgtagaagcatgcagcatctcctgccacccagatgttagagcgtgcttgtagctctgcatttacccggaagccaccaaaatctgagtctatttccaggccaccagtcttggccaactcaacattgggctccaggcccacagctgccactatgtggtcagtttctaccttcctgccgtctttcagcttgataagtaacttgccactgctgactccaacggattgcacaatagcattgggcatcaccttaaccccctctcgtctgactttttccatggtccagttgctgaggtat

SEQ ID NO: 337731 - DNA, 1000 bp, Homo Sapiens; identical to SEQ ID NO: 158316

SEQ ID NO: 337732 - DNA, 1000 bp, Homo Sapiens
ctgagacagagtctcgctctgtcacccaggctggagtacagtggcgcgatcccggctcgctgcaagctccgcctcccggattcacgccattctcctgcctcagtctcgcgagtagctgggactacagtcgcccgacaccactcccggccaattttttgtacctttagtagagacggggtttcaccgtgttagccaggatggtctcgatctcctgaccctgcgatccgcccgcctcggcctcccaaagcgctgggattacaggcgtgagccactgagcccggcccaaaatgaatcttttacatttactgttacttactgttaaacatcttggtgagtgagttgtgggcaccctgagtacataaacacctttgcaatcacaaagcttttaagatcaaaactgttatagaaatagatcaagcagccttaggcacagacggtattgttgtagaatccacagcagttagtaagggccatagcactgaactccttatcttcccagggaccagaaaaagaaggagggttggtgccattcagagaagtactctgaaagagccctctgcagcacatgtaggtctcataggttctattggtgaaacttgtgtttgggaaggagacacagtcagcttcagctcccctggggacatagaggattcctgccatacaggcactgataagggatacacaggcccctgtgaagagggccctgaccacaaccttggacaagtcactcttccggtgaggtactattgatgtcaagcctccaagtgtgattcctatggaactaagattggcaaatccacagagtgaaaatgttgtaatgatttcagctctcacagaaatccactgtttctctccctcaatccactcctccattccagagagacgtttgttcttgtattgagacagttgctgataagccacaaactcatttatgaagaacttgattcccaccatctcagccaccattggacagtctgtccactctacacccatcatgaaa

SEQ ID NO: 337733 - DNA, 1000 bp, Homo Sapiens
tttaaacagccctctctaagtttatttaacccagtggttccaaacctagtccatcatggaaccctctgaacgcctcccaggacagtgtgccatgggacctcagtttgggaagcactctgaggaaaggcgggaagggtttctctgaaagcagagaaagaggtgacaccacccagcaggggaagccacagagagatcctagtgcctaggaagtggggaggggaggaggctttggtgtgcagcccacaacagaagggaaggggcatgtgagggaccccaggagaggggggatagagaggaccagggtgctgtttggatgtggaggggaaacgggaggaggcagaagtgaccctgagaattcacactgggggagttaggaaatgggggagcaggaagggggatggagtgggacatgtccttccttatgtcctcactcactctctgcacactcactccatgaccccttcccaattgtgggattgagctgggtctaagtcctgtggcttccctgaagagggctctgggaaagggaaggtggggacagatggttcccgggggagaacagccctcagaagcgcagaagcacaagcatgttctgtcctcactgtgcacagatcgtgtggttgtaaaaccgacagcagttgtccagggcctctgggctgaactctggattgacgctctggaaggcctcacggcagcactggtaaatctcaaagctactgctgctgagggtcgtgttcaagagggacatgcagtcaacttcagcccccctgggcatgtagaggatccctgccatacaggcgttcaccagggacacacaggctcccgtgaagagcgcccggagcactatctgggagaagtcgctcttccgttgggggaccatggaggtcaagcctcccagcatgatcccaatggagctgaaattggcaaatccacagagggcaaacgtcgtgaggacttcagctctgacggagatccactgcttcctgtcgccgacccactc

SEQ ID NO: 337734 - DNA, 1000 bp, Homo Sapiens
gcagggtacattatttattttcacttgaacatggaaagaaagtgtcacactcccccttcccctttatagggggagtgtattttaatcagcaacctcttctccatccaccctgtgtatgtgtgtacacatataccaccacagttgggaggcatgactaggcagacccagtcttatctgttcctcctttgaagagggtttgacaaatgggaaaaaggaaggagccacatcaggcagaggtttcaagccatggaatggaggaaaggcggcagagaggagcagcaccagaggccaggagagagtggaaagggccacagcttgtttttaaaaaattctataatttggaagagggtggcgattaattttcaaaatacacttcagagtcccactttccacatagctcccttactcacagccctttggttttttagacaaaatttaagagctctcataaagccagaagtattgataactcctcagtgcatccaaaaaaagtgttcacatcaatcccttacaaagactatgtgctgtagactttgcttcttcctatacatttgtcttacggctcagtggtaaggtagctgtagagacacattacggggtaaatggaaaagggaaataaaggggaagcccaggcacatgggtgcagggaggggtgtgattggttggaagggtagagaacaaaccccagaacagtgtaagctccagaggtgggtgatgggaacagtccccaaagtgagaagagggaataggtcagggcaatgcttgcagcatcaagttcctcaggagtttctgtcggcccagctcatagtcctcctcgtctacatttaccagcagcttgatggcttcatggcccacagcttgcttgagggagtctgtgatgaagacacctttaagtgcctctaataaagagccattgatgtagtcacgccagaatgcatcgaggtaggtgagctcagagaacttgatgtcacagatgatggagcccaggtcccgggacttg

SEQ ID NO: 337735 - DNA, 1000 bp, Homo Sapiens
ttttttttttttttttttgttgatatgcaaaacattctggtaagttcatttgaagttgaattatttcattaacatgtaaactcacatgtacaattttactttttgtcatatatttaaatattttcttatctgcagagctatctcaggatatgaaatcataacatgctagcaactagtaatttaacattaaaacacttccctaaattattccatggaaaagtgcatttacaatataaacatgtcatatatgaagctacaaatcataatctcactggagtggatataaaatttcaaattcagtccaaatgagtcaaagaaaaaagtgctaacagagcaaatctgaaacaagttcatggggattgggtaatgagtcatcgaaacgaaatcttttggaaaccatgctgctatcctctgggatattctctttgtcttctctatcaccacaggttccattacaggaggatttagaagtcttgtcttcagaggaccttacagaatgatcctgagtttgagaggaactggaagtttcttcagggtgaaacaagttttcaaagtcccactgctgtagccaagaatgagaaaggcatatctctgctgttggtcttttctctggattttttactaaaaggctctgaataaagtctgtggccagctgtgaaactgatgaaaaagtttcttccgaataatctacattaacttgagagatattgaggtatgtttcttgattatcttctcccacaaatggtgatgtgtgagttaacaacatatatgctattataccaatattccacatatctgttgctgtggtaatgggatcatagttcaggatttctggagctaaatattctggtgttcccatgatttcccgaagttcacacgcatgccctatttttcgagacattccaaaatctactattttaatgtccccgagagggtatatgctgctcagtaatatattctgtggctttaaatcaaggtgtacaatgttattctgatgtag

SEQ ID NO: 337736 - DNA, 1000 bp, Homo Sapiens
tttttttttttttttttaacaatacatgtgatttttatttagtgaacacagtatctgcaagagctctgacagccatccaccctccaatcttacttcactttacaaccaagtatcaatagaggctgttccttcatgcgagctgtgggagtatatacatcattgaataacagacactccagaaatcaacagatgtacattatttacatattactatatttaccgcaaatagaaatattttctaagaaaaaaagtcaatttgtggtttctggtctaccacagacctaacttctcagcaaagcatatctatgtagatatctgcgtttgtaactttaaaaataggcattgctttctatgaagcactaagtgctgctccatctataaatagctcctattttcagtttggtaccacattaaactgccccaaaatgttctgtgaccccaaagacacaaagttgctgcttatctgggtccagggtcagtacaattaaactcaaatatgaaccagggcggccagcaagacaggctggaagggctgtggcagtcgccgccgcctccccgcggggctcccctcactgcctcctggcctctgtctctggaaaaaagtatctttggccagagttgggactaacaattcaagccctgcgctcagacgtcagggtggggaggaggaggactgtgattgtgacgcggcctgcccagggtgagggacaaaaaacagatgtgtcctgtttcagggccgtcctggtagcggctggccctgcgcagtcactgacccagagttttctggaccaggcctgcctcaaggatcagcaggcatgatggtcgcacagccttcatgctaatactgtcctaacacagcctggagctaggcgatttcctttgaccacaaagtacctggagtctaactcagcaccacagcctctgcatggctcccaggtgcccaccacctggcgaagctcattcacagatgacagcaaagggggagcttgatcatctggcg

SEQ ID NO: 337737 - DNA, 1000 bp, Homo Sapiens
cagttttagttgtttttaatgagctttctgagcttggaaaacatgtcaaaattgtgtgtagttaaaagcctctgaggaaagagtctaaacattaaaccttcccgactgtggttcacagcaaaaatgtccagtgtttaggagcactagctcagactcaaactgccccttcttagcagtttgatcttaagcaaccttaatttgatctcaggcaaattacatttctctgggcctccatttactcatttttaagaagaggatatcaataacctaccacattgggttgttgtgaggattaaatacacattgaaatattaagaaaatgcctagcacacagtaagctctcagtaaatacttgctattattttatattgacctaaatatgccctttcatcaatcagttatattcttgggcaaggtattttaacaaatcactggccacttggaagtggaggcaacttgcagaaaattgtgagcataccatggagttcctggagttgtgcagcacagtgctggctggcctctgctaactttgtcttaataacctcaatgctaaatccatcctaagtaaatttaaatcacatccttagacacactgtccattctcaaaccgaatgaaaaaaaaattccacaagaaacaatgaaatacacattaacattttccctctatgtcccttgaatgtaagttctcttaaaattttctgtatactgattttatatcaagaacacttggatgataaataaacattaaggtaaaatgtaataggcacttcttttggggggaaaaactatgaaaggaacaactttttatattgaaattgcatcagaatccagggtagcaaagttataacttcttgaagttatcaaattaaccacagtccaaagaatggctgttagtatcctttggctgaacagattactgtgttaattagaacacagttattagtggttcttaaattcaaagtcatataaattttagtttatgcttgcacttaactcactc

SEQ ID NO: 337738 - DNA, 1000 bp, Homo Sapiens
ttttttttttttttttcatctaatatttctttaataataattctagttccataggttttcatgttatgccaatttgtacccgagtttaattacagaaaaggcaacaatttctaaattggtggtatacatttctttacaattttttaatgtaaggccatttattaaaatagacaaactagaagatgaaaacgaaggcaacagaaaaattcaacttttcacaaccaaaagaattagcacaaccttagaaataatttagaaaaaagtgttgttaaaagatatgttgcagatctccgttccattacccaagattatgtcaattcacgattctaaataaatctttttaaagtaagagattaaaaactcatcttcagtgtatatgtaaattctgtgttttatcacacaggtatgtttattcaacactgtcttttgaaaatggaccatttaaaaagacatagcaatttccattctgttaagtttcattcaactttacttagggttgaatacacatgaaatgtgcttttaatgcataaaaatcacagtggatagcagcaaaggactgggcggggggggcattgaggagaatttgataattcacattgtgattattctgcacattgatgaaacataattcacacctctaaaacctcaagacttcccttttttaaagaaccaaaataaacccaagacaccttgctgacacttccccacccctaaacaaactgatgactcttttacacataaaactgaaatagttatggcagcaaaagattttgatggcaatgaaagtttgtaaactgtatttcaatctcttgttcttattcccaaagtgcaagatgcagggttctcaatctttcagtagtgcttctcctgtaaataatccttcattttgtttggcaaaggcagtttctgaattaagtctattctggtatactgacgtataacaaaacgacacaggtactgcaacgagcgcacctgcatgaaccgggacactgggttggtc

SEQ ID NO: 337739 - DNA, 1000 bp, Homo Sapiens
atgtaaattgcagggtcacattagataaaaacagtattgttcagtctataaactgacactaaaaatcatactgtacacaactgatgatacactgtacaaagaactaaggctgaaggatgggagccattcatgtcttttttccaaatttgtgttagtatggatggcagtattatatacttttcagtacttactgaaactaacgttattaaggctacttgcaggattccttttgaatataaattaatataaatttagagtagaaaacagactagaattttcaagtatttgtcctaattataggtattttcttcactttcttcagtaattgctgggccctattatgagccaagcacaattctacatggtagagatagagtggtgaaaaacacctccttacatagaggttacattttagttgacatccattttttctgtcaatcatacttttgttaaaggaaggcctctctcctgtgcagactccgacaagacttttctgctgtgttacatcttgagaaccgggacacctggtactctgatataaacactgatcatatttacagaacaaagttttctcgcatctgtgaaatatgacgtttgtaaagaattcatgtcctaaccaagtctaaaacacagcatttgagagacttctttcctgtcaagattctttgaagctctagttttaaaggaacttttcacaatcatcagcatggacttcccaacggagacaaagatgtgagctctaactgaaggctgaaccacacctctcatttctacagattccctccagtgtggactctctgatggtagatgagatgtgacctctgactgaagcccttacaacagacatcacatatgtaaggcctctctccagtgtggactctctggtgtgtgtgaaaatgtgaggcctgactgaagcccttcccacactgctgacacgtatagggtttctctcctgtgtggaccctctgatgggcactgagaccagcactccaactgaatt

SEQ ID NO: 337740 - DNA, 1000 bp, Homo Sapiens
cagataaaatattataggtttatttaaaacttaattctcaccttgagtatgcaaaatacaaactccacaaaatgttcattttactttgtagtttacaaatatacaaaatagacgtttgcttaaatttatattacatatttattaaggcaaggaactatatagaaaaacacatttgttctgcttaaggcatacttgggaataaaccattgtacaaattattgcacatctgaaaccacagtgcataacagactgtctgcataaaaatgctaaagaagtaaaccaggtatattacctgacttaggtcataaatgttgatcggaagacaaatatagattttccttgtcaaagtatgcagcagtttgaaaactttggcttccttgtttggtacctttagaaccaagactcaccaagcaccatcatttaggctatttaaacatgttttctgtacctgaatttcttcctcttcttctaacatcataataatggcttttagaaggtaaagagaatacaaggtgatcttttatgcttatattgcatcaatacacaattcaagggaattctggtcttccctcccccaactcacggatataatttataccctgatatccacaacttccagtcacccccttggcattttgtaagtccaggaatattcaagtcggatttagaattggaatgatagaagatccagtcacagaccccatctgttctttgatttttgtcttttggattcctcatttttcctgattatccactcacaagatgactcagttgggaacttgaccatgattgtagtgctttctggctgggctccttccctcatcgggaagacagtgtgaaaagtaaaaaatactgaattctcttctggcagtgtgggtcatatccactgtctgggatttaaaaatgcctcttcatgtgtaaggcgaggtggtccgacctggaaaatgctcggtcgcatttttggcactggaacgggcggtgccccgtgtgtttacggtag

SEQ ID NO: 337741 - DNA, 1000 bp, Homo Sapiens
tacaatttctgagctgcactgtttatttgccggcttgaaacctaagtgacagtatgccactataattatggggtttcgtctaaacctttactacactgcaggtacagaaatatacggacacatttttagagaattgacattttgcaaaatgcagcaaacattttaatttatacatgagaaaaggaatgttcaaaagggtatgcatttcaagttattgcaggttatttgtgagagaatttctgcaggtaaaacatgtttaaatttaaccaacagtagcgtgtcagtgtatttaaaatcatgacaaaaatcttctctctggtcatgttgcccatgacaaattactatgatgttgtacgtttagggcaagatgtcaatacagcataaatcccatggtattttggttttcttctggagattaaagctgtttttcttgggataaatgcagcagcaaaacacaaaccagttgatcaaaaaagcacttctgccataactccaataattttcaggacacatcaaccgacagtagttttgccattcccagttcttttaaggattacatctctgcactgttgccttaaggacgtctgtaaaagcttgttctctgttaagccagtttactgactacagcctggttgagagaatttagttggttggtccatttatctagtgcagtatatcgtgcaccacccctcttctgatgatccagttcaaggagttggttgacttgatcaattcggccatgaatagtgttatccaatatgcactgcaccagcaagctctccacatcagctacatctatgtttaactccttagaaataaaaggaatatgtattcttgtgtaaggcttaattaattttataagcacttgtgttctgatgtttcgcaaaagctcttcaatgtgttctcttatgaaaggatcatccatgatgttgctgtgatttgtttttagaatcttttcaaattcagtgatgtcattattctgataggcacttactaaatt

SEQ ID NO: 337742 - DNA, 1000 bp, Homo Sapiens
aaactgcacagccacatttattgttccagcctggaaaaacatcccttttttaaatttcacacagcaaagcatgttaaaaacttcactcatcaaataaatgataatttaaacaagaacttgctaaagaaacctcatcacaacaacgttttagggcctgatcactttaagtccatggggccattaatgaatatcaaccaaatgtctctttataatctgcaagccgtttttcctacaacaagaaggcgtaacatgtttccttgactcaggtgataacattagaaaagaaatcatgatttgtttcttttgctgtaacaggcagacactgcatttcttgctataatcaggaaagatggaacgactgctgcccttctcttgctgctatcaacagtttttcacgcattatctcaatgcttgaatagtccggcaacttaagatagttcacacaagtcattacagagggcaagaagtcatctgggttttctgttgattcaaacgtctttcggacaattgtcaaaggtggattcaaactccggaatcctccaacaggcaatcttgggctaccagtcacaaactggagaaataacctctgctgctcattatcaaaactactgagaatctcaaacaaaaacttcacagcccgactgtcatgagtataaccatgatcaggcctacagcattccatcagtgtctttgcatcccaagtgtctgctttactgccacaaaggagctgatccagttcctccgggtagaagtactgaagatgactgagtgggaagactgattcaaatccatctctgaacgaatcaaattgcctagaaacgccttcatttagtgcccagaatataaccagtcttagatactcctctaaattgtggatagtgactggtatatccttccctcctttcttcagttcgatattgggaaaccctggcagagtgaaatccagtcctagatcttcaactgagcagccattcatagtcaaggtttctaatgcatactg

SEQ ID NO: 337743 - DNA, 1000 bp, Homo Sapiens
ctaaaagcattaggaatatttttattaaattcagagaaagcataattgcgaacaaatacatgactttctccccaaaggccactttgtgataaagtacatacatatagtgttcatggtttctttaaagtgctagattgtctctggcttgagaatcatctattgctttaaaaggtctttcagcacaaccccagcactgttgtcaggtaacgctggcaaaggtgtaaatgtgggcaaaacatctgagatgggtttcagaagaagatgcccgggcccaccaggtccaagtccagctgggttaataagaggtacagctgccgagcgaggagccaaaaacggatttacatctgttcttctaccagacctggattctgctgtatctttaaaactttctggtgcatttgtatctctttttcttcttcctggtgaatccagaggtttcatatcatgaacagaaagctttggtggtggaatggatggatgagattctgtttctagaaatttaacaaaaagttctgaaaaagaactattaaccacagattgctgatttggtctcaaaggtgtgttgggaacactttttgatcctcctccaagccacccagtcatccacctggtaacactgccctgatcgtcatgaaacaactgctccatctcctcccttctgacgcccaggatgctccccattaaccgtaacacttcatgacgctgatttttcggtgtgtggaaatgaccaatgaagaggtttctcattaggactttgtctacttttccttctgagctgtttgctaagctcatcaatttcttttgtacatcatccagcatttcttgtcggagctcattttgtcttttaagttcttcaatttgttcttcttttacatctaactgttctgtaagtcttgatgctgaatccaatgcagcatttgcttcatccaaacattcctgtaatgatatcacttttccttccagattttctgcgtttttcttccattcagctataagctgt

SEQ ID NO: 337744 - DNA, 1000 bp, Homo Sapiens; identical to SEQ ID NO: 158319

SEQ ID NO: 337745 - DNA, 1000 bp, Homo Sapiens
ttttttttttttttttggtttggaggaaccagctgaatttctgaaagtgtttccttacaatggtggtacctggctcagggatgggcaggggtagccaaaccctccccgtgctgcccagttcgctgagggtgggagtaggaacaaaagtttaaggctgaggccactgccatgccctggattaacaaccaggaaaatcatgttaatcaaggaaacaaaaattcctctagactctgcaatactgcactcttaacaaaatcaaatgaaaacaagacgtgtctgccaaggttcaggataacagatgccctgtccactgagagcggcagttctgcagtcagagttctttgatcagccctggacccatttatcacatgggggaggaagggagggtgccctctcgcctggtcccatgatcctggcatggtgcaggttccagcgatgtcccaggcagggtggcaaagggacacccggtaggatgaggcactcagtgaggaggagggaggcagagtctcctttctgactgcgggaggacgggaacacattcaccttccctaaagtcagggaagaacatagttctctagaaaaatcatttgtcaagaaaggggatgtgggtgctgatttgtacattgattcaggggagtaattggggagaaggaaaaaggtggggtggaatgctggctcggccctgccagtcactgggtggcagcagggcgctcagaggttgctgaagagttcgtttttcttgctccagtccatctgcggggcccgtttgctgctgcgtttctggtgggccctctctttggccatggccagggagatgttgaagtctaggatggggtcggaggaggaggtagacgagggcgctgtggagtcctgttttggggggctgtcttgggaattcagctcctcgctggtgtcactggaggcggatctcaccagggctggcctggggctctccaaggctgcctctgccagggcttcacgactgttctccttctgtatc

SEQ ID NO: 337746 - DNA, 1000 bp, Homo Sapiens
tctgttatatgattcatcctattatgtctacttctgaaagcagagataatactggccctcatttaaaggggttttaaggattaaatatcagtgtgtctactattctgcctggaccacatagagggctcaaaaatagtaatttcacatgacaggttctagactttcaaataatacagtttgatgtactcttgcttatgtaaccacctgataaaattcaacatgttccaaattccctttgaaataatggaaaatgacaaaaataaacagccaaatatcaaaactagaatgaaaaatgaagttacctcaaatagtgaagggcaaaaggaaactgggatctaagcctggagttaaattgagacctccgtctgtctgaactgatacatgactaacacagcttaccaactggctttttcttcatccaaaaataggccattaaacaaatatactttagggatttataaatgacaaatcaagaaattatcttatattgttttaatatatgaatttataaattattttataaatttaatataatttaaaaaattttaaagtagttatcctaaaacaagaccttgaaatgtatcagtgctgttcgaaggatctagcaatgaaggtggagaagttaaataaaagataattgacaacaacagtttggtgtacattaagtaagaaaagcaagttatatgagtaacagcccttgtcttcttagtggctaaggtaaggggaagatgtcattgtcattgtgttgttgctgattatagcttattttaaatttgtgttcacactcttgaaaatctacccaaattacacaggaaaatctcacagttcagcagtgcaaaaattttatttctgtttcccctccccaccactttacaagatgtaaaattttacttaatccaccgtattctctttttttaattatctgttatcagtcatgtcaaatgtgaggaaaaaaacactaatcaattaaaaatatccgtccctcttccccactgctaca

SEQ ID NO: 337747 - DNA, 1000 bp, Homo Sapiens
ttttttttttttttcaaagtagacctctgtcttggattactatgtacctggacaggtgaactcttgtatgtttctgttttggggatttttaggggttttccatgtacattcatagagcctggtcattccatgtacattcatagagcctggtcagcagcgaggagtccttgttgcgtatggacggaaggctccctggcacccagatgtctcccttcgtcctggctgacacagagcatggtggtcatctgctcttcatgtccagcaggctcagaaagaactcggagttcccctcgcacccttgggccaagcttttcaagtccgagtgccaggactggatgagctggggtttgtgtgtctgctggcggcacagtgggtgtgcacaagaccaccatttgggtatctaacaaacacaggctcacaaaagggattttggcatatctgacaaagctttttgtctgagagttggattgagcttcctttcaacttcatcttatcgtaggtgtagattaagttttcggacctggccaggccgagagccacctgcatggtcctcctggcatggatgctgtccctcatggcccccatcaggaatgggcagaggagctgcactgaccaggtgtcaggcagcatctgcagcacctgggctgcatcaaattcggtggcgtggcggttcagcaggtccacggcagccacggccagctcgtgggcagtggggccagcatgcaggtagatggccagcagcgtgtgaaagagttgctggcggtggggtgggtctcggccctcggagcaccacaggcagtagtcctcggccgctgcaaagtcctgcagctcgtgcaccaggatatgcagcgccttctcatgctcgcccagcttcccgtgcaggatggcgctctccatgggcaggccagctccctgcagcctctcgagaagaaagtggactcggtataaatcagatttctggagcagccgccgcagcttggcctgcgtctcggtggcctct

SEQ ID NO: 337748 - DNA, 1000 bp, Homo Sapiens
tttgaaaagggctgtgtgcacgcctgcatgccccacaacaacacaactttattcctctcccaaacatctgtcaggcctggccttcctgagcaggagctgagcaggaacagggcctggctgcctctcctctgccacagctctgacctgggcaaggctggaagctggcatcgtaatggatgggggagtgggtggaggatctgagggtcccctgggtaggttccgataccttggacaggtgggcctcatcctgacttagaactcggggaggggccactcttccttccccttcttccagcagcagctccaccaccctccaccttctgtcctcgacatgtgtcccagaaaacccagccatgaggaccgctctgagaagggtctataggctttgcaagcagaaagaaaggtgggctgacctctgacctggattcagggggtgtctggggtcatccccaaagccaagtatggttggaaaggagaaggactgagaaaagacgatggccctggcatcagcaggtgaggcccaggatgacccatgctagaatctgggggaggacgcgggccctgcccagccagcagttggtcatctctgggggccacacaggccatgccagtcagcttcgctctcgcaccgggcccggccatggaagaagtgcctgatgaggttctgggcctcttctttcacgctccttccaggagaggtcttctgagtcagcaagtgtgagaggtggcgggcaaagcctttaaacaactccttggaagcaaacttgccctccttgtagaaaggggtgaggcacttgaccacaacatttgcagcctccttcaaggagacgccaggagcggagagctggaaggggtcttgagccgtgggattcaaggtgccctgttcgctggccgagacgctgcccttgacctcagctacgacggagggcttggctgaggggcgtggcctcttctgaggctggctctctgggttctcctgctgggatcgaggccgcttgcc

SEQ ID NO: 337749 - DNA, 1000 bp, Homo Sapiens
tcagcgggccacctgcaggagctcttccgtggccaggcccaccagggcatggaagctcaggtgcaggtattttctccagaagcgtcggtcctgcccgtacacctgggccgggtagcaggggcttccgatgccgtggaagatgcgggccacagccctgctggagaacttctcctctggcctcagggacaggaactggcggatgtcgcagcggacctggtcctcccaatcctggagtctggcctgccctggctcggggccctgtgcgtcctccatgcctcccggctcctgcccttcctcttcctcaaagtagcggccgagcaggtccttgagcctggtgctgcgctcctcatcctgctgctccaggcagggcccgcagctggggaaggctacgctgtgaaaggcctggaaggttctgcgcagacgggccagggcctggcgctcccgggcctgcacacggccatagaggaagtcacatatctggtccttctcctcagcggtcaggtcccccgggctgcgaaggtggaaggccagctcactgaactccacaagcacccctgtcccacgccgcacacctgtcctgggctcgtggtcccactgcagctggcagagagcccgccgcacagaggccagctcccagcccatggagtccaccagcttgaccatgtcaaactccacggagctgctgccttgccctgggtcctcaggcagctgctgggccaagcacacagccaaagggggacacctgtgggccagggcctggagctgggcagggcccccagggcagttcagacggcaatgggtataggtggtcgccagcagctccagccagtggtgtgggtgcagctccaggtagcacagcaaagtctcgatggcctcctccggcatgtccaaagcctgtacggtaagctgtattgggagtgcccgctcatggcccatgcagacccttctgggtcctggggctgcttggtggctaagctgctcagcctcttgaggggggtac

SEQ ID NO: 337750 - DNA, 1000 bp, Homo Sapiens
tttttttttttttttttttcattggtacagacaggtctttattgttgacatattttctcatttaatccttgaagcaaccctgaggtaggttttattatccccacttcgcagatgagtaaactgatgtccctaggttaggttacttgccgaagatcacacatttactagtggcaaagccactgataattccaaacccaaggggactcttttgagtagttcacaggctgctgccaaggaaagtagagcagaaaacttcaaaggggaaggactggatcattgactggagcttgaggggctcaagcaccagggatgaacgaggcacattcacaggccaagaccaggactcagcaggagaagcctagagccatgtgcgagtggtcaagcaggaagaggtcttgacgtttggtaagagctgacaatgtcatcaaatacacatagagctcagcttccagggactggagaaacaagaaggcctccagcagctaccagtccagggactggccacagtcagtcagactcaaagagaactgagaggccacaacagtcttccagacccagcaacctttggcatctcagtggtaactccattccagcaaatcaccctgttccaggcagggcaagtccagggagagctgccacagagtgatgccatcctaacttggcctcagtgcagtaacctcagggcagtggtcctttaactttgttaaggccttgaaaatctgacaaaagccataaaacctccccacagagacatacagacacacatgtacaaacaacattttgcatacaatttcagggagtccatggaccccaggtaggggggactcctgctttagggcaagggtgtcaccctgagtagtcactgattgcaaacgtatctttatactgctcgtatatcctatgactgttccccttctgttgttccctaatcattagaatgttgttgatttttaatgggagccaaggaaatggggtacagcctacactccagccagagaaa

SEQ ID NO: 337751 - DNA, 1000 bp, Homo Sapiens
tttttttttttttttttttttttttttttcctgatagcaaagtgtttttaataaacatcaattaaaatacagttaaaagttcaaaaattttctatgactagccaataaattgctgcaacttttacagctaacgctggtgttcctgaaatttgaaacatagtacttttcaagaactgtggaaaagcttgattacaacaaaaataacaggcagagtgttctattgttcctgttttctcctgaaacttaaactctgaatagcaacagattgcagcaaatgtagctcagcatattctgaaaaatacagccccaggaaatagctagttaaaatgtggaccacatttcaattccacctttccagtggagattatcagtagactcaaagagatccaagggttggatgaataaccatagttgaaaatgctgacacaaattattatttggcaataataaactgaggtgaaatgatgccaagtaactgatgtagtggaagtatgttctggtctgactagaatacagcaataaaagttgagaggttaataagggcaaaagaaccttcagataaatggagaatgagaaagaattgatgattcaaaaaacatacttcattgtgatgacaagcaaattaaggatgaaaaaaagcaaggtgaaaagaaataggaaaaatagttcaggatgtagaaaaattctttcacaacagccaggaaattctcttgacagaggatctcttggtaaaataaacgtggagatgaactagaacaggtatgaggttctagcagaagaaacatttgcataaatgtgactttcttatccagccacactaactctatttcttaaaagcaacacaatttccaaaactttcttgctcaaagctcagatttacacaatgccacctctaagaggcaggacactagcctaaactaaaatgtcccttatgtctgttcttactgtcttctcctttggcttgagagatgttttgatttgtaaaagtactggccaatac

SEQ ID NO: 337752 - DNA, 1000 bp, Homo Sapiens; identical to SEQ ID NO: 158321

SEQ ID NO: 337753 - DNA, 1000 bp, Homo Sapiens
tttttaaaaagaatattatttattatcttctttattaatactcacatgtaacctttgctttttacacaaaagtctgctttagaagaatgcctcctcggcttatcatgcccaatggggctttttgtttctggaccacttcccctttctccacccccacccccacatccaaattactcttaacatgttcacagataccacgaatattttgtaaacaagatttgggttactggaacttgatttcattaacatcccacttcaaaatggaaggcaggtggaggacagggtaagaaataggagaaagaggacaagagaaggcaaagaagaagaggggcacctggtcagaacgttcaagtcttgccttttcttaggggtgtgtattttgtggctgttccttgaaatgcactgactcaaaacattgacagcaagtgtgtgtgtgattatttatatatctataatagaatatgtgggcttcctccgtttgagtctggactgtgtttatttaaacacactacgatcctctttataggtatcaccacagggaatcaggtctcctgggaaccccttttagagacggggcttccgaagcagggtcttgctgaggtctttgacctcctcagggctgttgacccgctcatagcccaggacggccatgggctggtagcaaaactcctccacctgtttgatctgctggaaggtgagggcggtccgccaggcattggcggcctgcgtggcattgcgtgcagataccacgaaaggcttggaggaggagcccgagccactggtcatgttcagggcaaactgctccatttcggggctcaccaacagtcccacaaaatcgtacactctccgtagtgtcttgacggggtctcccaccaggtcctcgtaccgcaccaccaggtagtggccctgcagccagtcagggggctgcagggctgtctgcagcgtcttagccatactattgcagatgacctccatagcgcccagagcgtggtagtctgcg

SEQ ID NO: 337754 - DNA, 1000 bp, Homo Sapiens
ttttttttttttttttttttcaggatacaaaaggtttattgcttataaaaataagttaccaaaacccaagccccacaaaacacaagaaccccgcatgacgatacccatgaacacaagggctcattccagtaacagctcgcggagacgacagacaccagcactgccgacacacatggacgaggagcatgctgcacagcttccttctaccaggttctagaaaggtcttctttgccttcagtccgctggctagtgggaataattagtcccatcagccacagagggagtctgctcttcaagagtggcctctgcacacatggcgctgctttatgaaagggaggagcagctgtacacatctgggcagtgaggaaccagctgagccttctgtgggcttcctgcgtgtctgggaaggtgctgggtggggtctgaggctggggccagcgtgggggctactgccggcaggtgtcatggaaggcttcgagggttcggaaatccctccatgtcgggggaaggccgtcctgcagaaacttcccgcagcgctggcacggggcctggaacagctttatgtaacttcttaaccaggtcatgaaggatcggaccacgacatccggcatctggggcagctgatagtggagcagggcagtggtggcatggtctgtcaccttctggaatacttgatagttggatttggaccatatatcaagcttgccatcttctgtgtagacattctcgttatatccctttactattgttcgatcaatgaacaggctccgcatgacgacgatcactttcaacacctttcccaaggtcaccagaagcattgctgatgttccattgggtctggataagtggatggacatttcaggaaacatcctgtcaatgcggctgatcacatcatcaacatattgaggtggtaggacaagagttgtgggctgagcctttggtctacgtttggcagatactcccatctgattagcggaacgcttcaatgactgctgattta

SEQ ID NO: 337755 - DNA, 1000 bp, Homo Sapiens
tttttttttttttttcaaaatttaaaaatattttattacatcattaaaataattcacttgccatttcaacagcttacactgttttttaaatttttttaactcttcatactaaactccctgatccctagtgttaaatctcctatttaaattaaaacttggtgctctttgttactcagaaactgatggataaaaacacatttacttcaaaattccatcaatcaaatacattttgttacctgatttatcagagaaatatctcagctctgagcatgtgtatctaaattattctccctataatatataggtgaggaaaatatcctaaaatagatggaggtaacgtacatgatgttacagcacatataatacatgattgttataaatttttcagagacacctgaaaactcacttaagaaactaacttcagaaacaaaccatttatttttcactctaatgtaaattaatatgtatgtatttacgtacatacacatacataaaaaacaaaattgtctagtattgagtagctgtttatgagtgaaaaaatggttacaaattggttaattagcttaattttgtacttaacaattcgatcattttggggtacaaacaagaagtcagtgcatttatagactccatagagtcagttactcaagcatacactttaaaaaagaaccctcctcaacatcacaggcattgtacagcaagaatatatgtactctgatgcaattcctactttataagcagactagacagcacttggcttacttttaaaatagcttcgtaaaagaaatatatcatataaagaaatgcatgtttgctaaaagtcttttaaaattacatcaaaacaacattaaaacctgttcactgagaagagcctattgaatttaattcctgttttgaaatacctagttaacaattcagaatattgccttgtgaggtttgaatcaagatgtgattgatgtgtagagccagatagagtacatgactccatctctatctgcca

SEQ ID NO: 337756 - DNA, 1000 bp, Homo Sapiens; identical to SEQ ID NO: 158324

SEQ ID NO: 337757 - DNA, 1000 bp, Homo Sapiens
ggattcttatttatttattgtttgaaatttacaataatagaataaacatatcttgaatatatttctagagaaaacttcgcacttaaatgttcagattcttttctacatgtatgatgatgaagacagttccttaatgtgaagaattctgtctgttaacattcagtcaggttggaatggatctgaaaaccatgacatatgaagggcagttgaggaaacagtggttgggagatgatgagtaactggccttgattatcttcagggttgccatgagaaagagggagtaaagataatctgggctgctccataagacagaacagggtagcggggtactaggcagattttagcaacctaagaaagaactttctaacaaagagatatgcccaacagtggaacagtttgccttaacagacaatgagccactatcactggaagtgtgtaggcagagttggtgtgatcattttctaagggtaattggggaggtagtgcctacatggggtgggagattgaggctatttttcttcttccaacctgaaaaggcattgttcaacaaacctgaaagtcattctacaaatttagtgttaatactaagcagataattaacaaatactttcaatactgcacggtcttccatgagcatgtaacaagtaggtagaacatcattgtcagtttgttctttgaatgttttaccagtcgatgtagacttgacattagttactacccaaagaaaatttaggttgtgtcagtatgtaaaataataccatatcccaacagaggtctagaatgcccttagaaatttcaaagactctaggatttgttctttcactacatcctgggccactatacttgtgtactctgttattgcaaacttagcttattttctccagctgccccctaactagacaattatctctaatctctttcccccataatcctcttgaacactgcaactagatgtctggctaaaaccgcttttgaacaaattactacctattaagaagcc

SEQ ID NO: 337758 - DNA, 1000 bp, Homo Sapiens; identical to SEQ ID NO: 158325

SEQ ID NO: 337759 - DNA, 1000 bp, Homo Sapiens; identical to SEQ ID NO: 158326

SEQ ID NO: 337760 - DNA, 1000 bp, Homo Sapiens
ttttttttttttttttttttttttttgcggtggctgggaacgttgcttcatttccttttctagcaggatgcatgattgggcaagaacttgcttaaaacacaaccagctaaacagctaaacagggcctgggagggaggccccagccccaggctcctggctctgaggttaattaacttctggccgaaagcccagagccggagtgctaggggttgggcgaatctctgcccagtctaatgtggtccatagttccagaattcacttcaggatcagagatgtggtgaacacagcaaaaacagtggcagggtcgtgggtgatgtggatcttgggggaagcttggaaggcacttctggggtccctgaagccggggggttgaggggatctgactccctgtcccttctacaatgggaaaaggctgcttcaatgctgcttttcgcaagtagagggtctgcaggggtcaaagggatcaccatcccaccttggaatccagaaagttcgtgggggcaggctcagagaccagcctgcaggacctgagaaagaggcgccgccttccctggatgaactccaagaacccacactgtgcgaggaagatgaaccatcttccaccagcttgggaatatcagtcctgcccaacccagaagagacctggaaaatggttctaagctagaaggcaccacggatgcccctccatcagaaagagtgggacgtgtcacccatggccaccctcaacacaccctggaaagcagcaagctcatgcacgtcagtgtccctgggcctctgcctgccatgcagagctgagtccccatggtccgcagcctcccaccggggctgcctgaggaacctggcagccacggcgacattgtgaaggaatgagccatgcaggagtcggggagcagttgacaggagggaagggattgccctgagcttggagataaccactgtggctcacgcctcgatcacagtccctgccgaggcaggagaggggtgggtggggggttggggg

SEQ ID NO: 337761 - DNA, 1000 bp, Homo Sapiens; identical to SEQ ID NO: 158327

SEQ ID NO: 337762 - DNA, 1000 bp, Homo Sapiens
caacttggaacaaacttttattttgaatgctggtctgatcagtccacggccaggggtaggtggtaactagaaacagctggaaggagggaaggagaggggaccagcagtccgcaagcaggaggaaaggaaagggttggggacaggaggaggcaaggctgaggaaggacccagccagctgggtgtctgccccggctagagaacgaaccacccccacccaccagcctaccctccatctgtggcttcagtgcagaagtcagtccaggtgggttcaggcccatgccaccttctctggcctgcacagtcccaccccaggcaggggttcttccagaaggctaaatgctctgtcctaaccctggaagtgtcctttcactaacccctgcctgcccgccccacgctccagttgggtctttcaaacctggagctcaggccttcactactgtgctcctgtagcagccacaggggtggcgtggtggggaagatggggttctagtctcagcctggctcagggaagatggggttctagtctcagcctggctcaggggaacatccctccacccctccaacaggaggtgctacaaaacatgatcctgagcagacccagacccccttctggtaaccagtgcctgaggcccaacaagaagcggggtgatgggaggctccaggccgggcagatcagcgaaagctgagggcagccagggccggcccaggcaaacgcaggattgtctccaaggggaaacccaccagctgtctttgggttggtggcaagggtcagggtcagggcccgagatggggagagtcctataatcccatcgccattcccctccacatgtctccaggttacaaccagagagcttttggcatgacctgaatctgtgggcttaaagggaaaaaggaggagagagagaaaagggaagccactactttctccctgttaaaatgcccaagtcctagactgggggttcctgctctggcagcagcagacaccaaatcccagaagccc

SEQ ID NO: 337763 - DNA, 1000 bp, Homo Sapiens; identical to SEQ ID NO: 158328

SEQ ID NO: 337764 - DNA, 1000 bp, Homo Sapiens
ttttttttttttttttatacaaatacaaaatttatttccatagaaagcaaaatttataagttaaatataaagattaaaatagtgtttgaaaagctcactatagtgctaacaaactaaatgaaaataaggctattttgcatttaaaactgaaatacctcttaaaataatttgatccccagtgtttgctctttttgaagtaaccaacttactcttaaaaaggatggctgccaagatggaaagtcttactgggttttcatgttaacctattctttggacataactatgaattttgtatacaatgcacttcatgaaaagttgtggctcccccagattgcccacaagtgtgatcttgaagtcctaaacatttgtccatgtaagcttcaaaacagcgttaactgagttattcaagtagcagtacttaaagatacaattcttgaagcagtttcaatggtttctgatccaaataatcagtttctgaacattactacttcacataatagagtccatcttcagtttcttctcactttctctttcccttttgggtttcctttttgtggcctgaggccaccagttctttgggtactatcaagatacttccatcatgggtacactggagagcatagtggttgggattgactggcctaccttggtcatctcttaatctactaaaaatatcatgataaaggtcatgcagtttctgtttcattatgttaatagctttgttacattgtgcttgctctctcttaagagtttccttctttgcttgcaagttacatacatcatcttctaaattcaaaattatgtccaatttgcgtttacgacagttctgcgcagcaactttatttttccctcttcgtctgatgtcacggataagtgagacttgtaggtctgtcagataatatctacttaacatgctattgaaagaatcaacaggcatgccgacaatttcatctacagaaaaagggatatgcaaagctttagcacgctgttcatcacggct

SEQ ID NO: 337765 - DNA, 1000 bp, Homo Sapiens; identical to SEQ ID NO: 158329

SEQ ID NO: 337766 - DNA, 1000 bp, Homo Sapiens
ttttttttttttttttttttttaacgtaaacacaaagtctcatttatttttgtctgaagcacacaggagctcactcagcacaataacagtaagcgaatcatacaaatattgagaaaaaatgttcctatgaatacatacatgtatattcttaagagtagcgatcaggagtttaacaacaaatgtaaagtggttttctctaaagaatgctttctgacaggcttttgggttggaaatggacaggtaaatcactgtcacataacaggtaagctaagaataacttctgttacccaagtcatttgaaccctgtggactgtgaaagccctcttggaatttacatttaattccatcattggtctggttgacttccacatttcactaaatttggacaagatccacaaagtaactcctcaactctcagtctttcacactcaggtctgtgggaaggaaaggcagtgagaccaggtgtgaacacatgcacggagaccaatgttaggattttctaacagtatccttctgtttctgcacttccaaagtcatacctaaactggctagtatatctgaaattgctaacatctccttgaagctgtccaaaaaaaaaaaattttttttcaacaattcttaacaatccatacaatttaaaaaccatttcaagtcattgcctataacacttcttagtttacccattaataactcacaccattgcttttaagcgtgtgaatgtttccagcaatcatcaactttaaaaatggacaacaatgaaaagatgtctaagagtctccagaagcatccaaattttggatctctcctacgtatagcacaaggtagaattgatacaatgtgccttccagcttgcctttaaagctctccatatgtctagttctgaggtgaagagattaaaaataggaagagcctggtagggagtgaagattcaaaatgcattgctagatctcacaccggttatatttcctctctaagatctcagctgcagttgccaatgggg

SEQ ID NO: 337767 - DNA, 1000 bp, Homo Sapiens
gcttctatgttttttgtttatatgctcccaagagagatttttttttttacctatgaccaaaaatagatcaaaggagggtagtcatagcaagtgggggagtgaatgtctggattcaaaacaggttacttaatacagctctgtctgtgggctcatgggtgtcacaataacaatgacaatgatgatagtattagctaccgtttgctaagcacctactgcgtatcaggcacctgactcggtgctttacatacattacctcacagccaggttggcaaatggtcattttgacacacacacacagggaatacaggtggatcttttgcaggtttttgcatttcccctaggtgaccggtttagaggggtgctttggctgggccttcagataaagactgggaggagagccctgtggcctggcctggtcccttcgtagcatactctgccccagcttcacacacaaaggagacctgacccagcaagggtctcactgtgcctgtcaggatgccaccacgtgggggctgccagccctgcaatccagccacctcctgggctggggaccctcccagctcccacctggggctgccagaggggagaatcccaatggcccctgagttcatggccatgtttattttgagtaaaacatgagggaataaaccaaggagcaagggggcaaagccagaataaattatgaaataattttctaaaagatggtcagcagaatccccgcagctgtgaaacaaaaagctctgtcatctacaacagtgcttcctcgaacgctggacccttgagacatgtgacgggacctgagggcagccaccgggctggcggggacctctccgaacgctgatctcaaagagggtggaaagaccttgaggcggggcaatccgtgaggttgctttcttgctgaagatgtgatttggacattttacgtgaaagcagtgcctggtgctggcagtgacacccgggtggccacagagacgtgagggatgacaggcggcggtgggga

SEQ ID NO: 337768 - DNA, 1000 bp, Homo Sapiens
ctggacccagctgagtttttattttacagatcataaaacggatgaaagtatatcacagtaattaatgaagccgttctaatttagcttgaagagatttaaaattcccagtgatggcttgtactgctactgacgagctcatagactggagctcaacaaggtaaccacaaacagcatccaggcagagatttgtaaatcttctcctttcacaatttaaaacttggctgggattctcaacatatcttatcaataatacatgtatacaatccaaaaggtgcagtggcttcttcattctgttccagaatggatcccgtgatttgaacaactgatcataaacttctagtagtctaggtaatggtactccaatttcattcattgtctgtattacgaagcccacatcccagttcaaagtacaaacctgctgttctaaaaactgtacaataaaatctaaaggaaagaagcgtggtgtgccagcataaattttgccaaggagaacaatcttgagactaagagcatgcattctatccgaggagctcaatgtcacactgtcactcaattctttctctatgatatcttgccaaagtgtctgcaccaatatagggtctgaataaccggcacaatgaattattgcaagtttgcactctgcaagtttaaatgggtcagcaaattccccataaagcttagttatgtccatcagctcagaatccagctgagaaactgcatcctgtacagaagaatgatgggaatactgcctttgtagtgtctcctgtatctgaagttggatcctagcaacctccattttttcttctaattcatgaagaaattcaccatcggcagctattgatgaaatggcagtggaacttttggcactaagaatggctcgagcaatgtactctagtcgctgctgaagtgaaatttctgtgctatgcatgtcagccagtctggacagtacacgagcagcattactgaaacttctgttcttctcgtaataccgccagagtaa

SEQ ID NO: 337769 - DNA, 1000 bp, Homo Sapiens; identical to SEQ ID NO: 161030

SEQ ID NO: 337770 - DNA, 1000 bp, Homo Sapiens
tttttttttttttttgtgaataaaacttttaataatgtacagcagaaattggacaggctcattcttatattaaaacaaaagatttcctatattacaatttatttacatttgcatactgaagaggtaaagtgtctaagtggctattttacagtcctttctaataaaatgtacaaaaacaaacagaagtaccgagaatgccgttcgggggcctttatggcgacgtaagaacgggcttggacttggtctgtgaatccagaatccagaggtgcaggtagcactatggatcagggttagcctcggggggccaaaaacacggcttcagtttctccccaactctcacttagtgttaagagtggcagaggtgggtgtgggagcttcccaaagacctgctccatcttccccagaggtggaagagttggactgtgtgtggggtaagggcagaagggccaactggggagtgggctagtggcttgggagtggacgtgtgttggcagatcccagaggctacttgtgactctgggaagaggagtctaagttccatcattacctataaaccgccaaggttctgctgcagggcggataggtgggaggtcagcaggggtaaagacggtccccccaatgacacaatggtatttaaacgaaattagtggccagtaaattggcccaaaggttaggggaagatctcctttaatgcaaggaaagaagcaataatcagtcaaataaatagaagggccaggagcactggggagcctgagggcagggacagggctctccctcctccacaagctttggcagagaactgctgggttggaggcagagatgctctaaggctacatacacaatacacctcccctggggacaggaagggggctcagaatgaatgcagtgatttgaggtctcacctggggttctaaaccccaggtctcatcacccgcccctggtctctttgtggagggggttgtgggggttcctctttcttcagtgatcttatataagaaca

SEQ ID NO: 337771 - DNA, 1000 bp, Homo Sapiens
ttttagtcattacaaataactcctttatttccgttccctctcccctcaaatggctcatgtccacatcaacaaggcaaggaaacatctatgaccccaactatgaaacatagaagcagctaattctgactacattgaagcagagcacacacaatttgaaagaagcataaggaagtatacaacaaacatgcataaaaaccttatgcaaccacatctgggccttgtatttatcactcatttttatgatattttcttctttcgaaagaataggatgaacccatgctcaaaacctttctaaagcattttcaaaatacagcttttttggtggtacttcaaaataggttggcacaaaacaaaacgtgacatttggtctctggtttgtgaaggagccattgcctctctctcctccacggtcttagggatcccaaggaagagaagtgagtgtgcgaccgagctcagggcccaggctggttcatgctattcttgcttttcagaatggtatcctcgtaatgaccagctccaggggcagtagcggcttctaagggcaagccctgttgctggtagccgtaattgacattcccacaagggaagtgacgtagcctgaacagaggtacctccttcatattggcagtcagcgaagagggctctaggagcagtgaggcccccggaagtctcccagttgcaacgttaggtgggacagtacagcttccctccagccccaggttacccctgtcgtgtggctccttctttgctataggattattctttttggtgggtttctctgtaaaccaggagccgtacgttgggttccacaagctggtgggcttgtttctggatccgtggaccttgtgcaactccgaaggagggttggactgagagaatgccatattcacgtgtcccccttccacggccggccctctagggactcgaacagagatctctgcagctgtgggtttctttgcagccttgccagaggaggtggtaggcagaggtggtggggcag

SEQ ID NO: 337772 - DNA, 1000 bp, Homo Sapiens; identical to SEQ ID NO: 158331

SEQ ID NO: 337773 - DNA, 1000 bp, Homo Sapiens; identical to SEQ ID NO: 158333

SEQ ID NO: 337774 - DNA, 1000 bp, Homo Sapiens
ttttttttttttttttttcattttaaaaaaaggaaaaagttttattacgaaactagtttgtataaaacagggttatacatatttttgtaagtttgtaataaaacagtaagaaaaaaaaggcagtaatagaaatctccaaaaggcaacctatcaaaaccaactggctgccactttgagtttggacagtagctgcataaactttgttcttcttgaacagtatttaataacatcattaatacattaacaacatttctataaagtaagacacattggtgctgaagtacaactggtggcctcttgatctcacctatgaggagagttctttacaaaaccacatagggaaaattgcagttgtaaggtgaactacacatctaaaatatgcagaggtaatagcattacatgttaaagtatcaagatatacacattttaaaccatttgtacaaaacttctataaatttttctctctctttctctcttatgtacaaaaatatcttaatatatccccgaactggttaggatagatacaaatagattttttataataaaaaattcacaaaagattggaagcattctataatgaaaatggtagaaaagacagtgtgagggaagccatggggtttgggaatcgggccctggaggagaagcagagtttcaaagggctgagaatagcatagtttcactgtaaaccaatgtctacagcttattggggtgggggctactgagacgaaagacaccaactcgtttctagagggctaagaactgcactttaagaaagggcggggaggtgaagggacccgagcaagaactttcagctgtgcgtgttagaggtgatgggagttactataacgcgtgtgctgctcccttctgccaggagcccactgcttttgcacacaagctgcattttgcgcattgactcaggtcccagttgctcttcatatctccgtgaatgattggagtgcaaagatactgttctgagcgcttcccgttttctgaaagccat

SEQ ID NO: 337775 - DNA, 1000 bp, Homo Sapiens
ttttttttttttttttttttttttttttgtgttgagtaagagccacatttatttcttaattggacagagcctcaagtgcacgcacagtacaggagcctagggctaacactcgggtgtaagacatcgggacaggcgtcgtgacgtcgggacggcagctatgacatggggtctggggtgtgcccacagcaatcacatatgtacaagccagggacgcggcctctgagccacaggggaaccaggggacggactaactacaggaagcacaggcccagggagaaacgcaggtcgccacagctgctgtccgtctgggggaccgcacggcccggcaccgggggtaagggagtgtgccttccgtggtccccacatgggtgaggctggcataggaccagtgcagcagcacagtaaacacctgtgacatcagccccaccagggccccaggtgctggggactccagggaccagggttgacagggagggccacctcatcacagccgtcctgggtgggggagtttgtgcctgtgcagccggtggatgaaacattggcatcttctcagcgatgactcccagtgggaggccttggacttggcacccctaggcactggccgtgtcccatcagatcccaagtgctggtcggcctggagcccggcatccccatctatctggagccgcagcggaaggagctccccctttctggtggaggatggctgcccccaaaccaaaacaagcccccagactcggcagtataaagcattaaatgaaaccatctgagggagacggctttccagatctgtctcacctcccccacttagcaggaagcagcagccaccctgggcctggctgtctcccaagcaccgcaccccatgagcacctccacaccagccctccacctcacagatgtggaaaccgactcctggggagctcaaggaaggcagctaacgtggtccctaggtggtttctggcagagcgaacttttcaagaagccaggtgtcctgactcaggcg

SEQ ID NO: 337776 - DNA, 1000 bp, Homo Sapiens; identical to SEQ ID NO: 158334

SEQ ID NO: 337777 - DNA, 1000 bp, Homo Sapiens
ttttgtaagaaacaatatattttatttttctgacaccacagctctggcgagtggttttgtaccaaatttaatggaggttacacagaacgtcttacgcatgggagggggaggaaagggaaggaaccacaaaatttaaaacaaacagaaacaaaatcctggatagcttttagcatctgttccactcccacattaataaaattcacttgggaattcctaataaaaggagaacagaaaacaaggtgggcagggaagggtatgatgggaaagagaaagacttagggggaaaaaagaccagagagcatcccaaggacagacctttccctctcagagccaagaggacgctcggcatggaaggcgaggctttgctagatttatttccccagaataacactgtgtattgcagctgccaaagggaaagagagagggaagcagagggtcaccagcggggggcacaaaggaaggaaacacttaactgaggagacagagcaaaatcggagagagaaaacaagagaaaaatgtgccagtgggttggtatattgggagacaagacagtgctgaagagcacttgaactgaaaaacaaatgtcctaagagtcattatttttcaaaagaaaaatctcccccctccccccacccctcgctgaacttagttcctttttttgtgcttttcattaatactctgctctgaggtcgtagtttggtttttctatacactgcagttgaaagaaaatagtccaaaggtctgaagatggattctccacctaaagtaaacagcccagcattcctgttctcctcttgccccaaagactaaagtctctgctaaaatcccttttacaatatagtacagtacacagaaaaaaataaagcccaaatcaaaaaaacaaaaacagaaaagaatcctgggagaagccagtccaaaggacgtaaacatacagagaacggtgcaacacatgaccgatggcaattctcaaagcacagctacagattcccaaaagtaggtg

SEQ ID NO: 337778 - DNA, 1000 bp, Homo Sapiens
ttttttttttttttttttttagtgtggcagatgtttattgagctagaggaggagagctgagctgagcccagcctgatcacctcctcagagactcagcattgtgaattgcccctacagggtcatttttatacagcatgaagtagccctgcacctgggcaggactgatctggtttgtagctcgaaggacatgttctgcaaagttctcagctaaggaaggtgcctgccctggatagaacctctggaacatctgggtcagctgccagtgtgagcagtagcccacgtactccttcaggtccactcgccccgggcgtatcagggcagggtccagcctgtcaacgtggttggtggtcatgaacacgatgcgggcctcggtggaagccacaccatccaaggcattgagcagtccactgaaggtgaggcgacctaggccttggtactttactgggttctccacagccaagtctcgactgagaaaagcagcatccacatcctccaggagtaccaggctctgctgcggggccacgctcagcaggtggttgagtcggtcatcagagaggctggagtccgtgaggctcagcaggcagatgctgtgctccagttccccagccagggctgtgataaaactgctctttccgcaaccagggggcccataaagcaggtagccacgtctgtaaggaatgcctctgtcagtgtaccacttggggttatcgatgaattcctggacgtctctgacaattcggtcagccagaccctgttgtagaaccacagaattcagtggtcgccggcggcgtggatagccaaagggacgccattcagagcccacagctgtgtacatcacggtcttcccttcctcctgctgcaaggctagctctcgagcttcctccaggatgttgaagaaaacctttcggtcagtgcccagggccgtgaaggtgacagattcccaaggagtccccgtctgcaagtctatcatctgcatctctcgacttcgttctacccgaat

SEQ ID NO: 337779 - DNA, 1000 bp, Homo Sapiens
ttttttttttttttttctataaaatatgaaccattttattgaagaacagttatacagtgtagctacagatactgactagatactaaatatttctgcctgatttttcattgtcttcacaagttagggaatagaaatcaaaaaaccaaaaatctcaaatgatttagctgtccagaacatatttgacagttgataaatttataacagctctgacatataaatttctaattagagaatcctttcatttgaaaaaattgagatgatattaccctaatgaagtttttacctgaagttaacaaagtcctggatttgatatattactttgaatgcattaattctgaaaatttatatttagttctactttataacatttcttctcttaaggatgggatatgaggtacacatgagctggtttctacagtatgaatgtatgtacatatataaagtatggttgtaaaggagtgggtgatttgcaaataaagcacattatacacaaaatataaataacttcccttttaaaagttactgagaataaagaatatagaacatggttataggcacttacattgctatcaaatgcaggaattcacttcaataagaagtgctttctttgtaagcatggttcatggcaatagaagctccaactttggagaggatgctttccgtgacaaaaataataaccacaaaaaaaatggtggttgaaggaaaacagtccaaatttacagatgctttaaacttcttttggccttggcatcagctttcatgttaaaaaataaagctggtggggaagctatctcacttgcaaagtaaatggcttgtatgagattggcgaatcttggtcagatattgcatttttaaagcacaaaaccaccggccaccaatatcttcctgtgcatgcatataaattattttcttctaattcaaatggcagcagaggaatcccggcgtgcatgtgcatggagacacacacacatcactaaggacacaggacaaactatcataa

SEQ ID NO: 337780 - DNA, 1000 bp, Homo Sapiens; identical to SEQ ID NO: 158335

SEQ ID NO: 337781 - DNA, 1000 bp, Homo Sapiens
tttttttttttttatgtttttatttttttttaagacaaggtcttactctgttgcccaggttggagtgcagtgatgcaattacagctcactgcagctttgaattgggctcaagtgatcctcccacctcagcttcctgagcacctgggaccacagatgtgtgccacttcgcctggctaattttgaaaaactcttttttgtagagccggagtctccctatattgcacaagctggtcttgaactcctgggctcaggcaattctcccacctcagcctcccaaagtgctgagattatagctgtgagccaccgtgcccagcctgaagctagaggctgttttcaatatgtcattattctcatttggttaggataagattgaagggaggggtagaaagtttcaaaggcggagagtttcaaaggcatcatgttaacaggcagcaacacgatcaagccccacacgaaggaaccaccaagactggagtgtgcattctcattgtaggaagtcttctgctaacttgttgaattcatctgcaaaacgcaaatgcaggttgtgtttgccttctggcatcaaatgcagccgtgagcctttcacgtgcttatgaatgaagtcggcatgaaaccgtgggaccagaggatccttctcaccgtgcacaatcaaggcggggcactggacccggggcagcaggtgccggcagatgttaccatctgggagatgtttaaactgtcttatgccatccacccacttttcacaggttctggcaaagtagtcatacccatagagggcttctagaggctttcttgttctctcactccatttggaaacatctcggatgccctcatatatcatgctgtcttcgtcagtgacgtaggcgttggcgccccagatcaccatcttgtggatgtaagatggatattttgcagcagcaatgagtgcggttatgcccccatcactccaccccagcagagaaaccttcttaaacttcagcgccttcatcaaatcaacagc

SEQ ID NO: 337782 - DNA, 1000 bp, Homo Sapiens; identical to SEQ ID NO: 158337

SEQ ID NO: 337783 - DNA, 1000 bp, Homo Sapiens
gatgtaaaatacagctttattagaattctcttaaaatgtttgataatatacaagcagtctgactcccaatgctttgtgtcattatacaaataagaaaataacttgctttaattctaatgcagcattttttaacctgctaaatagaactaacttcttgtttctgaaatcctgaacatatgcctcattgaaataccattttcaggacatcgttttcccagcaaaaagcttctttagataacagaatcatttggtatacacagaacacgaatgatgactgcaaggggaggctgcagggctggaggagggttagagcaacacagtttccagttacagttgagtccgggaagccagcaccagaaagaggggaatgataagacccgccctttgttctgtataaagacttggggcttttctttgagtagcggctgctgccgactttaaggcacagtcaggatgggtgctgtggtccacgcactgtaagagcttcactggtcggtaatcattaatacagctgtactggaaccccatgtccttcagcctcttttccaggactttcatgctgccttccccgcaggattccacattgggtcccccaatttcatgcataacccagatctcgattcgtgtaattttttccttctggaggtttggaatttcataatctgcaaaaaaacctttgatgggataggctcctgttggctctgaaccattcagcatgacgtggatcaccccagaactatccttggaatactggatggatgcccttttccaaaaggaatccacaggattattttcacagtcttctgatgtagggcaggattggtaatcgagtccagagtcatttttctgtcgacaccagctcaagaaatctgcaaccctgccatacagaacatcgctcaggggcataaaacgacgggtgttgtctgcaaagctgttaacaaggaggtggctattttcccagaacagggacttatctctgggaatagagtgcctggacaag

SEQ ID NO: 337784 - DNA, 1000 bp, Homo Sapiens
ttttttacatggaaatattccatgggatttatttttaacaaacatttacataaacaataaatgaaaaaaaaacaggtttaaagtgagcagattcatatttacagtgtgatttttaaggactgtctatatccaaattttattttcgtgaacgcttacattctaagagcagtacaattagcctattacgtagggccctaatcttgttagtatagtgttgttgaaatactttcttcagcttttgccttaacaaatccaaagatggaagatgatgacaatctggaatattcaacataacatgaaaaaattcattccacatatccaaatgaggaagccttctaaaaagaccttcaggcttacactctcctccttcatttttcactttcatgtaagtgccaaagagcatgcaatatactgttgcagcaaccccaaagtaatcgatctggtagttccatggtttgttgctgagcatctcaacacactgaaaaccagatgtttcacactttgctgtgaatatagttccttttggaaaaagtttcatatctatactctgacccaggtcaatcagtgccaagccagcagataaatcatcttcatcatcctgttccaaaaatccgtttccaagtatgaaattgtctggtttaatgtctccatgaatgatttcacagtcatgcacttgctcaatcatgtaaagcattctcatagcaaaagagatgacaagaccttgaggcatcactttttcaggggtatttttatagaggttaatggcatttaataatgttccatagctgtagagctctcctactaatacactgccattctggaataagtgggcagaatagaacttcataaacatgtgctgcatagatggctttagtctttccatcaactgggtcccaatgtagaattcccaggggttggcaggcttttggacctttaaaacaaatttctgtttatttttagcatcattcagatctccctgggtagcttcgtacacctgggc

SEQ ID NO: 337785 - DNA, 1000 bp, Homo Sapiens
tttaatagttgaatttatttagaaattttccaccacttcctattgactaatacaatcaactaaaatttgatgccacagaaatatattacatagaactagattttcaaaaaagtagttggatatggttcacatagtcaaaacactggaagctgtaattaaatctttttgttgtatcattgcactttaaatccccaaattctgctttgtaaacggtctttcaacatctgctaattatggactgtttgccagacaccaagccaggcatcgagggataaggaggagatgctcacatcatgctataactagacaagtatttagtgattcttcccttccatgaatagctatagctgatagcaaagaaaaaatgtaaagtgttagaattacgggacagaaatttatagaacatgagagtatagtatatcagagaaaatgcccaaatgttatatactacacaggacagcttggattgaggaagaactcaggaaatgggagattaccaaagatgaaattattcaccagatttatttgcagctccactgaacttttatttttcttgaagtctttttttttttttaacaaatactctcatcacaaaaaaagccattgtttgaataactgtggacttttgagacacaaggggatgtcaaaggttttatccttcccttttttataacactgtcattttctatttagaagtgacagtaagaaaaacatctaatccaactcatgcagaggtcaaaaacaggcaggcaagagagtactgaagcaagtgcagtcagagaatgttatttcattaagatgtgaaactggtttgaaaaaagttattatcacaatagaaaactaaaactggattgtacagcttgtaaaatcaagttaaattaggtgtgatattatcaagagtctaagaattcatctgaagcaattatttgatcgacgcaaatatattctatacaattatatttaaagtgaattatggtcctaataagcttaagcatttaat

SEQ ID NO: 337786 - DNA, 1000 bp, Homo Sapiens; identical to SEQ ID NO: 158339

SEQ ID NO: 337787 - DNA, 1000 bp, Homo Sapiens
ttttttttttttttttttactgtgccataatctttattataatagacatacctctcactatcaatattgtacataaaaataagtgagaaaaagacattttgcaggaaggaattccatttattgtggatgcattttcacaatatatgtttattggagcgatccattatcagtgaaaagtatcaagtgtttataaaatttttaggaatggcagattcacagaacatgctagtcagcttgcagttttacctcgtaaagataacagagaattatagtcaaaccagtaaacaaggaatttacttttcaaaagattaaatccaaactgaacaaaattctaccctaaaacttactccatccaaatattggaataaaagtcagcagtgatacattctcttctgaactttagattttctagaaaaatatgtaatagtgatcaggaggagctcttgttcaaaagtacaacaaagcaatgttaccttaccataggccttaattcaaactttgatccatttcactccaatgacgggagtcaatgctacctgggacacttgtatttgtaaattctgatttagcttattgtagacttgtgcctactttgtcatgagggtttgacttctgcattcttcgtggctttccttcctttggcttaggtttgctaaagctagaagattcaattgctctttacagacttatgaggaagatagactttgtaacgcagatgtcacttctcatgccagccctgccctggttagctcttctggaggaatactgcagataagaaaatagttatttgggaggctccctcagtgtggtaggaattgagactaacacaattttggttaagtccactgaggtatgagtttatagaactccactgtatgtatccagctatactagaacattttgccaagacactggaggactctttcattatctactgtgaagaataaagacttagaggctatataataagttctggattgtgtgtgtaaaaatcatgagt

SEQ ID NO: 337788 - DNA, 1000 bp, Homo Sapiens; identical to SEQ ID NO: 246440

SEQ ID NO: 337789 - DNA, 1000 bp, Homo Sapiens
acaaaggcaaataaaatgtaatcatgcagaacattttttaatataagaaaatgcggataaaatatactacaccagatcaacatttatcaattccatagatactgagttttcaacttactgcactgttttcatataagtacatgcaaaactagcagattatggatttttaaagtaacattaaaataataccatagtttgacaatacttggggcaataggaatgaaaactaagagccctagcctaattatttctgccttaacacaaatctcaattaagacattacatatataaaaatcacagaaatgtcaatattataattcccaaatttataagatctgcatcacatcaaatagacactgatcatttaaaaaacaaaacaacaaaaatgtgtttgacatttaagagcatactcactcttctgagaaggggggagggtgaaatctatgataaaccattaaggattatccactgtccctgctaaggaagcacttgcatacttccaatctgcttaaagacatctgaaggttttataaaatgtttaagataagctacactagttatttttaaaaatcttgaaaagtaacaaattgaaggtatcagcaccttccctcctccccaaagtagctaaagatctacgagaaaaataaagtgccaatgtctaaagtactgttaatggtttaagaggcactaccccatttgatggcttaggataaatatgaaaataggccagatctgatctgaataacaaatagaaggtaggtattccagtatattaattcctgactagatgggggctaaaccaggaaactacctattcccccatttattgctttgaaaccctgtaaatataaattctgacagaacaatcagatttctaagatggaaagcacagtgtttgtgccactttgaagttgaaaaagaaggtgcactcttgatcactgggaggagagctgctgagactctcctctccacaactcatatcttcacaagagtcctcact

SEQ ID NO: 337790 - DNA, 1000 bp, Homo Sapiens
ctgagggactgcacaggcctggtagcatgcctgatgttccttctttattaaatgacggagtcaggatgttgtgattacagttgaaggcgacgtgttagaaaggacaggtgcatgaaggcagagagtgcccacagactcggctctcgaaccggggcaggagggaacaaggtgagctgtgcagcccacaggacgggcgggctgggtggacacagccccccaagttggccaagctgagtctctgggcgagtggctcccaggagaggcctggctgagcaggcagagcaccctgggaccccagggcagaaggacccctgccctccagtccccaagacccaggcccgtctccactcatacacgccacctacatgtgacgtcagccctgaaaaggtaacaggaaagttcagaacaaaaacaaaaccccaaaagtaaaaaggctacgtgtagcagagtaataccggaaacgttatatacacaggcggtgatggccccctcggaagtgtccgggtcacttagggggcactgcagaggtccctgtggccagagctgcggggcctcagtacacggagctgttccggatgccacagcacagcaccatgctcaggatcatctcgaagatcatgatcacagcgaccacgatggcagcaatgccgatgaggtacagcttcccggagaagaggtcatcgatcttctggtggcagtcctccttgaagaggttgctgatgatgttgctgcccgagggacacaaattgttcttgagcactgaggtggtcaaagcagtcagtgtgctggagccacagcagtcaagcgtctcgtggaaggtcttcaccacagccttggcgttgttggcgtcatcatccaccacggcctgctgtagggcctggtcatagaactgcttcacatccttggcgatctggtccttgttgacaaagccccagatgccggcggccacctcacaggcaaacaggatgaccaggcaggtgaagaacgtccccagcaggca

SEQ ID NO: 337791 - DNA, 1000 bp, Homo Sapiens
ttttttttttttttttttctcataaagtagttttatttagatttcaaacaaaccaaagcagggaaaagagtcggccacggtgaatccgtccactctgtgctggacgtggctccaggacctggagctgacaggcaggaccgggcccctcggaccgctacacctgggcctcccaggctggtagtgtcaggaaacggccccccgcccacgttcccagcagcgcccccgtggctcctccggggtgcggccagtccggaagctgggggaccccggtagaagtcgggctcagctcccctcccgaggggacaggtgggccggccgctcccaccctgggcccgtccaccgagccccgagtgacgtgagtggcggtggggcagcccctcttctctgaagcacgtgaaaacccagaacagacatggggagggagaaaaagccaaaacgaaacaaccagaggagacggggaccagcacaaaacctccgtgaggtagtctgtcgtctaaggagccacgggtccggccctagtgaggtaaactcggcaagtttattctggtggtgtcaggactcctccgtgccagagtcatcctcatcgtccccgaagcagctgtcggcctcctcctccacctcgccgtcctcgtagtagtcgtcgtagaagaggtctgagccctcgtcgggcgccggcgccttggtcttcacgcagtactcggccagcgtggtgggcaccttcacgccgtcacgctccgcgtccaccttggtccccaggacctgcttccggatgatgtctgtgtactcccgatccttccccttgctctctttccacttcctgtacatcacggaggcgtccacgtttgcgggcgagaaggtgttgggctcgttcaggagggagatcacactcaggagaatggtcctgacgttctgcgtggggttccacctctctgagggcagctccccgctctgggggtcgtccaccggcgggtggaggatggagatacacacgtcccccgtc

SEQ ID NO: 337792 - DNA, 1000 bp, Homo Sapiens; identical to SEQ ID NO: 158341

SEQ ID NO: 337793 - DNA, 1000 bp, Homo Sapiens
gctgttactttttcttcagtacatttcgaattaaggttccaaggctatgagtacaaactctcttggccagtcccatacatgtccgcgagtcgtttaaagcgaggtccccagtcacttaggtagtcatagttctgatcagagtttgagctgatggaatctaaagagctgagtgattcagcaactgagccatttccttcaaaagcatatgtctgcagggagtcataaggaggagcaccaggatcaacatcggcttcttttaatctttcccaaataaattccctaaagatgacattatctgggatgcttttaaaagctggtcgactcaggaattgaatttctggagtcacatccctccgggtcttggtgtctcggatgacgttgaggtttctcagtgcagccatgtcaaacgcttccgtgtcctcctctcccccgccctcgtcatcgtatctcacaatattttctctgatgtctctttcttcgtcaaaaataaggggctcttttttccgtcttctcatagtgacgataaggaggatcaacaccaataatgtcaagacacaggcgagtatggctatcagggctcctgtactgaggccagcaggtaggacataggcctctgcattgcaggtctgggctacgccgtcagcatcacagtcacacacgcggatggtgagggtgttggtgctgctaagtgagggagatccactgtccacaatgaaaattggcagatagtaaactgattgttcctgtctccggaagccgtttctcctggtcagtattgaggctgtgttgtctttgttatctttcaatgaaaagttgtggttatttgttgcatccgttgttaagctgaagtaaaactggtgtccattggatggctcatctttatccacagcactgattttctggataacctgccccggctgggcattttcacagacggtggtctcatagtccatggcaaattcaggggcgttatcattgatgtcaagtatagtgatggcca

SEQ ID NO: 337794 - DNA, 1000 bp, Homo Sapiens; identical to SEQ ID NO: 158342

SEQ ID NO: 337795 - DNA, 1000 bp, Homo Sapiens; identical to SEQ ID NO: 158343

SEQ ID NO: 337796 - DNA, 1000 bp, Homo Sapiens; identical to SEQ ID NO: 158344

SEQ ID NO: 337797 - DNA, 1000 bp, Homo Sapiens
ttcatgtacaaaacacattttttattttgcaaagccaaagccatgctttaaaaatacagactttgaatcttaagacattattttgcattttaaagagagatatagttaaagcttacaagaacaatataaagtttcaaataacaccattgtcaggtttaaacatgtcggtatgtttacatgacagttctttcctttttttttttttttttttttgagatggagtctcgctttgtcacccaggctggagtgcaatggcacgatctcggctcactgcaacctctgcctcctgggttcaagcgattctcttgcctcagcctcccaagtagctgggattacaggcacccgccaccacgcctggcaaatttttgtatttttagtagagaggggtttcgccatgttggccaggctggtctcaaactcctgacctcaagtgatccacccatcttagcttcccaaaatgctgggattacaggtgtgagccaccatgcctagcccatgacagtaccttcctaacatgtgtttgtatttttgtaacacaagttgctatttttctaatgttcatatatttacatagccctttaaaaacatgagttccatgaactttctatgtcattgaagagagctgttaaaatctgattccatcacaaatttcagacccctttaaaataattatcagaagccagcataattccagctgtcccctagctaatctgcagctcctcataacaaaagtcttcagccacacattgctcttcaaccacattaaagaaacggaacaaaacttctttctacattgtctcagtaaagttgctttctttaaaaaaaaaaaaaaagtattccatttatttaaaaaattaaaaacatctaacattttaaactgtacaataaaccccaacttcattacgattcattaatcaaatctctcttgagtccattttgtttgctggaactccgctaggcactcagagcacagctgtgagcaagattattctagatcctg

SEQ ID NO: 337798 - DNA, 1000 bp, Homo Sapiens; identical to SEQ ID NO: 158347

SEQ ID NO: 337799 - DNA, 1000 bp, Homo Sapiens; identical to SEQ ID NO: 160619

SEQ ID NO: 337800 - DNA, 1000 bp, Homo Sapiens; identical to SEQ ID NO: 158348

SEQ ID NO: 337801 - DNA, 1000 bp, Homo Sapiens; identical to SEQ ID NO: 158350

SEQ ID NO: 337802 - DNA, 735 bp, Homo Sapiens
tttgagacacgtctaaccagtttaatgacttcgaaaccgtgcaaatgccgggctatgcagcactagggatacaagaggcaccaaggccaggggggtgggggtgggggacactacaacattgtcatggggaaaacgggatcacctaatattggtaggggaaaagggcggtccactggcagctcagaactatgacatattcctcggggacctgcatcccttcctgaaagtaggagcaagccagctgccttcattcccggacataaattctggtgcagaccacgtcatcggcgccaaacgtcaggataagttcatcgttggccagctcacgggtccagtaggttttggggccgtccccttcaagaagagtttgggtgcagtggatcttgttctcattctcccaagtggctaaactcctgcacttgcgtccgtccacggtctcctcctcaaagccttctccgaccttgaagttgatctcagtggtgcgcacggtggtggatgtcttgatgtagaactgatccccgtcctggcggatctccacgtgcggcttggacgcagccgctacggccactttcctcagcatggcgttcacacccagtgccttcagcagctcgtcgaaattctcgctgctgcgcatcttccaggtgccggcgaagttgggcatggtggcggtggcggcggcggcaggtacgacggcggcggcgcacgggcacactctgagctcgcaagggcagactc

SEQ ID NO: 337803 - DNA, 1000 bp, Homo Sapiens; identical to SEQ ID NO: 158351

SEQ ID NO: 337804 - DNA, 1000 bp, Homo Sapiens
tttttttttttttttttacaaagaacagaccaaaaaatatatataaataaataaaaaccttaaacattcttacaggggatcttaaagaacagaatacatgttaaaaacctcagtaatttatatcaattttaagcggtactttatatacaatggggaaaaaacacatgcatagtccaaatacaatgttgaaaacagcattttcataacaaaaaaccccgaacactaagtgttaataccatgtacatgaattcaagaaggaccaccctttttgtctgttgcacacagtttatttaacaatatgatataagaaatgagttggtattttaccattctatacagtgattgaatcttctcgagtttcgtatttataggaattagagcgcttgcatgatttacactagaattgcttttcctcatttcaagtttcacatagaagaaagaaaagaaggcttcttctctagtaacattagcatggtctaagagtgatcatccctattttttgtctaaaaccagttttatcagagaaacaaagcaacaatttctacatctgcaagacaagtttggcttcagccattatgtatagatagatgtgtgtgggtgtgtacgtgtgtgcacgccggagtcaattcctatcatccagggtaatactgggagacgcccacagagttcactatagaaaaaaatcttcccgaaacatcacaaagttatcgggatacattataagcttgcattatttcaggaatcagttctgaatattatttttcttcttacttttaaacataaatgtttaaagtcttgaaaatacaaataaaaaatatgaatataatgaacttgtttttcccgttaaaaaaaggcatgagtcaccagcaatgacgacaaaaagaatccaaacaaaacccccctccccccaaacaaaaacaaaacggaaaaaaaagaaccccccccacccccccgccaaaaaaaaaccaaagagagagaccagatatttaaatcaactggt

SEQ ID NO: 337805 - DNA, 1000 bp, Homo Sapiens
ttttttttcaactccctccaagttgtttatttaataataataaaaaagaaatgcacacacataaacctgaactcccccccaccccaccctcccttactcccagtaactagctccaaaatgaaaaaacttcccttgtcccacctggggactaaattcccacctccactgccataacactagagaaacaaaataaaaaatatgcagcagctcaccacccaccccacaactgaacctcacacaatcccctcaaacaaagaagccaggactgggggttcacaggaatgagaggagccctatattctgaaaagggatgagaagagaggtgaacacccccacctcaaataagtgcttaacccccacacctgctctttcctttaccaattgccccaagcctggggatcagggaaatttgaaacagtcccacctggccacctggtaccccctccccccgttctaagtcagtgtgaatggcagaggtcagggatgattgaggtagaggggctggtgggaggcctggtgggcctggctggctgcagagactggcaaggggccacctgtggcattgcctggggttggggatggctgttttcggagcgaggggggcactgtggaggtcttgatgtgaatcaccctggtgtccatgacctcacactcgatctgcatcatctcctcatagtcccccggggccccacggcctgacagggtctcattgggggccatggcaggcatcaccagggacatcttgggccgggaggtcttgttgtggctgatggctgggagcagcaggtggtcccttcggaaagagacaacataaaatgtgtcttcccgtcggtcaattgcatccaagaatgctggctgcgaacggtctgggtggcgatatagttgcagctggcccacagaatccctttctgggggtccagggggttggatggggactgccttaactggaggtgacttcttccgtggctgagacttctgtctctcctgggccctctgaggg

SEQ ID NO: 337806 - DNA, 1000 bp, Homo Sapiens; identical to SEQ ID NO: 158353

SEQ ID NO: 337807 - DNA, 1000 bp, Homo Sapiens; identical to SEQ ID NO: 158354

SEQ ID NO: 337808 - DNA, 1000 bp, Homo Sapiens
ttttttttttttttttttttttttgaactgttaaaaaatttattaaaatgtccaagaagtacattaatgtccacagtgtcagataccacagacccacagaacactgcagctcacagcaaaaccagcaggacccaaagccgttcacacgcacacacactcatatgcgtgccacgcacatggcacacgcagacacacacgcacatccaaaagggaaagatcaaaagacaaaccgcccactttagaaaagaccagagccccctcccaccatggagccgaggtgggggcagggcaaacggctgaggggctcaagggcagggagcataaaccaagaccccccaaaaaacactgcatccccagccccccgcaaacaaaggaaaatttttgtgtgacatagatgaccaaagatgtgttattattattattttaaactaagaagagttatcaaagtaagaagacaaacctgtatccctgggttttctgaataataaccataataagatagatgtctacagggaggaagattgaagacaaggataagggttcagtttacacttcttaaccatttcctaaatgtgtatgagggtgcaattatatttcaatctcctctccagagtccagagcaggatttgggtcagaaccaagatgggagttggctctgacttctggatttggagtaaggatttggtgatggagagaaagtgtaagcagagccagagtaaggatttggtccagaaaacaggaccaaatccttattccaaatccttactcctgtcgtggttgtgacttcaagccagtacctttcctttatatctgagcctcagtttcactgtgtgtaaaatgggaaagtaacagtttctaagtcaatgggctattgagaagattcaaggagattgtatgtaagtctttagcatggtgtctacttcttagttgtcaatggtcattattacttcccagaagggattcaggctcagttaacacatttctttctttactgaacccc

SEQ ID NO: 337809 - DNA, 1000 bp, Homo Sapiens
ggatcgtcatttcttacagcaataggtaaaaacataaatacgggtgggtgcgtgggcgggcgacggcgagatagcaaaggcccgggcgcccggccctggctcgcggaatgggcggccagatctcaggccctgcgtgcccgagctcagtcccagttccaaccgggggtgcccatggactctcggagggcactcctggggggacagctaagacaccaggctgcaggatcactcattgcacgctgcataatcgccgccacaaactctcccgtgcgcaagaacaaacgcgcgtgggacagaaaaagttcctaggtctccgcaggagtgaatgcaaaatccaggggactcagggtcatgttgggagccccttctccccccgagagtcagggagctgttgaggtgggatcggtcagggtcgcgccacgcgggtcccttccctaccaggctcggataccatgcagcgtggacactcccgagttgctctgcggaatcccggggctctgaaccgcattcaagtccccgacgccgaagttcacgaagttgttgttggcggcggcagtggccggctgcgctggggaaggcccggcggggtaagcggcagtgcagctgtagccagggctgcaggccgcgccgccgtaacccggataggcggggtaggcgttataaccgtagggattgaggcccacgccgtaggcaggcgcgtagggcgccgagtcccctaggcatggcttgccatcgcgcaccagcactggcaccgcgatcctgcgggcaggcggcggcggcggcgggggcagccccaccagctccagagtctggtcctgccgctgccgcttgcacttgtagcgccggttctggaaccagatcttgacctgcgtggacgtgagtttcagcacgctggccagctggtcgcgttcgggggccgacaggtaccgctgctgcttgaagcgccgctccagctcatagacctgcgcctgcgagaagagcacgcgcggcttcctccgcc

SEQ ID NO: 337810 - DNA, 1000 bp, Homo Sapiens
tcaggtttctaacatttaatctccacttagggaattggaggtcagaaatgaataaaataccatgccccagtaggctccagtctagggaagtgggcagcaggcagaaaccaagacacagaaagcaacgacacataacagatatgctatgatacaaatggtgccgcaggagctgcacagttcggaggccatttctggccagaggatgggatgcgtgaaatccaggaaggcttccaggaaggagtagctggcactgggatgggcaggaacagcaatgtctctactgatggtttcattggagaaagctggcaaagttgagaagtttggagaccaaccgtgacaaaatttaaacatcaggtatgtgaaggcaagggggaccaactgtgacaaaatgtaaacgtcaagtgtgtgaagtcaaaggggaaccaggaaagtaaaagagtgacaatcagcagtgcttttggcaaaaaggcctctggcagcagtgtagaagagaaacgcagagatcacaggtataagaatgacagtaggagaggggaggagggtacatatttcagaggcatcacaggggggtgtactgataggacgggggcctgcttgtatgaaggtgaaagaggaggagggagagtgtctctgggagatggggtgaatggtagtgttctgagcagagagagcagggaaatcaggaggaggagtggttcagggaagaggcaggggttcagatgccaagttctgcattggccaagctgagtcagaggtgctgggagactcccatgtgggtctggggatagaagaaagctctgagttcagcaatgatcatggaaaccaagggagggttgacagcaccctgaggtgggggagacatgggcactgaggagggatcttgaatgattcctacattaaagacatcctgactgggcacagtggctcatgcctgtaatcccagaactttgggaggccgaggaggccggccaaaatggtgaaacgccgtctctactaaaaa

SEQ ID NO: 337811 - DNA, 1000 bp, Homo Sapiens
aataaagacactgcttttatttagtttgatatgtttctttacagaatgcagaaaacacatcttaaaatcatatagaaggaaataaaaacacatcagtggttggtgaacacttgaatgtgagattggctctccatctcacagagtccaacggccatcaccagcccagcgctcaggggagcaggctgcctgcaaaggcattgttgctgttgttattctgttcactgccccatcgcctccagttgctatggcaacaggccattctgggccagccacgtctctgcatggcagtgcccaatggtggagttgctaggggcgacggagctgtttggaaggcctttcaaagccctcacctggaacattgggaattgtttattttttgatgaggtcatcagaaataatctcaccaggtcagatcccacttgtgctcctgtctctggggcaccaggggaaactctgacttggaggcatgagcccagtcaccagtggtccactgagcccgcatttacaggctcccccacagggggactgctcactccagagtaccccctggggacttgggcaggggagaggggctgggccctgtgggagaaggcgcaaggggaaatgccctcttgagagcagtaggacagagaactctccccccctcctaccaggcctcccctcctgagggaggacacacaaatcctctgcaaaacagtcgatatggcttagaagtagctgctctgtgtgcaaagggagcctgggtccacccacccaccctcaatcaggggaatggatacattattgcgaaaggcattcctccctaaaaagtacccaaaataacgcttcagacatcaagaaaagtcatgctcaaaatggtttcttccacaggaggagaatcgaagcagagtgggcgcccctgagtcatgggacagagatgcagatggacggacggatgttctgctaaaaaaggcaaaagaaccccagtgtaattccagaatttaaaccattaggaaaagta

SEQ ID NO: 337812 - DNA, 1000 bp, Homo Sapiens
cctcatttaggcaaacattttggatttaatgatctaaagctcacagatgcatgccacatctagctaaaagtacataaaaagcgcacctctggaaataacagccctccctctggctgaagactgagaagcattaaggatgcttctggatttctgcagcggcagggcaggggtctgcacaggcctgacctggtgttgctggagcgcggcatcccctcctgggtgctgctccgaaaggcaggctgggaggtgcttgctggggtgttccatggcagcgctgccaaccaagtctgggtctctaaaagccaccctcagtttataccaactgatcaggaaaataggtggtgacagggccttgaagggtacatgccggcttcccttaagttgattagatgggaaaccaaacaccgtctttcaagtgtgaggctgtgccatgctccctcagggaggaggggcgctgggtctgaccaggtctgcctctgccctcaccagctggcagacgtgaactggagaacagcaccagaaaggctggtggttggcagctgctcacgacacagttgctgacctgcagcagatcggctgtgggtgagcaggacagtcaggccctccacaagcactgttctggagtttcgtctgactaggtgaaccctctggcttttcgaggacgcagggtaccctactgccaccagccagtgagcagactaggacatctctagacaggaaactcatctaaaaatcggaggacaacctgatgcacccaagtgacaatggacccaggcagctgtgcacaccaggtgggaggcgtttggaacagttagactcatcagtggataggtttttctagcacaaatggaatgtggtgtctcatgtccctagggagacaaagggcaggtttcttatctggtctttccaagctttcaactctctggctcaagtgtcccagaatgaactagaagtctattcctccaccctggtccgtggtcacttccagaactctgaagtg

SEQ ID NO: 337813 - DNA, 1000 bp, Homo Sapiens; identical to SEQ ID NO: 158355

SEQ ID NO: 337814 - DNA, 1000 bp, Homo Sapiens; identical to SEQ ID NO: 158356
